United States Patent Application Publication US 2012/0159672 A1 - sequence listing, part 3

SEQ ID NO: 4220 - DNA, 1652 bp, Arabidopsis thaliana
  misc_feature (1)..(1652): Ceres Seq. ID no. 12599962
gttaacggtcggaatctaaaaaatgtctcctaactactccttcttcttcttcatcttcttcctcacttcacactcttctgttttctccagaatcttaccagagacctccacaaccactacctcaattctcaatgtcgctgactccatccacagaaccaagtatacgtcgtcgtttcggttaaaccagcaagaagaacagactcactctgcttcttcttctttcagcttgcagcttcattcacgagtttccgtccgaggaactgaacactcagactataagtcactcacactagccagactcaaccgtgacacagcccgagtcaaatctctcataacccgtttagatctagccatcaacaacatatccaaagcagatctcaaacccatcagcacaatgtacaccactgaggaacaagatatcgaagctcctttaatctccggcacgactcaaggaagtggcgagtacttcacacgcgtcggtatcggaaaaccggcgcgtgaagtttatatggttctagatactggaagtgacgtgaactggctacaatgtactccttgcgctgactgttaccaccaaaccgaaccaatcttcgagccatcgtcgtcttcttcttacgagcctctctcttgtgacactccacagtgcaatgcccttgaagtctcagaatgtagaaacgccacgtgtctttacgaggtttcttacggtgatggttcttacaccgttggagatttcgccaccgagactctcacaatcggctcaactctagttcaaaacgtcgccgttggttgtggacacagcaacgaagggttgttcgtcggcgccgccggtttacttggactcggcggtggtttgttagctcttccgtcgcagctcaacacgacgtcgttctcgtactgtctcgttgaccgtgactcagactcggcttcgaccgtggatttcgggacttctctttctcctgacgccgtcgtggctccgttgctacgtaaccaccagctcgacacgttttactacctaggcctcaccggaataagcgtcggcggcgagttgcttcagattcctcagtcttctttcgagatggacgagtcaggcagcggtgggatcatcatcgactcaggaaccgccgtgactcgtctccagaccgaaatctataactcgcttagagactcgttcgtgaaaggaacgttggacttggaaaaagcagccggggtggcgatgtttgacacgtgttataacctttcggctaagacgacggtagaagtcccgaccgtggcttttcatttccccggcgggaagatgttggctttgccggcgaagaactacatgattccggttgactcggtggggacattttgtttggcatttgcaccgacggcgagttcactagcgattatcggaaacgtgcagcaacaagggacacgtgtcactttcgatttggcaaattctctcattggattctcgtctaataaatgctaagctgttttcatcaaaaaaaacaaaaatgctaagctgttttttctataaatatatttgagttacaatgaaaaggaaaagtcacttaaaagatagtaatgttaagttagagtactgtactactgtttggttgtgtttgtttcttgtacttgttgttgcaatgcatagagtgaaaaagagt

SEQ ID NO: 4221 - protein, 483 aa, Arabidopsis thaliana
  peptide (1)..(483): Ceres Seq. ID no. 12599963
  misc_feature (90)..(481): Pfam Name: Pfam Description:  Eukaryotic aspartyl protease
  misc_feature (1)..(483): NCBI GI NO: 15222611 NR Description: hypothetical protein; protein id: At1g25510
  misc_feature (13)..(483): NCBI GI NO: 15229656 NR Description: putative chloroplast nucleoid DNA-binding protein
  misc_feature (13)..(483): NCBI GI NO: 19424106 NR Description: putative chloroplast nucleoid DNA-binding protein
  misc_feature (68)..(483): NCBI GI NO: 34895664 NR Description: nucleoid DNA-binding protein cnd41-like protein
  misc_feature (5)..(483): NCBI GI NO: 15223368 NR Description: chloroplast nucleoid DNA binding protein, putative
  misc_feature (5)..(483): NCBI GI NO: 21594980 NR Description: chloroplast nucleoid DNA binding protein, putative
  misc_feature (19)..(483): NCBI GI NO: 15228618 NR Description: putative protein; protein id: At3g61820
  misc_feature (8)..(483): NCBI GI NO: 28392860 NR Description: unknown protein [Arabidopsis thaliana]
  misc_feature (93)..(483): NCBI GI NO: 15231010 NR Description: hypothetical protein, 5' partial
  misc_feature (93)..(483): NCBI GI NO: 24417232 NR Description: unknown [Arabidopsis thaliana]
MSPNYSFFFFIFFLTSHSSVFSRILPETSTTTTSILNVADSIHRTKYTSSFRLNQQEEQTHSASSSFSLQLHSRVSVRGTEHSDYKSLTLARLNRDTARVKSLITRLDLAINNISKADLKPISTMYTTEEQDIEAPLISGTTQGSGEYFTRVGIGKPAREVYMVLDTGSDVNWLQCTPCADCYHQTEPIFEPSSSSSYEPLSCDTPQCNALEVSECRNATCLYEVSYGDGSYTVGDFATETLTIGSTLVQNVAVGCGHSNEGLFVGAAGLLGLGGGLLALPSQLNTTSFSYCLVDRDSDSASTVDFGTSLSPDAVVAPLLRNHQLDTFYYLGLTGISVGGELLQIPQSSFEMDESGSGGIIIDSGTAVTRLQTEIYNSLRDSFVKGTLDLEKAAGVAMFDTCYNLSAKTTVEVPTVAFHFPGGKMLALPAKNYMIPVDSVGTFCLAFAPTASSLAIIGNVQQQGTRVTFDLANSLIGFSSNKC

SEQ ID NO: 4222 - protein, 359 aa, Arabidopsis thaliana
  peptide (1)..(359): Ceres Seq. ID no. 12599964
  misc_feature (1)..(357): Pfam Name: Pfam Description:  Eukaryotic aspartyl protease
  misc_feature (1)..(359): NCBI GI NO: 15222611 NR Description: hypothetical protein; protein id: At1g25510
  misc_feature (1)..(359): NCBI GI NO: 15229656 NR Description: putative chloroplast nucleoid DNA-binding protein
  misc_feature (1)..(359): NCBI GI NO: 19424106 NR Description: putative chloroplast nucleoid DNA-binding protein
  misc_feature (1)..(359): NCBI GI NO: 34895664 NR Description: nucleoid DNA-binding protein cnd41-like protein
  misc_feature (1)..(359): NCBI GI NO: 15223368 NR Description: chloroplast nucleoid DNA binding protein, putative
  misc_feature (1)..(359): NCBI GI NO: 21594980 NR Description: chloroplast nucleoid DNA binding protein, putative
  misc_feature (1)..(359): NCBI GI NO: 15228618 NR Description: putative protein; protein id: At3g61820
  misc_feature (1)..(359): NCBI GI NO: 28392860 NR Description: unknown protein [Arabidopsis thaliana]
  misc_feature (1)..(359): NCBI GI NO: 15231010 NR Description: hypothetical protein, 5' partial
  misc_feature (1)..(359): NCBI GI NO: 24417232 NR Description: unknown [Arabidopsis thaliana]
MYTTEEQDIEAPLISGTTQGSGEYFTRVGIGKPAREVYMVLDTGSDVNWLQCTPCADCYHQTEPIFEPSSSSSYEPLSCDTPQCNALEVSECRNATCLYEVSYGDGSYTVGDFATETLTIGSTLVQNVAVGCGHSNEGLFVGAAGLLGLGGGLLALPSQLNTTSFSYCLVDRDSDSASTVDFGTSLSPDAVVAPLLRNHQLDTFYYLGLTGISVGGELLQIPQSSFEMDESGSGGIIIDSGTAVTRLQTEIYNSLRDSFVKGTLDLEKAAGVAMFDTCYNLSAKTTVEVPTVAFHFPGGKMLALPAKNYMIPVDSVGTFCLAFAPTASSLAIIGNVQQQGTRVTFDLANSLIGFSSNKC

SEQ ID NO: 4223 - protein, 321 aa, Arabidopsis thaliana
  peptide (1)..(321): Ceres Seq. ID no. 12599965
  misc_feature (1)..(319): Pfam Name: Pfam Description:  Eukaryotic aspartyl protease
  misc_feature (1)..(321): NCBI GI NO: 15222611 NR Description: hypothetical protein; protein id: At1g25510
  misc_feature (1)..(321): NCBI GI NO: 15229656 NR Description: putative chloroplast nucleoid DNA-binding protein
  misc_feature (1)..(321): NCBI GI NO: 19424106 NR Description: putative chloroplast nucleoid DNA-binding protein
  misc_feature (1)..(321): NCBI GI NO: 34895664 NR Description: nucleoid DNA-binding protein cnd41-like protein
  misc_feature (1)..(321): NCBI GI NO: 15223368 NR Description: chloroplast nucleoid DNA binding protein, putative
  misc_feature (1)..(321): NCBI GI NO: 21594980 NR Description: chloroplast nucleoid DNA binding protein, putative
  misc_feature (1)..(321): NCBI GI NO: 15228618 NR Description: putative protein; protein id: At3g61820
  misc_feature (1)..(321): NCBI GI NO: 28392860 NR Description: unknown protein [Arabidopsis thaliana]
  misc_feature (1)..(321): NCBI GI NO: 15231010 NR Description: hypothetical protein, 5' partial
  misc_feature (1)..(321): NCBI GI NO: 24417232 NR Description: unknown [Arabidopsis thaliana]
MVLDTGSDVNWLQCTPCADCYHQTEPIFEPSSSSSYEPLSCDTPQCNALEVSECRNATCLYEVSYGDGSYTVGDFATETLTIGSTLVQNVAVGCGHSNEGLFVGAAGLLGLGGGLLALPSQLNTTSFSYCLVDRDSDSASTVDFGTSLSPDAVVAPLLRNHQLDTFYYLGLTGISVGGELLQIPQSSFEMDESGSGGIIIDSGTAVTRLQTEIYNSLRDSFVKGTLDLEKAAGVAMFDTCYNLSAKTTVEVPTVAFHFPGGKMLALPAKNYMIPVDSVGTFCLAFAPTASSLAIIGNVQQQGTRVTFDLANSLIGFSSNKC

SEQ ID NO: 4224 - DNA, 1778 bp, Arabidopsis thaliana
  misc_feature (1)..(1778): Ceres Seq. ID no. 12329299
aaaaaaggcttctctgtgttgttctctgtgttgttctctgtggtcattcttctttcttttcacttcttcttcttcttcgctcttcttctcactgtcgggttccatttggcgcgaaaagttcttcactttttccagcttttttttgttctctgacagttttttttttttgtttggttacaaataaagatgccagtaagtgtggcactagttttgctgttgacattgagcagtgtgattctgattaatgggagaagttacggcgtcggaaacatatgcgatcgtggtcggagaccgagcgagagaccacacagtgtcaaaatcactgattttggtgctgtgggagatgggaaaacgttgaacacacttgcgtttcaaaatgctgtcttttatctaaagtctttcgctgataaaggtggtgctcagctttatgttcctccgggacggtggctcaccggaagtttcaacctcaccagtcatctcactctctttctcgagaaagacgccgtcatacttgcctcacaggatccatcgcattggcaagtcacggatgccttaccgtcatatgggcggggtattgatctaccagggaagagatacatgagtttgataaacggtgacatgctacatgatgtagtagtaacaggtgataacggtaccatagatgggcaaggccttgtttggtgggatcggtttaattctcattctttagagtacagtcgccctcaccttgtcgagtttgtctctgccgaaaatgtcattgtatcaaatcttacattcttgaacgctccggcttatactatccattcagtttattgtcgcaatttatacattcatagagtaacggctaatacttgtccagaatctccttataccatcggtattgtcccagattcttctgaaaatgtgtgtatccaagaatctagtatcaacatggggtatgatgccatttctcttaaaagtggttgtgatgaatacggtttatcgtatgcaagacctactgctaatgtccagataagaaatgtttaccttagagcagcttctggttcctccatttcctttggtagtgaaatgtctggtggtatatctgatgttgaggtcagtgatgctcacatacacaactcgttatccgggattgcctttagaacaacaaatggaagaggtggttatattaaggagattgatatttccaacatccatatggttaatgttggtactgcatttctagccaacggtagcttcggtactcatccggattctggtttcgatgaaaatgcttacccgcttgtgagtcacatcaggttacatgacattgttggagaaaacataagcactgctggatatttctttggaacgaaagagtctcctttcacttcgattttgttatcgaatatctctctgtcgattaaaaactcggcttcccctgctgattcttggcaatgctcatatgttgacgggtcttcggaattcgtagtccctgaaccgtgccttgagctgaagagttttgatagttactatggtagagctgaggccttatgaaaccaaacttcattaggaatgatgattcatatttgtttaagagagagcaaatggttctgattcttttcttttccccaaaaataaaccacagtgtgtagaattattacctgttccttgttggtgttgttgtccctgttatttgcagcttgtgagattaatatatcttgtacaggttcatttcttcattcatgtgtaaccaaagaaattttgtattagcccagtaaccagatattaattttttt

SEQ ID NO: 4225 - protein, 449 aa, Arabidopsis thaliana
  peptide (1)..(449): Ceres Seq. ID no. 12329300
  misc_feature (75)..(433): Pfam Name: Pfam Description:  Glycosyl hydrolases family 28
  misc_feature (1)..(449): NCBI GI NO: 22327662 NR Description: Expressed protein; protein id: At5g49215
  misc_feature (3)..(446): NCBI GI NO: 30679999 NR Description: polygalacturonase, putative [Arabidopsis thaliana]
  misc_feature (71)..(446): NCBI GI NO: 21593399 NR Description: polygalacturonase-like protein
  misc_feature (71)..(446): NCBI GI NO: 18397713 NR Description: polygalacturonase, putative; protein id: At3g06770
  misc_feature (1)..(441): NCBI GI NO: 15228881 NR Description: polygalacturonase, putative; protein id: At3g16850
  misc_feature (3)..(441): NCBI GI NO: 7939578 NR Description: polygalacturonase-like protein
  misc_feature (1)..(441): NCBI GI NO: 21553827 NR Description: polygalacturonase, putative [Arabidopsis thaliana]
  misc_feature (39)..(438): NCBI GI NO: 40714685 NR Description: putative polygalacturonase
  misc_feature (9)..(437): NCBI GI NO: 18412253 NR Description: polygalacturonase, putative; protein id: At3g62110
  misc_feature (9)..(437): NCBI GI NO: 11263971 NR Description: hypothetical protein T17J13
MPVSVALVLLLTLSSVILINGRSYGVGNICDRGRRPSERPHSVKITDFGAVGDGKTLNTLAFQNAVFYLKSFADKGGAQLYVPPGRWLTGSFNLTSHLTLFLEKDAVILASQDPSHWQVTDALPSYGRGIDLPGKRYMSLINGDMLHDVVVTGDNGTIDGQGLVWWDRFNSHSLEYSRPHLVEFVSAENVIVSNLTFLNAPAYTIHSVYCRNLYIHRVTANTCPESPYTIGIVPDSSENVCIQESSINMGYDAISLKSGCDEYGLSYARPTANVQIRNVYLRAASGSSISFGSEMSGGISDVEVSDAHIHNSLSGIAFRTTNGRGGYIKEIDISNIHMVNVGTAFLANGSFGTHPDSGFDENAYPLVSHIRLHDIVGENISTAGYFFGTKESPFTSILLSNISLSIKNSASPADSWQCSYVDGSSEFVVPEPCLELKSFDSYYGRAEAL

SEQ ID NO: 4226 - protein, 312 aa, Arabidopsis thaliana
  peptide (1)..(312): Ceres Seq. ID no. 12329301
  misc_feature (1)..(296): Pfam Name: Pfam Description:  Glycosyl hydrolases family 28
  misc_feature (1)..(312): NCBI GI NO: 22327662 NR Description: Expressed protein; protein id: At5g49215
  misc_feature (1)..(309): NCBI GI NO: 30679999 NR Description: polygalacturonase, putative [Arabidopsis thaliana]
  misc_feature (1)..(309): NCBI GI NO: 21593399 NR Description: polygalacturonase-like protein
  misc_feature (1)..(309): NCBI GI NO: 18397713 NR Description: polygalacturonase, putative; protein id: At3g06770
  misc_feature (1)..(304): NCBI GI NO: 15228881 NR Description: polygalacturonase, putative; protein id: At3g16850
  misc_feature (1)..(304): NCBI GI NO: 7939578 NR Description: polygalacturonase-like protein
  misc_feature (1)..(304): NCBI GI NO: 21553827 NR Description: polygalacturonase, putative [Arabidopsis thaliana]
  misc_feature (1)..(301): NCBI GI NO: 40714685 NR Description: putative polygalacturonase
  misc_feature (1)..(300): NCBI GI NO: 18412253 NR Description: polygalacturonase, putative; protein id: At3g62110
  misc_feature (1)..(300): NCBI GI NO: 11263971 NR Description: hypothetical protein T17J13
MSLINGDMLHDVVVTGDNGTIDGQGLVWWDRFNSHSLEYSRPHLVEFVSAENVIVSNLTFLNAPAYTIHSVYCRNLYIHRVTANTCPESPYTIGIVPDSSENVCIQESSINMGYDAISLKSGCDEYGLSYARPTANVQIRNVYLRAASGSSISFGSEMSGGISDVEVSDAHIHNSLSGIAFRTTNGRGGYIKEIDISNIHMVNVGTAFLANGSFGTHPDSGFDENAYPLVSHIRLHDIVGENISTAGYFFGTKESPFTSILLSNISLSIKNSASPADSWQCSYVDGSSEFVVPEPCLELKSFDSYYGRAEAL

SEQ ID NO: 4227 - protein, 305 aa, Arabidopsis thaliana
  peptide (1)..(305): Ceres Seq. ID no. 12329302
  misc_feature (1)..(289): Pfam Name: Pfam Description:  Glycosyl hydrolases family 28
  misc_feature (1)..(305): NCBI GI NO: 22327662 NR Description: Expressed protein; protein id: At5g49215
  misc_feature (1)..(302): NCBI GI NO: 30679999 NR Description: polygalacturonase, putative [Arabidopsis thaliana]
  misc_feature (1)..(302): NCBI GI NO: 21593399 NR Description: polygalacturonase-like protein
  misc_feature (1)..(302): NCBI GI NO: 18397713 NR Description: polygalacturonase, putative; protein id: At3g06770
  misc_feature (1)..(297): NCBI GI NO: 15228881 NR Description: polygalacturonase, putative; protein id: At3g16850
  misc_feature (1)..(297): NCBI GI NO: 7939578 NR Description: polygalacturonase-like protein
  misc_feature (1)..(297): NCBI GI NO: 21553827 NR Description: polygalacturonase, putative [Arabidopsis thaliana]
  misc_feature (1)..(294): NCBI GI NO: 40714685 NR Description: putative polygalacturonase
  misc_feature (1)..(293): NCBI GI NO: 18412253 NR Description: polygalacturonase, putative; protein id: At3g62110
  misc_feature (1)..(293): NCBI GI NO: 11263971 NR Description: hypothetical protein T17J13
MLHDVVVTGDNGTIDGQGLVWWDRFNSHSLEYSRPHLVEFVSAENVIVSNLTFLNAPAYTIHSVYCRNLYIHRVTANTCPESPYTIGIVPDSSENVCIQESSINMGYDAISLKSGCDEYGLSYARPTANVQIRNVYLRAASGSSISFGSEMSGGISDVEVSDAHIHNSLSGIAFRTTNGRGGYIKEIDISNIHMVNVGTAFLANGSFGTHPDSGFDENAYPLVSHIRLHDIVGENISTAGYFFGTKESPFTSILLSNISLSIKNSASPADSWQCSYVDGSSEFVVPEPCLELKSFDSYYGRAEAL

SEQ ID NO: 4228 - DNA, 1681 bp, Arabidopsis thaliana
  misc_feature (1)..(1681): Ceres Seq. ID no. 12385085
aactgaaaaattaaaaggcaaaagctttttttcagatttctgataatcagacagacagacacaaacaaacaccggtatcgacgaacggaactaactccgatatccaaaacccactccaagtttcacgaacgaagggcttagtatctgccatggctcctgatgcttctactgctcttgcagcgagggagaaagttcagcaaatcctgaatgcagcttgtaccggaaatctcgaattccttaagaatgttgctaagcagcttgatgaaggaaaagacttgacgaaaactgtggagagtattaaagacgcaaacaaacgtggagcgcttcacttcgctgcgagagaaggacaaactgaaatatgcagatatcttttggaagaactgaaactcaatgctgatgcaaaagatgaaactggtgatactccgcttgttcatgctgcgaggcaaggacagattgaaacggttaagtatcttttagagcaaggagctgatcccaatatagctagtgaactaggagccacagctttgcatcatgcggctgggacaggagaaatcgagttgctaaaggaattgctctctagaggtgttcctgttgattctgaaagtgaatctggcacgccattaatctgggctgctggccacgaccaaaaaaatgctgtggaagtcttgttagaacacaatgccaatcctaatgctgagactgaagataatatcacaccgttattatctgcagtggcagcgggttctctgtcatgcttagagttgttggtcaaggcaggtgccaaagctaacgtttttgctggtggtgcaactccattgcacattgcggctgatattggaaaccttgagttaattaactgtttacttaaagccggggctgatccgaatcagaaagatgaggagggtaataggccattagaagttgcagctgctagagacaacagaaaggttgttgagatcctcttcccattgacaacaaaaccagaaactgtttcggactggacagtagatggaattctcgctcacatggaatcaaacaaagaacaagaggaaaactcaaacaaggcgaaatcccaagagactgggatcaagaaagatcttcctgtggtctccccagaagcaaaggcaaaagccgcagaagcaaaagccagaggacaagacgcctttcacagaaaggattttcagatggctattgatgcttatacacaagcaattgattttgacccaacggatcataccttattctcaaaccgaagcctctgctggttgcgactaggacaagctgagcatgccttatctgatgctaaagcctgcagagaactaaacccagattggcctaaaggttgcttcagagaaggcgctgctctgcgtttgctacagcggtttgacgaggcagccaatgctttctacgagggagtattgcttagccctgaaagcaaagagctcattgatgctttcagagaagctgtagatgccggaaggaagtttcacggcaagggtgaggttaaggccaaatcataagatcttcgagagatggtttatgtagtatatgtatgaagttttgatctacttcttacctttgttctcccttgtgcactattcttaggaacaaagttttgtttgtggtcgaatttggtaatttgtccgagtttacagcttagataaaaaagagttggtaatac

SEQ ID NO: 4229 - protein, 456 aa, Arabidopsis thaliana
  peptide (1)..(456): Ceres Seq. ID no. 12385086
  misc_feature (362)..(395): Pfam Name: Pfam Description:  TPR Domain
  misc_feature (1)..(456): NCBI GI NO: 15229331 NR Description: ankyrin-like protein; protein id: At3g04710
  misc_feature (1)..(456): NCBI GI NO: 34329680 NR Description: unknown [Nicotiana benthamiana]
  misc_feature (1)..(456): NCBI GI NO: 24745936 NR Description: ankyrin-like protein [Solanum tuberosum]
  misc_feature (17)..(440): NCBI GI NO: 27542768 NR Description: ankyrin-like protein-like protein
  misc_feature (10)..(451): NCBI GI NO: 34896852 NR Description: putative ankyrin [Oryza sativa]
  misc_feature (17)..(297): NCBI GI NO: 13435243 NR Description: putative gag-pol polyprotein [Oryza sativa]
  misc_feature (305)..(432): NCBI GI NO: 13435243 NR Description: putative gag-pol polyprotein [Oryza sativa]
  misc_feature (2)..(211): NCBI GI NO: 38637543 NR Description: ankyrin-like protein
  misc_feature (325)..(450): NCBI GI NO: 38637543 NR Description: ankyrin-like protein
  misc_feature (20)..(442): NCBI GI NO: 27542766 NR Description: ankyrin-like protein-like protein
MAPDASTALAAREKVQQILNAACTGNLEFLKNVAKQLDEGKDLTKTVESIKDANKRGALHFAAREGQTEICRYLLEELKLNADAKDETGDTPLVHAARQGQIETVKYLLEQGADPNIASELGATALHHAAGTGEIELLKELLSRGVPVDSESESGTPLIWAAGHDQKNAVEVLLEHNANPNAETEDNITPLLSAVAAGSLSCLELLVKAGAKANVFAGGATPLHIAADIGNLELINCLLKAGADPNQKDEEGNRPLEVAAARDNRKVVEILFPLTTKPETVSDWTVDGILAHMESNKEQEENSNKAKSQETGIKKDLPVVSPEAKAKAAEAKARGQDAFHRKDFQMAIDAYTQAIDFDPTDHTLFSNRSLCWLRLGQAEHALSDAKACRELNPDWPKGCFREGAALRLLQRFDEAANAFYEGVLLSPESKELIDAFREAVDAGRKFHGKGEVKAKS

SEQ ID NO: 4230 - DNA, 1016 bp, Arabidopsis thaliana; identical to SEQ ID NO: 3861
  misc_feature (1)..(1016): Ceres Seq. ID no. 13576736

SEQ ID NO: 4231 - protein, 190 aa, Arabidopsis thaliana; identical to SEQ ID NO: 3862
  peptide (1)..(190): Ceres Seq. ID no. 13576737
  misc_feature (134)..(166): Pfam Name: Pfam Description:  Ankyrin repeat
  misc_feature (1)..(190): NCBI GI NO: 30683047 NR Description: expressed protein [Arabidopsis thaliana]
  misc_feature (32)..(188): NCBI GI NO: 33146872 NR Description: unknown protein
  misc_feature (24)..(104): NCBI GI NO: 25407827 NR Description: hypothetical protein At2g26210
  misc_feature (32)..(188): NCBI GI NO: 34906752 NR Description: contains EST AU056950
  misc_feature (88)..(172): NCBI GI NO: 17230240 NR Description: hypothetical protein [Nostoc sp. PCC 7120]

SEQ ID NO: 4232 - protein, 167 aa, Arabidopsis thaliana; identical to SEQ ID NO: 3863
  peptide (1)..(167): Ceres Seq. ID no. 13576738
  misc_feature (111)..(143): Pfam Name: Pfam Description:  Ankyrin repeat
  misc_feature (1)..(167): NCBI GI NO: 30683047 NR Description: expressed protein [Arabidopsis thaliana]
  misc_feature (9)..(165): NCBI GI NO: 33146872 NR Description: unknown protein
  misc_feature (1)..(81): NCBI GI NO: 25407827 NR Description: hypothetical protein At2g26210
  misc_feature (9)..(165): NCBI GI NO: 34906752 NR Description: contains EST AU056950
  misc_feature (65)..(149): NCBI GI NO: 17230240 NR Description: hypothetical protein [Nostoc sp. PCC 7120]

SEQ ID NO: 4233 - protein, 159 aa, Arabidopsis thaliana; identical to SEQ ID NO: 3864
  peptide (1)..(159): Ceres Seq. ID no. 13576739
  misc_feature (103)..(135): Pfam Name: Pfam Description:  Ankyrin repeat
  misc_feature (1)..(159): NCBI GI NO: 30683047 NR Description: expressed protein [Arabidopsis thaliana]
  misc_feature (1)..(157): NCBI GI NO: 33146872 NR Description: unknown protein
  misc_feature (1)..(73): NCBI GI NO: 25407827 NR Description: hypothetical protein At2g26210
  misc_feature (1)..(157): NCBI GI NO: 34906752 NR Description: contains EST AU056950
  misc_feature (57)..(141): NCBI GI NO: 17230240 NR Description: hypothetical protein [Nostoc sp. PCC 7120]

SEQ ID NO: 4234 - DNA, 898 bp, Arabidopsis thaliana
  misc_feature (1)..(898): Ceres Seq. ID no. 13496719
aaaaatcctccgtctacctccgtctacctccgtctgattcctctattgggagaatccaaatttgcttcaggttccgttcgttcatggcttcgccagaggagatgggtgatgatgcatcagaaattccatccccgccaaaaaacacttacaaggatcccgacggtggaaggcaacgattcttactggaacttgaatttattcaatgtctcgccaatcctacttacatccactacctggcacagaatcggtattttgaagatgaagcatttattggatacttgaagtatcttcaatactggcagcgaccagagtacatcaagttcattatgtacccacactgcctatatttccttgaacttcttcaaaaccccaacttcaggactgctatggctcatcctgcaaacaaggaattggcgcatagacaacagttttactattggaagaactacagaaacaacagactgaagcacattctacctcggcctcttccagagcctgtacctccacaaccaccagttgcaccttcaacttctttgccacctgcaccatctgcaactgctgctctctctccagccctttctccaatgcagtacaataatatgctttctaagaatgacactaggaatatgggtgctactggaattgatcgtaggaagagaaagaagggtatataagcatttcctgccctgaagcatacaccatggcgtcagtcgtcagatatggtttcctccatgtcctaggagggaagcctacttgactcaggttacaaaaatgttggaaactcggtattactcattccgtgtcataggccgtttatggaagttgtcatatatggtgttcaatctttgtctatgatatacaacaacccccaatcagtatcagtctttatctttgttcc

SEQ ID NO: 4235 - protein, 223 aa, Arabidopsis thaliana
  peptide (1)..(223): Ceres Seq. ID no. 13496720
  misc_feature (54)..(156): Pfam Name: Pfam Description:  SOH1
  misc_feature (28)..(223): NCBI GI NO: 22326900 NR Description: SOH1 - like protein [Arabidopsis thaliana]
  misc_feature (36)..(208): NCBI GI NO: 33146796 NR Description: SOH1-like protein
  misc_feature (36)..(208): NCBI GI NO: 34899976 NR Description: P0039H02.5
  misc_feature (51)..(194): NCBI GI NO: 12597881 NR Description: hypothetical protein [Oryza sativa]
  misc_feature (36)..(208): NCBI GI NO: 34899964 NR Description: P0428D12.23
  misc_feature (51)..(155): NCBI GI NO: 27673870 NR Description: similar to CGI-125 protein
  misc_feature (51)..(155): NCBI GI NO: 13385570 NR Description: RIKEN cDNA 3110004H13 [Mus musculus]
  misc_feature (51)..(155): NCBI GI NO: 7705592 NR Description: CGI-125 protein [Homo sapiens]
  misc_feature (56)..(157): NCBI GI NO: 21355471 NR Description: CG1057-PA [Drosophila melanogaster]
  misc_feature (52)..(164): NCBI GI NO: 39589769 NR Description: Hypothetical protein CBG12403
KSSVYLRLPPSDSSIGRIQICFRFRSFMASPEEMGDDASEIPSPPKNTYKDPDGGRQRFLLELEFIQCLANPTYIHYLAQNRYFEDEAFIGYLKYLQYWQRPEYIKFIMYPHCLYFLELLQNPNFRTAMAHPANKELAHRQQFYYWKNYRNNRLKHILPRPLPEPVPPQPPVAPSTSLPPAPSATAALSPALSPMQYNNMLSKNDTRNMGATGIDRRKRKKGI

SEQ ID NO: 4236 - protein, 196 aa, Arabidopsis thaliana
  peptide (1)..(196): Ceres Seq. ID no. 13496721
  misc_feature (27)..(129): Pfam Name: Pfam Description:  SOH1
  misc_feature (1)..(196): NCBI GI NO: 22326900 NR Description: SOH1 - like protein [Arabidopsis thaliana]
  misc_feature (9)..(181): NCBI GI NO: 33146796 NR Description: SOH1-like protein
  misc_feature (9)..(181): NCBI GI NO: 34899976 NR Description: P0039H02.5
  misc_feature (24)..(167): NCBI GI NO: 12597881 NR Description: hypothetical protein [Oryza sativa]
  misc_feature (9)..(181): NCBI GI NO: 34899964 NR Description: P0428D12.23
  misc_feature (24)..(128): NCBI GI NO: 27673870 NR Description: similar to CGI-125 protein
  misc_feature (24)..(128): NCBI GI NO: 13385570 NR Description: RIKEN cDNA 3110004H13 [Mus musculus]
  misc_feature (24)..(128): NCBI GI NO: 7705592 NR Description: CGI-125 protein [Homo sapiens]
  misc_feature (29)..(130): NCBI GI NO: 21355471 NR Description: CG1057-PA [Drosophila melanogaster]
  misc_feature (25)..(137): NCBI GI NO: 39589769 NR Description: Hypothetical protein CBG12403
MASPEEMGDDASEIPSPPKNTYKDPDGGRQRFLLELEFIQCLANPTYIHYLAQNRYFEDEAFIGYLKYLQYWQRPEYIKFIMYPHCLYFLELLQNPNFRTAMAHPANKELAHRQQFYYWKNYRNNRLKHILPRPLPEPVPPQPPVAPSTSLPPAPSATAALSPALSPMQYNNMLSKNDTRNMGATGIDRRKRKKGI

SEQ ID NO: 4237 - protein, 190 aa, Arabidopsis thaliana
  peptide (1)..(190): Ceres Seq. ID no. 13496722
  misc_feature (21)..(123): Pfam Name: Pfam Description:  SOH1
  misc_feature (1)..(190): NCBI GI NO: 22326900 NR Description: SOH1 - like protein [Arabidopsis thaliana]
  misc_feature (3)..(175): NCBI GI NO: 33146796 NR Description: SOH1-like protein
  misc_feature (3)..(175): NCBI GI NO: 34899976 NR Description: P0039H02.5
  misc_feature (18)..(161): NCBI GI NO: 12597881 NR Description: hypothetical protein [Oryza sativa]
  misc_feature (3)..(175): NCBI GI NO: 34899964 NR Description: P0428D12.23
  misc_feature (18)..(122): NCBI GI NO: 27673870 NR Description: similar to CGI-125 protein
  misc_feature (18)..(122): NCBI GI NO: 13385570 NR Description: RIKEN cDNA 3110004H13 [Mus musculus]
  misc_feature (18)..(122): NCBI GI NO: 7705592 NR Description: CGI-125 protein [Homo sapiens]
  misc_feature (23)..(124): NCBI GI NO: 21355471 NR Description: CG1057-PA [Drosophila melanogaster]
  misc_feature (19)..(131): NCBI GI NO: 39589769 NR Description: Hypothetical protein CBG12403
MGDDASEIPSPPKNTYKDPDGGRQRFLLELEFIQCLANPTYIHYLAQNRYFEDEAFIGYLKYLQYWQRPEYIKFIMYPHCLYFLELLQNPNFRTAMAHPANKELAHRQQFYYWKNYRNNRLKHILPRPLPEPVPPQPPVAPSTSLPPAPSATAALSPALSPMQYNNMLSKNDTRNMGATGIDRRKRKKGI

SEQ ID NO: 4238 - DNA, 1734 bp, Arabidopsis thaliana
  misc_feature (1)..(1734): Ceres Seq. ID no. 12562159
acaagggaggtgcttcgtcctcgaagcttttagaacttagccaagcagctgttgtttcttagttgactccctctccgacgaaaatggtgtccacgagcaagatcaaatccgttgatttctataggaaaatcccgagggatttgacagaggcgtctctgtctggtgctggattgtccattatagcagccctctctatgatatttctatttggaatggagttgaataattatttggctgtcagcacttccacatcggtcattgttgacaggagcgctgacggagacttcttgcgcttagattttaatataagcttcccgtcactttcatgtgaattcgcatctgtggatgtcagtgatgtattaggaactaacaggctaaatgtaacaaagacaattcggaagttttctattgattcgaatatgagacccactggttctgagtttcatgccggggaagttttatcactcattaatcatggagatgaaactggtgaagaaatagttgaagattcggtaccacttactggacgcaactttgacacatttacacatcaatttccaatcttggttgttaatttctatgctccgtggtgctattggtgtaatctcctgaaaccatcatgggagaaagcagctaaacagataaaagagagatatgatccagaaatggacggacgtgttattttggcaaaagttgactgcacccaagaaggtgatctctgtcggaggaatcatatacaagggtatccatccattcgcattttccgcaaaggcagtgatcttaaggatgacaatgcacaccacgaccatgaatcctactatggagatcgtgatacggaaagcttagtgaagatggtggtgagtctggttgaaccaattcatctagagccccataatctagcattggaggacaaatcagacaattcatcgagaactctaaaaaaggcaccttctacaggaggatgtcgagttgaaggatacatgcgtgtgaagaaggttccaggcaatttaatggtttcagctcgctcgggatctcattcctttgattcttctcagatgaatatgtcacatgttgttaaccatctatcctttgggcggaggattatgcctcagaaattttcggagtttaagcgcttgtcaccttatctcggcctaagccacgaccgtttagacggccggtccttcataaaccaacgagatctcggcccaaacgttaccattgagcattatcttcaaatagtaaagactgaggtagtgaaaagcaatggacaggcattggttgaggcgtatgagtacacagcacatagcagcgttgctcatagttactatttaccagtggccaagtttcactttgagctctcaccgatgcaggttctcataacggaaaactccaagtccttctcacatttcatcaccaacgtatgcgccattattggtggtgtcttcacggtggccggaatcttggattctattctccatcactccatgacactcatgaaaaagatagaacttggtaaaaacttctgaagctccctaagggttttatttcgttttcctctgtaacgagtcagaaatttttgccctagttataccagacgtcacttaaataattcggttatatatattcacaaactgttatccttttgaacatatataagtattatcgatgtctctgaagtctttgggagttttagtagaacaaattgttatcacttaaatcaggggaatttacttc

SEQ ID NO: 4239 - protein, 480 aa, Arabidopsis thaliana
  peptide (1)..(480): Ceres Seq. ID no. 12562160
  misc_feature (1)..(480): NCBI GI NO: 22328963 NR Description: putative protein; protein id: At4g27080
  misc_feature (1)..(479): NCBI GI NO: 18402672 NR Description: expressed protein; protein id: At3g20560
  misc_feature (164)..(480): NCBI GI NO: 21618302 NR Description: unknown [Arabidopsis thaliana]
  misc_feature (183)..(479): NCBI GI NO: 15223682 NR Description: hypothetical protein; protein id: At1g50950.1
  misc_feature (1)..(158): NCBI GI NO: 15223682 NR Description: hypothetical protein; protein id: At1g50950.1
  misc_feature (277)..(478): NCBI GI NO: 28278376 NR Description: Similar to serologically defined breast cancer antigen 84
  misc_feature (1)..(119): NCBI GI NO: 28278376 NR Description: Similar to serologically defined breast cancer antigen 84
  misc_feature (293)..(478): NCBI GI NO: 7706278 NR Description: serologically defined breast cancer antigen 84
  misc_feature (293)..(478): NCBI GI NO: 13384938 NR Description: serologically defined breast cancer antigen 84
  misc_feature (1)..(125): NCBI GI NO: 7706278 NR Description: serologically defined breast cancer antigen 84
MVSTSKIKSVDFYRKIPRDLTEASLSGAGLSIIAALSMIFLFGMELNNYLAVSTSTSVIVDRSADGDFLRLDFNISFPSLSCEFASVDVSDVLGTNRLNVTKTIRKFSIDSNMRPTGSEFHAGEVLSLINHGDETGEEIVEDSVPLTGRNFDTFTHQFPILVVNFYAPWCYWCNLLKPSWEKAAKQIKERYDPEMDGRVILAKVDCTQEGDLCRRNHIQGYPSIRIFRKGSDLKDDNAHHDHESYYGDRDTESLVKMVVSLVEPIHLEPHNLALEDKSDNSSRTLKKAPSTGGCRVEGYMRVKKVPGNLMVSARSGSHSFDSSQMNMSHVVNHLSFGRRIMPQKFSEFKRLSPYLGLSHDRLDGRSFINQRDLGPNVTIEHYLQIVKTEVVKSNGQALVEAYEYTAHSSVAHSYYLPVAKFHFELSPMQVLITENSKSFSHFITNVCAIIGGVFTVAGILDSILHHSMTLMKKIELGKNF

SEQ ID NO: 4240 - protein, 443 aa, Arabidopsis thaliana
  peptide (1)..(443): Ceres Seq. ID no. 12562161
  misc_feature (1)..(443): NCBI GI NO: 22328963 NR Description: putative protein; protein id: At4g27080
  misc_feature (1)..(442): NCBI GI NO: 18402672 NR Description: expressed protein; protein id: At3g20560
  misc_feature (127)..(443): NCBI GI NO: 21618302 NR Description: unknown [Arabidopsis thaliana]
  misc_feature (146)..(442): NCBI GI NO: 15223682 NR Description: hypothetical protein; protein id: At1g50950.1
  misc_feature (1)..(121): NCBI GI NO: 15223682 NR Description: hypothetical protein; protein id: At1g50950.1
  misc_feature (240)..(441): NCBI GI NO: 28278376 NR Description: Similar to serologically defined breast cancer antigen 84
  misc_feature (1)..(82): NCBI GI NO: 28278376 NR Description: Similar to serologically defined breast cancer antigen 84
  misc_feature (256)..(441): NCBI GI NO: 7706278 NR Description: serologically defined breast cancer antigen 84
  misc_feature (256)..(441): NCBI GI NO: 13384938 NR Description: serologically defined breast cancer antigen 84
  misc_feature (1)..(88): NCBI GI NO: 7706278 NR Description: serologically defined breast cancer antigen 84
MIFLFGMELNNYLAVSTSTSVIVDRSADGDFLRLDFNISFPSLSCEFASVDVSDVLGTNRLNVTKTIRKFSIDSNMRPTGSEFHAGEVLSLINHGDETGEEIVEDSVPLTGRNFDTFTHQFPILVVNFYAPWCYWCNLLKPSWEKAAKQIKERYDPEMDGRVILAKVDCTQEGDLCRRNHIQGYPSIRIFRKGSDLKDDNAHHDHESYYGDRDTESLVKMVVSLVEPIHLEPHNLALEDKSDNSSRTLKKAPSTGGCRVEGYMRVKKVPGNLMVSARSGSHSFDSSQMNMSHVVNHLSFGRRIMPQKFSEFKRLSPYLGLSHDRLDGRSFINQRDLGPNVTIEHYLQIVKTEVVKSNGQALVEAYEYTAHSSVAHSYYLPVAKFHFELSPMQVLITENSKSFSHFITNVCAIIGGVFTVAGILDSILHHSMTLMKKIELGKNF

SEQ ID NO: 4241 - protein, 437 aa, Arabidopsis thaliana
  peptide (1)..(437): Ceres Seq. ID no. 12562162
  misc_feature (1)..(437): NCBI GI NO: 22328963 NR Description: putative protein; protein id: At4g27080
  misc_feature (1)..(436): NCBI GI NO: 18402672 NR Description: expressed protein; protein id: At3g20560
  misc_feature (121)..(437): NCBI GI NO: 21618302 NR Description: unknown [Arabidopsis thaliana]
  misc_feature (140)..(436): NCBI GI NO: 15223682 NR Description: hypothetical protein; protein id: At1g50950.1
  misc_feature (1)..(115): NCBI GI NO: 15223682 NR Description: hypothetical protein; protein id: At1g50950.1
  misc_feature (234)..(435): NCBI GI NO: 28278376 NR Description: Similar to serologically defined breast cancer antigen 84
  misc_feature (1)..(76): NCBI GI NO: 28278376 NR Description: Similar to serologically defined breast cancer antigen 84
  misc_feature (250)..(435): NCBI GI NO: 7706278 NR Description: serologically defined breast cancer antigen 84
  misc_feature (250)..(435): NCBI GI NO: 13384938 NR Description: serologically defined breast cancer antigen 84
  misc_feature (1)..(82): NCBI GI NO: 7706278 NR Description: serologically defined breast cancer antigen 84
MELNNYLAVSTSTSVIVDRSADGDFLRLDFNISFPSLSCEFASVDVSDVLGTNRLNVTKTIRKFSIDSNMRPTGSEFHAGEVLSLINHGDETGEEIVEDSVPLTGRNFDTFTHQFPILVVNFYAPWCYWCNLLKPSWEKAAKQIKERYDPEMDGRVILAKVDCTQEGDLCRRNHIQGYPSIRIFRKGSDLKDDNAHHDHESYYGDRDTESLVKMVVSLVEPIHLEPHNLALEDKSDNSSRTLKKAPSTGGCRVEGYMRVKKVPGNLMVSARSGSHSFDSSQMNMSHVVNHLSFGRRIMPQKFSEFKRLSPYLGLSHDRLDGRSFINQRDLGPNVTIEHYLQIVKTEVVKSNGQALVEAYEYTAHSSVAHSYYLPVAKFHFELSPMQVLITENSKSFSHFITNVCAIIGGVFTVAGILDSILHHSMTLMKKIELGKNF

SEQ ID NO: 4242 - DNA, 929 bp, Arabidopsis thaliana
  misc_feature (1)..(929): Ceres Seq. ID no. 12599908
agctatagacagacacacccaaaccctagatctaaccccagccgtcagatcagattgatcgggcaatcgcttctagaccgttggaatcaagcaatggtagaggtagaatcgtatttgtgggtatctagaagaggcgttaggattgtctccaagctgggtgttttttcatcttgatggccaactaatcgaatctcctactctaaagatatttttgtttatttctgtcatgtgtgatttggtcgcgcgtacgggtcgtctccagcagcggtacgaggatggctctcgtctcgtcgccgggtgtattccgtttaggtatgtaaattctgacaaagatggtaattctgaatctgggaaagtgattcaagtgttgatgatcagctcgtctagtggacctggacttttgtttcccaagggaggatgggagaatgatgagacagtcagggaggctgcagcgagggaagcagtggaagaagcaggagtccgtgggattcttatggattttttggggaattatgagttcaagagcaaatcacaccaagatgagtttagcccagaaggtttatgtaaagcggcaatgtacgcgttgtatgtgaaagaagagctagcgacgtggccggaacatgagacgagaacacgtaaatggctgacaattgaagaagcggtagagagttgcaggcacccttggatgaaggacgcattggtggaaggattctgtaaatggcataaggagaagatggttaaaggagaggagataactggtgaacattgaagcaaatgtgcataaacctctgagcgttggtttcattcctttcgattttgtttttacctttttgtttttgtttttgaagtcttatgcatggataatctcttgtgactgcgaaacgtaatagtttcgaagatttaaagttcaattattgccctattttcac

SEQ ID NO: 4243 - protein, 180 aa, Arabidopsis thaliana
  peptide (1)..(180): Ceres Seq. ID no. 12599909
  misc_feature (19)..(166): Pfam Name: Pfam Description:  NUDIX domain
  misc_feature (1)..(180): NCBI GI NO: 18399682 NR Description: expressed protein; protein id: At3g12600.1
  misc_feature (1)..(175): NCBI GI NO: 38175436 NR Description: MutT-like protein
  misc_feature (1)..(175): NCBI GI NO: 34900054 NR Description: MutT-like protein~contains ESTsAU085960
  misc_feature (1)..(180): NCBI GI NO: 15231598 NR Description: MutT-like protein; protein id: At3g26690.1
  misc_feature (1)..(180): NCBI GI NO: 18391450 NR Description: expressed protein; protein id: At1g12880
  misc_feature (1)..(180): NCBI GI NO: 25518008 NR Description: F13K23.14 protein - Arabidopsis thaliana
  misc_feature (1)..(162): NCBI GI NO: 15221055 NR Description: unknown protein; protein id: At1g18300.1
  misc_feature (1)..(158): NCBI GI NO: 15223919 NR Description: hypothetical protein; protein id: At1g14860.1
  misc_feature (1)..(158): NCBI GI NO: 18379275 NR Description: expressed protein; protein id: At2g01670
  misc_feature (1)..(158): NCBI GI NO: 21595695 NR Description: unknown [Arabidopsis thaliana]
MCDLVARTGRLQQRYEDGSRLVAGCIPFRYVNSDKDGNSESGKVIQVLMISSSSGPGLLFPKGGWENDETVREAAAREAVEEAGVRGILMDFLGNYEFKSKSHQDEFSPEGLCKAAMYALYVKEELATWPEHETRTRKWLTIEEAVESCRHPWMKDALVEGFCKWHKEKMVKGEEITGEH

SEQ ID NO: 4244 - protein, 132 aa, Arabidopsis thaliana
  peptide (1)..(132): Ceres Seq. ID no. 12599910
  misc_feature (1)..(118): Pfam Name: Pfam Description:  NUDIX domain
  misc_feature (1)..(132): NCBI GI NO: 18399682 NR Description: expressed protein; protein id: At3g12600.1
  misc_feature (1)..(127): NCBI GI NO: 38175436 NR Description: MutT-like protein
  misc_feature (1)..(127): NCBI GI NO: 34900054 NR Description: MutT-like protein~contains ESTsAU085960
  misc_feature (1)..(132): NCBI GI NO: 15231598 NR Description: MutT-like protein; protein id: At3g26690.1
  misc_feature (1)..(132): NCBI GI NO: 18391450 NR Description: expressed protein; protein id: At1g12880
  misc_feature (1)..(132): NCBI GI NO: 25518008 NR Description: F13K23.14 protein - Arabidopsis thaliana
  misc_feature (1)..(114): NCBI GI NO: 15221055 NR Description: unknown protein; protein id: At1g18300.1
  misc_feature (1)..(110): NCBI GI NO: 15223919 NR Description: hypothetical protein; protein id: At1g14860.1
  misc_feature (1)..(110): NCBI GI NO: 18379275 NR Description: expressed protein; protein id: At2g01670
  misc_feature (1)..(110): NCBI GI NO: 21595695 NR Description: unknown [Arabidopsis thaliana]
MISSSSGPGLLFPKGGWENDETVREAAAREAVEEAGVRGILMDFLGNYEFKSKSHQDEFSPEGLCKAAMYALYVKEELATWPEHETRTRKWLTIEEAVESCRHPWMKDALVEGFCKWHKEKMVKGEEITGEH

SEQ ID NO: 4245 - protein, 91 aa, Arabidopsis thaliana
  peptide (1)..(91): Ceres Seq. ID no. 12599911
  misc_feature (1)..(77): Pfam Name: Pfam Description:  NUDIX domain
  misc_feature (1)..(91): NCBI GI NO: 18399682 NR Description: expressed protein; protein id: At3g12600.1
  misc_feature (1)..(86): NCBI GI NO: 38175436 NR Description: MutT-like protein
  misc_feature (1)..(86): NCBI GI NO: 34900054 NR Description: MutT-like protein~contains ESTsAU085960
  misc_feature (1)..(91): NCBI GI NO: 15231598 NR Description: MutT-like protein; protein id: At3g26690.1
  misc_feature (1)..(91): NCBI GI NO: 18391450 NR Description: expressed protein; protein id: At1g12880
  misc_feature (1)..(91): NCBI GI NO: 25518008 NR Description: F13K23.14 protein - Arabidopsis thaliana
  misc_feature (1)..(73): NCBI GI NO: 15221055 NR Description: unknown protein; protein id: At1g18300.1
  misc_feature (1)..(69): NCBI GI NO: 15223919 NR Description: hypothetical protein; protein id: At1g14860.1
  misc_feature (1)..(69): NCBI GI NO: 18379275 NR Description: expressed protein; protein id: At2g01670
  misc_feature (1)..(69): NCBI GI NO: 21595695 NR Description: unknown [Arabidopsis thaliana]
MDFLGNYEFKSKSHQDEFSPEGLCKAAMYALYVKEELATWPEHETRTRKWLTIEEAVESCRHPWMKDALVEGFCKWHKEKMVKGEEITGEH

SEQ ID NO: 4246 - DNA, 490 bp, Arabidopsis thaliana
  misc_feature (1)..(490): Ceres Seq. ID no. 12476432
aagaaatctttcagatttgcgcatatcgacaattttccgagcggccagtttaagtattttgtttgtagttaacgtgtttcaagaactttgacaatggctgaggaagcgcataaggtaacattgaatgtctatgatttaagccaaggcttggcacgccagctctcacaatcactcctgggaaaggttattgaaggtgtatggcatacaggaatagttgtctatgggaatgagtacttttttggaggagggatacaacatttaccagttggaagaactccatatggaacaccaattcgaacgatagagttgggtctatcacatgtgcctaaagatgtattcgagatgtacttggaagaaatcagtcctcgttacactgctgaatcctacaatttacttactcacaactgcaacaacttcagcaacgaggtcgctcagtttttggtgttccatatggagttcttccaactggtaaatgttgtatccctcctcc

SEQ ID NO: 4247 - protein, 132 aa, Arabidopsis thaliana
  peptide (1)..(132): Ceres Seq. ID no. 12476433
  misc_feature (6)..(117): Pfam Name: DUF862 Pfam Description: Eukaryotic protein of unknown function
  misc_feature (1)..(117): NCBI GI NO: 15231383 NR Description: unknown protein; protein id: At3g07090
  misc_feature (1)..(117): NCBI GI NO: 37535296 NR Description: unknown protein
  misc_feature (5)..(116): NCBI GI NO: 28277916 NR Description: Similar to DNA segment
  misc_feature (7)..(116): NCBI GI NO: 29246854 NR Description: GLP_191_9337_10773 [Giardia lamblia ATCC 50803]
  misc_feature (8)..(116): NCBI GI NO: 37589651 NR Description: Unknown (protein for MGC:73066) [Danio rerio]
  misc_feature (6)..(116): NCBI GI NO: 14779199 NR Description: similar to LD11371p
  misc_feature (1)..(116): NCBI GI NO: 34867307 NR Description: similar to D15Wsu75e protein [Rattus norvegicus]
  misc_feature (6)..(116): NCBI GI NO: 20162548 NR Description: D15Wsu75e protein [Mus musculus]
  misc_feature (8)..(117): NCBI GI NO: 40738408 NR Description: hypothetical protein AN6915.2
  misc_feature (4)..(117): NCBI GI NO: 19173191 NR Description: hypothetical protein [Encephalitozoon cuniculi]
MAEEAHKVTLNVYDLSQGLARQLSQSLLGKVIEGVWHTGIVVYGNEYFFGGGIQHLPVGRTPYGTPIRTIELGLSHVPKDVFEMYLEEISPRYTAESYNLLTHNCNNFSNEVAQFLVFHMEFFQLVNVVSLL

SEQ ID NO: 4248 - DNA, 1677 bp, Arabidopsis thaliana
  misc_feature (1)..(1677): Ceres Seq. ID no. 12370844
agcaaaacatttgtcttcgtgtttgaaagctagataaaagattcactaaatggccaccgcaagcaccgctgctactttcagaccctcctccgtttcagcttcttccgaattaacccatctgagatcaccctccaaactccccaaatttacgcctctgccatcggctcgctcacggtcctcttcttcgttctccgtctcctgcaccatcgctaaggacccagctgttgtcatggcggactcggagaagattaaggccgctggatctgatccgactatgtggcaacgacctgattcattcggtcgtttcgggaagtttggcggcaagtacgtccccgaaactctaatgcacgccctctctgaactcgaaacggctttctattcgctcgccaccgacgaagatttccagagagaattagcagagatcttgaaagactacgttggtcgggaaagtcctctttactttgcagagaggctcacggagcattaccgccgtgaaaacggtgaagggccgctcatatacctcaaaagggaagacttgaaccacaccggtgctcacaagatcaacaacgctgtggctcaggctcttctcgccaagcgtctaggaaagaaacgaattattgctgagacaggggctggtcaacatggtgtagccacagctactgtgtgtgcacgtttcggtttgcagtgcattatctacatgggtgctcaagacatggagagacaagctcttaatgtgttcagaatgcgtcttctcggtgctgaggtaaggggagtccactctggaacagccactttaaaggacgcaacttctgaagctataagggattgggtgaccaatgtggagactacacattacatattgggatccgttgcgggtcctcatccttatcctatgatggtcagagactttcacgcggtgattggtaaagaaacaaggaaacaagcgatggagaaatggggcgggaagcctgatgttctggttgcttgtgtcggtggtggttcaaatgctatgggactcttccatgaatttgtcgatgacacagaggttcgaatgattggtgtggaagccgctggatttggattggacagcggcaaacatgctgccacattgacaaaaggagatgtcggtgtactccacggagctatgagttacttgctgcaagatgatgatggccaaatcattgaaccacactccatcagtgccggattggactaccctggagtcggacctgagcatagtttccttaaagacgtgggaagggctgaatactttagcgttactgatgaagaagcattagaagctttcaagagagtgtctcggttggagggaataatcccggcattggagacatcgcacgcattggcccatctggagaagctttgtccgacgttacctgatggagccagagtggtattaaacttcagtgggagaggcgacaaggatgttcagactgcaatcaagtatctcgaagtttaaagagtgtagattactttcattttcacacagtgctatttcttttatgtagtttgttagttctccttgcttatggtcgggaatccaaaagtttggatcaaagggttaagaagagaataagtgttatgaatgtatcatataaataaaaatgttctatggaacgtttgatgttcttataagcaattcgaactgttttgttcttg

SEQ ID NO: 4249 - protein, 475 aa, Arabidopsis thaliana
  peptide (1)..(475): Ceres Seq. ID no. 12370845
  misc_feature (127)..(461): Pfam Name: Pfam Description:  Pyridoxal-phosphate dependent enzyme
  misc_feature (1)..(475): NCBI GI NO: 15236977 NR Description: tryptophan synthase beta-subunit
  misc_feature (1)..(475): NCBI GI NO: 81661 NR Description: tryptophan synthase (EC 4
  misc_feature (1)..(475): NCBI GI NO: 15239755 NR Description: tryptophan synthase beta chain 1 precursor
  misc_feature (30)..(475): NCBI GI NO: 3915165 NR Description: Tryptophan synthase beta chain 2
  misc_feature (38)..(475): NCBI GI NO: 18481702 NR Description: tryptophan synthase beta-subunit [Sorghum bicolor]
  misc_feature (36)..(475): NCBI GI NO: 7437014 NR Description: probable tryptophan synthase (EC 4
  misc_feature (7)..(475): NCBI GI NO: 38636821 NR Description: putative tryptophan synthase beta-subunit
  misc_feature (78)..(475): NCBI GI NO: 1174780 NR Description: Tryptophan synthase beta chain 2
  misc_feature (87)..(475): NCBI GI NO: 1174778 NR Description: Tryptophan synthase beta chain 1
  misc_feature (73)..(474): NCBI GI NO: 23041317 NR Description: hypothetical protein
MATASTAATFRPSSVSASSELTHLRSPSKLPKFTPLPSARSRSSSSFSVSCTIAKDPAVVMADSEKIKAAGSDPTMWQRPDSFGRFGKFGGKYVPETLMHALSELETAFYSLATDEDFQRELAEILKDYVGRESPLYFAERLTEHYRRENGEGPLIYLKREDLNHTGAHKINNAVAQALLAKRLGKKRIIAETGAGQHGVATATVCARFGLQCIIYMGAQDMERQALNVFRMRLLGAEVRGVHSGTATLKDATSEAIRDWVTNVETTHYILGSVAGPHPYPMMVRDFHAVIGKETRKQAMEKWGGKPDVLVACVGGGSNAMGLFHEFVDDTEVRMIGVEAAGFGLDSGKHAATLTKGDVGVLHGAMSYLLQDDDGQIIEPHSISAGLDYPGVGPEHSFLKDVGRAEYFSVTDEEALEAFKRVSRLEGIIPALETSHALAHLEKLCPTLPDGARVVLNFSGRGDKDVQTAIKYLEV

SEQ ID NO: 4250 - protein, 415 aa, Arabidopsis thaliana
  peptide (1)..(415): Ceres Seq. ID no. 12370846
  misc_feature (67)..(401): Pfam Name: Pfam Description:  Pyridoxal-phosphate dependent enzyme
  misc_feature (1)..(415): NCBI GI NO: 15236977 NR Description: tryptophan synthase beta-subunit
  misc_feature (1)..(415): NCBI GI NO: 81661 NR Description: tryptophan synthase (EC 4
  misc_feature (1)..(415): NCBI GI NO: 15239755 NR Description: tryptophan synthase beta chain 1 precursor
  misc_feature (1)..(415): NCBI GI NO: 3915165 NR Description: Tryptophan synthase beta chain 2
  misc_feature (1)..(415): NCBI GI NO: 18481702 NR Description: tryptophan synthase beta-subunit [Sorghum bicolor]
  misc_feature (1)..(415): NCBI GI NO: 7437014 NR Description: probable tryptophan synthase (EC 4
  misc_feature (1)..(415): NCBI GI NO: 38636821 NR Description: putative tryptophan synthase beta-subunit
  misc_feature (18)..(415): NCBI GI NO: 1174780 NR Description: Tryptophan synthase beta chain 2
  misc_feature (27)..(415): NCBI GI NO: 1174778 NR Description: Tryptophan synthase beta chain 1
  misc_feature (13)..(414): NCBI GI NO: 23041317 NR Description: hypothetical protein
MADSEKIKAAGSDPTMWQRPDSFGRFGKFGGKYVPETLMHALSELETAFYSLATDEDFQRELAEILKDYVGRESPLYFAERLTEHYRRENGEGPLIYLKREDLNHTGAHKINNAVAQALLAKRLGKKRIIAETGAGQHGVATATVCARFGLQCIIYMGAQDMERQALNVFRMRLLGAEVRGVHSGTATLKDATSEAIRDWVTNVETTHYILGSVAGPHPYPMMVRDFHAVIGKETRKQAMEKWGGKPDVLVACVGGGSNAMGLFHEFVDDTEVRMIGVEAAGFGLDSGKHAATLTKGDVGVLHGAMSYLLQDDDGQIIEPHSISAGLDYPGVGPEHSFLKDVGRAEYFSVTDEEALEAFKRVSRLEGIIPALETSHALAHLEKLCPTLPDGARVVLNFSGRGDKDVQTAIKYLEV

SEQ ID NO: 4251 - protein, 400 aa, Arabidopsis thaliana
  peptide (1)..(400): Ceres Seq. ID no. 12370847
  misc_feature (52)..(386): Pfam Name: Pfam Description:  Pyridoxal-phosphate dependent enzyme
  misc_feature (1)..(400): NCBI GI NO: 15236977 NR Description: tryptophan synthase beta-subunit
  misc_feature (1)..(400): NCBI GI NO: 81661 NR Description: tryptophan synthase (EC 4
  misc_feature (1)..(400): NCBI GI NO: 15239755 NR Description: tryptophan synthase beta chain 1 precursor
  misc_feature (1)..(400): NCBI GI NO: 3915165 NR Description: Tryptophan synthase beta chain 2
  misc_feature (1)..(400): NCBI GI NO: 18481702 NR Description: tryptophan synthase beta-subunit [Sorghum bicolor]
  misc_feature (1)..(400): NCBI GI NO: 7437014 NR Description: probable tryptophan synthase (EC 4
  misc_feature (1)..(400): NCBI GI NO: 38636821 NR Description: putative tryptophan synthase beta-subunit
  misc_feature (3)..(400): NCBI GI NO: 1174780 NR Description: Tryptophan synthase beta chain 2
  misc_feature (12)..(400): NCBI GI NO: 1174778 NR Description: Tryptophan synthase beta chain 1
  misc_feature (1)..(399): NCBI GI NO: 23041317 NR Description: hypothetical protein
MWQRPDSFGRFGKFGGKYVPETLMHALSELETAFYSLATDEDFQRELAEILKDYVGRESPLYFAERLTEHYRRENGEGPLIYLKREDLNHTGAHKINNAVAQALLAKRLGKKRIIAETGAGQHGVATATVCARFGLQCIIYMGAQDMERQALNVFRMRLLGAEVRGVHSGTATLKDATSEAIRDWVTNVETTHYILGSVAGPHPYPMMVRDFHAVIGKETRKQAMEKWGGKPDVLVACVGGGSNAMGLFHEFVDDTEVRMIGVEAAGFGLDSGKHAATLTKGDVGVLHGAMSYLLQDDDGQIIEPHSISAGLDYPGVGPEHSFLKDVGRAEYFSVTDEEALEAFKRVSRLEGIIPALETSHALAHLEKLCPTLPDGARVVLNFSGRGDKDVQTAIKYLEV

SEQ ID NO: 4252 - DNA, 1150 bp, Arabidopsis thaliana
  misc_feature (1)..(1150): Ceres Seq. ID no. 13509011
acgactacaaagtacaagaaagtctcatttgagaataattgagcgataaagaaacggtatgacgtcgttttgctccatgatttctcttcttcttcttctctctctttcatcggcggttttctccgatgacgcttctttccagaaacttccggtgccggaaactaggtcaggtcccgaagctttcgcttttgattccaccggtaaagggttctataccggtgtctccggtggtaaaatcctcaagtacctccccgagacgggttatgttgactttgcccagatcactgaatcctcgaactcttcatggtgcgatggtactattggaacggctttagccggacgctgtggtcgaccagcaggaatagcattcaacgagaaaacaggtgatctttacgtcgccgatgctccgttgggtcttcacgttatttctcccgccggtggtttggctacgaagatcaccgacagtgttgacggaaagcctttcaagtttcttgacggtcttgacgttgatcccactactggtgtcgtctacttcacttccttcagctcacgcttctccccaatccaagtgttgattgcattggggttaaaggacgcgaccggaaagctctacaaatacgacccatcgaccaaagtcgtgactgtactgatggaagggctaagtggttcagccgggtgtgcagtgagctcagatggttcgtttgtgctggttagtcagttcacaaaaagtaacatcaagaggtattggatcaagggacccaaagctggttcttctgaagacttcaccaactcagtctcaaaccctgacaatatcaaaagaattggctctactggaaacttttgggtcgcttcagtggtgaacaagatcatcgtacctacgaacccatcagcagtcaaagttaactctaatggtgaagttcttcaaacaattcctctcaaagataaatttggagacactctgctcagcgaagtcaacgaattcgagggcaatttatatataggaactctcaccggaccatttgctggaattcttaagctcgaaaagggttcttgtcctgccacttagatctcttatttgaatgcatccgatgtgttacaataatatatatatatgagctttttatttatttctgaataaaataaccactta

SEQ ID NO: 4253 - protein, 335 aa, Arabidopsis thaliana
  peptide (1)..(335): Ceres Seq. ID no. 13509012
  misc_feature (2)..(322): Pfam Name: Pfam Description:  Strictosidine synthase
  misc_feature (1)..(335): NCBI GI NO: 15221106 NR Description: strictosidine synthase family
  misc_feature (1)..(335): NCBI GI NO: 1754983 NR Description: strictosidine synthase
  misc_feature (1)..(327): NCBI GI NO: 15221105 NR Description: strictosidine synthase family
  misc_feature (1)..(327): NCBI GI NO: 21431845 NR Description: Strictosidine synthase 3 precursor (SS-3)
  misc_feature (1)..(327): NCBI GI NO: 30698979 NR Description: strictosidine synthase family
  misc_feature (1)..(313): NCBI GI NO: 1754987 NR Description: strictosidine synthase
  misc_feature (37)..(264): NCBI GI NO: 11280567 NR Description: hypothetical protein F24I3
  misc_feature (37)..(264): NCBI GI NO: 30694556 NR Description: strictosidine synthase-related
  misc_feature (272)..(327): NCBI GI NO: 11280567 NR Description: hypothetical protein F24I3
  misc_feature (272)..(327): NCBI GI NO: 30694556 NR Description: strictosidine synthase-related
MTSFCSMISLLLLLSLSSAVFSDDASFQKLPVPETRSGPEAFAFDSTGKGFYTGVSGGKILKYLPETGYVDFAQITESSNSSWCDGTIGTALAGRCGRPAGIAFNEKTGDLYVADAPLGLHVISPAGGLATKITDSVDGKPFKFLDGLDVDPTTGVVYFTSFSSRFSPIQVLIALGLKDATGKLYKYDPSTKVVTVLMEGLSGSAGCAVSSDGSFVLVSQFTKSNIKRYWIKGPKAGSSEDFTNSVSNPDNIKRIGSTGNFWVASVVNKIIVPTNPSAVKVNSNGEVLQTIPLKDKFGDTLLSEVNEFEGNLYIGTLTGPFAGILKLEKGSCPAT

SEQ ID NO: 4254 - protein, 329 aa, Arabidopsis thaliana
  peptide (1)..(329): Ceres Seq. ID no. 13509013
  misc_feature (1)..(316): Pfam Name: Pfam Description:  Strictosidine synthase
  misc_feature (1)..(329): NCBI GI NO: 15221106 NR Description: strictosidine synthase family
  misc_feature (1)..(329): NCBI GI NO: 1754983 NR Description: strictosidine synthase
  misc_feature (1)..(321): NCBI GI NO: 15221105 NR Description: strictosidine synthase family
  misc_feature (1)..(321): NCBI GI NO: 21431845 NR Description: Strictosidine synthase 3 precursor (SS-3)
  misc_feature (1)..(321): NCBI GI NO: 30698979 NR Description: strictosidine synthase family
  misc_feature (1)..(307): NCBI GI NO: 1754987 NR Description: strictosidine synthase
  misc_feature (31)..(258): NCBI GI NO: 11280567 NR Description: hypothetical protein F24I3
  misc_feature (31)..(258): NCBI GI NO: 30694556 NR Description: strictosidine synthase-related
  misc_feature (266)..(321): NCBI GI NO: 11280567 NR Description: hypothetical protein F24I3
  misc_feature (266)..(321): NCBI GI NO: 30694556 NR Description: strictosidine synthase-related
MISLLLLLSLSSAVFSDDASFQKLPVPETRSGPEAFAFDSTGKGFYTGVSGGKILKYLPETGYVDFAQITESSNSSWCDGTIGTALAGRCGRPAGIAFNEKTGDLYVADAPLGLHVISPAGGLATKITDSVDGKPFKFLDGLDVDPTTGVVYFTSFSSRFSPIQVLIALGLKDATGKLYKYDPSTKVVTVLMEGLSGSAGCAVSSDGSFVLVSQFTKSNIKRYWIKGPKAGSSEDFTNSVSNPDNIKRIGSTGNFWVASVVNKIIVPTNPSAVKVNSNGEVLQTIPLKDKFGDTLLSEVNEFEGNLYIGTLTGPFAGILKLEKGSCPAT

SEQ ID NO: 4255 - DNA, 2016 bp, Arabidopsis thaliana
  misc_feature (1)..(2016): Ceres Seq. ID no. 13489529
tctttttttcctgagacttttccttgaatcctcttccctcctccttcttctctctctctcgtttctcaactaccgtctctctgcttcttctgttcccaaaaccggaaactttacttcgtggaattttcccttgtttctgaaatggaagacacaacatttaccaaagtgttcgttggaggattagcttgggaaacacacaaagtctctctcaggaattactttgaacagtttggtgacattgttgaagctgtcgttatcactgataaatctagtggtagatctaaaggctatggctttgttactttttgtgatccggaagcagctcagaaagcttgtgtagatccagctcctgttattgatggaagaagagctaattgtaatcttgctgcttttggtgttcagagatccaaaccttcttctcctattcatggacatgtaggaggaagaggcatgaaggtgactagccctttcaagacacactttgggaccgcggctactgctattccttccccacttccattctcccactacacacttccttacactaatccttttgggttctcttcatactcaatggattacaattaccccacgcagagctattacaatgtttatggaggggcaactgctcagcatccaatgtatggaagcggaccaatgactggtgtagcagcagcaccagcagcagggttctacccatatctccagtttgctgaaggaaatggacctgtcactggttatgctcccctccactaccccaaccacatgtttcactattctgctcccgggggaaactacccgcatcacaatggttcaccagtgtctcttgcaccttcaccagtcataccatcagtttgctttgcagttccacaggcttgaccatgaaggctcgtggttcatagttccatgatgctatgtaggggaccaattcatttaaatccttaaggcaaagctttgtttactactttcatccacatgcctctgaagtttcacaagacctgtggcctaaccatggttgcccttttccctttatgcttctaacccattagacaaagaagcccataatttggagtttgggcgtctttgcaagttctagttaagtctcacataggggtttaactaggaccatcttcatacacattactcatcttttcattttattcattgcattacctgctttctgaacgaaggtttcgttcaagatagcttgttcgagctgtagaagtaaacagttaccgtcttttgcacagtgcctcgcaaaggcaagcaattttgtagaaaaacttaaaaacttaggattggctgatcaacaagaaaggaaataaggatttcccgggaaaggcacaagaagtgaattgccaccacctggaagtgttgaagtagtgtgtgcaaaggtgtgcacactacttcacgctatatccattttaatgtgcagtcttaggattattagatctaggaccatgttgttacacattgtcttgtagtagaacgctagaacataaacttcctttgaggataaaggaattgctaacacatgtatattctcggtggctaagctttggagttatagccacacttgagctaacttagattaagatcatttttaagattcaaaatttagattgctcatcatatcttgaaccaaccccactaatggattgtggggttcttgcatttgcatgtatttttgcctcttgggagatattttggttccctttaggttcttctcataacaatcaaccaaaccagttgaccaaccatggttaggaatttcaggtgagaggtattcatcacctctttatctctcttttgtacttctttcctctatttcttcaagactaaaaactctctttttatgtaatttgttgttatatcttgtaagctgtgtgtttctgattctatgtaagaaaactaaaagctttcagtttccatcctcggtggttggaaaatgaaactgtgattgcaatattttactttgatctgatatataatcctcttgtatgaggttatgacaag

SEQ ID NO: 4256 - protein, 245 aa, Arabidopsis thaliana
  peptide (1)..(245): Ceres Seq. ID no. 13489530
  misc_feature (9)..(64): Pfam Name: a.k.a. RRM, RBD, or RNP domain Pfam Description: RNA recognition motif.
  misc_feature (1)..(245): NCBI GI NO: 14532532 NR Description: At1g33470/F10C21_14 [Arabidopsis thaliana]
  misc_feature (104)..(245): NCBI GI NO: 30692876 NR Description: RRM-containing protein -related
  misc_feature (1)..(233): NCBI GI NO: 34907334 NR Description: P0698A10.29
  misc_feature (3)..(226): NCBI GI NO: 18395177 NR Description: RNA recognition motif (RRM)-containing protein
  misc_feature (3)..(214): NCBI GI NO: 34905758 NR Description: similar to RNA-binding protein
  misc_feature (1)..(97): NCBI GI NO: 15217552 NR Description: RNA recognition motif (RRM)-containing protein
  misc_feature (3)..(186): NCBI GI NO: 25518372 NR Description: hypothetical protein F19G10
  misc_feature (1)..(237): NCBI GI NO: 15010636 NR Description: At1g20880/F9H16_14 [Arabidopsis thaliana]
  misc_feature (1)..(237): NCBI GI NO: 18394923 NR Description: RNA recognition motif (RRM)-containing protein
  misc_feature (1)..(237): NCBI GI NO: 23505939 NR Description: At1g20880/F9H16_14 [Arabidopsis thaliana]
MEDTTFTKVFVGGLAWETHKVSLRNYFEQFGDIVEAVVITDKSSGRSKGYGFVTFCDPEAAQKACVDPAPVIDGRRANCNLAAFGVQRSKPSSPIHGHVGGRGMKVTSPFKTHFGTAATAIPSPLPFSHYTLPYTNPFGFSSYSMDYNYPTQSYYNVYGGATAQHPMYGSGPMTGVAAAPAAGFYPYLQFAEGNGPVTGYAPLHYPNHMFHYSAPGGNYPHHNGSPVSLAPSPVIPSVCFAVPQA

SEQ ID NO: 4257 - protein, 142 aa, Arabidopsis thaliana
  peptide (1)..(142): Ceres Seq. ID no. 13489531
  misc_feature (1)..(142): NCBI GI NO: 14532532 NR Description: At1g33470/F10C21_14 [Arabidopsis thaliana]
  misc_feature (1)..(142): NCBI GI NO: 30692876 NR Description: RRM-containing protein -related
  misc_feature (1)..(130): NCBI GI NO: 34907334 NR Description: P0698A10.29
  misc_feature (1)..(123): NCBI GI NO: 18395177 NR Description: RNA recognition motif (RRM)-containing protein
  misc_feature (1)..(111): NCBI GI NO: 34905758 NR Description: similar to RNA-binding protein
  misc_feature (1)..(83): NCBI GI NO: 25518372 NR Description: hypothetical protein F19G10
  misc_feature (1)..(134): NCBI GI NO: 15010636 NR Description: At1g20880/F9H16_14 [Arabidopsis thaliana]
  misc_feature (1)..(134): NCBI GI NO: 18394923 NR Description: RNA recognition motif (RRM)-containing protein
  misc_feature (1)..(134): NCBI GI NO: 23505939 NR Description: At1g20880/F9H16_14 [Arabidopsis thaliana]
  misc_feature (1)..(142): NCBI GI NO: 22330665 NR Description: RNA recognition motif (RRM)-containing protein
MKVTSPFKTHFGTAATAIPSPLPFSHYTLPYTNPFGFSSYSMDYNYPTQSYYNVYGGATAQHPMYGSGPMTGVAAAPAAGFYPYLQFAEGNGPVTGYAPLHYPNHMFHYSAPGGNYPHHNGSPVSLAPSPVIPSVCFAVPQA

SEQ ID NO: 4258 - DNA, 1419 bp, Arabidopsis thaliana
  misc_feature (1)..(1419): Ceres Seq. ID no. 12325621
cttttctattttattggcttctcaaaacgaaataacgaaatcgcctcctcttcttctcctcctcgacctggaaatcaatctttcgccgccgagttcttctctctgcggcggagaatcaattagcaatctccaggtttttcacttcaaaacctttccttttattatcaaattttgttcctttttagctttaggatttcatatttctagaacccagaagaaactcttgcccataacatctctatatttattggtatagaattaggtgagggaaaagaggatggctttgatcggaaaatccgagagattctctgctgattttgtgatgggtggtgctgcagccattgttgccaaatctgcagctgctccaatcgaaagggtgaagcttttactgcagaatcaaggggagatgataaagactggacatctcataagaccttacactggtttgggtaattgctttaccagaatctatagagaagaaggtgttttgtccttttggagaggaaaccaagccaatgtcatacgatatttccctacacaggcttccaactttgcatttaaaggttacttcaagaaccttcttggatgttcgaaagagaaagatggttacttgaagtggtttgctggaaatgtagcttcgggaagtgctgctggagcaacaacttccttgtttctgtaccatttggattatgcgcggacccgtttaggcactgatgcaaaggaatgttctgttaatggcaagagacagtttaaagggatgatcgatgtgtatcgtaaaactttgtcaagtgacggtattaaaggtctttaccgtggatttggtgtgtcaatagtgggaatcactctttaccgaggaatgtattttgggatgtacgacaccatcaaacccattgtgttagtcggttccttagagggaaacttcttggctagttttctattgggttggagtattactacctctgcaggcgtcattgcttacccttttgacacacttaggaggagaatgatgcttacatcaggacaacctgttaaataccggaacaccattcatgccttaagagagatattgaagtcggaagggttctatgcgctatatagaggagttactgcgaacatgcttcttggagtagcaggagcaggagtgcttgcgggatatgatcagcttcaccagattgcttataagcattgggttcagtagttttgaaccaaacccgaaacgatgacaatgaaagctgagctcaaaaagagaaggttagtaaacaccaagaagtctcacttgctttccaatgtattgtgttagttaacagaatctcggaatcattaaccgattgaaccagcagaagatagggaaaattgttcatagttcttgtgcagtaacattgttatatcaataatccaagaaaggcctatttgattttg

SEQ ID NO: 4259 - protein, 306 aa, Arabidopsis thaliana
  peptide (1)..(306): Ceres Seq. ID no. 12325622
  misc_feature (1)..(306): NCBI GI NO: 18418286 NR Description: ADP/ATP translocase-like protein
  misc_feature (16)..(306): NCBI GI NO: 21593088 NR Description: ADP/ATP translocase-like protein
  misc_feature (1)..(304): NCBI GI NO: 11357161 NR Description: ADP/ATP translocase-like protein
  misc_feature (6)..(301): NCBI GI NO: 19112115 NR Description: adp,atp carrier protein
  misc_feature (10)..(299): NCBI GI NO: 15235280 NR Description: mitochondrial ADP,ATP carrier protein, putative
  misc_feature (8)..(301): NCBI GI NO: 399015 NR Description: ADP,ATP carrier protein, mitochondrial precursor
  misc_feature (8)..(301): NCBI GI NO: 485517 NR Description: ADP,ATP carrier protein - rice
  misc_feature (8)..(301): NCBI GI NO: 113460 NR Description: ADP
  misc_feature (10)..(301): NCBI GI NO: 2780194 NR Description: adenine nucleotide translocator [Lupinus albus]
  misc_feature (10)..(301): NCBI GI NO: 3334115 NR Description: ADP
MALIGKSERFSADFVMGGAAAIVAKSAAAPIERVKLLLQNQGEMIKTGHLIRPYTGLGNCFTRIYREEGVLSFWRGNQANVIRYFPTQASNFAFKGYFKNLLGCSKEKDGYLKWFAGNVASGSAAGATTSLFLYHLDYARTRLGTDAKECSVNGKRQFKGMIDVYRKTLSSDGIKGLYRGFGVSIVGITLYRGMYFGMYDTIKPIVLVGSLEGNFLASFLLGWSITTSAGVIAYPFDTLRRRMMLTSGQPVKYRNTIHALREILKSEGFYALYRGVTANMLLGVAGAGVLAGYDQLHQIAYKHWVQ

SEQ ID NO: 4260 - protein, 291 aa, Arabidopsis thaliana
  peptide (1)..(291): Ceres Seq. ID no. 12325623
  misc_feature (1)..(291): NCBI GI NO: 18418286 NR Description: ADP/ATP translocase-like protein
  misc_feature (1)..(291): NCBI GI NO: 21593088 NR Description: ADP/ATP translocase-like protein
  misc_feature (1)..(289): NCBI GI NO: 11357161 NR Description: ADP/ATP translocase-like protein
  misc_feature (1)..(286): NCBI GI NO: 19112115 NR Description: adp,atp carrier protein
  misc_feature (1)..(284): NCBI GI NO: 15235280 NR Description: mitochondrial ADP,ATP carrier protein, putative
  misc_feature (1)..(286): NCBI GI NO: 399015 NR Description: ADP,ATP carrier protein, mitochondrial precursor
  misc_feature (1)..(286): NCBI GI NO: 485517 NR Description: ADP,ATP carrier protein - rice
  misc_feature (1)..(286): NCBI GI NO: 113460 NR Description: ADP
  misc_feature (1)..(286): NCBI GI NO: 2780194 NR Description: adenine nucleotide translocator [Lupinus albus]
  misc_feature (1)..(286): NCBI GI NO: 3334115 NR Description: ADP
MGGAAAIVAKSAAAPIERVKLLLQNQGEMIKTGHLIRPYTGLGNCFTRIYREEGVLSFWRGNQANVIRYFPTQASNFAFKGYFKNLLGCSKEKDGYLKWFAGNVASGSAAGATTSLFLYHLDYARTRLGTDAKECSVNGKRQFKGMIDVYRKTLSSDGIKGLYRGFGVSIVGITLYRGMYFGMYDTIKPIVLVGSLEGNFLASFLLGWSITTSAGVIAYPFDTLRRRMMLTSGQPVKYRNTIHALREILKSEGFYALYRGVTANMLLGVAGAGVLAGYDQLHQIAYKHWVQ

SEQ ID NO: 4261 - protein, 263 aa, Arabidopsis thaliana
  peptide (1)..(263): Ceres Seq. ID no. 12325624
  misc_feature (1)..(263): NCBI GI NO: 18418286 NR Description: ADP/ATP translocase-like protein
  misc_feature (1)..(263): NCBI GI NO: 21593088 NR Description: ADP/ATP translocase-like protein
  misc_feature (1)..(261): NCBI GI NO: 11357161 NR Description: ADP/ATP translocase-like protein
  misc_feature (1)..(258): NCBI GI NO: 19112115 NR Description: adp,atp carrier protein
  misc_feature (1)..(256): NCBI GI NO: 15235280 NR Description: mitochondrial ADP,ATP carrier protein, putative
  misc_feature (1)..(258): NCBI GI NO: 399015 NR Description: ADP,ATP carrier protein, mitochondrial precursor
  misc_feature (1)..(258): NCBI GI NO: 485517 NR Description: ADP,ATP carrier protein - rice
  misc_feature (1)..(258): NCBI GI NO: 113460 NR Description: ADP
  misc_feature (1)..(258): NCBI GI NO: 2780194 NR Description: adenine nucleotide translocator [Lupinus albus]
  misc_feature (1)..(258): NCBI GI NO: 3334115 NR Description: ADP
MIKTGHLIRPYTGLGNCFTRIYREEGVLSFWRGNQANVIRYFPTQASNFAFKGYFKNLLGCSKEKDGYLKWFAGNVASGSAAGATTSLFLYHLDYARTRLGTDAKECSVNGKRQFKGMIDVYRKTLSSDGIKGLYRGFGVSIVGITLYRGMYFGMYDTIKPIVLVGSLEGNFLASFLLGWSITTSAGVIAYPFDTLRRRMMLTSGQPVKYRNTIHALREILKSEGFYALYRGVTANMLLGVAGAGVLAGYDQLHQIAYKHWVQ

SEQ ID NO: 4262 - DNA, 885 bp, Arabidopsis thaliana
  misc_feature (1)..(885): Ceres Seq. ID no. 12558291
attagagagatctgatctttccccaattccataacccgaaaaatggaagaaatcgccgataaaaccttcttccgatactgtctcctcactcttattttcgccggcccaccaaccgccgtccttctgaaattcctccaagctccttacggtaaacacaaccgtaccggatggggtcccaccgtatctccaccgattgcttggttcgtcatggagagcccaaccttgtggctcactctcctcctcttcccctttggtcgtcacgctctcaaccctaaatctctacttctattctctccttatctcattcattacttccaccgcaccatcatttaccctcttcgcctcttccgcagctccttccccgccggtaaaaacggatttccgatcaccatcgccgccttggctttcacctttaatctcctcaatggttatatccaggcgaggtgggtttcgcattacaaggatgactacgaagacggaaactggttctggtggcggtttgttatcggtatggtggttttcataaccggcatgtatataaatatcacgtcggaccggactttggtacgattgaagaaagagaaccggggaggttatgtgataccgagaggaggctggttcgagttggtaagctgtccgaattattttggagaggcgattgagtggttgggctgggctgttatgacttggtcttgggccggtattggattttttctgtacacgtgttccaatttgtttccgcgtgcacgtgcgagtcacaagtggtacattgccaagttcaaggaagagtatcccaagactcgtaaagctgttattccttttgtgtactgagaattgagaaagttgaaaactagtttatcatatgttatgtgtcaatttgtttcc

SEQ ID NO: 4263 - protein, 262 aa, Arabidopsis thaliana
  peptide (1)..(262): Ceres Seq. ID no. 12558292
  misc_feature (111)..(262): Pfam Name: Pfam Description:  3-oxo-5-alpha-steroid 4-dehydrogenase
  misc_feature (1)..(262): NCBI GI NO: 15224430 NR Description: 3-oxo-5-alpha-steroid 4-dehydrogenase
  misc_feature (1)..(262): NCBI GI NO: 1280611 NR Description: steroid reductase DET2 [Arabidopsis thaliana]
  misc_feature (5)..(262): NCBI GI NO: 23476464 NR Description: steroid 5-alpha-reductase [Gossypium hirsutum]
  misc_feature (2)..(262): NCBI GI NO: 11493760 NR Description: putative steroid reductase [Glycine max]
  misc_feature (1)..(262): NCBI GI NO: 34850849 NR Description: steroid 5alpha-reductase [Ipomoea nil]
  misc_feature (6)..(262): NCBI GI NO: 34908346 NR Description: putative steroid reductase DET2
  misc_feature (31)..(262): NCBI GI NO: 17567677 NR Description: 3-oxo-5-alpha-steroid 4- dehydrogenase family member
  misc_feature (13)..(261): NCBI GI NO: 206838 NR Description: steroid 5 alpha-reductase (EC 1.3.99.5)
  misc_feature (13)..(261): NCBI GI NO: 25742565 NR Description: steroid 5 alpha-reductase 1
  misc_feature (35)..(262): NCBI GI NO: 2498887 NR Description: 3-oxo-5-alpha-steroid 4-dehydrogenase 1
MEEIADKTFFRYCLLTLIFAGPPTAVLLKFLQAPYGKHNRTGWGPTVSPPIAWFVMESPTLWLTLLLFPFGRHALNPKSLLLFSPYLIHYFHRTIIYPLRLFRSSFPAGKNGFPITIAALAFTFNLLNGYIQARWVSHYKDDYEDGNWFWWRFVIGMVVFITGMYINITSDRTLVRLKKENRGGYVIPRGGWFELVSCPNYFGEAIEWLGWAVMTWSWAGIGFFLYTCSNLFPRARASHKWYIAKFKEEYPKTRKAVIPFVY

SEQ ID NO: 4264 - protein, 207 aa, Arabidopsis thaliana
  peptide (1)..(207): Ceres Seq. ID no. 12558293
  misc_feature (56)..(207): Pfam Name: Pfam Description:  3-oxo-5-alpha-steroid 4-dehydrogenase
  misc_feature (1)..(207): NCBI GI NO: 15224430 NR Description: 3-oxo-5-alpha-steroid 4-dehydrogenase
  misc_feature (1)..(207): NCBI GI NO: 1280611 NR Description: steroid reductase DET2 [Arabidopsis thaliana]
  misc_feature (1)..(207): NCBI GI NO: 23476464 NR Description: steroid 5-alpha-reductase [Gossypium hirsutum]
  misc_feature (1)..(207): NCBI GI NO: 11493760 NR Description: putative steroid reductase [Glycine max]
  misc_feature (1)..(207): NCBI GI NO: 34850849 NR Description: steroid 5alpha-reductase [Ipomoea nil]
  misc_feature (1)..(207): NCBI GI NO: 34908346 NR Description: putative steroid reductase DET2
  misc_feature (1)..(207): NCBI GI NO: 17567677 NR Description: 3-oxo-5-alpha-steroid 4- dehydrogenase family member
  misc_feature (1)..(206): NCBI GI NO: 206838 NR Description: steroid 5 alpha-reductase (EC 1.3.99.5)
  misc_feature (1)..(206): NCBI GI NO: 25742565 NR Description: steroid 5 alpha-reductase 1
  misc_feature (1)..(207): NCBI GI NO: 2498887 NR Description: 3-oxo-5-alpha-steroid 4-dehydrogenase 1
MESPTLWLTLLLFPFGRHALNPKSLLLFSPYLIHYFHRTIIYPLRLFRSSFPAGKNGFPITIAALAFTFNLLNGYIQARWVSHYKDDYEDGNWFWWRFVIGMVVFITGMYINITSDRTLVRLKKENRGGYVIPRGGWFELVSCPNYFGEAIEWLGWAVMTWSWAGIGFFLYTCSNLFPRARASHKWYIAKFKEEYPKTRKAVIPFVY

SEQ ID NO: 4265 - DNA, 1251 bp, Arabidopsis thaliana
  misc_feature (1)..(1251): Ceres Seq. ID no. 13488723
aaagaaagaaagaaaaaaaagaagagaaacggccgaatcttcataaattccgccatctgttaagctcaatcgccgcctaaactccggcgactctctcgaagatatttggtgattgaggtgactcggaagagagtgagagagagagatggatgatagaggaggatcgttcgtagcagtgagaaggatttcacaaggtctagaacgaggaagtgtttatcattcttcttctgctgaggttgtagctggatcggcagcgtggttaggccgtggcctttcctgtgtttgtgttcagggtagagacggtgaccctcgtccttcatttgatctaacgcctgctcaggaggaatgcctgcagaggttgcaaagccgcattgatgttgcttatgacagctcaatacctcagcatcaggaagctctaaaggatctttggaaacttgcatttcctgaagaagagctacacggaattgtatctgatcagtggaaggaaatgggttggcagggaaaagatccatcgacagattttaggggtggtggttttatttctctcgaaaacttgttgtacttcgctaggaaattcccgaaatctttccacggccttctgcggaaacaggttggcgatcgttctgtgtgggaatacccctttgctgttgctggcatcaatataacattcatgctcatccagatgcttgaccttgaagcagtgaaaccacgaagtattgttggggaaacatttctaagattcctttcggtgaacgagtctgcgtttgaccttctttattgcattgccttcaagctaatggatcagcaatggctatccatgcgtgcttcatacatggagtttaacactgtgatgaaatcaacaaggcggcaactggagagagagattatgattgaagacattacaagtctcgaagatttgccatcatacagtcttctcagtcaatagcaaatagcttaccaaaaactactttgtaagtagaaagatctaacagctcagaaaccctatatcaaagctaaaacaacagcagagcaagtaagcaagcaaaaaagaagacaaggtttctctctctctcgctcttcactccatcttcctcgatattagtgttggttccatgaaatttgggttgttatttctatgaaaccagggtcagattttgtttcttatggggtcagattttctaacttgtggtgcttgtaaaacgttgttggttagttggtgttttgggctaataaatcatttggttacatttc

SEQ ID NO: 4266 - protein, 266 aa, Arabidopsis thaliana
  peptide (1)..(266): Ceres Seq. ID no. 13488724
  misc_feature (85)..(246): Pfam Name: Pfam Description:  Protein of unknown function, DUF609
  misc_feature (1)..(266): NCBI GI NO: 18411543 NR Description: expressed protein [Arabidopsis thaliana]
  misc_feature (1)..(266): NCBI GI NO: 11288393 NR Description: hypothetical protein F27H5
  misc_feature (1)..(266): NCBI GI NO: 18406626 NR Description: expressed protein [Arabidopsis thaliana]
  misc_feature (1)..(266): NCBI GI NO: 15810014 NR Description: At2g44770/F16B22.26 [Arabidopsis thaliana]
  misc_feature (1)..(266): NCBI GI NO: 7485547 NR Description: hypothetical protein At2g44770
  misc_feature (1)..(266): NCBI GI NO: 14140119 NR Description: putative protein [Oryza sativa]
  misc_feature (1)..(266): NCBI GI NO: 38345956 NR Description: OSJNBb0038F03.14
  misc_feature (33)..(265): NCBI GI NO: 18408759 NR Description: expressed protein [Arabidopsis thaliana]
  misc_feature (28)..(266): NCBI GI NO: 15218859 NR Description: hypothetical protein [Arabidopsis thaliana]
  misc_feature (29)..(264): NCBI GI NO: 18396599 NR Description: expressed protein [Arabidopsis thaliana]
MDDRGGSFVAVRRISQGLERGSVYHSSSAEVVAGSAAWLGRGLSCVCVQGRDGDPRPSFDLTPAQEECLQRLQSRIDVAYDSSIPQHQEALKDLWKLAFPEEELHGIVSDQWKEMGWQGKDPSTDFRGGGFISLENLLYFARKFPKSFHGLLRKQVGDRSVWEYPFAVAGINITFMLIQMLDLEAVKPRSIVGETFLRFLSVNESAFDLLYCIAFKLMDQQWLSMRASYMEFNTVMKSTRRQLEREIMIEDITSLEDLPSYSLLSQ

SEQ ID NO: 4267 - protein, 152 aa, Arabidopsis thaliana
  peptide (1)..(152): Ceres Seq. ID no. 13488725
  misc_feature (1)..(132): Pfam Name: Pfam Description:  Protein of unknown function, DUF609
  misc_feature (1)..(152): NCBI GI NO: 18411543 NR Description: expressed protein [Arabidopsis thaliana]
  misc_feature (1)..(152): NCBI GI NO: 11288393 NR Description: hypothetical protein F27H5
  misc_feature (1)..(152): NCBI GI NO: 18406626 NR Description: expressed protein [Arabidopsis thaliana]
  misc_feature (1)..(152): NCBI GI NO: 15810014 NR Description: At2g44770/F16B22.26 [Arabidopsis thaliana]
  misc_feature (1)..(152): NCBI GI NO: 7485547 NR Description: hypothetical protein At2g44770
  misc_feature (1)..(152): NCBI GI NO: 14140119 NR Description: putative protein [Oryza sativa]
  misc_feature (1)..(152): NCBI GI NO: 38345956 NR Description: OSJNBb0038F03.14
  misc_feature (1)..(151): NCBI GI NO: 18408759 NR Description: expressed protein [Arabidopsis thaliana]
  misc_feature (1)..(152): NCBI GI NO: 15218859 NR Description: hypothetical protein [Arabidopsis thaliana]
  misc_feature (1)..(150): NCBI GI NO: 18396599 NR Description: expressed protein [Arabidopsis thaliana]
MGWQGKDPSTDFRGGGFISLENLLYFARKFPKSFHGLLRKQVGDRSVWEYPFAVAGINITFMLIQMLDLEAVKPRSIVGETFLRFLSVNESAFDLLYCIAFKLMDQQWLSMRASYMEFNTVMKSTRRQLEREIMIEDITSLEDLPSYSLLSQ

SEQ ID NO: 4268 - DNA, 1026 bp, Arabidopsis thaliana
  misc_feature (1)..(1026): Ceres Seq. ID no. 13494105
gcgggtggcattgattcatctgatcaatgacaaaggataagaaaaactaaaagagagcaaattcagaagctgagaatatgaagacggagcttgaagaagaagaagaagaagaatggagatccgttcacgaggttttattaatcgttcttccttatcttcattctctgttcgagcttctctctatgattcgcgtttcgcgatctctcagagacgcgatcagagacgaaaccgcgttatggacaaaactcgttattgaaccaccgttgagctctcgtctaaccgatgatattctatcggagttcagttccaaatccgccggaaagctgaaaactctgattctccggcaatgtcttatggtcaccaacaagggactccgtcgtgttgtggatgctaatcctctcatcactaagataattgtgcctggatgctctggattgactcctgaaggaatcatggaatgtgttgaaagcttgtctaagaacaatcataaactagagacacttcacatcaatggcgtcaatggctttaccaaacaacatctctcagcactgtatacttacctttcttccgagggaacgattgacctcgaggtctgtcccaaatgcgatgaagtaaggatgattccgtcttgctcaagagaatcatgtaaccagaagcaacgcaagtgccgtggatgctggctttgtatccctagatgtgcagagtgcgcagtgtgccttgttggttcagatactgagagtcaagaagcagcgtgtggtaatgatgatgttctgtgtcttgaatgttggcttgtgcttcccaagtgcagattctgcaataaaccatattgcactaatcacagtagtcgtcgacatgagattgcaatcactgatgctgcatctcggccttcgtttgaatgtgaagcttgttactatagggcaggtacaaacccatatgaagtcgactatcaaatctaaacaaacactttgttgtctgcaactttgtctattttgtatatgacaagcttggattgtgaaatattcagcc

SEQ ID NO: 4269 - protein, 292 aa, Arabidopsis thaliana
  peptide (1)..(292): Ceres Seq. ID no. 13494106
  misc_feature (1)..(292): NCBI GI NO: 18379265 NR Description: expressed protein [Arabidopsis thaliana]
  misc_feature (1)..(292): NCBI GI NO: 21536590 NR Description: unknown [Arabidopsis thaliana]
  misc_feature (65)..(277): NCBI GI NO: 38175497 NR Description: F-box protein family-like protein
  misc_feature (17)..(158): NCBI GI NO: 38175497 NR Description: F-box protein family-like protein
  misc_feature (17)..(251): NCBI GI NO: 18405307 NR Description: expressed protein [Arabidopsis thaliana]
  misc_feature (1)..(248): NCBI GI NO: 18404757 NR Description: F-box protein family [Arabidopsis thaliana]
  misc_feature (1)..(248): NCBI GI NO: 22655121 NR Description: expressed protein [Arabidopsis thaliana]
  misc_feature (17)..(167): NCBI GI NO: 38345348 NR Description: OSJNBa0081L15.21
  misc_feature (66)..(242): NCBI GI NO: 18404757 NR Description: F-box protein family [Arabidopsis thaliana]
  misc_feature (66)..(242): NCBI GI NO: 22655121 NR Description: expressed protein [Arabidopsis thaliana]
MKTELEEEEEEEWRSVHEVLLIVLPYLHSLFELLSMIRVSRSLRDAIRDETALWTKLVIEPPLSSRLTDDILSEFSSKSAGKLKTLILRQCLMVTNKGLRRVVDANPLITKIIVPGCSGLTPEGIMECVESLSKNNHKLETLHINGVNGFTKQHLSALYTYLSSEGTIDLEVCPKCDEVRMIPSCSRESCNQKQRKCRGCWLCIPRCAECAVCLVGSDTESQEAACGNDDVLCLECWLVLPKCRFCNKPYCTNHSSRRHEIAITDAASRPSFECEACYYRAGTNPYEVDYQI

SEQ ID NO: 4270 - protein, 257 aa, Arabidopsis thaliana
  peptide (1)..(257): Ceres Seq. ID no. 13494107
  misc_feature (1)..(257): NCBI GI NO: 18379265 NR Description: expressed protein [Arabidopsis thaliana]
  misc_feature (1)..(257): NCBI GI NO: 21536590 NR Description: unknown [Arabidopsis thaliana]
  misc_feature (30)..(242): NCBI GI NO: 38175497 NR Description: F-box protein family-like protein
  misc_feature (1)..(123): NCBI GI NO: 38175497 NR Description: F-box protein family-like protein
  misc_feature (1)..(216): NCBI GI NO: 18405307 NR Description: expressed protein [Arabidopsis thaliana]
  misc_feature (1)..(213): NCBI GI NO: 18404757 NR Description: F-box protein family [Arabidopsis thaliana]
  misc_feature (1)..(213): NCBI GI NO: 22655121 NR Description: expressed protein [Arabidopsis thaliana]
  misc_feature (1)..(132): NCBI GI NO: 38345348 NR Description: OSJNBa0081L15.21
  misc_feature (31)..(207): NCBI GI NO: 18404757 NR Description: F-box protein family [Arabidopsis thaliana]
  misc_feature (31)..(207): NCBI GI NO: 22655121 NR Description: expressed protein [Arabidopsis thaliana]
MIRVSRSLRDAIRDETALWTKLVIEPPLSSRLTDDILSEFSSKSAGKLKTLILRQCLMVTNKGLRRVVDANPLITKIIVPGCSGLTPEGIMECVESLSKNNHKLETLHINGVNGFTKQHLSALYTYLSSEGTIDLEVCPKCDEVRMIPSCSRESCNQKQRKCRGCWLCIPRCAECAVCLVGSDTESQEAACGNDDVLCLECWLVLPKCRFCNKPYCTNHSSRRHEIAITDAASRPSFECEACYYRAGTNPYEVDYQI

SEQ ID NO: 4271 - protein, 200 aa, Arabidopsis thaliana
  peptide (1)..(200): Ceres Seq. ID no. 13494108
  misc_feature (1)..(200): NCBI GI NO: 18379265 NR Description: expressed protein [Arabidopsis thaliana]
  misc_feature (1)..(200): NCBI GI NO: 21536590 NR Description: unknown [Arabidopsis thaliana]
  misc_feature (1)..(185): NCBI GI NO: 38175497 NR Description: F-box protein family-like protein
  misc_feature (1)..(66): NCBI GI NO: 38175497 NR Description: F-box protein family-like protein
  misc_feature (1)..(159): NCBI GI NO: 18405307 NR Description: expressed protein [Arabidopsis thaliana]
  misc_feature (1)..(156): NCBI GI NO: 18404757 NR Description: F-box protein family [Arabidopsis thaliana]
  misc_feature (1)..(156): NCBI GI NO: 22655121 NR Description: expressed protein [Arabidopsis thaliana]
  misc_feature (1)..(75): NCBI GI NO: 38345348 NR Description: OSJNBa0081L15.21
  misc_feature (1)..(150): NCBI GI NO: 18404757 NR Description: F-box protein family [Arabidopsis thaliana]
  misc_feature (1)..(150): NCBI GI NO: 22655121 NR Description: expressed protein [Arabidopsis thaliana]
MVTNKGLRRVVDANPLITKIIVPGCSGLTPEGIMECVESLSKNNHKLETLHINGVNGFTKQHLSALYTYLSSEGTIDLEVCPKCDEVRMIPSCSRESCNQKQRKCRGCWLCIPRCAECAVCLVGSDTESQEAACGNDDVLCLECWLVLPKCRFCNKPYCTNHSSRRHEIAITDAASRPSFECEACYYRAGTNPYEVDYQI

SEQ ID NO: 4272 - DNA, 1285 bp, Arabidopsis thaliana
  misc_feature (1)..(1285): Ceres Seq. ID no. 12558302
agattgaagtctcgcgaacagtcttgttgggttttgggttttgagagacagagaggttttggcttccgggtcgttagtgtttgatcatcttcgtatctcagaagggtgaactttgttgttttggcttttgcgtactgttgaatcagcttttccagatgcctcgaagaccatcatcaggaagaagagtgttaaagcatcagcctttaacattttcaccgtttatgcggttactttcctttgcttcaatggctaggcgtgatttgtctcatcctgaagattgtcaatgttctgatgaagatatatcttttgatgaaaagcaaaagatccctaatttaccaagaaaagggaaagaagaacaagtctcggactcgtctgatgaagaagattctcaggaagatgtccaagcagactttgagttctttgatcctaaacctacagactttcatggtgttaagatcctgttacaaaactatctcgatgacaaggagtgggatttgagcagttttgttgattgcatattggagcaaacaactgtaggaactgttgtgaaagtagctgatgatgaggatgagtcagtatttgctcttgtcactgctcttaacatggcaagagataaggacaacaagtgttttagagagttaaaagagtttcttcgtaaagtttgttctgaaaagaatatagcgaataatctagaaatgctcttagagaaaaaggcacaagatgttggtttattggtatctcaaagagtgatgaatcttcctccacaacttcttcctccactttatgatggattgttcgatgaagtctcatgggcaatcgaagatgagcctacagaaaagcttcgaagatcattccgttttaagtcatatcttctagttaccaagatttacaagctgaagaatcctaagcagagaaaacctcgacatggtgaagaagacattgaagacacagtatttcttaagcctgaagatgaactctttctcgagcttagctcttggtccttcacattccctatgcgctcacagctcgttacttcccaagaaatgaagaattatcagctgatgggtttagtgatggccgtggaagcaaacaagattcctaaattcagacagatgttgaactctctcattgattaacaatgatgaacatcttcttcttaaagattcaattaacggtttagttgtaatcgattcccgccagttttgtttgattcggttaaggattattgaggcttgttattacccaaactgtggtttgttttgtctaaaacgatgaggttcttatt

SEQ ID NO: 4273 - protein, 326 aa, Arabidopsis thaliana
  peptide (1)..(326): Ceres Seq. ID no. 12558303
  misc_feature (1)..(326): NCBI GI NO: 18406554 NR Description: Expressed protein; protein id: At2g44510
  misc_feature (1)..(326): NCBI GI NO: 7486435 NR Description: hypothetical protein At2g44510
  misc_feature (70)..(325): NCBI GI NO: 29126338 NR Description: putative p21 C-terminal-binding protein
  misc_feature (108)..(247): NCBI GI NO: 20258819 NR Description: unknown protein [Arabidopsis thaliana]
  misc_feature (55)..(86): NCBI GI NO: 20258819 NR Description: unknown protein [Arabidopsis thaliana]
  misc_feature (48)..(249): NCBI GI NO: 15237534 NR Description: putative protein; protein id: At5g03830.1
  misc_feature (277)..(326): NCBI GI NO: 15237534 NR Description: putative protein; protein id: At5g03830.1
  misc_feature (70)..(249): NCBI GI NO: 29126339 NR Description: putative p21 C-terminal-binding protein
  misc_feature (48)..(305): NCBI GI NO: 19075196 NR Description: hypothetical protein [Schizosaccharomyces pombe]
  misc_feature (64)..(305): NCBI GI NO: 40739074 NR Description: hypothetical protein AN6865.2
MPRRPSSGRRVLKHQPLTFSPFMRLLSFASMARRDLSHPEDCQCSDEDISFDEKQKIPNLPRKGKEEQVSDSSDEEDSQEDVQADFEFFDPKPTDFHGVKILLQNYLDDKEWDLSSFVDCILEQTTVGTVVKVADDEDESVFALVTALNMARDKDNKCFRELKEFLRKVCSEKNIANNLEMLLEKKAQDVGLLVSQRVMNLPPQLLPPLYDGLFDEVSWAIEDEPTEKLRRSFRFKSYLLVTKIYKLKNPKQRKPRHGEEDIEDTVFLKPEDELFLELSSWSFTFPMRSQLVTSQEMKNYQLMGLVMAVEANKIPKFRQMLNSLID

SEQ ID NO: 4274 - protein, 304 aa, Arabidopsis thaliana
  peptide (1)..(304): Ceres Seq. ID no. 12558304
  misc_feature (1)..(304): NCBI GI NO: 18406554 NR Description: Expressed protein; protein id: At2g44510
  misc_feature (1)..(304): NCBI GI NO: 7486435 NR Description: hypothetical protein At2g44510
  misc_feature (48)..(303): NCBI GI NO: 29126338 NR Description: putative p21 C-terminal-binding protein
  misc_feature (86)..(225): NCBI GI NO: 20258819 NR Description: unknown protein [Arabidopsis thaliana]
  misc_feature (33)..(64): NCBI GI NO: 20258819 NR Description: unknown protein [Arabidopsis thaliana]
  misc_feature (26)..(227): NCBI GI NO: 15237534 NR Description: putative protein; protein id: At5g03830.1
  misc_feature (255)..(304): NCBI GI NO: 15237534 NR Description: putative protein; protein id: At5g03830.1
  misc_feature (48)..(227): NCBI GI NO: 29126339 NR Description: putative p21 C-terminal-binding protein
  misc_feature (26)..(283): NCBI GI NO: 19075196 NR Description: hypothetical protein [Schizosaccharomyces pombe]
  misc_feature (42)..(283): NCBI GI NO: 40739074 NR Description: hypothetical protein AN6865.2
MRLLSFASMARRDLSHPEDCQCSDEDISFDEKQKIPNLPRKGKEEQVSDSSDEEDSQEDVQADFEFFDPKPTDFHGVKILLQNYLDDKEWDLSSFVDCILEQTTVGTVVKVADDEDESVFALVTALNMARDKDNKCFRELKEFLRKVCSEKNIANNLEMLLEKKAQDVGLLVSQRVMNLPPQLLPPLYDGLFDEVSWAIEDEPTEKLRRSFRFKSYLLVTKIYKLKNPKQRKPRHGEEDIEDTVFLKPEDELFLELSSWSFTFPMRSQLVTSQEMKNYQLMGLVMAVEANKIPKFRQMLNSLID

SEQ ID NO: 4275 - protein, 296 aa, Arabidopsis thaliana
  peptide (1)..(296): Ceres Seq. ID no. 12558305
  misc_feature (1)..(296): NCBI GI NO: 18406554 NR Description: Expressed protein; protein id: At2g44510
  misc_feature (1)..(296): NCBI GI NO: 7486435 NR Description: hypothetical protein At2g44510
  misc_feature (40)..(295): NCBI GI NO: 29126338 NR Description: putative p21 C-terminal-binding protein
  misc_feature (78)..(217): NCBI GI NO: 20258819 NR Description: unknown protein [Arabidopsis thaliana]
  misc_feature (25)..(56): NCBI GI NO: 20258819 NR Description: unknown protein [Arabidopsis thaliana]
  misc_feature (18)..(219): NCBI GI NO: 15237534 NR Description: putative protein; protein id: At5g03830.1
  misc_feature (247)..(296): NCBI GI NO: 15237534 NR Description: putative protein; protein id: At5g03830.1
  misc_feature (40)..(219): NCBI GI NO: 29126339 NR Description: putative p21 C-terminal-binding protein
  misc_feature (18)..(275): NCBI GI NO: 19075196 NR Description: hypothetical protein [Schizosaccharomyces pombe]
  misc_feature (34)..(275): NCBI GI NO: 40739074 NR Description: hypothetical protein AN6865.2
MARRDLSHPEDCQCSDEDISFDEKQKIPNLPRKGKEEQVSDSSDEEDSQEDVQADFEFFDPKPTDFHGVKILLQNYLDDKEWDLSSFVDCILEQTTVGTVVKVADDEDESVFALVTALNMARDKDNKCFRELKEFLRKVCSEKNIANNLEMLLEKKAQDVGLLVSQRVMNLPPQLLPPLYDGLFDEVSWAIEDEPTEKLRRSFRFKSYLLVTKIYKLKNPKQRKPRHGEEDIEDTVFLKPEDELFLELSSWSFTFPMRSQLVTSQEMKNYQLMGLVMAVEANKIPKFRQMLNSLID

SEQ ID NO: 4276 - DNA, 1547 bp, Arabidopsis thaliana
  misc_feature (1)..(1547): Ceres Seq. ID no. 12703922
aagtcagcaactcacttccgtctctctccccctcaaaaccagcagaaccagtctcactcgatccttaatccaccatggcaacgacttctcgccggtttaccaccggtttattcgcctcgatcacctcggtcaaatcccattccgcaaaccgacctcaatccatctccctaatccgtcgaaaccacatcgatcatcgtctaccgttgatcgttccaagttccaggcggtggattatccaagcggcgagatcctgggatggatttgacgacggagctgaggcggagattaagaagccaggcgcgtatggttacgcgatcggcgataacgagatcgaagggagcagtagtagtactgtccatgtgatcgacggagagcatgttaagacggcggagatagtgatatgggcggcggttacggcggcgtttggcgtcggaaacagagtgatgtataagctcgcgttagttccactcaaggagtatcctttcttccttgcgcaactctccaccttcgggtatgtagctgtatattatactatcttgtattttcgatatcgtgctggaactgtcacagatgcaatgctctcggtgccaaaatctccatttttaattgttggcatcttagaggctctagctgcagctgctggcatggcagccgcagcgaatctttcggggccatcaacgacagttttatctcagacatttcttgtctggcaaattttcttctccattatttttctcgggaggagatatagcgtaaaccaaatactcggatgtactcttgtagctctcggtgtaatcgtcagtgtggcaagtggatcaggtgctgctcattcattgaatgaagccggagtattatggattcttctaatggttctctctttcttgcttcaaggagcaggtacagtattgaaggaagtcatctttatagatagccaaagacgattaaagggtgcttcactcgatctatttatagtaaattcatatggttcagctttccaagccatctgcattgcgttgcttcttccatttctttcaaaactttggggcataccgtttaaccaactcggtacctacctaaaagatggtgcggtttgttttctcaacaatgggacaataacaaaaggatgtgatggggctccgtttttgcctctgttgtttgtgataatgaacattggctataacattgctcttttaagactcctcaagatttcatccgcggtggtttcatgtcttgcatcaacagtctcagtgccaattgcagtgtttctgttcacaatgccattaccgtaccttggagttgcatcatcactaccaaaagggttcatgggaggaacaatcatacttgtattgggaatgattctttatagttggacaccacacggagctaactcttctcatactgattcagtcattccttcacctcctccaacatagagagggcttaactaaggggttttgcttttatataaagatttgagagatttatgcaaattcggtttgtgtttaaataaacttatatttgatcatatgatgttaatggaaaagttg

SEQ ID NO: 4277 - protein, 452 aa, Arabidopsis thaliana
  peptide (1)..(452): Ceres Seq. ID no. 12703923
  misc_feature (1)..(452): NCBI GI NO: 20260240 NR Description: unknown protein [Arabidopsis thaliana]
  misc_feature (1)..(452): NCBI GI NO: 21536591 NR Description: unknown [Arabidopsis thaliana]
  misc_feature (1)..(452): NCBI GI NO: 18419900 NR Description: putative protein; protein id: At5g19380
  misc_feature (1)..(452): NCBI GI NO: 21553716 NR Description: unknown [Arabidopsis thaliana]
  misc_feature (168)..(452): NCBI GI NO: 15239887 NR Description: putative protein; protein id: At5g12170.1
  misc_feature (107)..(442): NCBI GI NO: 30686536 NR Description: expressed protein [Arabidopsis thaliana]
  misc_feature (222)..(393): NCBI GI NO: 7487326 NR Description: hypothetical protein T22A6
  misc_feature (107)..(194): NCBI GI NO: 7487326 NR Description: hypothetical protein T22A6
  misc_feature (1)..(146): NCBI GI NO: 15239886 NR Description: putative protein; protein id: At5g12160.1
  misc_feature (107)..(245): NCBI GI NO: 28973717 NR Description: unknown protein [Arabidopsis thaliana]
MATTSRRFTTGLFASITSVKSHSANRPQSISLIRRNHIDHRLPLIVPSSRRWIIQAARSWDGFDDGAEAEIKKPGAYGYAIGDNEIEGSSSSTVHVIDGEHVKTAEIVIWAAVTAAFGVGNRVMYKLALVPLKEYPFFLAQLSTFGYVAVYYTILYFRYRAGTVTDAMLSVPKSPFLIVGILEALAAAAGMAAAANLSGPSTTVLSQTFLVWQIFFSIIFLGRRYSVNQILGCTLVALGVIVSVASGSGAAHSLNEAGVLWILLMVLSFLLQGAGTVLKEVIFIDSQRRLKGASLDLFIVNSYGSAFQAICIALLLPFLSKLWGIPFNQLGTYLKDGAVCFLNNGTITKGCDGAPFLPLLFVIMNIGYNIALLRLLKISSAVVSCLASTVSVPIAVFLFTMPLPYLGVASSLPKGFMGGTIILVLGMILYSWTPHGANSSHTDSVIPSPPPT

SEQ ID NO: 4278 - protein, 329 aa, Arabidopsis thaliana
  peptide (1)..(329): Ceres Seq. ID no. 12703924
  misc_feature (1)..(329): NCBI GI NO: 20260240 NR Description: unknown protein [Arabidopsis thaliana]
  misc_feature (1)..(329): NCBI GI NO: 21536591 NR Description: unknown [Arabidopsis thaliana]
  misc_feature (1)..(329): NCBI GI NO: 18419900 NR Description: putative protein; protein id: At5g19380
  misc_feature (1)..(329): NCBI GI NO: 21553716 NR Description: unknown [Arabidopsis thaliana]
  misc_feature (45)..(329): NCBI GI NO: 15239887 NR Description: putative protein; protein id: At5g12170.1
  misc_feature (1)..(319): NCBI GI NO: 30686536 NR Description: expressed protein [Arabidopsis thaliana]
  misc_feature (99)..(270): NCBI GI NO: 7487326 NR Description: hypothetical protein T22A6
  misc_feature (1)..(71): NCBI GI NO: 7487326 NR Description: hypothetical protein T22A6
  misc_feature (1)..(23): NCBI GI NO: 15239886 NR Description: putative protein; protein id: At5g12160.1
  misc_feature (1)..(122): NCBI GI NO: 28973717 NR Description: unknown protein [Arabidopsis thaliana]
MYKLALVPLKEYPFFLAQLSTFGYVAVYYTILYFRYRAGTVTDAMLSVPKSPFLIVGILEALAAAAGMAAAANLSGPSTTVLSQTFLVWQIFFSIIFLGRRYSVNQILGCTLVALGVIVSVASGSGAAHSLNEAGVLWILLMVLSFLLQGAGTVLKEVIFIDSQRRLKGASLDLFIVNSYGSAFQAICIALLLPFLSKLWGIPFNQLGTYLKDGAVCFLNNGTITKGCDGAPFLPLLFVIMNIGYNIALLRLLKISSAVVSCLASTVSVPIAVFLFTMPLPYLGVASSLPKGFMGGTIILVLGMILYSWTPHGANSSHTDSVIPSPPPT

SEQ ID NO: 4279 - protein, 285 aa, Arabidopsis thaliana
  peptide (1)..(285): Ceres Seq. ID no. 12703925
  misc_feature (1)..(285): NCBI GI NO: 20260240 NR Description: unknown protein [Arabidopsis thaliana]
  misc_feature (1)..(285): NCBI GI NO: 21536591 NR Description: unknown [Arabidopsis thaliana]
  misc_feature (1)..(285): NCBI GI NO: 18419900 NR Description: putative protein; protein id: At5g19380
  misc_feature (1)..(285): NCBI GI NO: 21553716 NR Description: unknown [Arabidopsis thaliana]
  misc_feature (1)..(285): NCBI GI NO: 15239887 NR Description: putative protein; protein id: At5g12170.1
  misc_feature (1)..(275): NCBI GI NO: 30686536 NR Description: expressed protein [Arabidopsis thaliana]
  misc_feature (55)..(226): NCBI GI NO: 7487326 NR Description: hypothetical protein T22A6
  misc_feature (1)..(27): NCBI GI NO: 7487326 NR Description: hypothetical protein T22A6
  misc_feature (1)..(78): NCBI GI NO: 28973717 NR Description: unknown protein [Arabidopsis thaliana]
  misc_feature (1)..(28): NCBI GI NO: 20161872 NR Description: B1139B11.13
MLSVPKSPFLIVGILEALAAAAGMAAAANLSGPSTTVLSQTFLVWQIFFSIIFLGRRYSVNQILGCTLVALGVIVSVASGSGAAHSLNEAGVLWILLMVLSFLLQGAGTVLKEVIFIDSQRRLKGASLDLFIVNSYGSAFQAICIALLLPFLSKLWGIPFNQLGTYLKDGAVCFLNNGTITKGCDGAPFLPLLFVIMNIGYNIALLRLLKISSAVVSCLASTVSVPIAVFLFTMPLPYLGVASSLPKGFMGGTIILVLGMILYSWTPHGANSSHTDSVIPSPPPT

SEQ ID NO: 4280 - DNA, 1718 bp, Arabidopsis thaliana
  misc_feature (1)..(1718): Ceres Seq. ID no. 12562559
ctattgcattgagattgatatcttgttgcaggggaactctggttccatgtgttaggtattttcctttcgtcgacctgattcatcttgtgcatgtcgattctgaataatgaacgaagaaggctgcgtcccgcacaactctgatgttgttaaacaaaagtctatagatcaaagagcccctctttccggggaacctaaatgtgttatctgcagtcgttatggtgagtacatatgtgacgagaccaatgatgacgtctgcagcctcgagtgtaagcaagcactcctgagaagggttgacagcgctagagtttttcctgccacagatgagtgcttctatgttagagacccaggatcttcttcccacgatgctcaactacttagaagaaagcttgatattcatgtccaaggacaaggatcagcagtccctccacctgtcttgactttcacttcatgtggacttcctcctaagcttcttctcaacttagaaacggctggctatgactttcctactcctatccagatgcaagcaattccagctgctttaaccggcaaaagtctgctcgcctcagccgacaccggctctgggaaaacagcttcttttcttgttcctattatttctcgttgcacaacgtatcactctgagcatccctcagaccagaggaggaaccccttggctatggttttggctccaacgagagagctctgtgtccaagttgaagatcaggcaaaaatgctcggaaagggactgccatttaagactgcactcgttgtaggtggtgatcccatgtctggacaactctaccgcattcagcaaggtgttgaattgatcattggtaccccaggccgggtggtggaccttctatcaaagcacaccattgaactagataacatcatgacgtttgtgctggatgaagttgactgcatgcttcagagaggcttcagagatcaggtgatgcagatatttcaggccttgtcacaaccacaggtcttgctgttctctgcgacgatctcaagagaggtggagaaggtgggagggtctctagccaaggaaatcattttggtatccataggtaatcccaacaagcctaacaaggctgtcaaccaattggccatctgggtagatgcaaagcaaaagaaacagaagctgtttgatatactcagaagtcaaaaccatttcaagccccccgctgttgtttatgtgagttcgagagttggagcagatctcctggctaatgccataactgttgtcacgggggtaaaagctctatcgatccatggggagaagccaatgaaggagaggagagacgtaatgggatcgtttttgggtggagaggtgccagttcttgtatcaacgggagttctaggccgaggagttgacctattggtggtaaggcaggtgatagtgtttgacatgcctagtaccatcaaggagtacatacatgtaattggcagggcctctaggatgggagagaagggcactgccattgtgtttgtgaatgaggacgacaggaacctattccctgatttagttgccgctttaaaaagtagtggagcagccatacctaaggaacttatcaatttgacatccagggaaatgcacaacaagaagagaagggttgggtactgagatgtatgacctggatccgaatgttgttgtaaattaagaaagaaaggaagacttgagagcattgacgaatagaaaaaattaagggtttaactct

SEQ ID NO: 4281 - protein, 505 aa, Arabidopsis thaliana
  peptide (1)..(505): Ceres Seq. ID no. 12562560
  misc_feature (139)..(333): Pfam Name: Pfam Description:  DEAD/DEAH box helicase
  misc_feature (138)..(505): NCBI GI NO: 30678477 NR Description: ATP dependent RNA helicase GB:227525
  misc_feature (185)..(502): NCBI GI NO: 34880424 NR Description: similar to RIKEN cDNA 1210002B07
  misc_feature (10)..(184): NCBI GI NO: 34880424 NR Description: similar to RIKEN cDNA 1210002B07
  misc_feature (10)..(502): NCBI GI NO: 13385988 NR Description: RIKEN cDNA 1210002B07 [Mus musculus]
  misc_feature (3)..(502): NCBI GI NO: 27469538 NR Description: Similar to hypothetical protein DKFZp564B1023
  misc_feature (3)..(444): NCBI GI NO: 13775232 NR Description: hypothetical protein DKFZp564B1023 [Homo sapiens]
  misc_feature (95)..(504): NCBI GI NO: 17985987 NR Description: belle CG9748-PA
  misc_feature (95)..(504): NCBI GI NO: 19528473 NR Description: RE28061p [Drosophila melanogaster]
  misc_feature (95)..(504): NCBI GI NO: 15227951 NR Description: DEAD/DEAH box RNA helicase, putative
  misc_feature (95)..(504): NCBI GI NO: 28393424 NR Description: putative DEAD/DEAH box RNA helicase
MNEEGCVPHNSDVVKQKSIDQRAPLSGEPKCVICSRYGEYICDETNDDVCSLECKQALLRRVDSARVFPATDECFYVRDPGSSSHDAQLLRRKLDIHVQGQGSAVPPPVLTFTSCGLPPKLLLNLETAGYDFPTPIQMQAIPAALTGKSLLASADTGSGKTASFLVPIISRCTTYHSEHPSDQRRNPLAMVLAPTRELCVQVEDQAKMLGKGLPFKTALVVGGDPMSGQLYRIQQGVELIIGTPGRVVDLLSKHTIELDNIMTFVLDEVDCMLQRGFRDQVMQIFQALSQPQVLLFSATISREVEKVGGSLAKEIILVSIGNPNKPNKAVNQLAIWVDAKQKKQKLFDILRSQNHFKPPAVVYVSSRVGADLLANAITVVTGVKALSIHGEKPMKERRDVMGSFLGGEVPVLVSTGVLGRGVDLLVVRQVIVFDMPSTIKEYIHVIGRASRMGEKGTAIVFVNEDDRNLFPDLVAALKSSGAAIPKELINLTSREMHNKKRRVGY

SEQ ID NO: 4282 - protein, 368 aa, Arabidopsis thaliana
  peptide (1)..(368): Ceres Seq. ID no. 12562561
  misc_feature (2)..(196): Pfam Name: Pfam Description:  DEAD/DEAH box helicase
  misc_feature (1)..(368): NCBI GI NO: 30678477 NR Description: ATP dependent RNA helicase GB:227525
  misc_feature (48)..(365): NCBI GI NO: 34880424 NR Description: similar to RIKEN cDNA 1210002B07
  misc_feature (1)..(47): NCBI GI NO: 34880424 NR Description: similar to RIKEN cDNA 1210002B07
  misc_feature (1)..(365): NCBI GI NO: 13385988 NR Description: RIKEN cDNA 1210002B07 [Mus musculus]
  misc_feature (1)..(365): NCBI GI NO: 27469538 NR Description: Similar to hypothetical protein DKFZp564B1023
  misc_feature (1)..(307): NCBI GI NO: 13775232 NR Description: hypothetical protein DKFZp564B1023 [Homo sapiens]
  misc_feature (1)..(367): NCBI GI NO: 17985987 NR Description: belle CG9748-PA
  misc_feature (1)..(367): NCBI GI NO: 19528473 NR Description: RE28061p [Drosophila melanogaster]
  misc_feature (1)..(367): NCBI GI NO: 15227951 NR Description: DEAD/DEAH box RNA helicase, putative
  misc_feature (1)..(367): NCBI GI NO: 28393424 NR Description: putative DEAD/DEAH box RNA helicase
MQAIPAALTGKSLLASADTGSGKTASFLVPIISRCTTYHSEHPSDQRRNPLAMVLAPTRELCVQVEDQAKMLGKGLPFKTALVVGGDPMSGQLYRIQQGVELIIGTPGRVVDLLSKHTIELDNIMTFVLDEVDCMLQRGFRDQVMQIFQALSQPQVLLFSATISREVEKVGGSLAKEIILVSIGNPNKPNKAVNQLAIWVDAKQKKQKLFDILRSQNHFKPPAVVYVSSRVGADLLANAITVVTGVKALSIHGEKPMKERRDVMGSFLGGEVPVLVSTGVLGRGVDLLVVRQVIVFDMPSTIKEYIHVIGRASRMGEKGTAIVFVNEDDRNLFPDLVAALKSSGAAIPKELINLTSREMHNKKRRVGY

SEQ ID NO: 4283 - protein, 316 aa, Arabidopsis thaliana
  peptide (1)..(316): Ceres Seq. ID no. 12562562
  misc_feature (1)..(144): Pfam Name: Pfam Description:  DEAD/DEAH box helicase
  misc_feature (1)..(316): NCBI GI NO: 30678477 NR Description: ATP dependent RNA helicase GB:227525
  misc_feature (1)..(313): NCBI GI NO: 34880424 NR Description: similar to RIKEN cDNA 1210002B07
  misc_feature (1)..(313): NCBI GI NO: 13385988 NR Description: RIKEN cDNA 1210002B07 [Mus musculus]
  misc_feature (1)..(313): NCBI GI NO: 27469538 NR Description: Similar to hypothetical protein DKFZp564B1023
  misc_feature (1)..(255): NCBI GI NO: 13775232 NR Description: hypothetical protein DKFZp564B1023 [Homo sapiens]
  misc_feature (1)..(315): NCBI GI NO: 17985987 NR Description: belle CG9748-PA
  misc_feature (1)..(315): NCBI GI NO: 19528473 NR Description: RE28061p [Drosophila melanogaster]
  misc_feature (1)..(315): NCBI GI NO: 15227951 NR Description: DEAD/DEAH box RNA helicase, putative
  misc_feature (1)..(315): NCBI GI NO: 28393424 NR Description: putative DEAD/DEAH box RNA helicase
  misc_feature (1)..(315): NCBI GI NO: 15231074 NR Description: DEAD/DEAH box RNA helicase protein, putative
MVLAPTRELCVQVEDQAKMLGKGLPFKTALVVGGDPMSGQLYRIQQGVELIIGTPGRVVDLLSKHTIELDNIMTFVLDEVDCMLQRGFRDQVMQIFQALSQPQVLLFSATISREVEKVGGSLAKEIILVSIGNPNKPNKAVNQLAIWVDAKQKKQKLFDILRSQNHFKPPAVVYVSSRVGADLLANAITVVTGVKALSIHGEKPMKERRDVMGSFLGGEVPVLVSTGVLGRGVDLLVVRQVIVFDMPSTIKEYIHVIGRASRMGEKGTAIVFVNEDDRNLFPDLVAALKSSGAAIPKELINLTSREMHNKKRRVGY

SEQ ID NO: 4284 - DNA, 1179 bp, Arabidopsis thaliana
  misc_feature (1)..(1179): Ceres Seq. ID no. 12370969
gaatcttcgagaagactcttcttttgattcaatcactcaccggagaagaagaagaagctatgccggtgttcaaagctccgttcaatggctactctgtgaaattcagtccattctacgagtcacgcctcgccgtcgctacagctcagaacttcggaattctcggaaacggccgaatccatgtcctcgagctcgctcctggagctccaggcgtaactgaatccgtctcgtacgatacagccgacgctgtatacgacgtatgttggtcagaatctcatgactctgtgctcatcgccgcaattggtgacggctcagtgaagatttacgacacagctcttcctcctccttctaatccgattagatcattccaagagcacgcgcgtgaggttcaatctgtggattacaatcccacgcggcgcgattcgtttctcacttcttcgtgggatgatacggttaagctttgggctatggatcgtccggcgagtgtaaggacttttaaggaacatgcttattgcgtttatcaagcagtttggaatcctaaacatggtgatgtgtttgcttctgcttctggagattgtactttaaggatttgggatgttagagaacctggatcaactatgatcatccctgctcatgattttgagattttgtcttgtgattggaataagtatgatgattgtattttagctacttcttcagtggataagacagttaaggtttgggatgttaggagttatagagttcctttggctgtgcttaatggtcatggatatgcggtgaggaaggtgaaattctcgccgcataggaggagtttgatagcttcttgctcttatgatatgagtgtttgtctttgggactatatggtggaagatgctttggttggtaggtatgatcatcatacagagtttgctgttgggatcgatatgagtgttcttgttgaaggtttaatggcgagtactggttgggatgagcttgtttatgtttggcagcaagggatggatcctagagccagttgattcataagtaagtttgtgattgcaaaacagtttcatctttatttgttgtggaattggtttggtttttgttaaaggaatgtagttggaataaagttgggatcttgcttaagaagaaatgtaagttactgagagtttcacatatgaacaaggttatctttcgaattgt

SEQ ID NO: 4285 - protein, 336 aa, Arabidopsis thaliana
  peptide (1)..(336): Ceres Seq. ID no. 12370970
  misc_feature (20)..(336): NCBI GI NO: 15218882 NR Description: peroxisomal targeting signal type 2 receptor Pex7p
  misc_feature (20)..(336): NCBI GI NO: 4689316 NR Description: peroxisomal targeting signal type 2 receptor
  misc_feature (20)..(336): NCBI GI NO: 16611997 NR Description: peroxisomal targeting signal 2 receptor
  misc_feature (20)..(336): NCBI GI NO: 28195239 NR Description: peroxisomal targeting signal type 2 receptor
  misc_feature (28)..(327): NCBI GI NO: 4505731 NR Description: peroxisomal biogenesis factor 7
  misc_feature (28)..(327): NCBI GI NO: 34852639 NR Description: similar to peroxisomal PTS2 receptor
  misc_feature (28)..(327): NCBI GI NO: 6679283 NR Description: peroxisome biogenesis factor 7 [Mus musculus]
  misc_feature (28)..(327): NCBI GI NO: 25090901 NR Description: Peroxisomal targeting signal 2 receptor
  misc_feature (28)..(328): NCBI GI NO: 31216935 NR Description: ENSANGP00000020634 [Anopheles gambiae]
  misc_feature (27)..(210): NCBI GI NO: 40746753 NR Description: hypothetical protein AN0880.2
IFEKTLLLIQSLTGEEEEAMPVFKAPFNGYSVKFSPFYESRLAVATAQNFGILGNGRIHVLELAPGAPGVTESVSYDTADAVYDVCWSESHDSVLIAAIGDGSVKIYDTALPPPSNPIRSFQEHAREVQSVDYNPTRRDSFLTSSWDDTVKLWAMDRPASVRTFKEHAYCVYQAVWNPKHGDVFASASGDCTLRIWDVREPGSTMIIPAHDFEILSCDWNKYDDCILATSSVDKTVKVWDVRSYRVPLAVLNGHGYAVRKVKFSPHRRSLIASCSYDMSVCLWDYMVEDALVGRYDHHTEFAVGIDMSVLVEGLMASTGWDELVYVWQQGMDPRAS

SEQ ID NO: 4286 - protein, 317 aa, Arabidopsis thaliana
  peptide (1)..(317): Ceres Seq. ID no. 12370971
  misc_feature (1)..(317): NCBI GI NO: 15218882 NR Description: peroxisomal targeting signal type 2 receptor Pex7p
  misc_feature (1)..(317): NCBI GI NO: 4689316 NR Description: peroxisomal targeting signal type 2 receptor
  misc_feature (1)..(317): NCBI GI NO: 16611997 NR Description: peroxisomal targeting signal 2 receptor
  misc_feature (1)..(317): NCBI GI NO: 28195239 NR Description: peroxisomal targeting signal type 2 receptor
  misc_feature (9)..(308): NCBI GI NO: 4505731 NR Description: peroxisomal biogenesis factor 7
  misc_feature (9)..(308): NCBI GI NO: 34852639 NR Description: similar to peroxisomal PTS2 receptor
  misc_feature (9)..(308): NCBI GI NO: 6679283 NR Description: peroxisome biogenesis factor 7 [Mus musculus]
  misc_feature (9)..(308): NCBI GI NO: 25090901 NR Description: Peroxisomal targeting signal 2 receptor
  misc_feature (9)..(309): NCBI GI NO: 31216935 NR Description: ENSANGP00000020634 [Anopheles gambiae]
  misc_feature (8)..(191): NCBI GI NO: 40746753 NR Description: hypothetical protein AN0880.2
MPVFKAPFNGYSVKFSPFYESRLAVATAQNFGILGNGRIHVLELAPGAPGVTESVSYDTADAVYDVCWSESHDSVLIAAIGDGSVKIYDTALPPPSNPIRSFQEHAREVQSVDYNPTRRDSFLTSSWDDTVKLWAMDRPASVRTFKEHAYCVYQAVWNPKHGDVFASASGDCTLRIWDVREPGSTMIIPAHDFEILSCDWNKYDDCILATSSVDKTVKVWDVRSYRVPLAVLNGHGYAVRKVKFSPHRRSLIASCSYDMSVCLWDYMVEDALVGRYDHHTEFAVGIDMSVLVEGLMASTGWDELVYVWQQGMDPRAS

SEQ ID NO: 4287 - protein, 182 aa, Arabidopsis thaliana
  peptide (1)..(182): Ceres Seq. ID no. 12370972
  misc_feature (1)..(182): NCBI GI NO: 15218882 NR Description: peroxisomal targeting signal type 2 receptor Pex7p
  misc_feature (1)..(182): NCBI GI NO: 4689316 NR Description: peroxisomal targeting signal type 2 receptor
  misc_feature (1)..(182): NCBI GI NO: 16611997 NR Description: peroxisomal targeting signal 2 receptor
  misc_feature (1)..(182): NCBI GI NO: 28195239 NR Description: peroxisomal targeting signal type 2 receptor
  misc_feature (1)..(173): NCBI GI NO: 4505731 NR Description: peroxisomal biogenesis factor 7
  misc_feature (1)..(173): NCBI GI NO: 34852639 NR Description: similar to peroxisomal PTS2 receptor
  misc_feature (1)..(173): NCBI GI NO: 6679283 NR Description: peroxisome biogenesis factor 7 [Mus musculus]
  misc_feature (1)..(173): NCBI GI NO: 25090901 NR Description: Peroxisomal targeting signal 2 receptor
  misc_feature (1)..(174): NCBI GI NO: 31216935 NR Description: ENSANGP00000020634 [Anopheles gambiae]
  misc_feature (1)..(56): NCBI GI NO: 40746753 NR Description: hypothetical protein AN0880.2
MDRPASVRTFKEHAYCVYQAVWNPKHGDVFASASGDCTLRIWDVREPGSTMIIPAHDFEILSCDWNKYDDCILATSSVDKTVKVWDVRSYRVPLAVLNGHGYAVRKVKFSPHRRSLIASCSYDMSVCLWDYMVEDALVGRYDHHTEFAVGIDMSVLVEGLMASTGWDELVYVWQQGMDPRAS

SEQ ID NO: 4288 - DNA, 1153 bp, Arabidopsis thaliana
  misc_feature (1)..(1153): Ceres Seq. ID no. 13497349
aaaattgaaattcgaaaacagaacaaaaaaaaaaatctctctcaatctctctcagatctgaatccatccatcaccgatctctaatggcggcaccaccagcatcatcctcggcgagggaagagttcgtgtacctcgcaaagctcgcagagcaagcggaacgttacgaagaaatggttgaattcatggaaaaagtcgctgaagccgttgacaaagacgaactcaccgtcgaagaacgtaatctcctctccgtcgcttacaaaaacgtaatcggcgctcgtcgtgcttcctggagaatcatctcttccattgaacaaaaagaagagagtcgtggtaacgatgaccatgtgaccacgatccgtgattacagaagcaagatcgaatctgagttatcgaaaatctgtgacggtattcttaagcttcttgatactagacttgttcctgcttctgctaatggagattctaaggttttttaccttaagatgaagggagattatcataggtatttggctgagtttaagactggtcaagagaggaaagatgctgctgaacatactctcaccgcttacaaagctgctcaggatattgctaatgctgaattggctccaacgcatccgattcgtcttggtttggctttgaatttctctgtgttttactatgagattcttaattctccagatcgtgcttgtaatctcgctaagcaggcgtttgatgaagccattgctgagttagatactcttggagaggagtcatacaaggatagtaccttgatcatgcagcttcttcgtgacaatcttactctctggacttctgacatgcaggacgaaagtccggaggagattaaagaagcagcagcaccaaagcctgctgaagaacagaaggagatctaagtttgtggtttcttttttcagtattcttaagttatgcaattataattatgtttctgcttggtgtttattttctaatctttcctttgctatccccgaagcttctaaggccgtctaattcttgtcctttgtttgcttttctcaatcgtggatgctactggatttctgttttgttttacttcttctcttgattgattgcatttcccggcttatgccttgtacttgaaactcagttttctctcttattaatgatttgccattcacctggt

SEQ ID NO: 4289 - protein, 267 aa, Arabidopsis thaliana
  peptide (1)..(267): Ceres Seq. ID no. 13497350
  misc_feature (11)..(248): Pfam Name: Pfam Description:  14-3-3 protein
  misc_feature (1)..(267): NCBI GI NO: 18399524 NR Description: 14-3-3 protein GF14 phi (grf4)
  misc_feature (1)..(267): NCBI GI NO: 14532442 NR Description: At1g35160/T32G9_30 [Arabidopsis thaliana]
  misc_feature (3)..(265): NCBI GI NO: 18413181 NR Description: 14-3-3 protein GF14 chi (grf1)
  misc_feature (8)..(265): NCBI GI NO: 18411901 NR Description: 14-3-3 protein GF14 omega (grf2)
  misc_feature (3)..(265): NCBI GI NO: 1702986 NR Description: 14-3-3-like protein GF14 chi
  misc_feature (8)..(265): NCBI GI NO: 487791 NR Description: GF14omega isoform
  misc_feature (4)..(266): NCBI GI NO: 20340229 NR Description: 14-3-3-like protein [Thellungiella halophila]
  misc_feature (9)..(265): NCBI GI NO: 13447104 NR Description: GF14 omega [Brassica napus]
  misc_feature (8)..(265): NCBI GI NO: 1361987 NR Description: 14-3-3 protein homolog GF14 chi chain
  misc_feature (1)..(265): NCBI GI NO: 8099063 NR Description: 14-3-3 protein [Populus x canescens]
MAAPPASSSAREEFVYLAKLAEQAERYEEMVEFMEKVAEAVDKDELTVEERNLLSVAYKNVIGARRASWRIISSIEQKEESRGNDDHVTTIRDYRSKIESELSKICDGILKLLDTRLVPASANGDSKVFYLKMKGDYHRYLAEFKTGQERKDAAEHTLTAYKAAQDIANAELAPTHPIRLGLALNFSVFYYEILNSPDRACNLAKQAFDEAIAELDTLGEESYKDSTLIMQLLRDNLTLWTSDMQDESPEEIKEAAAPKPAEEQKEI

SEQ ID NO: 4290 - protein, 238 aa, Arabidopsis thaliana
  peptide (1)..(238): Ceres Seq. ID no. 13497351
  misc_feature (1)..(219): Pfam Name: Pfam Description:  14-3-3 protein
  misc_feature (1)..(238): NCBI GI NO: 18399524 NR Description: 14-3-3 protein GF14 phi (grf4)
  misc_feature (1)..(238): NCBI GI NO: 14532442 NR Description: At1g35160/T32G9_30 [Arabidopsis thaliana]
  misc_feature (1)..(236): NCBI GI NO: 18413181 NR Description: 14-3-3 protein GF14 chi (grf1)
  misc_feature (1)..(236): NCBI GI NO: 18411901 NR Description: 14-3-3 protein GF14 omega (grf2)
  misc_feature (1)..(236): NCBI GI NO: 1702986 NR Description: 14-3-3-like protein GF14 chi
  misc_feature (1)..(236): NCBI GI NO: 487791 NR Description: GF14omega isoform
  misc_feature (1)..(237): NCBI GI NO: 20340229 NR Description: 14-3-3-like protein [Thellungiella halophila]
  misc_feature (1)..(236): NCBI GI NO: 13447104 NR Description: GF14 omega [Brassica napus]
  misc_feature (1)..(236): NCBI GI NO: 1361987 NR Description: 14-3-3 protein homolog GF14 chi chain
  misc_feature (1)..(236): NCBI GI NO: 8099063 NR Description: 14-3-3 protein [Populus x canescens]
MVEFMEKVAEAVDKDELTVEERNLLSVAYKNVIGARRASWRIISSIEQKEESRGNDDHVTTIRDYRSKIESELSKICDGILKLLDTRLVPASANGDSKVFYLKMKGDYHRYLAEFKTGQERKDAAEHTLTAYKAAQDIANAELAPTHPIRLGLALNFSVFYYEILNSPDRACNLAKQAFDEAIAELDTLGEESYKDSTLIMQLLRDNLTLWTSDMQDESPEEIKEAAAPKPAEEQKEI

SEQ ID NO: 4291 - protein, 234 aa, Arabidopsis thaliana
  peptide (1)..(234): Ceres Seq. ID no. 13497352
  misc_feature (1)..(215): Pfam Name: Pfam Description:  14-3-3 protein
  misc_feature (1)..(234): NCBI GI NO: 18399524 NR Description: 14-3-3 protein GF14 phi (grf4)
  misc_feature (1)..(234): NCBI GI NO: 14532442 NR Description: At1g35160/T32G9_30 [Arabidopsis thaliana]
  misc_feature (1)..(232): NCBI GI NO: 18413181 NR Description: 14-3-3 protein GF14 chi (grf1)
  misc_feature (1)..(232): NCBI GI NO: 18411901 NR Description: 14-3-3 protein GF14 omega (grf2)
  misc_feature (1)..(232): NCBI GI NO: 1702986 NR Description: 14-3-3-like protein GF14 chi
  misc_feature (1)..(232): NCBI GI NO: 487791 NR Description: GF14omega isoform
  misc_feature (1)..(233): NCBI GI NO: 20340229 NR Description: 14-3-3-like protein [Thellungiella halophila]
  misc_feature (1)..(232): NCBI GI NO: 13447104 NR Description: GF14 omega [Brassica napus]
  misc_feature (1)..(232): NCBI GI NO: 1361987 NR Description: 14-3-3 protein homolog GF14 chi chain
  misc_feature (1)..(232): NCBI GI NO: 8099063 NR Description: 14-3-3 protein [Populus x canescens]
MEKVAEAVDKDELTVEERNLLSVAYKNVIGARRASWRIISSIEQKEESRGNDDHVTTIRDYRSKIESELSKICDGILKLLDTRLVPASANGDSKVFYLKMKGDYHRYLAEFKTGQERKDAAEHTLTAYKAAQDIANAELAPTHPIRLGLALNFSVFYYEILNSPDRACNLAKQAFDEAIAELDTLGEESYKDSTLIMQLLRDNLTLWTSDMQDESPEEIKEAAAPKPAEEQKEI

SEQ ID NO: 4292 - DNA, 1238 bp, Arabidopsis thaliana
  misc_feature (1)..(1238): Ceres Seq. ID no. 13488953
agtgagtattcaatctcatagactcatagcaatggcgaatcacaacagtttcacttacatggaccatagcttcagcgatataagtctcaactttgattcctctgctttcagcgattgtaacagtgacatatcctgcgagtttccaacaactacctccgagagccgtcaacgaaaactcttcctctcttgcgccgttgataattccgatgacgtgatcagaaatctcataacgcatcttgagtcatcttcttcgatcgaggaacagaagcaagctgctatggagattagactcttatcaaagaacaaaccagagaatcgtatcaaactcgctaaagccggtgctattaaaccgttggtttctttaatctcgtcttcggatcttcagcttcaagagtatggagtcactgcggtgttgaatctatctctctgcgatgagaacaaagagatgattgtttcttccggtgcggttaaaccgctcgttaatgcgttgagattaggaacaccgacgacgaaagagaacgctgcttgtgctctgctccggttatctcaagtggaggaaaacaaaatcacgattgggagatcaggagcgattcctttactagtgaaccttctagaaaatggcggattcagagcgaagaaagacgcgtcgacggctttatactcgttgtgttcgacgaacgagaacaaaaccagagctgttgaatctgggattatgaagccgttagtggagttaatgattgattttgaatcggatatggttgataaatcagcgtttgttatgaatctgttaatgtcggcgccggaatcgaagccggcggttgtggaagaaggaggagttccggtgttggttgagattgttgaagcgggaacacagagacagaaggagataagtgtgtcgatattgttgcagctttgtgaggagagtgttgtgtatcgaaccatggtggctcgtgaaggagcggttcctccgctcgtggctttatcgcagggtagtgcgagtcgtggtgctaaggtaaaggctgaggcgttgatagagcttcttaggcaacccagacaacaacaacaacaacaacactttgaatctaacgacaacgagagataacactttagtttgggctttttattaatgggcctttgtagaatacatatcttgttaattatttgggcggcccaagctgaacacatatcttgttaattattggtcgatgtgttttgcatcaaagttgcattacttgcgc

SEQ ID NO: 4293 - protein, 366 aa, Arabidopsis thaliana
  peptide (1)..(366): Ceres Seq. ID no. 13488954
  misc_feature (143)..(183): Pfam Name: Pfam Description:  Armadillo/beta-catenin-like repeat
  misc_feature (11)..(366): NCBI GI NO: 26452835 NR Description: unknown protein [Arabidopsis thaliana]
  misc_feature (11)..(366): NCBI GI NO: 15237730 NR Description: expressed protein [Arabidopsis thaliana]
  misc_feature (38)..(366): NCBI GI NO: 8843789 NR Description: phosphoinositide-specific phospholipase C-line
  misc_feature (11)..(351): NCBI GI NO: 18395805 NR Description: expressed protein [Arabidopsis thaliana]
  misc_feature (11)..(351): NCBI GI NO: 21592960 NR Description: unknown [Arabidopsis thaliana]
  misc_feature (11)..(351): NCBI GI NO: 16226454 NR Description: AT3g01400/T13O15_4 [Arabidopsis thaliana]
  misc_feature (24)..(351): NCBI GI NO: 34393600 NR Description: arm repeat-containing protein-like protein
  misc_feature (82)..(353): NCBI GI NO: 26452478 NR Description: unknown protein [Arabidopsis thaliana]
  misc_feature (47)..(351): NCBI GI NO: 28974687 NR Description: arm repeat-containing protein [Nicotiana tabacum]
  misc_feature (86)..(352): NCBI GI NO: 34393717 NR Description: arm repeat containing protein homolog-like
VSIQSHRLIAMANHNSFTYMDHSFSDISLNFDSSAFSDCNSDISCEFPTTTSESRQRKLFLSCAVDNSDDVIRNLITHLESSSSIEEQKQAAMEIRLLSKNKPENRIKLAKAGAIKPLVSLISSSDLQLQEYGVTAVLNLSLCDENKEMIVSSGAVKPLVNALRLGTPTTKENAACALLRLSQVEENKITIGRSGAIPLLVNLLENGGFRAKKDASTALYSLCSTNENKTRAVESGIMKPLVELMIDFESDMVDKSAFVMNLLMSAPESKPAVVEEGGVPVLVEIVEAGTQRQKEISVSILLQLCEESVVYRTMVAREGAVPPLVALSQGSASRGAKVKAEALIELLRQPRQQQQQQHFESNDNER

SEQ ID NO: 4294 - protein, 356 aa, Arabidopsis thaliana
  peptide (1)..(356): Ceres Seq. ID no. 13488955
  misc_feature (133)..(173): Pfam Name: Pfam Description:  Armadillo/beta-catenin-like repeat
  misc_feature (1)..(356): NCBI GI NO: 26452835 NR Description: unknown protein [Arabidopsis thaliana]
  misc_feature (1)..(356): NCBI GI NO: 15237730 NR Description: expressed protein [Arabidopsis thaliana]
  misc_feature (28)..(356): NCBI GI NO: 8843789 NR Description: phosphoinositide-specific phospholipase C-line
  misc_feature (1)..(341): NCBI GI NO: 18395805 NR Description: expressed protein [Arabidopsis thaliana]
  misc_feature (1)..(341): NCBI GI NO: 21592960 NR Description: unknown [Arabidopsis thaliana]
  misc_feature (1)..(341): NCBI GI NO: 16226454 NR Description: AT3g01400/T13O15_4 [Arabidopsis thaliana]
  misc_feature (14)..(341): NCBI GI NO: 34393600 NR Description: arm repeat-containing protein-like protein
  misc_feature (72)..(343): NCBI GI NO: 26452478 NR Description: unknown protein [Arabidopsis thaliana]
  misc_feature (37)..(341): NCBI GI NO: 28974687 NR Description: arm repeat-containing protein [Nicotiana tabacum]
  misc_feature (76)..(342): NCBI GI NO: 34393717 NR Description: arm repeat containing protein homolog-like
MANHNSFTYMDHSFSDISLNFDSSAFSDCNSDISCEFPTTTSESRQRKLFLSCAVDNSDDVIRNLITHLESSSSIEEQKQAAMEIRLLSKNKPENRIKLAKAGAIKPLVSLISSSDLQLQEYGVTAVLNLSLCDENKEMIVSSGAVKPLVNALRLGTPTTKENAACALLRLSQVEENKITIGRSGAIPLLVNLLENGGFRAKKDASTALYSLCSTNENKTRAVESGIMKPLVELMIDFESDMVDKSAFVMNLLMSAPESKPAVVEEGGVPVLVEIVEAGTQRQKEISVSILLQLCEESVVYRTMVAREGAVPPLVALSQGSASRGAKVKAEALIELLRQPRQQQQQQHFESNDNER

SEQ ID NO: 4295 - protein, 347 aa, Arabidopsis thaliana
  peptide (1)..(347): Ceres Seq. ID no. 13488956
  misc_feature (124)..(164): Pfam Name: Pfam Description:  Armadillo/beta-catenin-like repeat
  misc_feature (1)..(347): NCBI GI NO: 26452835 NR Description: unknown protein [Arabidopsis thaliana]
  misc_feature (1)..(347): NCBI GI NO: 15237730 NR Description: expressed protein [Arabidopsis thaliana]
  misc_feature (19)..(347): NCBI GI NO: 8843789 NR Description: phosphoinositide-specific phospholipase C-line
  misc_feature (1)..(332): NCBI GI NO: 18395805 NR Description: expressed protein [Arabidopsis thaliana]
  misc_feature (1)..(332): NCBI GI NO: 21592960 NR Description: unknown [Arabidopsis thaliana]
  misc_feature (1)..(332): NCBI GI NO: 16226454 NR Description: AT3g01400/T13O15_4 [Arabidopsis thaliana]
  misc_feature (5)..(332): NCBI GI NO: 34393600 NR Description: arm repeat-containing protein-like protein
  misc_feature (63)..(334): NCBI GI NO: 26452478 NR Description: unknown protein [Arabidopsis thaliana]
  misc_feature (28)..(332): NCBI GI NO: 28974687 NR Description: arm repeat-containing protein [Nicotiana tabacum]
  misc_feature (67)..(333): NCBI GI NO: 34393717 NR Description: arm repeat containing protein homolog-like
MDHSFSDISLNFDSSAFSDCNSDISCEFPTTTSESRQRKLFLSCAVDNSDDVIRNLITHLESSSSIEEQKQAAMEIRLLSKNKPENRIKLAKAGAIKPLVSLISSSDLQLQEYGVTAVLNLSLCDENKEMIVSSGAVKPLVNALRLGTPTTKENAACALLRLSQVEENKITIGRSGAIPLLVNLLENGGFRAKKDASTALYSLCSTNENKTRAVESGIMKPLVELMIDFESDMVDKSAFVMNLLMSAPESKPAVVEEGGVPVLVEIVEAGTQRQKEISVSILLQLCEESVVYRTMVAREGAVPPLVALSQGSASRGAKVKAEALIELLRQPRQQQQQQHFESNDNER

SEQ ID NO: 4296 - DNA, 825 bp, Arabidopsis thaliana
  misc_feature (1)..(825): Ceres Seq. ID no. 12325920
actgttaaggaaggtcttgctgcgctaagaaagaaaagaagaagaaagatgccaggagcaattgtggaggaagagaaatctcagattgaatccatcaaagagcaattgaaactcgagaaggaagatgatgttgttgtggaggatgtgaaagacggagaggaagaagacgatgatgaagacgatgaggacgtcgaagttgaaggggaaggtggaaatgagaatgcaaagcaaagtagaagcgagaagaaaagtcgcaaagctgttctaaagcttggcatgaaacctgtctcagatgtcagcagagtgacaatcaaaagagccaagaatgtgttatttgtcatctcgaagccagatgtttacaagagtcccaatgcagagacttacgtcatttttggagaggccaaggtcgacgatttgagctctcagctacagactcaagctgctcagaggtttaagatgcctgatgtgacatccatgctacctaacgccggttctgaagctaccatggctccactagcagaggaagaagacgaagacgatgttgatgacactggtgttgaagccagagacattgatcttgtcatgacccaagcaggtgtctccaaggccaaagccgtcagtgctctaaaggctaatgatggggatatcgtttcagccattatggaactcactacatagagttgagtagtagagccacctaaattgtgcttttgtttcattgtttcttgtctcagctaccattttctttgaacattattaattatgtctccccttgatttgaagtcattatctgtctactctgatcaaagtatttaatttgcggcc

SEQ ID NO: 4297 - protein, 225 aa, Arabidopsis thaliana
  peptide (1)..(225): Ceres Seq. ID no. 12325921
  misc_feature (79)..(138): Pfam Name: Pfam Description:  NAC domain
  misc_feature (17)..(225): NCBI GI NO: 18398710 NR Description: expressed protein; protein id: At1g33040
  misc_feature (17)..(225): NCBI GI NO: 21536597 NR Description: putative alpha NAC [Arabidopsis thaliana]
  misc_feature (17)..(225): NCBI GI NO: 15235122 NR Description: putative alpha NAC; protein id: At4g10480
  misc_feature (23)..(225): NCBI GI NO: 13899101 NR Description: alpha NAC-like protein [Arabidopsis thaliana]
  misc_feature (23)..(225): NCBI GI NO: 15229149 NR Description: alpha NAC-like protein; protein id: At3g49470
  misc_feature (20)..(225): NCBI GI NO: 4115918 NR Description: similar to nascent polypeptide associated complex alphachain
  misc_feature (20)..(224): NCBI GI NO: 34902238 NR Description: Putative nascent polypeptide associated complex alpha chain
  misc_feature (17)..(225): NCBI GI NO: 6752882 NR Description: nascent polypeptide associated complex alpha chain
  misc_feature (17)..(225): NCBI GI NO: 32352154 NR Description: nascent polypeptide associated complex alpha chain
  misc_feature (17)..(224): NCBI GI NO: 34907258 NR Description: putative nascent polypeptide associated complex alpha chain
TVKEGLAALRKKRRRKMPGAIVEEEKSQIESIKEQLKLEKEDDVVVEDVKDGEEEDDDEDDEDVEVEGEGGNENAKQSRSEKKSRKAVLKLGMKPVSDVSRVTIKRAKNVLFVISKPDVYKSPNAETYVIFGEAKVDDLSSQLQTQAAQRFKMPDVTSMLPNAGSEATMAPLAEEEDEDDVDDTGVEARDIDLVMTQAGVSKAKAVSALKANDGDIVSAIMELTT

SEQ ID NO: 4298 - protein, 209 aa, Arabidopsis thaliana
  peptide (1)..(209): Ceres Seq. ID no. 12325922
  misc_feature (63)..(122): Pfam Name: Pfam Description:  NAC domain
  misc_feature (1)..(209): NCBI GI NO: 18398710 NR Description: expressed protein; protein id: At1g33040
  misc_feature (1)..(209): NCBI GI NO: 21536597 NR Description: putative alpha NAC [Arabidopsis thaliana]
  misc_feature (1)..(209): NCBI GI NO: 15235122 NR Description: putative alpha NAC; protein id: At4g10480
  misc_feature (7)..(209): NCBI GI NO: 13899101 NR Description: alpha NAC-like protein [Arabidopsis thaliana]
  misc_feature (7)..(209): NCBI GI NO: 15229149 NR Description: alpha NAC-like protein; protein id: At3g49470
  misc_feature (4)..(209): NCBI GI NO: 4115918 NR Description: similar to nascent polypeptide associated complex alphachain
  misc_feature (4)..(208): NCBI GI NO: 34902238 NR Description: Putative nascent polypeptide associated complex alpha chain
  misc_feature (1)..(209): NCBI GI NO: 6752882 NR Description: nascent polypeptide associated complex alpha chain
  misc_feature (1)..(209): NCBI GI NO: 32352154 NR Description: nascent polypeptide associated complex alpha chain
  misc_feature (1)..(208): NCBI GI NO: 34907258 NR Description: putative nascent polypeptide associated complex alpha chain
MPGAIVEEEKSQIESIKEQLKLEKEDDVVVEDVKDGEEEDDDEDDEDVEVEGEGGNENAKQSRSEKKSRKAVLKLGMKPVSDVSRVTIKRAKNVLFVISKPDVYKSPNAETYVIFGEAKVDDLSSQLQTQAAQRFKMPDVTSMLPNAGSEATMAPLAEEEDEDDVDDTGVEARDIDLVMTQAGVSKAKAVSALKANDGDIVSAIMELTT

SEQ ID NO: 4299 - protein, 133 aa, Arabidopsis thaliana
  peptide (1)..(133): Ceres Seq. ID no. 12325923
  misc_feature (1)..(46): Pfam Name: Pfam Description:  NAC domain
  misc_feature (1)..(133): NCBI GI NO: 18398710 NR Description: expressed protein; protein id: At1g33040
  misc_feature (1)..(133): NCBI GI NO: 21536597 NR Description: putative alpha NAC [Arabidopsis thaliana]
  misc_feature (1)..(133): NCBI GI NO: 15235122 NR Description: putative alpha NAC; protein id: At4g10480
  misc_feature (1)..(133): NCBI GI NO: 13899101 NR Description: alpha NAC-like protein [Arabidopsis thaliana]
  misc_feature (1)..(133): NCBI GI NO: 15229149 NR Description: alpha NAC-like protein; protein id: At3g49470
  misc_feature (1)..(133): NCBI GI NO: 4115918 NR Description: similar to nascent polypeptide associated complex alphachain
  misc_feature (1)..(132): NCBI GI NO: 34902238 NR Description: Putative nascent polypeptide associated complex alpha chain
  misc_feature (1)..(133): NCBI GI NO: 6752882 NR Description: nascent polypeptide associated complex alpha chain
  misc_feature (1)..(133): NCBI GI NO: 32352154 NR Description: nascent polypeptide associated complex alpha chain
  misc_feature (1)..(132): NCBI GI NO: 34907258 NR Description: putative nascent polypeptide associated complex alpha chain
MKPVSDVSRVTIKRAKNVLFVISKPDVYKSPNAETYVIFGEAKVDDLSSQLQTQAAQRFKMPDVTSMLPNAGSEATMAPLAEEEDEDDVDDTGVEARDIDLVMTQAGVSKAKAVSALKANDGDIVSAIMELTT

SEQ ID NO: 4300 - DNA, 1620 bp, Arabidopsis thaliana
  misc_feature (1)..(1620): Ceres Seq. ID no. 12330906
  misc_feature (1204)..(1204): n is a, c, t, g, unknown, or other
  misc_feature (1190)..(1190): n is a, c, t, g, unknown, or other
  misc_feature (1193)..(1193): n is a, c, t, g, unknown, or other
  misc_feature (1194)..(1194): n is a, c, t, g, unknown, or other
acaacgtgaaaacacaggttcgtgctactactccaatgatacgggtctcaaaatactcaaaactctggcatgtctcaattccacaaattattgtttaatcattctgcttcttctataactgcagaagaaagaagaaagaagaagaagaagagattagagcttgagccataatatataatcccttgatcattagtctaaagaaccacataaaaagatgggattctggtcgttgttggaggtggcttctatgccggttattcaagttcttttcatgagtctcgtgggagctttcatggcctctgatcgttgcaagctcttccctgttgaagcccgtaattccatgaacaaggtggtgtttgtactatttgcaccggctctcatgtttgccaatctagctcagacggttacacttgaagacatcatctcatggtggtttatgccggtgaacatgggacttacatttctaatcggaggacttcttgggtggttggttgttaagattttgaaaccacctccttatcttgaaggtcttattgttgcaacttgttctgcaggaaatatggggaacctaccaatcatacttgtcccagcaatctgcgatgaggacaaaagtccttttggtaaccgaagtgtatgtagaaccgtcgggctctcttacgcgtctttctccatggcgctagggggtttctacatatggacatacacattccggctgattaaagggtccgcaatgaaagttcaagccatagaagaatctgagaaaatagcaattaaatcatccaatagtgacttagaagctgatcataagacccatctcctcggtgcaccggaagacaaggaaaacaaagtggtaaaggaagagacagggttttggagaaaaggagtagacttcctccatgagatattggaggagcttcttgcaccacctacacttggtgcaattatcggtttcattttcggtgcagtaagatggctcagaaatcttatcataggtgatgatgctcctttacgaatagtacaaagcactgcaaaacttcttggagatgggaccattccctgtatgactattatactagggggaaacctcatacaaggtttacgttcttcggcagtcaaaccgatggttgtacttggaatagtctgtgctcggtacatagctatgccaattatcggtataggcattgtactancanntgcaaatctnggatttcttccagctgatcctttgtttcagtatgttttgatgcttcagttcaccctcccgcctgccatgaatatcggtaccatgacacagctgtacaatgttgctcaagacgaatgctcagtgctcatgctttggacctacttggtcgcgatactggccctcactgtatggtccaccatcttccttcacttgttagtctaaagaacctgcaactctgtatgagcacaagaagattctatctctctactactacagagaccgaagctctgtcaagggatcttaccattctttttgtctatcacataaaatttgatcataacttgatagatttttctggttgcatgcgtacctttctgcaaatcttcatttttctccatatcccgatttgtaaacgccaatattgtatcaagtattac

SEQ ID NO: 4301 - protein, 396 aa, Arabidopsis thaliana
  peptide (1)..(396): Ceres Seq. ID no. 12330907
  misc_feature (9)..(388): Pfam Name: Pfam Description:  Auxin Efflux Carrier
  misc_feature (1)..(396): NCBI GI NO: 21536598 NR Description: unknown [Arabidopsis thaliana]
  misc_feature (1)..(396): NCBI GI NO: 18398448 NR Description: expressed protein; protein id: At2g17500
  misc_feature (1)..(395): NCBI GI NO: 15239215 NR Description: putative protein; protein id: At5g65980.1
  misc_feature (6)..(395): NCBI GI NO: 18411126 NR Description: expressed protein; protein id: At1g76520
  misc_feature (6)..(395): NCBI GI NO: 21553424 NR Description: unknown [Arabidopsis thaliana]
  misc_feature (1)..(395): NCBI GI NO: 22329697 NR Description: hypothetical protein; protein id: At1g20925.1
  misc_feature (7)..(395): NCBI GI NO: 15241659 NR Description: putative protein; protein id: At5g01990.1
  misc_feature (195)..(394): NCBI GI NO: 34394344 NR Description: auxin efflux carrier protein family-like protein
  misc_feature (12)..(214): NCBI GI NO: 18409758 NR Description: expressed protein; protein id: At1g71090
  misc_feature (231)..(396): NCBI GI NO: 18409758 NR Description: expressed protein; protein id: At1g71090
  misc_feature (326)..(326): Xaa is any aa, unknown or other
  misc_feature (327)..(327): Xaa is any aa, unknown or other
  misc_feature (330)..(330): Xaa is any aa, unknown or other
MGFWSLLEVASMPVIQVLFMSLVGAFMASDRCKLFPVEARNSMNKVVFVLFAPALMFANLAQTVTLEDIISWWFMPVNMGLTFLIGGLLGWLVVKILKPPPYLEGLIVATCSAGNMGNLPIILVPAICDEDKSPFGNRSVCRTVGLSYASFSMALGGFYIWTYTFRLIKGSAMKVQAIEESEKIAIKSSNSDLEADHKTHLLGAPEDKENKVVKEETGFWRKGVDFLHEILEELLAPPTLGAIIGFIFGAVRWLRNLIIGDDAPLRIVQSTAKLLGDGTIPCMTIILGGNLIQGLRSSAVKPMVVLGIVCARYIAMPIIGIGIVLXXANXGFLPADPLFQYVLMLQFTLPPAMNIGTMTQLYNVAQDECSVLMLWTYLVAILALTVWSTIFLHLLV

SEQ ID NO: 4302 - protein, 385 aa, Arabidopsis thaliana
  peptide (1)..(385): Ceres Seq. ID no. 12330908
  misc_feature (1)..(377): Pfam Name: Pfam Description:  Auxin Efflux Carrier
  misc_feature (1)..(385): NCBI GI NO: 21536598 NR Description: unknown [Arabidopsis thaliana]
  misc_feature (1)..(385): NCBI GI NO: 18398448 NR Description: expressed protein; protein id: At2g17500
  misc_feature (1)..(384): NCBI GI NO: 15239215 NR Description: putative protein; protein id: At5g65980.1
  misc_feature (1)..(384): NCBI GI NO: 18411126 NR Description: expressed protein; protein id: At1g76520
  misc_feature (1)..(384): NCBI GI NO: 21553424 NR Description: unknown [Arabidopsis thaliana]
  misc_feature (1)..(384): NCBI GI NO: 22329697 NR Description: hypothetical protein; protein id: At1g20925.1
  misc_feature (1)..(384): NCBI GI NO: 15241659 NR Description: putative protein; protein id: At5g01990.1
  misc_feature (184)..(383): NCBI GI NO: 34394344 NR Description: auxin efflux carrier protein family-like protein
  misc_feature (1)..(203): NCBI GI NO: 18409758 NR Description: expressed protein; protein id: At1g71090
  misc_feature (220)..(385): NCBI GI NO: 18409758 NR Description: expressed protein; protein id: At1g71090
  misc_feature (315)..(315): Xaa is any aa, unknown or other
  misc_feature (316)..(316): Xaa is any aa, unknown or other
  misc_feature (319)..(319): Xaa is any aa, unknown or other
MPVIQVLFMSLVGAFMASDRCKLFPVEARNSMNKVVFVLFAPALMFANLAQTVTLEDIISWWFMPVNMGLTFLIGGLLGWLVVKILKPPPYLEGLIVATCSAGNMGNLPIILVPAICDEDKSPFGNRSVCRTVGLSYASFSMALGGFYIWTYTFRLIKGSAMKVQAIEESEKIAIKSSNSDLEADHKTHLLGAPEDKENKVVKEETGFWRKGVDFLHEILEELLAPPTLGAIIGFIFGAVRWLRNLIIGDDAPLRIVQSTAKLLGDGTIPCMTIILGGNLIQGLRSSAVKPMVVLGIVCARYIAMPIIGIGIVLXXANXGFLPADPLFQYVLMLQFTLPPAMNIGTMTQLYNVAQDECSVLMLWTYLVAILALTVWSTIFLHLLV

SEQ ID NO: 4303 - protein, 377 aa, Arabidopsis thaliana
  peptide (1)..(377): Ceres Seq. ID no. 12330909
  misc_feature (1)..(369): Pfam Name: Pfam Description:  Auxin Efflux Carrier
  misc_feature (1)..(377): NCBI GI NO: 21536598 NR Description: unknown [Arabidopsis thaliana]
  misc_feature (1)..(377): NCBI GI NO: 18398448 NR Description: expressed protein; protein id: At2g17500
  misc_feature (1)..(376): NCBI GI NO: 15239215 NR Description: putative protein; protein id: At5g65980.1
  misc_feature (1)..(376): NCBI GI NO: 18411126 NR Description: expressed protein; protein id: At1g76520
  misc_feature (1)..(376): NCBI GI NO: 21553424 NR Description: unknown [Arabidopsis thaliana]
  misc_feature (1)..(376): NCBI GI NO: 22329697 NR Description: hypothetical protein; protein id: At1g20925.1
  misc_feature (1)..(376): NCBI GI NO: 15241659 NR Description: putative protein; protein id: At5g01990.1
  misc_feature (176)..(375): NCBI GI NO: 34394344 NR Description: auxin efflux carrier protein family-like protein
  misc_feature (1)..(195): NCBI GI NO: 18409758 NR Description: expressed protein; protein id: At1g71090
  misc_feature (212)..(377): NCBI GI NO: 18409758 NR Description: expressed protein; protein id: At1g71090
  misc_feature (307)..(307): Xaa is any aa, unknown or other
  misc_feature (308)..(308): Xaa is any aa, unknown or other
  misc_feature (311)..(311): Xaa is any aa, unknown or other
MSLVGAFMASDRCKLFPVEARNSMNKVVFVLFAPALMFANLAQTVTLEDIISWWFMPVNMGLTFLIGGLLGWLVVKILKPPPYLEGLIVATCSAGNMGNLPIILVPAICDEDKSPFGNRSVCRTVGLSYASFSMALGGFYIWTYTFRLIKGSAMKVQAIEESEKIAIKSSNSDLEADHKTHLLGAPEDKENKVVKEETGFWRKGVDFLHEILEELLAPPTLGAIIGFIFGAVRWLRNLIIGDDAPLRIVQSTAKLLGDGTIPCMTIILGGNLIQGLRSSAVKPMVVLGIVCARYIAMPIIGIGIVLXXANXGFLPADPLFQYVLMLQFTLPPAMNIGTMTQLYNVAQDECSVLMLWTYLVAILALTVWSTIFLHLLV

SEQ ID NO: 4304 - DNA, 1779 bp, Arabidopsis thaliana
  misc_feature (1)..(1779): Ceres Seq. ID no. 12343534
  misc_feature (1470)..(1470): n is a, c, t, g, unknown, or other
cttcaatctctcgtctcttactaacgttatttcttcaatctcattgatcaaaaaaaccaaaaccctaatctcaatttcctccaaaagtttcagtttttaaaaatgggttttcttcttttgtaacgaaaaatgtgtcaaactttgaattgaccatttttttttataaggattcgatgaagaaattgagaagctattactcaaatgtgagacatcatcagaatcaccatcatcatcaccatcatcatagcaacattgtttcttcagagaggaaatggatatttttccctctattgattggttcaatcttcgctttgttcttactcttcctcacaacaaccctaacttcaccaaccggaggagtccggtttctcccttttacccgacccgttttgttaaccggatctggttcatcagctttcgttgaatccaaaatcaaacctcaacaaatctcatcactcccgtcgccaccgcgttttgcttacttgatttctggatccgccggtgacgggaaatctctccggcgaactcttttggctctttaccatccgaataatcggtatgttgttcatttagatagagaatcttccatggaagagagagaggagcttcatggatatatcaaaaactcgtctttgtttcgaaggtttatgaatgttcatatgattgagaaagctaatcttgtcacgtatcgtggacctactatggttgccaatacacttcacgctgcggcgattttgcttagagaaggagctgattgggattggtttattaatcttagctcttctgattatcctctagtgactcatgatgatttgttgcatatcttttcgcatttgccgcgggatttgaacttcattgatcatactagtaacattggatggaaagcatcacaaagagcaaaaccggtgattatagatcctggactgtatttgaacaagaaatctgatgttttttgggttacgcaaagacggagcatcccaacagcattcaagcttttcacaggctctgcttggatggcgttatctcggccattcgtcgactattgtatatggggttgggataatctacctcgtacggtcttaatgtattactcgaattttctctcttctccagaaggatattttcacactgttctctgcaacgctgaggaattcagaaacacaacggtaaatagcaacctgcacttcatatcgtgggacaatccgcctaagcagcatccacaccatctcactcttacagacatgaccaaaatggtaaatagcaatgccccgtttgctagaaagttcagaagagaagatcctgtccttgacaagatcgatgatgagctccttaacagaggtcctgggatgataacacctggcggttggtgcattggaagccatgagaatgggagtgacccttgtgctgttattggtgatactgatgttatcaggcctggtccaggcgctagacggctcgagaatctggtanttcgttattatccactgagaatttccgatcaaaacagtgtaagtgatctgatatatctagagaacgacatcacacagagatggaatgtagcagccttgattattggggttagatgtgatttaggatctgatagaaatccctcttttagtcaagaatataagtgaagaaatacagaacaattaggctatatgatgtgggaagtatttgtcttgttgctccacacaacatgccttaaggtcttgttgtagttctcagattggaattttgagattttgtactctgctgttttaaaattagtttcttcctttc

SEQ ID NO: 4305 - protein, 486 aa, Arabidopsis thaliana
  peptide (1)..(486): Ceres Seq. ID no. 12343535
  misc_feature (101)..(326): Pfam Name: Pfam Description:  Core-2/I-Branching enzyme
  misc_feature (1)..(432): NCBI GI NO: 15242532 NR Description: N-acetylglucosaminyltransferase family
  misc_feature (1)..(432): NCBI GI NO: 15242199 NR Description: N-acetylglucosaminyltransferase family
  misc_feature (28)..(434): NCBI GI NO: 18400725 NR Description: N-acetylglucosaminyltransferase family
  misc_feature (28)..(434): NCBI GI NO: 15146308 NR Description: AT3g15350/K7L4_15 [Arabidopsis thaliana]
  misc_feature (20)..(432): NCBI GI NO: 15218824 NR Description: N-acetylglucosaminyltransferase family
  misc_feature (29)..(434): NCBI GI NO: 30687610 NR Description: N-acetylglucosaminyltransferase family
  misc_feature (20)..(432): NCBI GI NO: 15236287 NR Description: N-acetylglucosaminyltransferase family
  misc_feature (56)..(434): NCBI GI NO: 7486258 NR Description: hypothetical protein F27G19
  misc_feature (45)..(434): NCBI GI NO: 34903664 NR Description: B1015E06.17
  misc_feature (31)..(434): NCBI GI NO: 15219202 NR Description: N-acetylglucosaminyltransferase family
  misc_feature (433)..(433): Xaa is any aa, unknown or other
MKKLRSYYSNVRHHQNHHHHHHHHSNIVSSERKWIFFPLLIGSIFALFLLFLTTTLTSPTGGVRFLPFTRPVLLTGSGSSAFVESKIKPQQISSLPSPPRFAYLISGSAGDGKSLRRTLLALYHPNNRYVVHLDRESSMEEREELHGYIKNSSLFRRFMNVHMIEKANLVTYRGPTMVANTLHAAAILLREGADWDWFINLSSSDYPLVTHDDLLHIFSHLPRDLNFIDHTSNIGWKASQRAKPVIIDPGLYLNKKSDVFWVTQRRSIPTAFKLFTGSAWMALSRPFVDYCIWGWDNLPRTVLMYYSNFLSSPEGYFHTVLCNAEEFRNTTVNSNLHFISWDNPPKQHPHHLTLTDMTKMVNSNAPFARKFRREDPVLDKIDDELLNRGPGMITPGGWCIGSHENGSDPCAVIGDTDVIRPGPGARRLENLVXRYYPLRISDQNSVSDLIYLENDITQRWNVAALIIGVRCDLGSDRNPSFSQEYK

SEQ ID NO: 4306 - protein, 348 aa, Arabidopsis thaliana
  peptide (1)..(348): Ceres Seq. ID no. 12343536
  misc_feature (1)..(188): Pfam Name: Pfam Description:  Core-2/I-Branching enzyme
  misc_feature (1)..(294): NCBI GI NO: 15242532 NR Description: N-acetylglucosaminyltransferase family
  misc_feature (1)..(294): NCBI GI NO: 15242199 NR Description: N-acetylglucosaminyltransferase family
  misc_feature (1)..(296): NCBI GI NO: 18400725 NR Description: N-acetylglucosaminyltransferase family
  misc_feature (1)..(296): NCBI GI NO: 15146308 NR Description: AT3g15350/K7L4_15 [Arabidopsis thaliana]
  misc_feature (1)..(294): NCBI GI NO: 15218824 NR Description: N-acetylglucosaminyltransferase family
  misc_feature (1)..(296): NCBI GI NO: 30687610 NR Description: N-acetylglucosaminyltransferase family
  misc_feature (1)..(294): NCBI GI NO: 15236287 NR Description: N-acetylglucosaminyltransferase family
  misc_feature (1)..(296): NCBI GI NO: 7486258 NR Description: hypothetical protein F27G19
  misc_feature (1)..(296): NCBI GI NO: 34903664 NR Description: B1015E06.17
  misc_feature (1)..(296): NCBI GI NO: 15219202 NR Description: N-acetylglucosaminyltransferase family
  misc_feature (295)..(295): Xaa is any aa, unknown or other
MEEREELHGYIKNSSLFRRFMNVHMIEKANLVTYRGPTMVANTLHAAAILLREGADWDWFINLSSSDYPLVTHDDLLHIFSHLPRDLNFIDHTSNIGWKASQRAKPVIIDPGLYLNKKSDVFWVTQRRSIPTAFKLFTGSAWMALSRPFVDYCIWGWDNLPRTVLMYYSNFLSSPEGYFHTVLCNAEEFRNTTVNSNLHFISWDNPPKQHPHHLTLTDMTKMVNSNAPFARKFRREDPVLDKIDDELLNRGPGMITPGGWCIGSHENGSDPCAVIGDTDVIRPGPGARRLENLVXRYYPLRISDQNSVSDLIYLENDITQRWNVAALIIGVRCDLGSDRNPSFSQEYK

SEQ ID NO: 4307 - protein, 328 aa, Arabidopsis thaliana
  peptide (1)..(328): Ceres Seq. ID no. 12343537
  misc_feature (1)..(168): Pfam Name: Pfam Description:  Core-2/I-Branching enzyme
  misc_feature (1)..(274): NCBI GI NO: 15242532 NR Description: N-acetylglucosaminyltransferase family
  misc_feature (1)..(274): NCBI GI NO: 15242199 NR Description: N-acetylglucosaminyltransferase family
  misc_feature (1)..(276): NCBI GI NO: 18400725 NR Description: N-acetylglucosaminyltransferase family
  misc_feature (1)..(276): NCBI GI NO: 15146308 NR Description: AT3g15350/K7L4_15 [Arabidopsis thaliana]
  misc_feature (1)..(274): NCBI GI NO: 15218824 NR Description: N-acetylglucosaminyltransferase family
  misc_feature (1)..(276): NCBI GI NO: 30687610 NR Description: N-acetylglucosaminyltransferase family
  misc_feature (1)..(274): NCBI GI NO: 15236287 NR Description: N-acetylglucosaminyltransferase family
  misc_feature (1)..(276): NCBI GI NO: 7486258 NR Description: hypothetical protein F27G19
  misc_feature (1)..(276): NCBI GI NO: 34903664 NR Description: B1015E06.17
  misc_feature (1)..(276): NCBI GI NO: 15219202 NR Description: N-acetylglucosaminyltransferase family
  misc_feature (275)..(275): Xaa is any aa, unknown or other
MNVHMIEKANLVTYRGPTMVANTLHAAAILLREGADWDWFINLSSSDYPLVTHDDLLHIFSHLPRDLNFIDHTSNIGWKASQRAKPVIIDPGLYLNKKSDVFWVTQRRSIPTAFKLFTGSAWMALSRPFVDYCIWGWDNLPRTVLMYYSNFLSSPEGYFHTVLCNAEEFRNTTVNSNLHFISWDNPPKQHPHHLTLTDMTKMVNSNAPFARKFRREDPVLDKIDDELLNRGPGMITPGGWCIGSHENGSDPCAVIGDTDVIRPGPGARRLENLVXRYYPLRISDQNSVSDLIYLENDITQRWNVAALIIGVRCDLGSDRNPSFSQEYK

SEQ ID NO: 4308 - DNA, 1207 bp, Arabidopsis thaliana
  misc_feature (1)..(1207): Ceres Seq. ID no. 12395464
atgacgacgacgacgacgattcagtctcctctctctacacgttgaatttcaatcggcttcacgaaccttcaatctcgtgcggatcgaaattcgatcagtttgtagtaaccgacaagttccgaagatttttcatctgctggatttcgtcgatcagattgaaaccgagcttttcaatcaggtgacttggatatttctctacgttatgctcgatctgaagaattgggattcaaatctagtctcatagatcgattctgattaaactcgtggagatccaatctctatcactagttcgattggattgttgtttgttatcttcaaggcctctctgtgtttgtgagtgagatggtatatttgcatagctcaatctcggtctgcaattccgtcgacccaatgatcatgtctcactcctcacctaaatccagaaacacccgtaataaatcttcatcatcaccaacctgttccaaattccctgtctgcgacggatctcagtccgctgctatcgacgtcgtgatccttatcgcggtcatcaccgcctgcggcttcctcttcttcccttacgtcaaactcatcaccctcaaatcgattgaggtcttttcagatctctctcttttagtcaaacaagagattttgcagaacccgattgtgtatggatcattagctttgagtatcttctgtgctgccatctctacttggcttgttatactcttgtgtactatgcagagatgcggcaaaccgaattgtaaaggccttaggaaagctgttgagtttgatattcagcttgagactgaggaatgcgtcaagagctccagcaacaagaggggaatgtttgagttgcctcgtgttcatcaccgtgaattggaagctgagctgaagaagatggctccgcctaatgggcgagccgtgcttgttttcagagcgaggtgtggttgttctgtaaggagattagtcgtttccgggccaaagaagcagcagaggaagatcaagaaatgaataagcgaacaaagttattatatatataaaaaaaggttcaatctttggaaatgagattggatcactacacttttcttcggttagttttattctctcatacacactcttttacaaaaacttatatatgttatagtccatgtgtttaaataatgtacaatgggaataagcattgtaaggatattgtgggaaccaggttatagtgaagaacattttggtc

SEQ ID NO: 4309 - protein, 215 aa, Arabidopsis thaliana
  peptide (1)..(215): Ceres Seq. ID no. 12395465
  misc_feature (1)..(215): NCBI GI NO: 18395728 NR Description: Expressed protein; protein id: At3g01170
  misc_feature (1)..(193): NCBI GI NO: 6714471 NR Description: unknown protein [Arabidopsis thaliana]
  misc_feature (1)..(215): NCBI GI NO: 22326823 NR Description: putative protein; protein id: At5g15260
  misc_feature (21)..(215): NCBI GI NO: 11288897 NR Description: hypothetical protein F8M21
  misc_feature (9)..(214): NCBI GI NO: 15230653 NR Description: unknown protein; protein id: At3g06180.1
  misc_feature (106)..(214): NCBI GI NO: 15239636 NR Description: putative protein; protein id: At5g19020.1
MVYLHSSISVCNSVDPMIMSHSSPKSRNTRNKSSSSPTCSKFPVCDGSQSAAIDVVILIAVITACGFLFFPYVKLITLKSIEVFSDLSLLVKQEILQNPIVYGSLALSIFCAAISTWLVILLCTMQRCGKPNCKGLRKAVEFDIQLETEECVKSSSNKRGMFELPRVHHRELEAELKKMAPPNGRAVLVFRARCGCSVRRLVVSGPKKQQRKIKK

SEQ ID NO: 4310 - protein, 199 aa, Arabidopsis thaliana
  peptide (1)..(199): Ceres Seq. ID no. 12395466
  misc_feature (1)..(199): NCBI GI NO: 18395728 NR Description: Expressed protein; protein id: At3g01170
  misc_feature (1)..(177): NCBI GI NO: 6714471 NR Description: unknown protein [Arabidopsis thaliana]
  misc_feature (1)..(199): NCBI GI NO: 22326823 NR Description: putative protein; protein id: At5g15260
  misc_feature (5)..(199): NCBI GI NO: 11288897 NR Description: hypothetical protein F8M21
  misc_feature (1)..(198): NCBI GI NO: 15230653 NR Description: unknown protein; protein id: At3g06180.1
  misc_feature (90)..(198): NCBI GI NO: 15239636 NR Description: putative protein; protein id: At5g19020.1
MIMSHSSPKSRNTRNKSSSSPTCSKFPVCDGSQSAAIDVVILIAVITACGFLFFPYVKLITLKSIEVFSDLSLLVKQEILQNPIVYGSLALSIFCAAISTWLVILLCTMQRCGKPNCKGLRKAVEFDIQLETEECVKSSSNKRGMFELPRVHHRELEAELKKMAPPNGRAVLVFRARCGCSVRRLVVSGPKKQQRKIKK

SEQ ID NO: 4311 - protein, 197 aa, Arabidopsis thaliana
  peptide (1)..(197): Ceres Seq. ID no. 12395467
  misc_feature (1)..(197): NCBI GI NO: 18395728 NR Description: Expressed protein; protein id: At3g01170
  misc_feature (1)..(175): NCBI GI NO: 6714471 NR Description: unknown protein [Arabidopsis thaliana]
  misc_feature (1)..(197): NCBI GI NO: 22326823 NR Description: putative protein; protein id: At5g15260
  misc_feature (3)..(197): NCBI GI NO: 11288897 NR Description: hypothetical protein F8M21
  misc_feature (1)..(196): NCBI GI NO: 15230653 NR Description: unknown protein; protein id: At3g06180.1
  misc_feature (88)..(196): NCBI GI NO: 15239636 NR Description: putative protein; protein id: At5g19020.1
MSHSSPKSRNTRNKSSSSPTCSKFPVCDGSQSAAIDVVILIAVITACGFLFFPYVKLITLKSIEVFSDLSLLVKQEILQNPIVYGSLALSIFCAAISTWLVILLCTMQRCGKPNCKGLRKAVEFDIQLETEECVKSSSNKRGMFELPRVHHRELEAELKKMAPPNGRAVLVFRARCGCSVRRLVVSGPKKQQRKIKK

SEQ ID NO: 4312 - DNA, 1285 bp, Arabidopsis thaliana
  misc_feature (1)..(1285): Ceres Seq. ID no. 12395440
accatttccaatggccggagcagtaagcctttggcggagagaggccgtgttcttgacggcgatgctggcaggcgaaaccagcatcgtcggactaagtactctgtttaaggtagcaacttcaaagggactcaacatttaccctttcctcagctattcttatcttcttgcttctcttctccttcttccttctctgttcttcaccaacaggtcaagatcacttcctccactaagtgcctcaatactctctaagattggacttcttggctttctaggatcaatgtatgttattacaggaggcataggcatcgaatacagcaacccaaccttagcctccgccataggcaatattgttcctgctcttaccttcatcctcgctgttatcttcaggatggagaaagtatcattcaaagaaaggagcagtgtagccaaagtgatggggacgatactgtcactaataggcgcatttgtggtgattttctaccacggtccacgtgtctttgtcgcatcttctccaccatatctaaacttccgtcagctttctccaccgttgtcatcgtcaaagtctgattggctcatcggaggagctattcttaccatacaaggcatcttcgtttctgtttcttttattctccaggcacatataatgagagaatatcctgaagcattcacagtctccattctctacattctatgtatttcaatcgtgacctcaatgattggactagtagtcgaaaagaacaacccaagcatttggatcattcatttcgatattacattgtttacaattgttactacgggaataataacttcagtatactatgtgattcattcatgggcaatacgtcacaaaggacctctatacttagcgatatttaagcctctatctattttgatagcagtggttatggggaccatttttctcaacgattctctctatctcggatgtttgattggaggaattttgataacattaggcttttatgctgtgatgtggggcaaatcaaacgaagagaaggacaagttgttatcattttcaggaaaagagaaaacccctcttctattgagcggcaaaaacgaacaagtttaaatgaaaaataaattataatcaaaggagttacaaactctcaaatagtatcttatatacatggcgtgcaaacttttagtgtatactgtgtattgctttgtatataacttagaaaatgactatctaattgtttttttaagttacgggtacgtaacgactatctaaattcgttagatcacgacatctaacgaattttggtcc

SEQ ID NO: 4313 - protein, 361 aa, Arabidopsis thaliana
  peptide (1)..(361): Ceres Seq. ID no. 12395441
  misc_feature (26)..(159): Pfam Name: Pfam Description:  Integral membrane protein DUF6
  misc_feature (4)..(361): NCBI GI NO: 21618226 NR Description: contains similarity to integral membrane protein nodulin
  misc_feature (4)..(361): NCBI GI NO: 18405642 NR Description: expressed protein; protein id: At3g28080
  misc_feature (4)..(361): NCBI GI NO: 30689045 NR Description: nodulin MtN21 family protein
  misc_feature (4)..(361): NCBI GI NO: 22331380 NR Description: unknown protein; protein id: At3g28070
  misc_feature (4)..(356): NCBI GI NO: 11994130 NR Description: contains similarity to integral membrane proteinnodulin~gene_id:MMG15
  misc_feature (93)..(361): NCBI GI NO: 11994129 NR Description: contains similarity to nodulin~gene_id:MMG15.13
  misc_feature (4)..(264): NCBI GI NO: 11994127 NR Description: contains similarity to nodulin~gene_id:MMG15.11
  misc_feature (130)..(356): NCBI GI NO: 15232901 NR Description: unknown protein; protein id: At3g28100.1
  misc_feature (92)..(353): NCBI GI NO: 18405657 NR Description: expressed protein; protein id: At3g28130
  misc_feature (181)..(353): NCBI GI NO: 18421959 NR Description: putative protein; protein id: At5g40210
PFPMAGAVSLWRREAVFLTAMLAGETSIVGLSTLFKVATSKGLNIYPFLSYSYLLASLLLLPSLFFTNRSRSLPPLSASILSKIGLLGFLGSMYVITGGIGIEYSNPTLASAIGNIVPALTFILAVIFRMEKVSFKERSSVAKVMGTILSLIGAFVVIFYHGPRVFVASSPPYLNFRQLSPPLSSSKSDWLIGGAILTIQGIFVSVSFILQAHIMREYPEAFTVSILYILCISIVTSMIGLVVEKNNPSIWIIHFDITLFTIVTTGIITSVYYVIHSWAIRHKGPLYLAIFKPLSILIAVVMGTIFLNDSLYLGCLIGGILITLGFYAVMWGKSNEEKDKLLSFSGKEKTPLLLSGKNEQV

SEQ ID NO: 4314 - protein, 358 aa, Arabidopsis thaliana
  peptide (1)..(358): Ceres Seq. ID no. 12395442
  misc_feature (23)..(156): Pfam Name: Pfam Description:  Integral membrane protein DUF6
  misc_feature (1)..(358): NCBI GI NO: 21618226 NR Description: contains similarity to integral membrane protein nodulin
  misc_feature (1)..(358): NCBI GI NO: 18405642 NR Description: expressed protein; protein id: At3g28080
  misc_feature (1)..(358): NCBI GI NO: 30689045 NR Description: nodulin MtN21 family protein
  misc_feature (1)..(358): NCBI GI NO: 22331380 NR Description: unknown protein; protein id: At3g28070
  misc_feature (1)..(353): NCBI GI NO: 11994130 NR Description: contains similarity to integral membrane proteinnodulin~gene_id:MMG15
  misc_feature (90)..(358): NCBI GI NO: 11994129 NR Description: contains similarity to nodulin~gene_id:MMG15.13
  misc_feature (1)..(261): NCBI GI NO: 11994127 NR Description: contains similarity to nodulin~gene_id:MMG15.11
  misc_feature (127)..(353): NCBI GI NO: 15232901 NR Description: unknown protein; protein id: At3g28100.1
  misc_feature (89)..(350): NCBI GI NO: 18405657 NR Description: expressed protein; protein id: At3g28130
  misc_feature (178)..(350): NCBI GI NO: 18421959 NR Description: putative protein; protein id: At5g40210
MAGAVSLWRREAVFLTAMLAGETSIVGLSTLFKVATSKGLNIYPFLSYSYLLASLLLLPSLFFTNRSRSLPPLSASILSKIGLLGFLGSMYVITGGIGIEYSNPTLASAIGNIVPALTFILAVIFRMEKVSFKERSSVAKVMGTILSLIGAFVVIFYHGPRVFVASSPPYLNFRQLSPPLSSSKSDWLIGGAILTIQGIFVSVSFILQAHIMREYPEAFTVSILYILCISIVTSMIGLVVEKNNPSIWIIHFDITLFTIVTTGIITSVYYVIHSWAIRHKGPLYLAIFKPLSILIAVVMGTIFLNDSLYLGCLIGGILITLGFYAVMWGKSNEEKDKLLSFSGKEKTPLLLSGKNEQV

SEQ ID NO: 4315 - protein, 341 aa, Arabidopsis thaliana
  peptide (1)..(341): Ceres Seq. ID no. 12395443
  misc_feature (6)..(139): Pfam Name: Pfam Description:  Integral membrane protein DUF6
  misc_feature (1)..(341): NCBI GI NO: 21618226 NR Description: contains similarity to integral membrane protein nodulin
  misc_feature (1)..(341): NCBI GI NO: 18405642 NR Description: expressed protein; protein id: At3g28080
  misc_feature (1)..(341): NCBI GI NO: 30689045 NR Description: nodulin MtN21 family protein
  misc_feature (1)..(341): NCBI GI NO: 22331380 NR Description: unknown protein; protein id: At3g28070
  misc_feature (1)..(336): NCBI GI NO: 11994130 NR Description: contains similarity to integral membrane proteinnodulin~gene_id:MMG15
  misc_feature (73)..(341): NCBI GI NO: 11994129 NR Description: contains similarity to nodulin~gene_id:MMG15.13
  misc_feature (1)..(244): NCBI GI NO: 11994127 NR Description: contains similarity to nodulin~gene_id:MMG15.11
  misc_feature (110)..(336): NCBI GI NO: 15232901 NR Description: unknown protein; protein id: At3g28100.1
  misc_feature (72)..(333): NCBI GI NO: 18405657 NR Description: expressed protein; protein id: At3g28130
  misc_feature (161)..(333): NCBI GI NO: 18421959 NR Description: putative protein; protein id: At5g40210
MLAGETSIVGLSTLFKVATSKGLNIYPFLSYSYLLASLLLLPSLFFTNRSRSLPPLSASILSKIGLLGFLGSMYVITGGIGIEYSNPTLASAIGNIVPALTFILAVIFRMEKVSFKERSSVAKVMGTILSLIGAFVVIFYHGPRVFVASSPPYLNFRQLSPPLSSSKSDWLIGGAILTIQGIFVSVSFILQAHIMREYPEAFTVSILYILCISIVTSMIGLVVEKNNPSIWIIHFDITLFTIVTTGIITSVYYVIHSWAIRHKGPLYLAIFKPLSILIAVVMGTIFLNDSLYLGCLIGGILITLGFYAVMWGKSNEEKDKLLSFSGKEKTPLLLSGKNEQV

SEQ ID NO: 4316 - DNA, 2508 bp, Arabidopsis thaliana
  misc_feature (1)..(2508): Ceres Seq. ID no. 13494685
ggttttaagccatttttttcccaccgcctctgcagctctgcttttttagctgctattttttttttttgcttttggtcttcttcttcttcttcaagaatgagctaatactcacagaagaagaagatttttctttggatttttcactactgaggcattgttgtgaaattggatggtagtagcattggaatggcagaacaaaagagtagtaacggaggaggaggaggaggagatgttgttatcaatgttccagttgaggaagcatcaaggcgttccaaggaaatggcttcaccagagtctgagaaaggagttccctttagtaaaagcccttctcctgaaatctctaagcttgttggtagtcctaacaagcctcctagagctccaaatcagaacaatgtgggtctaactcagaggaaatcttttgcaaggtcggtttactcaaaacccaagtcccggtttgttgatccatcttgtcctgtagacacaagtattctagaggaggaagttagggagcaacttggtgctggtttttcttttagtagagcttctccgaataacaaatctaataggagtgtcgggtcaccagcaccggttactccaagtaaagtcgttgttgagaaagatgaggatgaggaaatctacaagaaggttaagctgaacagagagatgcgcagtaagataagtacattggctttgatagagtcagctttctttgtggtgattttgagcgctttggttgcgagtttaaccattaatgtcctgaaacatcacaccttctgggggctagaagtctggaaatggtgtgtgcttgtgatggttatattcagtggaatgttggtgacaaactggttcatgcgtttgattgtgttcctcatagaaacaaactttcttttgaggagaaaagtgctctactttgtgcacggcttgaagaagagcgtccaagttttcatttggctctgcttgattcttgttgcttggatattgttgttcaaccacgacgtgaaacggtcccccgcagccaccaaagtcctcaaatgtattaccaggactcttatttccattcttacaggggcattcttttggctggtgaaaacactcttgttgaaaatccttgcagcgaatttcaacgtcaataactttttcgataggattcaagattctgttttccaccagtatgttctacaaacgctctcgggtcttccacttatggaagaggcagagagggtcgggcgtgagccaagcacaggccatttgagtttcgcgactgtagtgaaaaaaggaacggttaaagagaagaaagtgattgatatggggaaagttcataagatgaagcgggagaaagtttcggcttggactatgcgagttttgatggaagcggttagaacttcaggtctctctactatctctgacacattggacgaaacagcatacggcgaggggaaagagcaagctgacagagaaattactagtgagatggaggctttggctgctgcttaccatgtcttcagaaatgttgctcagcccttcttcaattacatagaggaagaggacttgcttaggtttatgattaaggaagaggttgatcttgtgttcccattgtttgatggtgccgctgagaccgggagaattacaagaaaagctttcacagaatgggtggttaaggtgtacacgagccggagagctttagcgcattccttaaacgacacaaaaacagcggttaagcagttaaacaaacttgtgacagcaatcttgatggtggttaccgttgtcatttggctgctccttctagaagtagcaacgactaaggttttgctgttcttctccacccaactcgtggctctggcttttataatcggaagcacatgcaaaaacctctttgaatccattgtgttcgtattcgtcatgcatccttatgatgtcggtgatcgatgtgttgttgacggtgtcgcgatgctggtggaagaaatgaatctcttaacgacagtgttcttgaagcttaacaacgagaaagtgtattatccgaacgctgttttggccacgaaaccgataagcaattacttcagaagtccgaatatgggagaaacagtggaattctctatctctttctcgacaccagtctctaagatagcacatctcaaagaaagaatcgccgagtacttggagcagaacccgcaacattgggcaccggttcactcggtggtggtgaaggagatagagaacatgaacaagctgaagatggccctatacagtgaccacaccatcacgtttcaggaaaacagagagaggaatcttagaagaaccgaactttctttggccattaagagaatgttggaggaccttcacatcgactacactctccttcctcaagacattaatctcacaaagaagaactgatgagaaccaatttaaaaccggtttggtgttttttctaaaccgttgttataagacattattattaccaaacgttgtgatactgttttgtttaaggcttttagagtagatgatgaaatc

SEQ ID NO: 4317 - protein, 734 aa, Arabidopsis thaliana
  peptide (1)..(734): Ceres Seq. ID no. 13494686
  misc_feature (514)..(722): Pfam Name: Pfam Description:  Mechanosensitive ion channel
  misc_feature (1)..(731): NCBI GI NO: 15239769 NR Description: expressed protein [Arabidopsis thaliana]
  misc_feature (35)..(731): NCBI GI NO: 18390104 NR Description: putative protein T30F21.6 [Sorghum bicolor]
  misc_feature (372)..(730): NCBI GI NO: 38345847 NR Description: OSJNBa0084K11.11
  misc_feature (84)..(343): NCBI GI NO: 38345847 NR Description: OSJNBa0084K11.11
  misc_feature (298)..(730): NCBI GI NO: 15227342 NR Description: hypothetical protein [Arabidopsis thaliana]
  misc_feature (142)..(349): NCBI GI NO: 15227342 NR Description: hypothetical protein [Arabidopsis thaliana]
  misc_feature (476)..(730): NCBI GI NO: 30679840 NR Description: expressed protein [Arabidopsis thaliana]
  misc_feature (145)..(273): NCBI GI NO: 30679840 NR Description: expressed protein [Arabidopsis thaliana]
  misc_feature (379)..(444): NCBI GI NO: 30679840 NR Description: expressed protein [Arabidopsis thaliana]
  misc_feature (84)..(730): NCBI GI NO: 15231928 NR Description: hypothetical protein [Arabidopsis thaliana]
MAEQKSSNGGGGGGDVVINVPVEEASRRSKEMASPESEKGVPFSKSPSPEISKLVGSPNKPPRAPNQNNVGLTQRKSFARSVYSKPKSRFVDPSCPVDTSILEEEVREQLGAGFSFSRASPNNKSNRSVGSPAPVTPSKVVVEKDEDEEIYKKVKLNREMRSKISTLALIESAFFVVILSALVASLTINVLKHHTFWGLEVWKWCVLVMVIFSGMLVTNWFMRLIVFLIETNFLLRRKVLYFVHGLKKSVQVFIWLCLILVAWILLFNHDVKRSPAATKVLKCITRTLISILTGAFFWLVKTLLLKILAANFNVNNFFDRIQDSVFHQYVLQTLSGLPLMEEAERVGREPSTGHLSFATVVKKGTVKEKKVIDMGKVHKMKREKVSAWTMRVLMEAVRTSGLSTISDTLDETAYGEGKEQADREITSEMEALAAAYHVFRNVAQPFFNYIEEEDLLRFMIKEEVDLVFPLFDGAAETGRITRKAFTEWVVKVYTSRRALAHSLNDTKTAVKQLNKLVTAILMVVTVVIWLLLLEVATTKVLLFFSTQLVALAFIIGSTCKNLFESIVFVFVMHPYDVGDRCVVDGVAMLVEEMNLLTTVFLKLNNEKVYYPNAVLATKPISNYFRSPNMGETVEFSISFSTPVSKIAHLKERIAEYLEQNPQHWAPVHSVVVKEIENMNKLKMALYSDHTITFQENRERNLRRTELSLAIKRMLEDLHIDYTLLPQDINLTKKN

SEQ ID NO: 4318 - protein, 703 aa, Arabidopsis thaliana
  peptide (1)..(703): Ceres Seq. ID no. 13494687
  misc_feature (483)..(691): Pfam Name: Pfam Description:  Mechanosensitive ion channel
  misc_feature (1)..(700): NCBI GI NO: 15239769 NR Description: expressed protein [Arabidopsis thaliana]
  misc_feature (4)..(700): NCBI GI NO: 18390104 NR Description: putative protein T30F21.6 [Sorghum bicolor]
  misc_feature (341)..(699): NCBI GI NO: 38345847 NR Description: OSJNBa0084K11.11
  misc_feature (53)..(312): NCBI GI NO: 38345847 NR Description: OSJNBa0084K11.11
  misc_feature (267)..(699): NCBI GI NO: 15227342 NR Description: hypothetical protein [Arabidopsis thaliana]
  misc_feature (111)..(318): NCBI GI NO: 15227342 NR Description: hypothetical protein [Arabidopsis thaliana]
  misc_feature (445)..(699): NCBI GI NO: 30679840 NR Description: expressed protein [Arabidopsis thaliana]
  misc_feature (114)..(242): NCBI GI NO: 30679840 NR Description: expressed protein [Arabidopsis thaliana]
  misc_feature (348)..(413): NCBI GI NO: 30679840 NR Description: expressed protein [Arabidopsis thaliana]
  misc_feature (53)..(699): NCBI GI NO: 15231928 NR Description: hypothetical protein [Arabidopsis thaliana]
MASPESEKGVPFSKSPSPEISKLVGSPNKPPRAPNQNNVGLTQRKSFARSVYSKPKSRFVDPSCPVDTSILEEEVREQLGAGFSFSRASPNNKSNRSVGSPAPVTPSKVVVEKDEDEEIYKKVKLNREMRSKISTLALIESAFFVVILSALVASLTINVLKHHTFWGLEVWKWCVLVMVIFSGMLVTNWFMRLIVFLIETNFLLRRKVLYFVHGLKKSVQVFIWLCLILVAWILLFNHDVKRSPAATKVLKCITRTLISILTGAFFWLVKTLLLKILAANFNVNNFFDRIQDSVFHQYVLQTLSGLPLMEEAERVGREPSTGHLSFATVVKKGTVKEKKVIDMGKVHKMKREKVSAWTMRVLMEAVRTSGLSTISDTLDETAYGEGKEQADREITSEMEALAAAYHVFRNVAQPFFNYIEEEDLLRFMIKEEVDLVFPLFDGAAETGRITRKAFTEWVVKVYTSRRALAHSLNDTKTAVKQLNKLVTAILMVVTVVIWLLLLEVATTKVLLFFSTQLVALAFIIGSTCKNLFESIVFVFVMHPYDVGDRCVVDGVAMLVEEMNLLTTVFLKLNNEKVYYPNAVLATKPISNYFRSPNMGETVEFSISFSTPVSKIAHLKERIAEYLEQNPQHWAPVHSVVVKEIENMNKLKMALYSDHTITFQENRERNLRRTELSLAIKRMLEDLHIDYTLLPQDINLTKKN

SEQ ID NO: 4319 - protein, 575 aa, Arabidopsis thaliana
  peptide (1)..(575): Ceres Seq. ID no. 13494688
  misc_feature (355)..(563): Pfam Name: Pfam Description:  Mechanosensitive ion channel
  misc_feature (1)..(572): NCBI GI NO: 15239769 NR Description: expressed protein [Arabidopsis thaliana]
  misc_feature (1)..(572): NCBI GI NO: 18390104 NR Description: putative protein T30F21.6 [Sorghum bicolor]
  misc_feature (213)..(571): NCBI GI NO: 38345847 NR Description: OSJNBa0084K11.11
  misc_feature (1)..(184): NCBI GI NO: 38345847 NR Description: OSJNBa0084K11.11
  misc_feature (139)..(571): NCBI GI NO: 15227342 NR Description: hypothetical protein [Arabidopsis thaliana]
  misc_feature (1)..(190): NCBI GI NO: 15227342 NR Description: hypothetical protein [Arabidopsis thaliana]
  misc_feature (317)..(571): NCBI GI NO: 30679840 NR Description: expressed protein [Arabidopsis thaliana]
  misc_feature (1)..(114): NCBI GI NO: 30679840 NR Description: expressed protein [Arabidopsis thaliana]
  misc_feature (220)..(285): NCBI GI NO: 30679840 NR Description: expressed protein [Arabidopsis thaliana]
  misc_feature (1)..(571): NCBI GI NO: 15231928 NR Description: hypothetical protein [Arabidopsis thaliana]
MRSKISTLALIESAFFVVILSALVASLTINVLKHHTFWGLEVWKWCVLVMVIFSGMLVTNWFMRLIVFLIETNFLLRRKVLYFVHGLKKSVQVFIWLCLILVAWILLFNHDVKRSPAATKVLKCITRTLISILTGAFFWLVKTLLLKILAANFNVNNFFDRIQDSVFHQYVLQTLSGLPLMEEAERVGREPSTGHLSFATVVKKGTVKEKKVIDMGKVHKMKREKVSAWTMRVLMEAVRTSGLSTISDTLDETAYGEGKEQADREITSEMEALAAAYHVFRNVAQPFFNYIEEEDLLRFMIKEEVDLVFPLFDGAAETGRITRKAFTEWVVKVYTSRRALAHSLNDTKTAVKQLNKLVTAILMVVTVVIWLLLLEVATTKVLLFFSTQLVALAFIIGSTCKNLFESIVFVFVMHPYDVGDRCVVDGVAMLVEEMNLLTTVFLKLNNEKVYYPNAVLATKPISNYFRSPNMGETVEFSISFSTPVSKIAHLKERIAEYLEQNPQHWAPVHSVVVKEIENMNKLKMALYSDHTITFQENRERNLRRTELSLAIKRMLEDLHIDYTLLPQDINLTKKN

SEQ ID NO: 4320 - DNA, 573 bp, Arabidopsis thaliana
  misc_feature (1)..(573): Ceres Seq. ID no. 12393074
atcacttacttaacatactaagagagttattagaacttgcaaaaaatggcttccaaggctttgattctgttaggtctcttctcagttcttctcgtcgtctccgaagtgtcttccgcaaggcaatcgggcatggtgaagccagagagtgaggaaactgtgcaacctgaaggttatggcggtggccacggaggacatggtggtcacggagggggaggaggccacggacatggaggacacaacggaggagggggccacggacttgacggatacggaggaggtggaggacactatggaggaggtggaggacactacggaggaggtggaggacactacggaggtggtggaggaggatacggaggtggaggaggacaccacggaggaggaggccacgggctaaacgaacctgttcagactaagccgggtgtttaaaactatataatatcttcactaccatgcatgattgcatatatatatatacgcttatgtattatctatatgcctataaataaaccatggtgagtttgtaacgcagtgccttcagaaatgttcggaataaatttccataatattagt

SEQ ID NO: 4321 - protein, 127 aa, Arabidopsis thaliana
  peptide (1)..(127): Ceres Seq. ID no. 12393075
  misc_feature (38)..(120): Pfam Name: LMP1 Pfam Description: Herpesvirus latent membrane protein 1
  misc_feature (1)..(127): NCBI GI NO: 21536606 NR Description: putative glycine-rich protein
  misc_feature (1)..(127): NCBI GI NO: 15224540 NR Description: putative glycine-rich protein
  misc_feature (1)..(116): NCBI GI NO: 30678191 NR Description: glycine-rich protein [Arabidopsis thaliana]
  misc_feature (1)..(127): NCBI GI NO: 15224547 NR Description: putative glycine-rich protein
  misc_feature (1)..(127): NCBI GI NO: 9957568 NR Description: antimicrobial peptide shep-GRP
  misc_feature (42)..(127): NCBI GI NO: 30678191 NR Description: glycine-rich protein [Arabidopsis thaliana]
  misc_feature (1)..(116): NCBI GI NO: 15224548 NR Description: putative glycine-rich protein
  misc_feature (1)..(114): NCBI GI NO: 259447 NR Description: glycine-rich protein; atGRP [Arabidopsis thaliana]
  misc_feature (1)..(114): NCBI GI NO: 81625 NR Description: glycine-rich protein 3 precursor
  misc_feature (4)..(116): NCBI GI NO: 7488799 NR Description: dormancy-associated protein 2 - garden pea
MASKALILLGLFSVLLVVSEVSSARQSGMVKPESEETVQPEGYGGGHGGHGGHGGGGGHGHGGHNGGGGHGLDGYGGGGGHYGGGGGHYGGGGGHYGGGGGGYGGGGGHHGGGGHGLNEPVQTKPGV

SEQ ID NO: 4322 - protein, 99 aa, Arabidopsis thaliana
  peptide (1)..(99): Ceres Seq. ID no. 12393076
  misc_feature (10)..(92): Pfam Name: LMP1 Pfam Description: Herpesvirus latent membrane protein 1
  misc_feature (1)..(99): NCBI GI NO: 21536606 NR Description: putative glycine-rich protein
  misc_feature (1)..(99): NCBI GI NO: 15224540 NR Description: putative glycine-rich protein
  misc_feature (1)..(88): NCBI GI NO: 30678191 NR Description: glycine-rich protein [Arabidopsis thaliana]
  misc_feature (1)..(99): NCBI GI NO: 15224547 NR Description: putative glycine-rich protein
  misc_feature (1)..(99): NCBI GI NO: 9957568 NR Description: antimicrobial peptide shep-GRP
  misc_feature (14)..(99): NCBI GI NO: 30678191 NR Description: glycine-rich protein [Arabidopsis thaliana]
  misc_feature (1)..(88): NCBI GI NO: 15224548 NR Description: putative glycine-rich protein
  misc_feature (1)..(86): NCBI GI NO: 259447 NR Description: glycine-rich protein; atGRP [Arabidopsis thaliana]
  misc_feature (1)..(86): NCBI GI NO: 81625 NR Description: glycine-rich protein 3 precursor
  misc_feature (1)..(88): NCBI GI NO: 7488799 NR Description: dormancy-associated protein 2 - garden pea
MVKPESEETVQPEGYGGGHGGHGGHGGGGGHGHGGHNGGGGHGLDGYGGGGGHYGGGGGHYGGGGGHYGGGGGGYGGGGGHHGGGGHGLNEPVQTKPGV

SEQ ID NO: 4323 - protein, 74 aa, Arabidopsis thaliana
  peptide (1)..(74): Ceres Seq. ID no. 12393077
  misc_feature (1)..(73): Pfam Name: Pfam Description:  Transferrin binding protein-like solute binding protein
MAVATEDMVVTEGEEATDMEDTTEEGATDLTDTEEVEDTMEEVEDTTEEVEDTTEVVEEDTEVEEDTTEEEATG

SEQ ID NO: 4324 - DNA, 1334 bp, Arabidopsis thaliana
  misc_feature (1)..(1334): Ceres Seq. ID no. 13494122
acagcaaaaaatcgaaaatggttgcctcagccgccgcacatgagcaccgatcaatccaccaccgtcactttaccagacgtcatgactgctccagttcgacctgacattgtcaacttcgtccacgcccaaatctccaacaacagccgtcagccttacgcagtctccaaaaaggccggtcaccaaacctccgccgagtcctggggaaccggaagagccgtgtcacgtatccctcgtgttcctggtggtggaactcaccgtgccggtcaagcagcgttcggaaacatgtgtcgtggtggtcgtatgtttgctccgactaagatctggagacgctggcaccgtcgtgtcaatgtcaacatgaagaggcacgcgattgtttctgcaatcgctgctactgctgttccagctcttgtgatggctcgtggtcacaagatcgagaatgttcctgagatgcctcttgttgttagcgactcagctgaagctggtggagaagacatcagctgcgatcaaggtattgaagcagatcggtgcttacgacgatgcggagaaagctaagaacagtattggaattcgtcctggtaaaggtaaaatgaggaatcgtcgttacatttctaggaaaggtcctcttgttgtgtttggaactgaaggagccaagattgtgaaagcttttaggaatcttcctggtgttgagctttgtcacgttgagaggcttaacttgttgaaattagcccctggtggtcaccttggtaggtttgtgatttggactaagtctgcttttgagaagcttggatctatctatggctcgtttgagaaaccatcagagaagaagaagggttacgtcttgcctcgtgcgaagatggtgaatgctgatcttgctaggattattaactccgatgaggtacagagtgtggtgaacccgattaaggatggttccaagagagcggttctgaagaagaatccattgaagaaccttaatgtgatgttcaagttgaatccttatgctaagaccgcaaagagaatgtctctgttggctgaagcttcaagggttaaggctaagaaggagaagctcgagaagaagaggaaagtcgtcactaaggaggaggcccaagcgatcaaagcagcaggcaaggcttggtatcagactatgatttcagacagtgactacaccgagttcgataacttcaccaagtggcttggcgctagtcagtaatgatgctctcgtcatcgcaaagtctcttatatctaggcaaagattttggttttctgatttatgttcttcgtttgtattggatttatctgggattttatgttgttgagttggtaagacgatttttaag

SEQ ID NO: 4325 - protein, 256 aa, Arabidopsis thaliana
  peptide (1)..(256): Ceres Seq. ID no. 13494123
  misc_feature (7)..(119): Pfam Name: Pfam Description:  Ribosomal protein L4/L1 family
  misc_feature (7)..(256): NCBI GI NO: 15242558 NR Description: 60S ribosomal protein L4/L1 (RPL4D)
  misc_feature (7)..(256): NCBI GI NO: 26450328 NR Description: putative 60S ribosomal protein
  misc_feature (7)..(256): NCBI GI NO: 15232723 NR Description: 60S ribosomal protein L4/L1 (RPL4A)
  misc_feature (7)..(256): NCBI GI NO: 21593543 NR Description: 60S ribosomal protein L4-B (L1)
  misc_feature (7)..(256): NCBI GI NO: 17367847 NR Description: 60S ribosomal protein L4 (L1)
  misc_feature (7)..(256): NCBI GI NO: 13605831 NR Description: AT5g02870/F9G14_180 [Arabidopsis thaliana]
  misc_feature (7)..(256): NCBI GI NO: 34393487 NR Description: putative 60S ribosomal protein L4/L1
  misc_feature (7)..(256): NCBI GI NO: 34897236 NR Description: putative 60S ribosomal protein L1
  misc_feature (7)..(256): NCBI GI NO: 6441068 NR Description: 60S ribosomal protein L4 [Chlamydomonas sp. HS-5]
  misc_feature (7)..(221): NCBI GI NO: 1350686 NR Description: 60S RIBOSOMAL PROTEIN L4 (L1)
MFLRCLLLLATQLKLVEKTSAAIKVLKQIGAYDDAEKAKNSIGIRPGKGKMRNRRYISRKGPLVVFGTEGAKIVKAFRNLPGVELCHVERLNLLKLAPGGHLGRFVIWTKSAFEKLGSIYGSFEKPSEKKKGYVLPRAKMVNADLARIINSDEVQSVVNPIKDGSKRAVLKKNPLKNLNVMFKLNPYAKTAKRMSLLAEASRVKAKKEKLEKKRKVVTKEEAQAIKAAGKAWYQTMISDSDYTEFDNFTKWLGASQ

SEQ ID NO: 4326 - protein, 206 aa, Arabidopsis thaliana
  peptide (1)..(206): Ceres Seq. ID no. 13494124
  misc_feature (1)..(69): Pfam Name: Pfam Description:  Ribosomal protein L4/L1 family
  misc_feature (1)..(206): NCBI GI NO: 15242558 NR Description: 60S ribosomal protein L4/L1 (RPL4D)
  misc_feature (1)..(206): NCBI GI NO: 26450328 NR Description: putative 60S ribosomal protein
  misc_feature (1)..(206): NCBI GI NO: 15232723 NR Description: 60S ribosomal protein L4/L1 (RPL4A)
  misc_feature (1)..(206): NCBI GI NO: 21593543 NR Description: 60S ribosomal protein L4-B (L1)
  misc_feature (1)..(206): NCBI GI NO: 17367847 NR Description: 60S ribosomal protein L4 (L1)
  misc_feature (1)..(206): NCBI GI NO: 13605831 NR Description: AT5g02870/F9G14_180 [Arabidopsis thaliana]
  misc_feature (1)..(206): NCBI GI NO: 34393487 NR Description: putative 60S ribosomal protein L4/L1
  misc_feature (1)..(206): NCBI GI NO: 34897236 NR Description: putative 60S ribosomal protein L1
  misc_feature (1)..(206): NCBI GI NO: 6441068 NR Description: 60S ribosomal protein L4 [Chlamydomonas sp. HS-5]
  misc_feature (1)..(171): NCBI GI NO: 1350686 NR Description: 60S RIBOSOMAL PROTEIN L4 (L1)
MRNRRYISRKGPLVVFGTEGAKIVKAFRNLPGVELCHVERLNLLKLAPGGHLGRFVIWTKSAFEKLGSIYGSFEKPSEKKKGYVLPRAKMVNADLARIINSDEVQSVVNPIKDGSKRAVLKKNPLKNLNVMFKLNPYAKTAKRMSLLAEASRVKAKKEKLEKKRKVVTKEEAQAIKAAGKAWYQTMISDSDYTEFDNFTKWLGASQ

SEQ ID NO: 4327 - protein, 183 aa, Arabidopsis thaliana
  peptide (1)..(183): Ceres Seq. ID no. 13494125
  misc_feature (20)..(160): Pfam Name: Pfam Description:  Ribosomal protein L4/L1 family
  misc_feature (14)..(160): NCBI GI NO: 15242558 NR Description: 60S ribosomal protein L4/L1 (RPL4D)
  misc_feature (14)..(160): NCBI GI NO: 26450328 NR Description: putative 60S ribosomal protein
  misc_feature (14)..(160): NCBI GI NO: 15232723 NR Description: 60S ribosomal protein L4/L1 (RPL4A)
  misc_feature (14)..(160): NCBI GI NO: 21593543 NR Description: 60S ribosomal protein L4-B (L1)
  misc_feature (14)..(166): NCBI GI NO: 17367847 NR Description: 60S ribosomal protein L4 (L1)
  misc_feature (95)..(160): NCBI GI NO: 13605831 NR Description: AT5g02870/F9G14_180 [Arabidopsis thaliana]
  misc_feature (14)..(160): NCBI GI NO: 34393487 NR Description: putative 60S ribosomal protein L4/L1
  misc_feature (14)..(160): NCBI GI NO: 34897236 NR Description: putative 60S ribosomal protein L1
  misc_feature (44)..(160): NCBI GI NO: 6441068 NR Description: 60S ribosomal protein L4 [Chlamydomonas sp. HS-5]
  misc_feature (20)..(160): NCBI GI NO: 1350686 NR Description: 60S RIBOSOMAL PROTEIN L4 (L1)
TAKNRKWLPQPPHMSTDQSTTVTLPDVMTAPVRPDIVNFVHAQISNNSRQPYAVSKKAGHQTSAESWGTGRAVSRIPRVPGGGTHRAGQAAFGNMCRGGRMFAPTKIWRRWHRRVNVNMKRHAIVSAIAATAVPALVMARGHKIENVPEMPLVVSDSAEAGGEDISCDQGIEADRCLRRCGES

SEQ ID NO: 4328 - DNA, 1771 bp, Arabidopsis thaliana
  misc_feature (1)..(1771): Ceres Seq. ID no. 13495902
aaattcaattcgtttaaaaatggagagtcaaaagcaagaagataatgaatacattttccgcagtttgtatccatctgtgcccattcctgacaaacttacactgcctgaatttgtgctccaaggagttgaagaatacacagagaatgtagcgtttgtagaagcggtgaccggaaaagctgtgacgtacggtgatgtagtgagggacacaaagaggctagccaaagcgttgacatctctcggactaaggaaaggtcaagtgatggttgtggtcctaccaaacgtcgccgagtatgggattattgcccttggtattatgtctgccggtggagtcttctccggtgcaaatccgacggctcttgtttccgagatcaagaagcaagttgaagcttccggtgctagaggaatcatcactgatgctactaactatgaaaaggtgaaatcactaggtttaccggtgatagtgttaggtgaagagaagatagaaggagcagtaaactggaaagatcttctagaagcaggagacaaatgcggagataccgacaatgaagagattcttcagacagatctttgtgcacttcctttttcttcaggaacaacaggattacaaaaaggagtaatgctcacacatcgcaatctcatagccaatctttgctctactctcttcggtgtcaggtctgaaatgatcggtcagatcgtgacgcttggtttgatcccattctttcatatttacggtatcgttggcatatgttgtgctacaatgaagaataaaggcaaagttgttgctatgagtcggtacgatctaaggattttcttgaatgctttgattgctcatgaggtttcgtttgcgcctatagttccgccgattatattgaatcttgttaagaatccgatagttgatgagtttgatctttcgaagcttaaacttcagtctgtcatgactgctgctgctcctttagctcctgagcttcttactgccttcgaagccaagtttcctaatgtccaagtccaagaggcttatggattaacggagcatagttgcattacgttaactcacggagatccagagaaaggacaaggaatcgcgaaacgaaactcggttggtttcatacttccgaatctcgaggtaaagttcatagatcctgacaccggtagatcactcccgaagaacacttctggtgagctatgtgtgaggagccaatgtgtaatgcaaggttacttcatgaacaaggaagagactgacaagacaattgatgaacaaggttggcttcacacaggagacataggttacatcgatgatgatggagacatcttcatcgttgatcgtatcaaagaacttattaaatacaaaggttttcaggttgctccggccgagcttgaagctattctactcactcatccatccgttgaagacgttgccgtcgtgccgttaccggacgaggaagccggggagattccggcggcttgcgtggtgataaatccgaaagcgacagaaaaggaagaagacattctcaactttgttgcagcaaatgtggctcattacaagaaggttagagccgtccattttgtggattcaatccctaaatctctctctggtaaaatcatgaggaggcttcttagagacaagatcctcagcatcaacaagaagtagaagaaagaaaactcttacaagcttttaattaatctactttggttaaagaaattgtccttaaacaataaatactctttgtggtttcattattgctccttaattaggaaattctacagttcaatt

SEQ ID NO: 4329 - protein, 548 aa, Arabidopsis thaliana
  peptide (1)..(548): Ceres Seq. ID no. 13495903
  misc_feature (61)..(473): Pfam Name: Pfam Description:  AMP-binding enzyme
  misc_feature (7)..(548): NCBI GI NO: 15221636 NR Description: 4-coumarate:CoA ligase
  misc_feature (7)..(543): NCBI GI NO: 28628063 NR Description: 4-coumarate:CoA ligase-like [Nicotiana sylvestris]
  misc_feature (11)..(543): NCBI GI NO: 38567930 NR Description: OSJNBa0033H08.6
  misc_feature (7)..(542): NCBI GI NO: 17063848 NR Description: 4-coumarate:CoA ligase [Amorpha fruticosa]
  misc_feature (5)..(542): NCBI GI NO: 5163399 NR Description: 4-coumarate:coenzyme A ligase [Solanum tuberosum]
  misc_feature (7)..(542): NCBI GI NO: 7428495 NR Description: 4-coumarate-CoA ligase (EC 6
  misc_feature (5)..(542): NCBI GI NO: 398963 NR Description: 4-coumarate--CoA ligase 1
  misc_feature (16)..(544): NCBI GI NO: 112800 NR Description: 4-coumarate--CoA ligase 1
  misc_feature (16)..(544): NCBI GI NO: 112801 NR Description: 4-coumarate--CoA ligase 1
  misc_feature (7)..(542): NCBI GI NO: 12229632 NR Description: 4-coumarate--CoA ligase 2
NSIRLKMESQKQEDNEYIFRSLYPSVPIPDKLTLPEFVLQGVEEYTENVAFVEAVTGKAVTYGDVVRDTKRLAKALTSLGLRKGQVMVVVLPNVAEYGIIALGIMSAGGVFSGANPTALVSEIKKQVEASGARGIITDATNYEKVKSLGLPVIVLGEEKIEGAVNWKDLLEAGDKCGDTDNEEILQTDLCALPFSSGTTGLQKGVMLTHRNLIANLCSTLFGVRSEMIGQIVTLGLIPFFHIYGIVGICCATMKNKGKVVAMSRYDLRIFLNALIAHEVSFAPIVPPIILNLVKNPIVDEFDLSKLKLQSVMTAAAPLAPELLTAFEAKFPNVQVQEAYGLTEHSCITLTHGDPEKGQGIAKRNSVGFILPNLEVKFIDPDTGRSLPKNTSGELCVRSQCVMQGYFMNKEETDKTIDEQGWLHTGDIGYIDDDGDIFIVDRIKELIKYKGFQVAPAELEAILLTHPSVEDVAVVPLPDEEAGEIPAACVVINPKATEKEEDILNFVAANVAHYKKVRAVHFVDSIPKSLSGKIMRRLLRDKILSINKK

SEQ ID NO: 4330 - protein, 542 aa, Arabidopsis thaliana
  peptide (1)..(542): Ceres Seq. ID no. 13495904
  misc_feature (55)..(467): Pfam Name: Pfam Description:  AMP-binding enzyme
  misc_feature (1)..(542): NCBI GI NO: 15221636 NR Description: 4-coumarate:CoA ligase
  misc_feature (1)..(537): NCBI GI NO: 28628063 NR Description: 4-coumarate:CoA ligase-like [Nicotiana sylvestris]
  misc_feature (5)..(537): NCBI GI NO: 38567930 NR Description: OSJNBa0033H08.6
  misc_feature (1)..(536): NCBI GI NO: 17063848 NR Description: 4-coumarate:CoA ligase [Amorpha fruticosa]
  misc_feature (1)..(536): NCBI GI NO: 5163399 NR Description: 4-coumarate:coenzyme A ligase [Solanum tuberosum]
  misc_feature (1)..(536): NCBI GI NO: 7428495 NR Description: 4-coumarate-CoA ligase (EC 6
  misc_feature (1)..(536): NCBI GI NO: 398963 NR Description: 4-coumarate--CoA ligase 1
  misc_feature (10)..(538): NCBI GI NO: 112800 NR Description: 4-coumarate--CoA ligase 1
  misc_feature (10)..(538): NCBI GI NO: 112801 NR Description: 4-coumarate--CoA ligase 1
  misc_feature (1)..(536): NCBI GI NO: 12229632 NR Description: 4-coumarate--CoA ligase 2
MESQKQEDNEYIFRSLYPSVPIPDKLTLPEFVLQGVEEYTENVAFVEAVTGKAVTYGDVVRDTKRLAKALTSLGLRKGQVMVVVLPNVAEYGIIALGIMSAGGVFSGANPTALVSEIKKQVEASGARGIITDATNYEKVKSLGLPVIVLGEEKIEGAVNWKDLLEAGDKCGDTDNEEILQTDLCALPFSSGTTGLQKGVMLTHRNLIANLCSTLFGVRSEMIGQIVTLGLIPFFHIYGIVGICCATMKNKGKVVAMSRYDLRIFLNALIAHEVSFAPIVPPIILNLVKNPIVDEFDLSKLKLQSVMTAAAPLAPELLTAFEAKFPNVQVQEAYGLTEHSCITLTHGDPEKGQGIAKRNSVGFILPNLEVKFIDPDTGRSLPKNTSGELCVRSQCVMQGYFMNKEETDKTIDEQGWLHTGDIGYIDDDGDIFIVDRIKELIKYKGFQVAPAELEAILLTHPSVEDVAVVPLPDEEAGEIPAACVVINPKATEKEEDILNFVAANVAHYKKVRAVHFVDSIPKSLSGKIMRRLLRDKILSINKK

SEQ ID NO: 4331 - protein, 462 aa, Arabidopsis thaliana
  peptide (1)..(462): Ceres Seq. ID no. 13495905
  misc_feature (1)..(387): Pfam Name: Pfam Description:  AMP-binding enzyme
  misc_feature (1)..(462): NCBI GI NO: 15221636 NR Description: 4-coumarate:CoA ligase
  misc_feature (1)..(457): NCBI GI NO: 28628063 NR Description: 4-coumarate:CoA ligase-like [Nicotiana sylvestris]
  misc_feature (1)..(457): NCBI GI NO: 38567930 NR Description: OSJNBa0033H08.6
  misc_feature (1)..(456): NCBI GI NO: 17063848 NR Description: 4-coumarate:CoA ligase [Amorpha fruticosa]
  misc_feature (1)..(456): NCBI GI NO: 5163399 NR Description: 4-coumarate:coenzyme A ligase [Solanum tuberosum]
  misc_feature (1)..(456): NCBI GI NO: 7428495 NR Description: 4-coumarate-CoA ligase (EC 6
  misc_feature (1)..(456): NCBI GI NO: 398963 NR Description: 4-coumarate--CoA ligase 1
  misc_feature (1)..(458): NCBI GI NO: 112800 NR Description: 4-coumarate--CoA ligase 1
  misc_feature (1)..(458): NCBI GI NO: 112801 NR Description: 4-coumarate--CoA ligase 1
  misc_feature (1)..(456): NCBI GI NO: 12229632 NR Description: 4-coumarate--CoA ligase 2
MVVVLPNVAEYGIIALGIMSAGGVFSGANPTALVSEIKKQVEASGARGIITDATNYEKVKSLGLPVIVLGEEKIEGAVNWKDLLEAGDKCGDTDNEEILQTDLCALPFSSGTTGLQKGVMLTHRNLIANLCSTLFGVRSEMIGQIVTLGLIPFFHIYGIVGICCATMKNKGKVVAMSRYDLRIFLNALIAHEVSFAPIVPPIILNLVKNPIVDEFDLSKLKLQSVMTAAAPLAPELLTAFEAKFPNVQVQEAYGLTEHSCITLTHGDPEKGQGIAKRNSVGFILPNLEVKFIDPDTGRSLPKNTSGELCVRSQCVMQGYFMNKEETDKTIDEQGWLHTGDIGYIDDDGDIFIVDRIKELIKYKGFQVAPAELEAILLTHPSVEDVAVVPLPDEEAGEIPAACVVINPKATEKEEDILNFVAANVAHYKKVRAVHFVDSIPKSLSGKIMRRLLRDKILSINKK

SEQ ID NO: 4332 - DNA, 1109 bp, Arabidopsis thaliana
  misc_feature (1)..(1109): Ceres Seq. ID no. 13600811
aagttcgatttcctaattcctaatccgtttcctttttattccgatcaaagcagcgaaaaaagcatcggagatatgtcgtctaaggacaagaaactatcgaagccaacaagtggtcgtactggtggtatccgtacactttccgatctgaaccgaagatcagaacctgattccgatagtgactccgatggacctcaagaatacttcaccggtggcgaaaaaagtggtatgcttgttcaagatcctacaaaagaaccaaaacacgatgatgttgatgagatatttaatcaagcaagacagctaggagctgtggaaggacctcttgagcatccttcgagttctagaagctttacaggaacaggaagattgctttctggagaaagtgtgccaacggctcttcaacagcctgagcctgtgattcacaatattattttctggtctaatggattcactgtagatgatggacctttgaggaagttggatgatccagagaatgcttcttttcttgatagcattcgaaagtctgaatgtccgaaagagcttgagcctgttgataaaagagctcctgtacatgttaatcttatgagaagagatgagaagtgccctgagaaagaaaagcttaaggtttcatttcaaggagttggaaggactctaggtggtgcaagctcatcaacagcttcaagccaaagtaacctaactgatgtagcagcggttcaatcaccgttacagagccttgtagtagatgaaactcttccatccacatcgatccagcttagactcgcggatgggacacgcatggtagcaaagttcaacaaccatcacacggttaacgacattcgtggtttcattgagttttctcgaccagggaatccaaacaactatacccttcaggtcatggggttcccaccaaagccacttactgacccttctcagaccattgaacaagccggtctagcaagttctgtagtcattcagaaattctagaaaatttcgtttctctttttttgtactagagagagatttcaacaacttggaattgtactgaaaatattcaatcggcttattgttgtggcaagagaaataaaaacatcatatggtttctatgttgtttc

SEQ ID NO: 4333 - protein, 326 aa, Arabidopsis thaliana
  peptide (1)..(326): Ceres Seq. ID no. 13600812
  misc_feature (247)..(326): Pfam Name: Pfam Description:  UBX domain
  misc_feature (25)..(326): NCBI GI NO: 15234731 NR Description: expressed protein [Arabidopsis thaliana]
  misc_feature (25)..(326): NCBI GI NO: 18412499 NR Description: membrane trafficking factor -related
  misc_feature (25)..(326): NCBI GI NO: 7487458 NR Description: hypothetical protein T27D20
  misc_feature (16)..(325): NCBI GI NO: 13123657 NR Description: phosphatase-like protein Mtc923
  misc_feature (3)..(325): NCBI GI NO: 13123659 NR Description: phosphatase-like protein Psc923 [Pisum sativum]
  misc_feature (41)..(326): NCBI GI NO: 18414442 NR Description: phosphatase like protein [Arabidopsis thaliana]
  misc_feature (41)..(326): NCBI GI NO: 15292665 NR Description: putative phosphatase [Arabidopsis thaliana]
  misc_feature (41)..(322): NCBI GI NO: 7485149 NR Description: hypothetical protein - Arabidopsis thaliana
  misc_feature (34)..(325): NCBI GI NO: 32489879 NR Description: OSJNBa0060P14.10
  misc_feature (100)..(325): NCBI GI NO: 32492162 NR Description: OSJNBb0048E02.1
KFDFLIPNPFPFYSDQSSEKSIGDMSSKDKKLSKPTSGRTGGIRTLSDLNRRSEPDSDSDSDGPQEYFTGGEKSGMLVQDPTKEPKHDDVDEIFNQARQLGAVEGPLEHPSSSRSFTGTGRLLSGESVPTALQQPEPVIHNIIFWSNGFTVDDGPLRKLDDPENASFLDSIRKSECPKELEPVDKRAPVHVNLMRRDEKCPEKEKLKVSFQGVGRTLGGASSSTASSQSNLTDVAAVQSPLQSLVVDETLPSTSIQLRLADGTRMVAKFNNHHTVNDIRGFIEFSRPGNPNNYTLQVMGFPPKPLTDPSQTIEQAGLASSVVIQKF

SEQ ID NO: 4334 - protein, 302 aa, Arabidopsis thaliana
  peptide (1)..(302): Ceres Seq. ID no. 13600813
  misc_feature (223)..(302): Pfam Name: Pfam Description:  UBX domain
  misc_feature (1)..(302): NCBI GI NO: 15234731 NR Description: expressed protein [Arabidopsis thaliana]
  misc_feature (1)..(302): NCBI GI NO: 18412499 NR Description: membrane trafficking factor -related
  misc_feature (1)..(302): NCBI GI NO: 7487458 NR Description: hypothetical protein T27D20
  misc_feature (1)..(301): NCBI GI NO: 13123657 NR Description: phosphatase-like protein Mtc923
  misc_feature (1)..(301): NCBI GI NO: 13123659 NR Description: phosphatase-like protein Psc923 [Pisum sativum]
  misc_feature (17)..(302): NCBI GI NO: 18414442 NR Description: phosphatase like protein [Arabidopsis thaliana]
  misc_feature (17)..(302): NCBI GI NO: 15292665 NR Description: putative phosphatase [Arabidopsis thaliana]
  misc_feature (17)..(298): NCBI GI NO: 7485149 NR Description: hypothetical protein - Arabidopsis thaliana
  misc_feature (10)..(301): NCBI GI NO: 32489879 NR Description: OSJNBa0060P14.10
  misc_feature (76)..(301): NCBI GI NO: 32492162 NR Description: OSJNBb0048E02.1
MSSKDKKLSKPTSGRTGGIRTLSDLNRRSEPDSDSDSDGPQEYFTGGEKSGMLVQDPTKEPKHDDVDEIFNQARQLGAVEGPLEHPSSSRSFTGTGRLLSGESVPTALQQPEPVIHNIIFWSNGFTVDDGPLRKLDDPENASFLDSIRKSECPKELEPVDKRAPVHVNLMRRDEKCPEKEKLKVSFQGVGRTLGGASSSTASSQSNLTDVAAVQSPLQSLVVDETLPSTSIQLRLADGTRMVAKFNNHHTVNDIRGFIEFSRPGNPNNYTLQVMGFPPKPLTDPSQTIEQAGLASSVVIQKF

SEQ ID NO: 4335 - protein, 251 aa, Arabidopsis thaliana
  peptide (1)..(251): Ceres Seq. ID no. 13600814
  misc_feature (172)..(251): Pfam Name: Pfam Description:  UBX domain
  misc_feature (1)..(251): NCBI GI NO: 15234731 NR Description: expressed protein [Arabidopsis thaliana]
  misc_feature (1)..(251): NCBI GI NO: 18412499 NR Description: membrane trafficking factor -related
  misc_feature (1)..(251): NCBI GI NO: 7487458 NR Description: hypothetical protein T27D20
  misc_feature (1)..(250): NCBI GI NO: 13123657 NR Description: phosphatase-like protein Mtc923
  misc_feature (1)..(250): NCBI GI NO: 13123659 NR Description: phosphatase-like protein Psc923 [Pisum sativum]
  misc_feature (1)..(251): NCBI GI NO: 18414442 NR Description: phosphatase like protein [Arabidopsis thaliana]
  misc_feature (1)..(251): NCBI GI NO: 15292665 NR Description: putative phosphatase [Arabidopsis thaliana]
  misc_feature (1)..(247): NCBI GI NO: 7485149 NR Description: hypothetical protein - Arabidopsis thaliana
  misc_feature (1)..(250): NCBI GI NO: 32489879 NR Description: OSJNBa0060P14.10
  misc_feature (25)..(250): NCBI GI NO: 32492162 NR Description: OSJNBb0048E02.1
MLVQDPTKEPKHDDVDEIFNQARQLGAVEGPLEHPSSSRSFTGTGRLLSGESVPTALQQPEPVIHNIIFWSNGFTVDDGPLRKLDDPENASFLDSIRKSECPKELEPVDKRAPVHVNLMRRDEKCPEKEKLKVSFQGVGRTLGGASSSTASSQSNLTDVAAVQSPLQSLVVDETLPSTSIQLRLADGTRMVAKFNNHHTVNDIRGFIEFSRPGNPNNYTLQVMGFPPKPLTDPSQTIEQAGLASSVVIQKF

SEQ ID NO: 4336 - DNA, 1429 bp, Arabidopsis thaliana
  misc_feature (1)..(1429): Ceres Seq. ID no. 13575008
attcacatttggtgtctgctgctggctttggtctttctctttctctttctacttttttttggttctgcgatttccatcaaaacccttttcccaacaatcttggttttgtacagagaagaagaagaagaagaaaggcacacaaaataacccatgtctggtttatacaataactcatcttacttctctcctgctcgagctgcttctcctcagattagaagcactcctgagatcgacagctctcagtacttgacggagcttctcgctgaacatcaaaagcttactccttttatgcaggtcctacccatatgtagccgtctattgaatcaagagatgttcagggtctctggaatgatgtctaaccaaggatttggtgattttgatagacttcgacacagaagtcccagccctatggcttcttctaatcttatgtctaatgtctctaataccgggttaggaggctggaacggcctctctcaggagagacttagtggaacacctggaatgacaatggattggcaaggtgcacctggaagccccagttcatacaccgtcaaaaggatattgcgtctggagattcctgtagataactatcctaatttcaattttgttggacgacttctcggccctagaggcaactcgttaaaacgcgttgaagctaccaccggttgccgagtattcatcagagggaaagggtcaatcaaggatcccgaaaaggaagataaattaaggggaagacctggctatgaacacttgaatgagcagcttcacatcttaatagaggcagatcttccagctagtattgtggagatacgtctgcgacaagctcaagaaattatagaagagttactaaagcctgtggacgagtcgcaagatttcataaagagacagcagctgagggaactggcattgctaaactcgaacaacctgagggaagagagtccggggccaagcggaggtggaagcgtttcgcctttcaattcaagtggtaaacgcccgaaaacaggatgctaagtagcgttttgtacgtctcgcccaaaacgctccttcaagccttataatggttacttcaaccaaaagtacatgtctgcatgcattacacagacgcacatgtgtatatctggtttctccagtagtggctgcaatggtggtggtctggtcaaggcctgccctggtctctctcgggtgagcgaccctgtggctttcgtttttcttcttctttattttaaatttttgtttttctttttcctcatcaaaaattcattacagattatttaaaaaagattcatgcaaaaaaaaaaaaaaagagtatgagatatataatatatatagggagaaaaagatgtggtggcttgggagggcgtggactgaaaattcttattgtataaacataaacaaaaaacacatttattggattgattcttatcgtttg

SEQ ID NO: 4337 - protein, 286 aa, Arabidopsis thaliana
  peptide (1)..(286): Ceres Seq. ID no. 13575009
  misc_feature (139)..(194): Pfam Name: Pfam Description:  KH domain
  misc_feature (1)..(286): NCBI GI NO: 15224909 NR Description: KH domain protein [Arabidopsis thaliana]
  misc_feature (1)..(285): NCBI GI NO: 12322716 NR Description: unknown protein; 28504-31237
  misc_feature (1)..(285): NCBI GI NO: 30680583 NR Description: KH domain protein [Arabidopsis thaliana]
  misc_feature (1)..(285): NCBI GI NO: 40645104 NR Description: hypothetical protein [Nicotiana tabacum]
  misc_feature (3)..(283): NCBI GI NO: 34900448 NR Description: contains EST C27129
  misc_feature (1)..(283): NCBI GI NO: 34909270 NR Description: P0454H12.18
  misc_feature (13)..(284): NCBI GI NO: 15236738 NR Description: KH domain protein [Arabidopsis thaliana]
  misc_feature (13)..(284): NCBI GI NO: 20268733 NR Description: unknown protein [Arabidopsis thaliana]
  misc_feature (5)..(284): NCBI GI NO: 15241136 NR Description: KH domain protein [Arabidopsis thaliana]
  misc_feature (27)..(284): NCBI GI NO: 19424087 NR Description: putative RNA-binding protein
MSGLYNNSSYFSPARAASPQIRSTPEIDSSQYLTELLAEHQKLTPFMQVLPICSRLLNQEMFRVSGMMSNQGFGDFDRLRHRSPSPMASSNLMSNVSNTGLGGWNGLSQERLSGTPGMTMDWQGAPGSPSSYTVKRILRLEIPVDNYPNFNFVGRLLGPRGNSLKRVEATTGCRVFIRGKGSIKDPEKEDKLRGRPGYEHLNEQLHILIEADLPASIVEIRLRQAQEIIEELLKPVDESQDFIKRQQLRELALLNSNNLREESPGPSGGGSVSPFNSSGKRPKTGC

SEQ ID NO: 4338 - protein, 240 aa, Arabidopsis thaliana
  peptide (1)..(240): Ceres Seq. ID no. 13575010
  misc_feature (93)..(148): Pfam Name: Pfam Description:  KH domain
  misc_feature (1)..(240): NCBI GI NO: 15224909 NR Description: KH domain protein [Arabidopsis thaliana]
  misc_feature (1)..(239): NCBI GI NO: 12322716 NR Description: unknown protein; 28504-31237
  misc_feature (1)..(239): NCBI GI NO: 30680583 NR Description: KH domain protein [Arabidopsis thaliana]
  misc_feature (1)..(239): NCBI GI NO: 40645104 NR Description: hypothetical protein [Nicotiana tabacum]
  misc_feature (1)..(237): NCBI GI NO: 34900448 NR Description: contains EST C27129
  misc_feature (1)..(237): NCBI GI NO: 34909270 NR Description: P0454H12.18
  misc_feature (1)..(238): NCBI GI NO: 15236738 NR Description: KH domain protein [Arabidopsis thaliana]
  misc_feature (1)..(238): NCBI GI NO: 20268733 NR Description: unknown protein [Arabidopsis thaliana]
  misc_feature (1)..(238): NCBI GI NO: 15241136 NR Description: KH domain protein [Arabidopsis thaliana]
  misc_feature (1)..(238): NCBI GI NO: 19424087 NR Description: putative RNA-binding protein
MQVLPICSRLLNQEMFRVSGMMSNQGFGDFDRLRHRSPSPMASSNLMSNVSNTGLGGWNGLSQERLSGTPGMTMDWQGAPGSPSSYTVKRILRLEIPVDNYPNFNFVGRLLGPRGNSLKRVEATTGCRVFIRGKGSIKDPEKEDKLRGRPGYEHLNEQLHILIEADLPASIVEIRLRQAQEIIEELLKPVDESQDFIKRQQLRELALLNSNNLREESPGPSGGGSVSPFNSSGKRPKTGC

SEQ ID NO: 4339 - protein, 226 aa, Arabidopsis thaliana
  peptide (1)..(226): Ceres Seq. ID no. 13575011
  misc_feature (79)..(134): Pfam Name: Pfam Description:  KH domain
  misc_feature (1)..(226): NCBI GI NO: 15224909 NR Description: KH domain protein [Arabidopsis thaliana]
  misc_feature (1)..(225): NCBI GI NO: 12322716 NR Description: unknown protein; 28504-31237
  misc_feature (1)..(225): NCBI GI NO: 30680583 NR Description: KH domain protein [Arabidopsis thaliana]
  misc_feature (1)..(225): NCBI GI NO: 40645104 NR Description: hypothetical protein [Nicotiana tabacum]
  misc_feature (1)..(223): NCBI GI NO: 34900448 NR Description: contains EST C27129
  misc_feature (1)..(223): NCBI GI NO: 34909270 NR Description: P0454H12.18
  misc_feature (1)..(224): NCBI GI NO: 15236738 NR Description: KH domain protein [Arabidopsis thaliana]
  misc_feature (1)..(224): NCBI GI NO: 20268733 NR Description: unknown protein [Arabidopsis thaliana]
  misc_feature (1)..(224): NCBI GI NO: 15241136 NR Description: KH domain protein [Arabidopsis thaliana]
  misc_feature (1)..(224): NCBI GI NO: 19424087 NR Description: putative RNA-binding protein
MFRVSGMMSNQGFGDFDRLRHRSPSPMASSNLMSNVSNTGLGGWNGLSQERLSGTPGMTMDWQGAPGSPSSYTVKRILRLEIPVDNYPNFNFVGRLLGPRGNSLKRVEATTGCRVFIRGKGSIKDPEKEDKLRGRPGYEHLNEQLHILIEADLPASIVEIRLRQAQEIIEELLKPVDESQDFIKRQQLRELALLNSNNLREESPGPSGGGSVSPFNSSGKRPKTGC

SEQ ID NO: 4340 - DNA, 1657 bp, Arabidopsis thaliana
  misc_feature (1)..(1657): Ceres Seq. ID no. 12377488
atggagaaaccaaaccctagaagaccctcaaacagtgttcttccatacgaaacaccaagattaagagatcactatctcctcggcaaaaagctaggccaaggccaatttggaacaacctatctctgtacagagaaatcatcatcagctaattacgcttgcaaatcaatcccaaaacgtaagcttgtatgtcgtgaagactacgaagatgtatggcgtgagattcagatcatgcatcatctctctgagcatcctaatgttgttagaatcaagggtacttatgaagactctgtttttgttcacattgttatggaagtttgtgaaggtggtgagctttttgatcggattgtttctaaagggtgttttagtgaacgtgaagctgctaagttgattaagactattcttggtgttgttgaggcttgtcattctcttggtgttatgcatagagatcttaagcctgagaatttcttgtttgatagtcccagtgatgatgctaagcttaaagctacagactttggtttgtctgtcttctacaagccagggcagtatctgtatgatgtagttggaagtccgtattatgttgcacctgaggttctgaagaaatgttatggaccagagatagacgtgtggagcgccggtgttatcttgtacatcttactaagtggggttcctcctttttgggcagaaaccgagtcaggaatctttaggcagatattgcaagggaagatagattttaaatctgatccgtggcctactatctcagaaggtgctaaagatttgatttacaaaatgctcgataggagccccaagaaacgtatttctgcacatgaagcattgtgtcacccttggattgttgatgaacatgctgcaccagacaagcctctcgacccagcagtcttgtcgcgacttaagcagttctcgcaaatgaataaaatcaagaaaatggccttacgagtaatcgcggagagactctcggaggaagagattggtggtctgaaggaattgttcaaaatgatagatacagacaacagtggaacaatcacctttgaagagcttaaagcaggtctaaagagagttggatctgaattgatggaatcagaaatcaagtctcttatggatgcggcggatatagacaacagtgggacaatagactacggtgaattcctagcagcgacattacatataaacaagatggagagagaagagaacttggtggttgcgttttcatactttgataaagatggtagcggttatatcaccattgacgagcttcaacaagcctgcacagagtttggtctctgtgacactcctcttgatgacatgatcaaagagattgatcttgataatgacgggaagattgatttctcagagtttactgctatgatgaagaaaggagatggtgttgggaggagcagaactatgaggaacaacttgaacttcaatatagctgaagcttttggagttgaggacacaagcagcactgctaaatctgatgattcaccaaagtaattataatcatctatatacttggaattgagaaatgagaactcacaaaagaaaaactgaatctttcctttttgttttcgtttccacttttgtagatgagcaactttctcaattttgttataagcatggataattttgcttcatattttctgcg

SEQ ID NO: 4341 - protein, 501 aa, Arabidopsis thaliana
  peptide (1)..(501): Ceres Seq. ID no. 12377489
  misc_feature (25)..(283): Pfam Name: Pfam Description:  Protein kinase domain
  misc_feature (1)..(501): NCBI GI NO: 15233947 NR Description: calmodulin-domain protein kinase CDPK isoform 4
  misc_feature (1)..(498): NCBI GI NO: 15219693 NR Description: calcium-dependent protein kinase
  misc_feature (180)..(498): NCBI GI NO: 8778378 NR Description: F15O4.8 [Arabidopsis thaliana]
  misc_feature (1)..(189): NCBI GI NO: 8778378 NR Description: F15O4.8 [Arabidopsis thaliana]
  misc_feature (1)..(498): NCBI GI NO: 1084335 NR Description: calcium-dependent protein kinase (EC 2
  misc_feature (12)..(491): NCBI GI NO: 29892204 NR Description: seed calcium dependent protein kinase b
  misc_feature (12)..(491): NCBI GI NO: 7434370 NR Description: calcium-dependent protein kinase (EC 2
  misc_feature (1)..(487): NCBI GI NO: 15289760 NR Description: calcium dependent protein kinase
  misc_feature (13)..(492): NCBI GI NO: 116054 NR Description: Calcium-dependent protein kinase SK5 (CDPK)
  misc_feature (13)..(492): NCBI GI NO: 29892113 NR Description: seed calcium dependent protein kinase a
MEKPNPRRPSNSVLPYETPRLRDHYLLGKKLGQGQFGTTYLCTEKSSSANYACKSIPKRKLVCREDYEDVWREIQIMHHLSEHPNVVRIKGTYEDSVFVHIVMEVCEGGELFDRIVSKGCFSEREAAKLIKTILGVVEACHSLGVMHRDLKPENFLFDSPSDDAKLKATDFGLSVFYKPGQYLYDVVGSPYYVAPEVLKKCYGPEIDVWSAGVILYILLSGVPPFWAETESGIFRQILQGKIDFKSDPWPTISEGAKDLIYKMLDRSPKKRISAHEALCHPWIVDEHAAPDKPLDPAVLSRLKQFSQMNKIKKMALRVIAERLSEEEIGGLKELFKMIDTDNSGTITFEELKAGLKRVGSELMESEIKSLMDAADIDNSGTIDYGEFLAATLHINKMEREENLVVAFSYFDKDGSGYITIDELQQACTEFGLCDTPLDDMIKEIDLDNDGKIDFSEFTAMMKKGDGVGRSRTMRNNLNFNIAEAFGVEDTSSTAKSDDSPK

SEQ ID NO: 4342 - protein, 425 aa, Arabidopsis thaliana
  peptide (1)..(425): Ceres Seq. ID no. 12377490
  misc_feature (1)..(207): Pfam Name: Pfam Description:  Protein kinase domain
  misc_feature (1)..(425): NCBI GI NO: 15233947 NR Description: calmodulin-domain protein kinase CDPK isoform 4
  misc_feature (1)..(422): NCBI GI NO: 15219693 NR Description: calcium-dependent protein kinase
  misc_feature (104)..(422): NCBI GI NO: 8778378 NR Description: F15O4.8 [Arabidopsis thaliana]
  misc_feature (1)..(113): NCBI GI NO: 8778378 NR Description: F15O4.8 [Arabidopsis thaliana]
  misc_feature (1)..(422): NCBI GI NO: 1084335 NR Description: calcium-dependent protein kinase (EC 2
  misc_feature (1)..(415): NCBI GI NO: 29892204 NR Description: seed calcium dependent protein kinase b
  misc_feature (1)..(415): NCBI GI NO: 7434370 NR Description: calcium-dependent protein kinase (EC 2
  misc_feature (1)..(411): NCBI GI NO: 15289760 NR Description: calcium dependent protein kinase
  misc_feature (1)..(416): NCBI GI NO: 116054 NR Description: Calcium-dependent protein kinase SK5 (CDPK)
  misc_feature (1)..(416): NCBI GI NO: 29892113 NR Description: seed calcium dependent protein kinase a
MHHLSEHPNVVRIKGTYEDSVFVHIVMEVCEGGELFDRIVSKGCFSEREAAKLIKTILGVVEACHSLGVMHRDLKPENFLFDSPSDDAKLKATDFGLSVFYKPGQYLYDVVGSPYYVAPEVLKKCYGPEIDVWSAGVILYILLSGVPPFWAETESGIFRQILQGKIDFKSDPWPTISEGAKDLIYKMLDRSPKKRISAHEALCHPWIVDEHAAPDKPLDPAVLSRLKQFSQMNKIKKMALRVIAERLSEEEIGGLKELFKMIDTDNSGTITFEELKAGLKRVGSELMESEIKSLMDAADIDNSGTIDYGEFLAATLHINKMEREENLVVAFSYFDKDGSGYITIDELQQACTEFGLCDTPLDDMIKEIDLDNDGKIDFSEFTAMMKKGDGVGRSRTMRNNLNFNIAEAFGVEDTSSTAKSDDSPK

SEQ ID NO: 4343 - protein, 399 aa, Arabidopsis thaliana
  peptide (1)..(399): Ceres Seq. ID no. 12377491
  misc_feature (1)..(181): Pfam Name: Pfam Description:  Protein kinase domain
  misc_feature (1)..(399): NCBI GI NO: 15233947 NR Description: calmodulin-domain protein kinase CDPK isoform 4
  misc_feature (1)..(396): NCBI GI NO: 15219693 NR Description: calcium-dependent protein kinase
  misc_feature (78)..(396): NCBI GI NO: 8778378 NR Description: F15O4.8 [Arabidopsis thaliana]
  misc_feature (1)..(87): NCBI GI NO: 8778378 NR Description: F15O4.8 [Arabidopsis thaliana]
  misc_feature (1)..(396): NCBI GI NO: 1084335 NR Description: calcium-dependent protein kinase (EC 2
  misc_feature (1)..(389): NCBI GI NO: 29892204 NR Description: seed calcium dependent protein kinase b
  misc_feature (1)..(389): NCBI GI NO: 7434370 NR Description: calcium-dependent protein kinase (EC 2
  misc_feature (1)..(385): NCBI GI NO: 15289760 NR Description: calcium dependent protein kinase
  misc_feature (1)..(390): NCBI GI NO: 116054 NR Description: Calcium-dependent protein kinase SK5 (CDPK)
  misc_feature (1)..(390): NCBI GI NO: 29892113 NR Description: seed calcium dependent protein kinase a
MEVCEGGELFDRIVSKGCFSEREAAKLIKTILGVVEACHSLGVMHRDLKPENFLFDSPSDDAKLKATDFGLSVFYKPGQYLYDVVGSPYYVAPEVLKKCYGPEIDVWSAGVILYILLSGVPPFWAETESGIFRQILQGKIDFKSDPWPTISEGAKDLIYKMLDRSPKKRISAHEALCHPWIVDEHAAPDKPLDPAVLSRLKQFSQMNKIKKMALRVIAERLSEEEIGGLKELFKMIDTDNSGTITFEELKAGLKRVGSELMESEIKSLMDAADIDNSGTIDYGEFLAATLHINKMEREENLVVAFSYFDKDGSGYITIDELQQACTEFGLCDTPLDDMIKEIDLDNDGKIDFSEFTAMMKKGDGVGRSRTMRNNLNFNIAEAFGVEDTSSTAKSDDSPK

SEQ ID NO: 4344 - DNA, 990 bp, Arabidopsis thaliana
  misc_feature (1)..(990): Ceres Seq. ID no. 12325694
acccaaaatctccgatattcttattcctttgctgtatcatcttcttcttctacttcgtcctcatcatcgtcacatagatcctcctttttcgttaattggggagagatatactttcttttgaggatcagatcgtgacagggtttagctcaaggagagggtgagaaaaagaagaagaaggtgagaaaagtgaaggcaaggctttgaggatgtcttttacaggaactcaacagaaatgcaaggcttgtgagaagactgtttatgctgttgagcttctctctgctgatggagttggatatcacaagtcttgcttcaaatgcactcactgcaaaagcaggcttcagctgagtagttactcatcaatggaaggtgttttgtactgtaagcctcattttgagcagctctttaaggagagtggtagtttcaacaagaactttcagtcacctgcaaaatcggctgacaaatcaactcctgagctgacaaggacgcctagccgagttgctggcaggttctctggtacacaagagaaatgcgccacttgtagtaaaactgtgtatcctattgaaaaggtaacagtcgagagccagacatatcacaagtcctgcttcaagtgctcacatggaggttgcccaatttcaccttccaactacgcagctcttgaaggaatcctgtactgcaagcaccatttcgctcagctcttcaaggagaagggaagttacaaccacttaatcaaatccgcttccatcaaacgctctgcagccgcagcagtcgccgccggtgtaccagcagcctccgttcctgaatcttaaaatccaataatttctcctctctagtctaaaatttgaagttaatgccaaactgattcagtttgatttctctttgtgagagcgtgtgtgtaatctatgctttgatgttcttatttccattgatgtctcctaaaattctatgtttgtgtggtgatttggttatctataaaaagtctgaaactttcct

SEQ ID NO: 4345 - protein, 199 aa, Arabidopsis thaliana
  peptide (1)..(199): Ceres Seq. ID no. 12325695
  misc_feature (108)..(165): Pfam Name: Pfam Description:  LIM domain
  misc_feature (1)..(199): NCBI GI NO: 15228188 NR Description: transcription factor L2; protein id: At3g55770
  misc_feature (1)..(199): NCBI GI NO: 15225592 NR Description: putative LIM-domain protein; protein id: At2g39900
  misc_feature (1)..(167): NCBI GI NO: 11282608 NR Description: transcription factor L2
  misc_feature (1)..(184): NCBI GI NO: 7489184 NR Description: probable transcription factor SF3 - common tobacco
  misc_feature (1)..(189): NCBI GI NO: 17227092 NR Description: LIM domain protein [Gossypium hirsutum]
  misc_feature (3)..(195): NCBI GI NO: 34902012 NR Description: putative LIM-domain protein
  misc_feature (52)..(199): NCBI GI NO: 13926203 NR Description: transcription factor L2 [Arabidopsis thaliana]
  misc_feature (1)..(199): NCBI GI NO: 8515104 NR Description: LIM domain protein PLIM-2 [Nicotiana tabacum]
  misc_feature (1)..(199): NCBI GI NO: 15225897 NR Description: putative LIM-domain protein; protein id: At2g45800
  misc_feature (1)..(196): NCBI GI NO: 25354704 NR Description: T1N6.19 protein - Arabidopsis thaliana
MSFTGTQQKCKACEKTVYAVELLSADGVGYHKSCFKCTHCKSRLQLSSYSSMEGVLYCKPHFEQLFKESGSFNKNFQSPAKSADKSTPELTRTPSRVAGRFSGTQEKCATCSKTVYPIEKVTVESQTYHKSCFKCSHGGCPISPSNYAALEGILYCKHHFAQLFKEKGSYNHLIKSASIKRSAAAAVAAGVPAASVPES

SEQ ID NO: 4346 - protein, 148 aa, Arabidopsis thaliana
  peptide (1)..(148): Ceres Seq. ID no. 12325696
  misc_feature (57)..(114): Pfam Name: Pfam Description:  LIM domain
  misc_feature (1)..(148): NCBI GI NO: 15228188 NR Description: transcription factor L2; protein id: At3g55770
  misc_feature (1)..(148): NCBI GI NO: 15225592 NR Description: putative LIM-domain protein; protein id: At2g39900
  misc_feature (1)..(116): NCBI GI NO: 11282608 NR Description: transcription factor L2
  misc_feature (1)..(133): NCBI GI NO: 7489184 NR Description: probable transcription factor SF3 - common tobacco
  misc_feature (1)..(138): NCBI GI NO: 17227092 NR Description: LIM domain protein [Gossypium hirsutum]
  misc_feature (1)..(144): NCBI GI NO: 34902012 NR Description: putative LIM-domain protein
  misc_feature (1)..(148): NCBI GI NO: 13926203 NR Description: transcription factor L2 [Arabidopsis thaliana]
  misc_feature (1)..(148): NCBI GI NO: 8515104 NR Description: LIM domain protein PLIM-2 [Nicotiana tabacum]
  misc_feature (1)..(148): NCBI GI NO: 15225897 NR Description: putative LIM-domain protein; protein id: At2g45800
  misc_feature (1)..(145): NCBI GI NO: 25354704 NR Description: T1N6.19 protein - Arabidopsis thaliana
MEGVLYCKPHFEQLFKESGSFNKNFQSPAKSADKSTPELTRTPSRVAGRFSGTQEKCATCSKTVYPIEKVTVESQTYHKSCFKCSHGGCPISPSNYAALEGILYCKHHFAQLFKEKGSYNHLIKSASIKRSAAAAVAAGVPAASVPES

SEQ ID NO: 4347 - DNA, 912 bp, Arabidopsis thaliana
  misc_feature (1)..(912): Ceres Seq. ID no. 12325697
tcaatctgcgaatttctcttaaaccctaaccctctcgctgccgtccggtggtttttccgacgacgaactatgacgattcacgctgcagtaatccagaagcttctgaacaccggagcacatctcggccgtcgtgccgccgagcaccatttcaagcaatacgcttacgggacgcgtaacggaatgacaattatcgactccgacaaaaccctaatttgcctccgtagcgccgctcatttcgtcgctaacctcgcccacatgagaggtaacatcttcttcgtcaacacgaatcctctcttcgacgaaatcattgagctcacttctcgtcggatccaaggagattcgtataatcacaaccgtgcgataaatctgtggaagatgggagggtttttgactaacagctacagtcctaagaagtttcgatctaggcataaaaagctttgctttggtccaactactatgcctgattgtgtcgttgtgtttgattctgagaggaagagctctgtgatacttgaggcatcgaagcttcagattccggttgttgcaattgtggacccgaatgtgccattggagttctttgagaagattacgtatcctgtgccagctcgtgattcggtcaagtttgtgtatttgttctgtaatgtgatcaccaagtgctttgtggcagaacagatgaagttggggatcaaagaagggagcaatgaagatttgatgaaggatttagctgcttgattttgatatttgcaacaaaagtatgaaactttacagttgtttttctgagtctggaataattgttcttcagaattgtggttacttcaactttgaaattctgggagttttttacacatggatgattttgtttctctgatggatatttctgtataagattgttgagttctagtgttctacatcttg

SEQ ID NO: 4348 - protein, 242 aa, Arabidopsis thaliana
  peptide (1)..(242): Ceres Seq. ID no. 12325698
  misc_feature (34)..(223): Pfam Name: Pfam Description:  Ribosomal protein S2
  misc_feature (24)..(242): NCBI GI NO: 21536611 NR Description: putative ribosomal protein S2
  misc_feature (24)..(242): NCBI GI NO: 15228593 NR Description: putative ribosomal protein S2
  misc_feature (24)..(223): NCBI GI NO: 7440113 NR Description: ribosomal protein S2 homolog - wheat mitochondrion
  misc_feature (23)..(229): NCBI GI NO: 9944891 NR Description: ribosomal protein S2 [Zea mays]
  misc_feature (24)..(217): NCBI GI NO: 9944889 NR Description: ribosomal protein S2 [Zea mays]
  misc_feature (23)..(229): NCBI GI NO: 40795007 NR Description: ribosomal protein S2 [Zea mays]
  misc_feature (24)..(223): NCBI GI NO: 7489611 NR Description: hypothetical protein 483 - rice mitochondrion
  misc_feature (30)..(143): NCBI GI NO: 11467163 NR Description: rps2 [Marchantia polymorpha]
  misc_feature (135)..(220): NCBI GI NO: 11467163 NR Description: rps2 [Marchantia polymorpha]
  misc_feature (24)..(217): NCBI GI NO: 40795002 NR Description: ribosomal protein S2 [Zea mays]
SICEFLLNPNPLAAVRWFFRRRTMTIHAAVIQKLLNTGAHLGRRAAEHHFKQYAYGTRNGMTIIDSDKTLICLRSAAHFVANLAHMRGNIFFVNTNPLFDEIIELTSRRIQGDSYNHNRAINLWKMGGFLTNSYSPKKFRSRHKKLCFGPTTMPDCVVVFDSERKSSVILEASKLQIPVVAIVDPNVPLEFFEKITYPVPARDSVKFVYLFCNVITKCFVAEQMKLGIKEGSNEDLMKDLAA

SEQ ID NO: 4349 - protein, 219 aa, Arabidopsis thaliana
  peptide (1)..(219): Ceres Seq. ID no. 12325699
  misc_feature (11)..(200): Pfam Name: Pfam Description:  Ribosomal protein S2
  misc_feature (1)..(219): NCBI GI NO: 21536611 NR Description: putative ribosomal protein S2
  misc_feature (1)..(219): NCBI GI NO: 15228593 NR Description: putative ribosomal protein S2
  misc_feature (1)..(200): NCBI GI NO: 7440113 NR Description: ribosomal protein S2 homolog - wheat mitochondrion
  misc_feature (1)..(206): NCBI GI NO: 9944891 NR Description: ribosomal protein S2 [Zea mays]
  misc_feature (1)..(194): NCBI GI NO: 9944889 NR Description: ribosomal protein S2 [Zea mays]
  misc_feature (1)..(206): NCBI GI NO: 40795007 NR Description: ribosomal protein S2 [Zea mays]
  misc_feature (1)..(200): NCBI GI NO: 7489611 NR Description: hypothetical protein 483 - rice mitochondrion
  misc_feature (7)..(120): NCBI GI NO: 11467163 NR Description: rps2 [Marchantia polymorpha]
  misc_feature (112)..(197): NCBI GI NO: 11467163 NR Description: rps2 [Marchantia polymorpha]
  misc_feature (1)..(194): NCBI GI NO: 40795002 NR Description: ribosomal protein S2 [Zea mays]
MTIHAAVIQKLLNTGAHLGRRAAEHHFKQYAYGTRNGMTIIDSDKTLICLRSAAHFVANLAHMRGNIFFVNTNPLFDEIIELTSRRIQGDSYNHNRAINLWKMGGFLTNSYSPKKFRSRHKKLCFGPTTMPDCVVVFDSERKSSVILEASKLQIPVVAIVDPNVPLEFFEKITYPVPARDSVKFVYLFCNVITKCFVAEQMKLGIKEGSNEDLMKDLAA

SEQ ID NO: 4350 - protein, 182 aa, Arabidopsis thaliana
  peptide (1)..(182): Ceres Seq. ID no. 12325700
  misc_feature (1)..(163): Pfam Name: Pfam Description:  Ribosomal protein S2
  misc_feature (1)..(182): NCBI GI NO: 21536611 NR Description: putative ribosomal protein S2
  misc_feature (1)..(182): NCBI GI NO: 15228593 NR Description: putative ribosomal protein S2
  misc_feature (1)..(163): NCBI GI NO: 7440113 NR Description: ribosomal protein S2 homolog - wheat mitochondrion
  misc_feature (1)..(169): NCBI GI NO: 9944891 NR Description: ribosomal protein S2 [Zea mays]
  misc_feature (1)..(157): NCBI GI NO: 9944889 NR Description: ribosomal protein S2 [Zea mays]
  misc_feature (1)..(169): NCBI GI NO: 40795007 NR Description: ribosomal protein S2 [Zea mays]
  misc_feature (1)..(163): NCBI GI NO: 7489611 NR Description: hypothetical protein 483 - rice mitochondrion
  misc_feature (1)..(83): NCBI GI NO: 11467163 NR Description: rps2 [Marchantia polymorpha]
  misc_feature (75)..(160): NCBI GI NO: 11467163 NR Description: rps2 [Marchantia polymorpha]
  misc_feature (1)..(157): NCBI GI NO: 40795002 NR Description: ribosomal protein S2 [Zea mays]
MTIIDSDKTLICLRSAAHFVANLAHMRGNIFFVNTNPLFDEIIELTSRRIQGDSYNHNRAINLWKMGGFLTNSYSPKKFRSRHKKLCFGPTTMPDCVVVFDSERKSSVILEASKLQIPVVAIVDPNVPLEFFEKITYPVPARDSVKFVYLFCNVITKCFVAEQMKLGIKEGSNEDLMKDLAA

SEQ ID NO: 4351 - DNA, 1870 bp, Arabidopsis thaliana
  misc_feature (1)..(1870): Ceres Seq. ID no. 12328820
ataaactttataagaaaaataaatacatattctctttctcttccatcaagcaaagcttttcaaaaagaatcaaacttttcgaatctttttgcttctcgagatcttttcatagagagagagataaagaatgggtttttatgaaggagcctctgttcatccaagaactccagaaaacaaaaacacagtgaatattccgatactcacttcttcttcttcatcatcagatcttgacggagataacaatgacaacaacaacaatacaggaatcaaaacccttttgaaaagaatgatctttgatttgggtttcgcttgtttccttcctcctttaagctcaaccgaaaactccggcaacaacaatggaggaggaacaagcggcggcggaggaggaggaggaggaggaggagagaataacaaagcttggctattggcggaaacagcaccggagaatatgaatcctgatcctcattcagttcattcatcgtttagattcagtctttgttcacaaatcgagcttgagaaaatgaaaggtgaagaaccgtccttgtctgcttcgtcttcttgtcggaatttgtcggtttctggtggttccacgacggttttgatggttaatttggagaatggtgttaaggagactactgggaatgcgactgatgatttgcggtggactagagctaggtcgcttgagaagagtatttctccggtggctaatactttggttcgttttagctacggtgagattgtggcagctactcgtaatttctctaaagggagagtgttgggaagaggagcttgtagctatgtgtttagaggcaaaatcggaatgtggagaacggctttagcaatcaagagacttgataaggaagacaaagaatctcctaaatctttttgtagagagttgatgattgcaagctctcttcatagctccaacattgtacctcttcttggattctgtattgatcctgaagaagggttattcttggtttacaagtatgtctctggtggtagcctcgaacattatttacacgataagaagaagaagaaaggcgtaaaagccgcttttggtttgccttggtcagcaaggtacaaggtagcgttaggtatagcagatgccatagcttatttgcataatggaacagagcaatgtgttgttcacagagatatcaaaccttccaatattcttctttcatcaaagaaaataccaaagttgtgtgattttgggttagctacttggaccgctgcaccttcggttcctttcctctgcaagaccgtgaaaggcacattcggctatctggctcctgagtatttccagcatggtaagatatctgacaagaccgatgtttacgccttcggggttgtgttgcttgagctaataactggccggaaaccaatcgaagcaagaagagcatctggtcaagaaaatctggttgtttgggcgaaaccgttgttggatagagggatagaagctatagtggagctgcttgatccaaggctaaaatgcacaagaaaaaactcggttcaaatggagcggatgatccgtgctgcagcggcgtgtgtgatcaatgaggagtcccgaagacccggtatggaagagattgtctcaatcttgaaaggcgaagaaggtgtagagccagaaacacattcaagcaggaaaactacaaatatttcgggtatgattgactcttatacacaattgcaacaaaccaaatccgagatgaaatgtcatcttgatcttgcgatgctcggagtaaccgagtttgaagatgatgatcatgtgtacggccgataaaagattctaagaaatggatttataagtgtgtaaataggtatttatgaaaagtttgaaacagagttcttagtttctgaattagtg

SEQ ID NO: 4352 - protein, 552 aa, Arabidopsis thaliana
  peptide (1)..(552): Ceres Seq. ID no. 12328821
  misc_feature (1)..(552): NCBI GI NO: 15240345 NR Description: protein kinase - like protein
  misc_feature (93)..(547): NCBI GI NO: 15219657 NR Description: protein kinase, putative; protein id: At1g66460.1
  misc_feature (317)..(552): NCBI GI NO: 10177167 NR Description: Ser/Thr protein kinase-like protein
  misc_feature (232)..(303): NCBI GI NO: 10177167 NR Description: Ser/Thr protein kinase-like protein
  misc_feature (1)..(217): NCBI GI NO: 10177168 NR Description: gene_id:K22F20.5~unknown protein
  misc_feature (199)..(435): NCBI GI NO: 15223890 NR Description: hypothetical protein; protein id: At1g77280.1
  misc_feature (434)..(546): NCBI GI NO: 15223890 NR Description: hypothetical protein; protein id: At1g77280.1
  misc_feature (199)..(546): NCBI GI NO: 22329713 NR Description: hypothetical protein; protein id: At1g21590
  misc_feature (193)..(546): NCBI GI NO: 15237563 NR Description: putative protein; protein id: At5g63940
  misc_feature (176)..(546): NCBI GI NO: 28376688 NR Description: putative serine/threonine kinase
MGFYEGASVHPRTPENKNTVNIPILTSSSSSSDLDGDNNDNNNNTGIKTLLKRMIFDLGFACFLPPLSSTENSGNNNGGGTSGGGGGGGGGGENNKAWLLAETAPENMNPDPHSVHSSFRFSLCSQIELEKMKGEEPSLSASSSCRNLSVSGGSTTVLMVNLENGVKETTGNATDDLRWTRARSLEKSISPVANTLVRFSYGEIVAATRNFSKGRVLGRGACSYVFRGKIGMWRTALAIKRLDKEDKESPKSFCRELMIASSLHSSNIVPLLGFCIDPEEGLFLVYKYVSGGSLEHYLHDKKKKKGVKAAFGLPWSARYKVALGIADAIAYLHNGTEQCVVHRDIKPSNILLSSKKIPKLCDFGLATWTAAPSVPFLCKTVKGTFGYLAPEYFQHGKISDKTDVYAFGVVLLELITGRKPIEARRASGQENLVVWAKPLLDRGIEAIVELLDPRLKCTRKNSVQMERMIRAAAACVINEESRRPGMEEIVSILKGEEGVEPETHSSRKTTNISGMIDSYTQLQQTKSEMKCHLDLAMLGVTEFEDDDHVYGR

SEQ ID NO: 4353 - protein, 499 aa, Arabidopsis thaliana
  peptide (1)..(499): Ceres Seq. ID no. 12328822
  misc_feature (1)..(499): NCBI GI NO: 15240345 NR Description: protein kinase - like protein
  misc_feature (40)..(494): NCBI GI NO: 15219657 NR Description: protein kinase, putative; protein id: At1g66460.1
  misc_feature (264)..(499): NCBI GI NO: 10177167 NR Description: Ser/Thr protein kinase-like protein
  misc_feature (179)..(250): NCBI GI NO: 10177167 NR Description: Ser/Thr protein kinase-like protein
  misc_feature (1)..(164): NCBI GI NO: 10177168 NR Description: gene_id:K22F20.5~unknown protein
  misc_feature (146)..(382): NCBI GI NO: 15223890 NR Description: hypothetical protein; protein id: At1g77280.1
  misc_feature (381)..(493): NCBI GI NO: 15223890 NR Description: hypothetical protein; protein id: At1g77280.1
  misc_feature (146)..(493): NCBI GI NO: 22329713 NR Description: hypothetical protein; protein id: At1g21590
  misc_feature (140)..(493): NCBI GI NO: 15237563 NR Description: putative protein; protein id: At5g63940
  misc_feature (123)..(493): NCBI GI NO: 28376688 NR Description: putative serine/threonine kinase
MIFDLGFACFLPPLSSTENSGNNNGGGTSGGGGGGGGGGENNKAWLLAETAPENMNPDPHSVHSSFRFSLCSQIELEKMKGEEPSLSASSSCRNLSVSGGSTTVLMVNLENGVKETTGNATDDLRWTRARSLEKSISPVANTLVRFSYGEIVAATRNFSKGRVLGRGACSYVFRGKIGMWRTALAIKRLDKEDKESPKSFCRELMIASSLHSSNIVPLLGFCIDPEEGLFLVYKYVSGGSLEHYLHDKKKKKGVKAAFGLPWSARYKVALGIADAIAYLHNGTEQCVVHRDIKPSNILLSSKKIPKLCDFGLATWTAAPSVPFLCKTVKGTFGYLAPEYFQHGKISDKTDVYAFGVVLLELITGRKPIEARRASGQENLVVWAKPLLDRGIEAIVELLDPRLKCTRKNSVQMERMIRAAAACVINEESRRPGMEEIVSILKGEEGVEPETHSSRKTTNISGMIDSYTQLQQTKSEMKCHLDLAMLGVTEFEDDDHVYGR

SEQ ID NO: 4354 - protein, 445 aa, Arabidopsis thaliana
  peptide (1)..(445): Ceres Seq. ID no. 12328823
  misc_feature (1)..(445): NCBI GI NO: 15240345 NR Description: protein kinase - like protein
  misc_feature (1)..(440): NCBI GI NO: 15219657 NR Description: protein kinase, putative; protein id: At1g66460.1
  misc_feature (210)..(445): NCBI GI NO: 10177167 NR Description: Ser/Thr protein kinase-like protein
  misc_feature (125)..(196): NCBI GI NO: 10177167 NR Description: Ser/Thr protein kinase-like protein
  misc_feature (1)..(110): NCBI GI NO: 10177168 NR Description: gene_id:K22F20.5~unknown protein
  misc_feature (92)..(328): NCBI GI NO: 15223890 NR Description: hypothetical protein; protein id: At1g77280.1
  misc_feature (327)..(439): NCBI GI NO: 15223890 NR Description: hypothetical protein; protein id: At1g77280.1
  misc_feature (92)..(439): NCBI GI NO: 22329713 NR Description: hypothetical protein; protein id: At1g21590
  misc_feature (86)..(439): NCBI GI NO: 15237563 NR Description: putative protein; protein id: At5g63940
  misc_feature (69)..(439): NCBI GI NO: 28376688 NR Description: putative serine/threonine kinase
MNPDPHSVHSSFRFSLCSQIELEKMKGEEPSLSASSSCRNLSVSGGSTTVLMVNLENGVKETTGNATDDLRWTRARSLEKSISPVANTLVRFSYGEIVAATRNFSKGRVLGRGACSYVFRGKIGMWRTALAIKRLDKEDKESPKSFCRELMIASSLHSSNIVPLLGFCIDPEEGLFLVYKYVSGGSLEHYLHDKKKKKGVKAAFGLPWSARYKVALGIADAIAYLHNGTEQCVVHRDIKPSNILLSSKKIPKLCDFGLATWTAAPSVPFLCKTVKGTFGYLAPEYFQHGKISDKTDVYAFGVVLLELITGRKPIEARRASGQENLVVWAKPLLDRGIEAIVELLDPRLKCTRKNSVQMERMIRAAAACVINEESRRPGMEEIVSILKGEEGVEPETHSSRKTTNISGMIDSYTQLQQTKSEMKCHLDLAMLGVTEFEDDDHVYGR

SEQ ID NO: 4355 - DNA, 1724 bp, Arabidopsis thaliana
  misc_feature (1)..(1724): Ceres Seq. ID no. 13592997
agagttcacgagcttccgagtcaaaaacactctaaaacaaaaccatgactttgttccatagactcgatctcatcgatccgtacacgtgtacaccactcatcgtccgtgaaacctccattgttgaaccttcatcattgttcctagggtttccttccttcatcgacgaagacattgaagatctcttcgagttttcatcacctaatcctctcgatctattcgaaaccgtgacggatctggttaagattaagaaatctccgtcgtcttgcaagtacaaggtgattcgtcggagattagagccggagtatccattgaagtatctttgtgaccgtgtttctgatttggaatcaaagtttgatagattggttagtcctaagagtgataggaagtatacattgacgaaggagataaagggaagtggtgagaggaagtataaatgggaggcggagattcaaggaccgttggagaggaagtataagttggaagctgagattgaaggttcgggagagaggaagtatagatggacgacggagattaaaggagggaagaaggatgaggaagggttaaagttagctgctttgaagaaggagaaggcgaaagctaaagctattgctgctgctgaagcggagaagaagaagaataagaataagaagaagagttataattggacgacggaggtgaagagtgagagagagaatggtgaggtttcgcatacttatatcatcaaggctactactggaggagagaaaaagaagaaacatgaggagaaggagaagaaagagaagatagagactaagagcaagaagaaggagaaaactcgtgttgtggtgattgaggaggaggaagaagaagatgatgagtcgtcagaacatggtgctatcgttcttaggaaggcgttttccagaaggaatggagcagttaggaccaagaaggggaagaacaaggaaatgccacctgaatatgcggctgtgatgatccagagggccttcaaagcttatttgattcgtcgctcaaaatcattgcgtgctcttcgtgatcttgctattgcaaagactaaacttaaggagctaagagcttctttccacaacttcagctaccgtcgcctgattgctcgtgatggagaggagcgtcagaaattctcagagaagatcattgtactcctcctcactgttgacgccatagagggagttgatgtgatggttcgaggagcgaagagatcaatggtggatgagctggaagcaatgttagatgtggtagacccgcaaccgcaggggaaatcattgtcgatgagaagaagaacatttgatatgccagacagtttgatccgcaaagaaatcgcagagggagtgactcagattgtgcagatgcttgaaacggaagaagaatgatggaatggagcactgtgtgtttgtgactcaggggctgtttttgttgttgtttgtgactgggaagaactgatcagcctctttagtttgattagtgttctgaatgtttctaattatgcagacaaaattaataatgagagtggcttgaagaagagattggtgtctcgctcgcatcagtctcatctctcaaatcttgtctcttcttagtctgtttctgtttgtcaggttatgtaatccctttgtgttcccaaacttgtagactctgttttgtcaaattgcttatgtttttggttttgcttatttctactccatcatgaattagaaattgattataaagtttgc

SEQ ID NO: 4356 - protein, 446 aa, Arabidopsis thaliana
  peptide (1)..(446): Ceres Seq. ID no. 13592998
  misc_feature (83)..(340): Pfam Name: Pfam Description:  Caldesmon
  misc_feature (1)..(446): NCBI GI NO: 15241803 NR Description: calmodulin-binding protein family
  misc_feature (83)..(446): NCBI GI NO: 34897716 NR Description: ESTs AU082316
  misc_feature (278)..(381): NCBI GI NO: 34099892 NR Description: putative calmodulin-binding protein [Glycine max]
  misc_feature (108)..(304): NCBI GI NO: 8096269 NR Description: KED [Nicotiana tabacum]
  misc_feature (119)..(347): NCBI GI NO: 23508673 NR Description: MAEBL, putative [Plasmodium falciparum 3D7]
  misc_feature (119)..(347): NCBI GI NO: 34495237 NR Description: erythrocyte binding protein 2
  misc_feature (119)..(347): NCBI GI NO: 34495238 NR Description: erythrocyte binding protein 3
  misc_feature (97)..(366): NCBI GI NO: 23508673 NR Description: MAEBL, putative [Plasmodium falciparum 3D7]
  misc_feature (68)..(363): NCBI GI NO: 23481991 NR Description: erythrocyte binding protein
  misc_feature (97)..(366): NCBI GI NO: 34495238 NR Description: erythrocyte binding protein 3
MTLFHRLDLIDPYTCTPLIVRETSIVEPSSLFLGFPSFIDEDIEDLFEFSSPNPLDLFETVTDLVKIKKSPSSCKYKVIRRRLEPEYPLKYLCDRVSDLESKFDRLVSPKSDRKYTLTKEIKGSGERKYKWEAEIQGPLERKYKLEAEIEGSGERKYRWTTEIKGGKKDEEGLKLAALKKEKAKAKAIAAAEAEKKKNKNKKKSYNWTTEVKSERENGEVSHTYIIKATTGGEKKKKHEEKEKKEKIETKSKKKEKTRVVVIEEEEEEDDESSEHGAIVLRKAFSRRNGAVRTKKGKNKEMPPEYAAVMIQRAFKAYLIRRSKSLRALRDLAIAKTKLKELRASFHNFSYRRLIARDGEERQKFSEKIIVLLLTVDAIEGVDVMVRGAKRSMVDELEAMLDVVDPQPQGKSLSMRRRTFDMPDSLIRKEIAEGVTQIVQMLETEEE

SEQ ID NO: 4357 - DNA, 1331 bp, Arabidopsis thaliana
  misc_feature (1)..(1331): Ceres Seq. ID no. 12579649
acagttctactatatggatgatggccctggcttcttcaaaccatctgtgtgtttagtcttctcatttgtgcacaactcaaagacaagtccactaagtttgaagcaaaatggcgatatggtttcagagaattttcctgttgcttctcgtttcctgttgcgcctcttcagattttttggaaaatccagacttcgaatctccaccgttaaacttacctacaaactcaaatgctagctctgtatcgctggatcagaacagtacactcccgggatggacattccaagggacagtgctttatgttgaactgcctgataccggacacgcggttcagctcggtgaagatggcaagatcaatcaaacattcattgccaaaggtgatgaattgaactacatcctcacattcgcactgatccacgcaggccagaactgtacaagctctgctggtctcagtgtctcggggccagacagcaatgcggtcttttcttacagacaaaactacagtaaggtttcatggcagagctacagtcataacttgggtagttgggggaatggtgagcctattaacttagttcttgaaagtcaggcaatagattctgattctgatacaaactccacatgttggcctatcattgacacattgcttatcaagactgttggtgtaacattggtccaagacagtggtaacctcttaatcaatggtggatttgagtctggacctggtttcttgcccaactcaaccgatggagttctgattgacgcggttccaagcctgattcaatcaccattaaggcagtggtctgtcataggaacagtcagatacatagactcggagcacttccatgtcccagaaggcaaagctgcaatagaaattctgtctaacacagctccatctggcatacacagcaacaaaaggcacaagtgaaggttcaagatacaacctcacatttaccttaggcgatgctaacgatgcgtgcagaggacatttcgtggtgggtgctcaagctggctccgtaactcaaaacttcacattggagagtaatgggactggctctggtgagaagtttgggttagtgtttgaagcagacaaagatgcagcacagataagtttcaccagctactcagttacaatgacaaaagagaatgttgtttgtggtcctgtgattgatgaagtgatggtacatcctcttggtggaacagcctcagtaaaacccacttggctgctacttattttcgctttgttgtatgttgcagttctctgattgaaactgtttgggagagaggtcataaagaagatatttttgcaaggagatgtgataatcattctagcttcatg

SEQ ID NO: 4358 - protein, 270 aa, Arabidopsis thaliana
  peptide (1)..(270): Ceres Seq. ID no. 12579650
  misc_feature (41)..(265): Pfam Name: Pfam Description:  Protein of unknown function, DUF642
  misc_feature (1)..(265): NCBI GI NO: 15241320 NR Description: putative protein; protein id: At5g14150
  misc_feature (8)..(256): NCBI GI NO: 21554402 NR Description: unknown [Arabidopsis thaliana]
  misc_feature (8)..(256): NCBI GI NO: 15239049 NR Description: putative protein; protein id: At5g11420
  misc_feature (8)..(256): NCBI GI NO: 23397043 NR Description: unknown protein [Arabidopsis thaliana]
  misc_feature (13)..(256): NCBI GI NO: 34909656 NR Description: OJ1414_E05.5
  misc_feature (8)..(256): NCBI GI NO: 18418018 NR Description: putative protein; protein id: At4g32460
  misc_feature (15)..(256): NCBI GI NO: 38345426 NR Description: OSJNBb0091E11.17
  misc_feature (52)..(256): NCBI GI NO: 7486632 NR Description: hypothetical protein F8B4
  misc_feature (10)..(256): NCBI GI NO: 7488898 NR Description: hypothetical protein - castor bean
  misc_feature (10)..(255): NCBI GI NO: 34912572 NR Description: P0410E03.24
MAIWFQRIFLLLLVSCCASSDFLENPDFESPPLNLPTNSNASSVSLDQNSTLPGWTFQGTVLYVELPDTGHAVQLGEDGKINQTFIAKGDELNYILTFALIHAGQNCTSSAGLSVSGPDSNAVFSYRQNYSKVSWQSYSHNLGSWGNGEPINLVLESQAIDSDSDTNSTCWPIIDTLLIKTVGVTLVQDSGNLLINGGFESGPGFLPNSTDGVLIDAVPSLIQSPLRQWSVIGTVRYIDSEHFHVPEGKAAIEILSNTAPSGIHSNKRHK

SEQ ID NO: 4359 - DNA, 1397 bp, Arabidopsis thaliana
  misc_feature (1)..(1397): Ceres Seq. ID no. 13489548
aataaaaactttttcatggatctgagattttctccaaatctatatttgtgattgtttcgtgtagtttttctcttaaagttgtgttctttaagctctctcgtgctcaatcttacgtttccctttggtttgatttcgtgtttttgttattcgatttcacctttaacttttatctaatctcttgtttttgattttgtaaattgtaaaaagtttctggtgattctcttagcgaatttgggaaactttatctgtatttttctgtttcgccgtagatttaggatccttaattaatgaatttgtgggtttcaatattcctcgtctctgcaatagctggatcatgcttaccttctgggtttgcttacgttgacgtttgcaatcacgaattcgaggtgttccgatccgtgatcgagcaaaaatgtcctcgttctttgtatccaagccctcctatcgaggtagatggagacttgctagacaaactcatggatgcaaaccatggaaatgcctatatatccatactattttatacctcacggtgcccgttttcacgtgcagtacgcccaaagtttgatgttctgagttcaatgtttcctcacataacgcacctgattgttgagcaatctcaggctttaccatctgtgttttctaggtatggtatccatagcttgccttcaatcctgatggtgaatcaaacaatgaagatgcgataccatggtccaaaggatcttgcatccctgattcagttttacaaggaaacaacaggtcttaaacctgtccagtatatggatgaaggtgaaccaacaagcttggacactgatggaaacctgatcacatggctacacaacgggtcatctatcagagaaatagcagaaagagagccatatatggtacttgcactaatgtttctgtctttgaaactggcaattttgatcttccccatcatgggatcacggttgaaaacgttatgggcattgtatgttccgcatctgagcttgggaatacttggtgagactagccaactgtttggccgtgccctacacatgatcgatgtgaggagactatggataaaactgagactcaccaaaacaaggaacttccaagaaagagcaaagaacgcacttgcatcagtctcactaggaaaatcttcatcacaatcagcctaaaagggtgatttagaaatccttcactgtcaatgagcttagtttagattactttactttactgtctgtgagagatcctttgactgacatgtttctatacctttggagttccactgtctctgtatgtaaatcctgttttgcttcttttgtgaatattttttcttcttcttttgaatattcatgttcttggtccacttcgttgtgcttacgttttgtctatattgattatggatggtttggttt

SEQ ID NO: 4360 - protein, 289 aa, Arabidopsis thaliana
  peptide (1)..(289): Ceres Seq. ID no. 13489549
  misc_feature (1)..(289): NCBI GI NO: 18418521 NR Description: expressed protein [Arabidopsis thaliana]
  misc_feature (1)..(289): NCBI GI NO: 21536613 NR Description: contains similarity to protein disulfide isomerase-relatedprotein
  misc_feature (1)..(289): NCBI GI NO: 9758894 NR Description: contains similarity to protein disulfide isomerase-relatedprotein~gene_id:MRG7
  misc_feature (1)..(289): NCBI GI NO: 18396691 NR Description: expressed protein [Arabidopsis thaliana]
  misc_feature (1)..(156): NCBI GI NO: 6006856 NR Description: unknown protein [Arabidopsis thaliana]
  misc_feature (157)..(289): NCBI GI NO: 6006856 NR Description: unknown protein [Arabidopsis thaliana]
  misc_feature (6)..(286): NCBI GI NO: 30103009 NR Description: unknown protein
  misc_feature (49)..(286): NCBI GI NO: 29367467 NR Description: disulfide isomerase-like protein
  misc_feature (54)..(288): NCBI GI NO: 18399435 NR Description: expressed protein [Arabidopsis thaliana]
  misc_feature (53)..(158): NCBI GI NO: 15236643 NR Description: protein disulfide isomerase -related
MNLWVSIFLVSAIAGSCLPSGFAYVDVCNHEFEVFRSVIEQKCPRSLYPSPPIEVDGDLLDKLMDANHGNAYISILFYTSRCPFSRAVRPKFDVLSSMFPHITHLIVEQSQALPSVFSRYGIHSLPSILMVNQTMKMRYHGPKDLASLIQFYKETTGLKPVQYMDEGEPTSLDTDGNLITWLHNGSSIREIAEREPYMVLALMFLSLKLAILIFPIMGSRLKTLWALYVPHLSLGILGETSQLFGRALHMIDVRRLWIKLRLTKTRNFQERAKNALASVSLGKSSSQSA

SEQ ID NO: 4361 - protein, 226 aa, Arabidopsis thaliana
  peptide (1)..(226): Ceres Seq. ID no. 13489550
  misc_feature (1)..(226): NCBI GI NO: 18418521 NR Description: expressed protein [Arabidopsis thaliana]
  misc_feature (1)..(226): NCBI GI NO: 21536613 NR Description: contains similarity to protein disulfide isomerase-relatedprotein
  misc_feature (1)..(226): NCBI GI NO: 9758894 NR Description: contains similarity to protein disulfide isomerase-relatedprotein~gene_id:MRG7
  misc_feature (1)..(226): NCBI GI NO: 18396691 NR Description: expressed protein [Arabidopsis thaliana]
  misc_feature (1)..(93): NCBI GI NO: 6006856 NR Description: unknown protein [Arabidopsis thaliana]
  misc_feature (94)..(226): NCBI GI NO: 6006856 NR Description: unknown protein [Arabidopsis thaliana]
  misc_feature (1)..(223): NCBI GI NO: 30103009 NR Description: unknown protein
  misc_feature (1)..(223): NCBI GI NO: 29367467 NR Description: disulfide isomerase-like protein
  misc_feature (1)..(225): NCBI GI NO: 18399435 NR Description: expressed protein [Arabidopsis thaliana]
  misc_feature (1)..(95): NCBI GI NO: 15236643 NR Description: protein disulfide isomerase -related
MDANHGNAYISILFYTSRCPFSRAVRPKFDVLSSMFPHITHLIVEQSQALPSVFSRYGIHSLPSILMVNQTMKMRYHGPKDLASLIQFYKETTGLKPVQYMDEGEPTSLDTDGNLITWLHNGSSIREIAEREPYMVLALMFLSLKLAILIFPIMGSRLKTLWALYVPHLSLGILGETSQLFGRALHMIDVRRLWIKLRLTKTRNFQERAKNALASVSLGKSSSQSA

SEQ ID NO: 4362 - protein, 192 aa, Arabidopsis thaliana
  peptide (1)..(192): Ceres Seq. ID no. 13489551
  misc_feature (1)..(192): NCBI GI NO: 18418521 NR Description: expressed protein [Arabidopsis thaliana]
  misc_feature (1)..(192): NCBI GI NO: 21536613 NR Description: contains similarity to protein disulfide isomerase-relatedprotein
  misc_feature (1)..(192): NCBI GI NO: 9758894 NR Description: contains similarity to protein disulfide isomerase-relatedprotein~gene_id:MRG7
  misc_feature (1)..(192): NCBI GI NO: 18396691 NR Description: expressed protein [Arabidopsis thaliana]
  misc_feature (1)..(59): NCBI GI NO: 6006856 NR Description: unknown protein [Arabidopsis thaliana]
  misc_feature (60)..(192): NCBI GI NO: 6006856 NR Description: unknown protein [Arabidopsis thaliana]
  misc_feature (1)..(189): NCBI GI NO: 30103009 NR Description: unknown protein
  misc_feature (1)..(189): NCBI GI NO: 29367467 NR Description: disulfide isomerase-like protein
  misc_feature (1)..(191): NCBI GI NO: 18399435 NR Description: expressed protein [Arabidopsis thaliana]
  misc_feature (1)..(61): NCBI GI NO: 15236643 NR Description: protein disulfide isomerase -related
MFPHITHLIVEQSQALPSVFSRYGIHSLPSILMVNQTMKMRYHGPKDLASLIQFYKETTGLKPVQYMDEGEPTSLDTDGNLITWLHNGSSIREIAEREPYMVLALMFLSLKLAILIFPIMGSRLKTLWALYVPHLSLGILGETSQLFGRALHMIDVRRLWIKLRLTKTRNFQERAKNALASVSLGKSSSQSA

SEQ ID NO: 4363 - DNA, 1208 bp, Arabidopsis thaliana
  misc_feature (1)..(1208): Ceres Seq. ID no. 13495834
atcatagtttctatctccgatgacacaaaacgaggaagattatttgacattttaagtaagaacagctagctttgccatctccctaaaggcaataaatctcggatccactttcacgatattttgatattttttctatttataatctttctgggttttgagtcttttgaaggctgaattgctctgaaatctcaattgtataatcatctcctgggtcgtcgttatcgtgatcatctagaagaaagcatgactacactagatttgaccagagccgagcttgctcttattgttctctatttgaacaaagctgaggctagagataagatatgcagagctatccaatatggttccaaatttttgagcggtggccaacctggtactgctcaaactgtcgacaaaaacaccagcttggcgagaaaagttttccgtcttttcaagtttgtcaatgattttcacggtcttatcagccccgtgcctaaagggactccacttcctcttgtcttactcgggaagtcgaagaatgcgctcttgtctacctttttgtttcttgatcaaatcgtctggcttggtagatccggcatatacaagaacaaagaacgaactgaattgcttggacgtatatcacttttctgctggctgggatcatccgtttgtacaagtgcagtcgagattggtgagcttggaaggctctcttcatctatgaagaagatggaaaaggaactcaaagctgatgatgagctgtatcgtgctaagcttcagaaatcaaacgacagaactctagctttgattaaatcaagcatggacattattgtagccattggtctccttcagttagctccaaagacgattagtcctcgtgtcactggtgctttcgggtttaccacctcacttatctcttgttatcagttgcttccatcgcgccccaagttgaagacaccttgaagaaggaataagcttgttctctagactttcagaataattgtttcatattcatcagtaaacctattgtgttcaggtattctaaggagtctatgttcctcctttgaatgaatttgctgctcttataacgcgtttgcaagaataatgataagttttagaataagattattatgatacatcttcaagattttttgattagaaatttgtgtttgtttctcattttgaacaagactctgttcctacatagtagagaggaaatcatttgatgttcg

SEQ ID NO: 4364 - protein, 231 aa, Arabidopsis thaliana
  peptide (1)..(231): Ceres Seq. ID no. 13495835
  misc_feature (11)..(222): Pfam Name: PEX11 Pfam Description: Peroxisomal biogenesis factor 11
  misc_feature (1)..(231): NCBI GI NO: 30695340 NR Description: expressed protein [Arabidopsis thaliana]
  misc_feature (1)..(231): NCBI GI NO: 11358250 NR Description: hypothetical protein T27I15_160 - Arabidopsis thaliana
  misc_feature (2)..(231): NCBI GI NO: 18406877 NR Description: expressed protein [Arabidopsis thaliana]
  misc_feature (1)..(229): NCBI GI NO: 18378887 NR Description: expressed protein [Arabidopsis thaliana]
  misc_feature (2)..(221): NCBI GI NO: 7486466 NR Description: hypothetical protein At2g45740
  misc_feature (1)..(229): NCBI GI NO: 8489788 NR Description: unknown [Lycopersicon esculentum]
  misc_feature (1)..(229): NCBI GI NO: 25553559 NR Description: OSJNBa0038F22.7
  misc_feature (1)..(227): NCBI GI NO: 34898026 NR Description: ESTs AU064537
  misc_feature (131)..(231): NCBI GI NO: 14335058 NR Description: At2g45740/F4I18.28 [Arabidopsis thaliana]
MTTLDLTRAELALIVLYLNKAEARDKICRAIQYGSKFLSGGQPGTAQTVDKNTSLARKVFRLFKFVNDFHGLISPVPKGTPLPLVLLGKSKNALLSTFLFLDQIVWLGRSGIYKNKERTELLGRISLFCWLGSSVCTSAVEIGELGRLSSSMKKMEKELKADDELYRAKLQKSNDRTLALIKSSMDIIVAIGLLQLAPKTISPRVTGAFGFTTSLISCYQLLPSRPKLKTP

SEQ ID NO: 4365 - DNA, 1270 bp, Arabidopsis thaliana
  misc_feature (1)..(1270): Ceres Seq. ID no. 12558327
ctctcatttatcttcgtggagatctaaaagaaggaggaagacatttcttccctctggatctccaaaaaaacgagaggtttgggtggggaaggaaagaaggaggaagaggcaatgtcagctaggtattggtgtcacatgtgttcacaaatggtgaatccagttattggtgccgagatcaaatgccccttttgccaaagcgggtttgtcgaggaaatgagccgtgagattaatggcggcagcagtagcagtctaagggaggttcaagaccctgagattgattttggtacagaccgtgcattgtctctatggggtccaatcttgcttggaatgatgagtaatcctcgtagacgtagaaggtttaggaggacagagtttggtgtggataatgatgaggtcaatgtatctgatgatgttgatggaaatgacagcgtcgatattgatcgacatcatcatcgtcgtcatcgccacaggcaacaaggtagagagattgatttagacagagagtttgagtctatccttaggaggagacggagaagctcagctactatattgcagttgcttcagggtattcgtgcagggattgcttctgagtatgagagctcggatcgagacctgttaaatcaatcagctgttgttcagggttcaacgagtttgaatcaaaaccggaacaatacttctctttctgcaattggagattactttgttggatccagtttagaccatttgcttgaacatctagctgataatgattcaatcaggcacgggagtcttccagcacgtaaagaagttgtggataatctcccaacggttaagataagtgaatcattgcagtgctcgatttgtttggatgattttgacaaaggaagtgaagctaaagagatgccgtgtaagcacaagtttcacatccggtgtatagtaccgtggctcgagcttcacagttcatgtcccgtgtgccgatatgaactccctcctgatgatgagaccaaggttaatcctgtaagaccgagaacaagaactctagagatcaacgtaagtaatgagaatgtggaagatgatgcaaggaacagtaatgtgagcgagagaaggttctcttttccatggccgttcagcggattattctcttcatcctcttcgtcatccgcatcggcctcggggtcatctcatctcggtgagaactcgtaaactgctattcctcagcttatagtacataaaatcttgttcactcagattgttgaatactgcataacaaataaacactttcgaggaatgg

SEQ ID NO: 4366 - protein, 356 aa, Arabidopsis thaliana
  peptide (1)..(356): Ceres Seq. ID no. 12558328
  misc_feature (241)..(281): Pfam Name: RING finger Pfam Description: Zinc finger, C3HC4 type
  misc_feature (1)..(356): NCBI GI NO: 22328949 NR Description: putative protein; protein id: At4g26400
  misc_feature (13)..(356): NCBI GI NO: 7486783 NR Description: hypothetical protein M3E9
  misc_feature (1)..(356): NCBI GI NO: 15241188 NR Description: putative protein; protein id: At5g56340
  misc_feature (24)..(325): NCBI GI NO: 18405411 NR Description: expressed protein; protein id: At1g55530
  misc_feature (310)..(349): NCBI GI NO: 18405411 NR Description: expressed protein; protein id: At1g55530
  misc_feature (24)..(327): NCBI GI NO: 38454178 NR Description: At3g13430 [Arabidopsis thaliana]
  misc_feature (24)..(327): NCBI GI NO: 15231238 NR Description: unknown protein; protein id: At3g13430.1
  misc_feature (191)..(356): NCBI GI NO: 37535546 NR Description: putative zinc finger protein
  misc_feature (97)..(290): NCBI GI NO: 34903272 NR Description: unnamed protein product
  misc_feature (194)..(352): NCBI GI NO: 11994207 NR Description: gene_id:MPN9.20~unknown protein
MSARYWCHMCSQMVNPVIGAEIKCPFCQSGFVEEMSREINGGSSSSLREVQDPEIDFGTDRALSLWGPILLGMMSNPRRRRRFRRTEFGVDNDEVNVSDDVDGNDSVDIDRHHHRRHRHRQQGREIDLDREFESILRRRRRSSATILQLLQGIRAGIASEYESSDRDLLNQSAVVQGSTSLNQNRNNTSLSAIGDYFVGSSLDHLLEHLADNDSIRHGSLPARKEVVDNLPTVKISESLQCSICLDDFDKGSEAKEMPCKHKFHIRCIVPWLELHSSCPVCRYELPPDDETKVNPVRPRTRTLEINVSNENVEDDARNSNVSERRFSFPWPFSGLFSSSSSSSASASGSSHLGENS

SEQ ID NO: 4367 - protein, 348 aa, Arabidopsis thaliana
  peptide (1)..(348): Ceres Seq. ID no. 12558329
  misc_feature (233)..(273): Pfam Name: RING finger Pfam Description: Zinc finger, C3HC4 type
  misc_feature (1)..(348): NCBI GI NO: 22328949 NR Description: putative protein; protein id: At4g26400
  misc_feature (5)..(348): NCBI GI NO: 7486783 NR Description: hypothetical protein M3E9
  misc_feature (1)..(348): NCBI GI NO: 15241188 NR Description: putative protein; protein id: At5g56340
  misc_feature (16)..(317): NCBI GI NO: 18405411 NR Description: expressed protein; protein id: At1g55530
  misc_feature (302)..(341): NCBI GI NO: 18405411 NR Description: expressed protein; protein id: At1g55530
  misc_feature (16)..(319): NCBI GI NO: 38454178 NR Description: At3g13430 [Arabidopsis thaliana]
  misc_feature (16)..(319): NCBI GI NO: 15231238 NR Description: unknown protein; protein id: At3g13430.1
  misc_feature (183)..(348): NCBI GI NO: 37535546 NR Description: putative zinc finger protein
  misc_feature (89)..(282): NCBI GI NO: 34903272 NR Description: unnamed protein product
  misc_feature (186)..(344): NCBI GI NO: 11994207 NR Description: gene_id:MPN9.20~unknown protein
MCSQMVNPVIGAEIKCPFCQSGFVEEMSREINGGSSSSLREVQDPEIDFGTDRALSLWGPILLGMMSNPRRRRRFRRTEFGVDNDEVNVSDDVDGNDSVDIDRHHHRRHRHRQQGREIDLDREFESILRRRRRSSATILQLLQGIRAGIASEYESSDRDLLNQSAVVQGSTSLNQNRNNTSLSAIGDYFVGSSLDHLLEHLADNDSIRHGSLPARKEVVDNLPTVKISESLQCSICLDDFDKGSEAKEMPCKHKFHIRCIVPWLELHSSCPVCRYELPPDDETKVNPVRPRTRTLEINVSNENVEDDARNSNVSERRFSFPWPFSGLFSSSSSSSASASGSSHLGENS

SEQ ID NO: 4368 - protein, 344 aa, Arabidopsis thaliana
  peptide (1)..(344): Ceres Seq. ID no. 12558330
  misc_feature (229)..(269): Pfam Name: RING finger Pfam Description: Zinc finger, C3HC4 type
  misc_feature (1)..(344): NCBI GI NO: 22328949 NR Description: putative protein; protein id: At4g26400
  misc_feature (1)..(344): NCBI GI NO: 7486783 NR Description: hypothetical protein M3E9
  misc_feature (1)..(344): NCBI GI NO: 15241188 NR Description: putative protein; protein id: At5g56340
  misc_feature (12)..(313): NCBI GI NO: 18405411 NR Description: expressed protein; protein id: At1g55530
  misc_feature (298)..(337): NCBI GI NO: 18405411 NR Description: expressed protein; protein id: At1g55530
  misc_feature (12)..(315): NCBI GI NO: 38454178 NR Description: At3g13430 [Arabidopsis thaliana]
  misc_feature (12)..(315): NCBI GI NO: 15231238 NR Description: unknown protein; protein id: At3g13430.1
  misc_feature (179)..(344): NCBI GI NO: 37535546 NR Description: putative zinc finger protein
  misc_feature (85)..(278): NCBI GI NO: 34903272 NR Description: unnamed protein product
  misc_feature (182)..(340): NCBI GI NO: 11994207 NR Description: gene_id:MPN9.20~unknown protein
MVNPVIGAEIKCPFCQSGFVEEMSREINGGSSSSLREVQDPEIDFGTDRALSLWGPILLGMMSNPRRRRRFRRTEFGVDNDEVNVSDDVDGNDSVDIDRHHHRRHRHRQQGREIDLDREFESILRRRRRSSATILQLLQGIRAGIASEYESSDRDLLNQSAVVQGSTSLNQNRNNTSLSAIGDYFVGSSLDHLLEHLADNDSIRHGSLPARKEVVDNLPTVKISESLQCSICLDDFDKGSEAKEMPCKHKFHIRCIVPWLELHSSCPVCRYELPPDDETKVNPVRPRTRTLEINVSNENVEDDARNSNVSERRFSFPWPFSGLFSSSSSSSASASGSSHLGENS

SEQ ID NO: 4369 - DNA, 1508 bp, Arabidopsis thaliana
  misc_feature (1)..(1508): Ceres Seq. ID no. 12328951
gttgtttatttctgaagaagaagaaaaacagagcatcataagaagaaaaaaaaaaagcaatgggatccttagttcatgtgaaagaagccacagttattactccttccgaccaaacaccttcttctgttctgtctctctccgctttagattctcagcttttcctccgattcaccattgaatacctcctcgtttacccacccgtttccgacccggagtattctctctccggtcgtctcaaatccgctctctctcgcgctctcgttccttacttccctttctccggccgcgtccgagaaaaacccgacggcggcggaggtctcgaggtcaattgccgtggccaaggtgctctgtttcttgaagccgtctctgacatcctcacgtgccttgactttcagaaacctccccggcacgtgactagctggagaaagcttctttcgctccacgtcatcgatgtcctcgctggtgctccacctctcgtcgttcagctcacttggctccgtgacggtggtgctgctttagccgtcggtgttaaccactgcgtctccgatggaatcggtagcgccgagtttctcactttattcgccgagttatctaaagactcactgagtcaaaccgagttaaaacggaaacatctctgggatcgtcaattgcttatgccgtctccgattcgtgactcgttgagtcatcccgagttcaaccgtgttcccgatctatgcggattcgttaaccgattcaacgccgagcgactcgttcctacatcggttgtcttcgagagacagaaacttaacgagctaaagaaactcgcgagtcgactcggtgagttcaattctaaacacacatcgttcgaggtactctctgcacatgtatggcggagctgggcgagatcactgaacttgccatcgaatcaggtccttaagcttttgtttagcgtcaacattagagaccgagtcaaaccgagtctacccagtgggttctacgggaacgcattcgtcgtcggatgtgctcaaaccaccgtgaaagacttgacggagaaaggattaagctacgcgacgatgctcgtgaaacaagcgaaggagcgagtcggtgacgagtacgtcagatcggtggtggaagctgtgagcaaggagagagcgagtcctgactcggttggagtcttgatactgtcgcaatggtcacgtctcggtttagagaagcttgattttggtttgggtaaaccggttcatgttggatcggtctgttgcgaccgttactgtttgttgcttccgattcctgaacaaaatgacgccgttaaagtaatggtcgccgttccgtcaagctctgttgacacgtacgagaatcttgtgacgagtcctaacgcttagattagagaaaggataaattctaattttttactctttacgttttttacttttttacctttttctaaaataaattatgaactctcctccgttgacttgtaaaatatgagttttgacttattttattttaaatccatttttggttttctt

SEQ ID NO: 4370 - protein, 433 aa, Arabidopsis thaliana
  peptide (1)..(433): Ceres Seq. ID no. 12328952
  misc_feature (3)..(428): Pfam Name: Pfam Description:  Transferase family
  misc_feature (1)..(433): NCBI GI NO: 15225663 NR Description: putative anthranilate N-hydroxycinnamoyl/benzoyltransferase
  misc_feature (4)..(425): NCBI GI NO: 15217644 NR Description: putative hypersensitivity-related protein
  misc_feature (1)..(426): NCBI GI NO: 34894074 NR Description: putative benzoyltransferase
  misc_feature (1)..(425): NCBI GI NO: 34914932 NR Description: B1096D03.33
  misc_feature (5)..(425): NCBI GI NO: 30693723 NR Description: transferase family [Arabidopsis thaliana]
  misc_feature (5)..(425): NCBI GI NO: 30693725 NR Description: transferase family [Arabidopsis thaliana]
  misc_feature (5)..(425): NCBI GI NO: 28380187 NR Description: Taxadien-5-alpha-ol O-acetyltransferase
  misc_feature (4)..(428): NCBI GI NO: 21553692 NR Description: acyltransferase-like protein
  misc_feature (4)..(428): NCBI GI NO: 15229017 NR Description: putative protein; protein id: At3g48720.1
  misc_feature (4)..(428): NCBI GI NO: 34222064 NR Description: At3g48720 [Arabidopsis thaliana]
MGSLVHVKEATVITPSDQTPSSVLSLSALDSQLFLRFTIEYLLVYPPVSDPEYSLSGRLKSALSRALVPYFPFSGRVREKPDGGGGLEVNCRGQGALFLEAVSDILTCLDFQKPPRHVTSWRKLLSLHVIDVLAGAPPLVVQLTWLRDGGAALAVGVNHCVSDGIGSAEFLTLFAELSKDSLSQTELKRKHLWDRQLLMPSPIRDSLSHPEFNRVPDLCGFVNRFNAERLVPTSVVFERQKLNELKKLASRLGEFNSKHTSFEVLSAHVWRSWARSLNLPSNQVLKLLFSVNIRDRVKPSLPSGFYGNAFVVGCAQTTVKDLTEKGLSYATMLVKQAKERVGDEYVRSVVEAVSKERASPDSVGVLILSQWSRLGLEKLDFGLGKPVHVGSVCCDRYCLLLPIPEQNDAVKVMVAVPSSSVDTYENLVTSPNA

SEQ ID NO: 4371 - protein, 235 aa, Arabidopsis thaliana
  peptide (1)..(235): Ceres Seq. ID no. 12328953
  misc_feature (1)..(230): Pfam Name: Pfam Description:  Transferase family
  misc_feature (1)..(235): NCBI GI NO: 15225663 NR Description: putative anthranilate N-hydroxycinnamoyl/benzoyltransferase
  misc_feature (1)..(227): NCBI GI NO: 15217644 NR Description: putative hypersensitivity-related protein
  misc_feature (1)..(228): NCBI GI NO: 34894074 NR Description: putative benzoyltransferase
  misc_feature (1)..(227): NCBI GI NO: 34914932 NR Description: B1096D03.33
  misc_feature (1)..(227): NCBI GI NO: 30693723 NR Description: transferase family [Arabidopsis thaliana]
  misc_feature (1)..(227): NCBI GI NO: 30693725 NR Description: transferase family [Arabidopsis thaliana]
  misc_feature (1)..(227): NCBI GI NO: 28380187 NR Description: Taxadien-5-alpha-ol O-acetyltransferase
  misc_feature (1)..(230): NCBI GI NO: 21553692 NR Description: acyltransferase-like protein
  misc_feature (1)..(230): NCBI GI NO: 15229017 NR Description: putative protein; protein id: At3g48720.1
  misc_feature (1)..(230): NCBI GI NO: 34222064 NR Description: At3g48720 [Arabidopsis thaliana]
MPSPIRDSLSHPEFNRVPDLCGFVNRFNAERLVPTSVVFERQKLNELKKLASRLGEFNSKHTSFEVLSAHVWRSWARSLNLPSNQVLKLLFSVNIRDRVKPSLPSGFYGNAFVVGCAQTTVKDLTEKGLSYATMLVKQAKERVGDEYVRSVVEAVSKERASPDSVGVLILSQWSRLGLEKLDFGLGKPVHVGSVCCDRYCLLLPIPEQNDAVKVMVAVPSSSVDTYENLVTSPNA

SEQ ID NO: 4372 - DNA, 1330 bp, Arabidopsis thaliana
  misc_feature (1)..(1330): Ceres Seq. ID no. 13580365
atccaaaactctctcagtcatggctcttcttcgtcttcctggcatttccctccaaattctaggtcacaaatcaaaccagaagaaccctaatcccaatgttgccttcaccaatcactctctctctttatctactccttcactatgtcgtctccatcgtcacgcgacgtttccagactcaattccagcaaaatccagaaacctcacttcgtacttctccaccacaacacaagagccagtcctcgaatcttcttcttcttcttcttcagctcctgaggtagtagaagaagagatttctaaaaccagattgattgctcagaatgttccatggacatctacacctgaagatattagatcgttgttcgagaagtacgggagtgttatcgacattgagatgtctatgcataagaaggaaagaaatagaggtttggtgttcattgaaatggcttctcctgaagaagctgcaacagctcttaaatctcttgaatcgtgtgaatatgagggtcgtcgtttgaaggtagactatgcaaagaccaaaaagaagaagacatatgcgccgcgtgagacgccttcaccagtgcctacattcaatttgtttgttgcaaacttggcatttgaagcaagggccaagcatcttaaggagttctttgatgcagacactggtaatgttgtctccactgaagttatattccatgaaaatccaaggaggtcgagtggttacgggtttgtctctttcaaaaccaagaaacaggccgaggcagcgcttattgagttccaaggaaaggattttttgggaaggccaatccattagctaaaagcaaacagtttgtgaagttgcaagcaaaagaagggttgcagccaccagaggaggaagcagaggaggaaccatctcagtctgagacaatgacccaagagcacgaaactccggctgcataaaacttagaagtcttcgttgcaggatcattgttggagatattggaattgacgaagaagcttcgagcttttaggtctttattcttcttagtttttgaccaacaagaggagtgggtacatacaagtagtacctaccttgagtaaatggtggagaggtaagaagtacaagaccgattttgttagaactgaaaactagtaagagacaggtattaccaaacgtcagtatcagaccagatcaaatctcaagaaacaaactcatgtggctcctacgaaacttgctttgttcagttaaacacaatgcttctttgtttgtcatctactttcgattacttgtttgcgtttgttatatgcttagtgtgtaacttcatatatgaacccgtactcttaagaaagttatgtt

SEQ ID NO: 4373 - protein, 268 aa, Arabidopsis thaliana
  peptide (1)..(268): Ceres Seq. ID no. 13580366
  misc_feature (197)..(267): Pfam Name: a.k.a. RRM, RBD, or RNP domain Pfam Description: RNA recognition motif.
  misc_feature (7)..(268): NCBI GI NO: 22328520 NR Description: RNA recognition motif (RRM)-containing protein
  misc_feature (7)..(163): NCBI GI NO: 25407474 NR Description: hypothetical protein AT4g09050
  misc_feature (141)..(268): NCBI GI NO: 25407472 NR Description: hypothetical protein AT4g09040
  misc_feature (16)..(267): NCBI GI NO: 15226983 NR Description: 33 kDa ribonucleoprotein, chloroplast
  misc_feature (79)..(267): NCBI GI NO: 38346724 NR Description: OSJNBa0086O06.22
  misc_feature (101)..(267): NCBI GI NO: 34394882 NR Description: putative RNA-binding protein
  misc_feature (96)..(267): NCBI GI NO: 8163877 NR Description: enhancer binding protein-1; EBP1
  misc_feature (81)..(267): NCBI GI NO: 7446361 NR Description: RNA-binding protein - fava bean (fragment)
  misc_feature (39)..(267): NCBI GI NO: 133246 NR Description: 28 kDa ribonucleoprotein, chloroplast precursor
  misc_feature (76)..(265): NCBI GI NO: 1076509 NR Description: RNA-binding protein RNP1 precursor - kidney bean
SKTLSVMALLRLPGISLQILGHKSNQKNPNPNVAFTNHSLSLSTPSLCRLHRHATFPDSIPAKSRNLTSYFSTTTQEPVLESSSSSSSAPEVVEEEISKTRLIAQNVPWTSTPEDIRSLFEKYGSVIDIEMSMHKKERNRGLVFIEMASPEEAATALKSLESCEYEGRRLKVDYAKTKKKKTYAPRETPSPVPTFNLFVANLAFEARAKHLKEFFDADTGNVVSTEVIFHENPRRSSGYGFVSFKTKKQAEAALIEFQGKDFLGRPIH

SEQ ID NO: 4374 - protein, 262 aa, Arabidopsis thaliana
  peptide (1)..(262): Ceres Seq. ID no. 13580367
  misc_feature (191)..(261): Pfam Name: a.k.a. RRM, RBD, or RNP domain Pfam Description: RNA recognition motif.
  misc_feature (1)..(262): NCBI GI NO: 22328520 NR Description: RNA recognition motif (RRM)-containing protein
  misc_feature (1)..(157): NCBI GI NO: 25407474 NR Description: hypothetical protein AT4g09050
  misc_feature (135)..(262): NCBI GI NO: 25407472 NR Description: hypothetical protein AT4g09040
  misc_feature (10)..(261): NCBI GI NO: 15226983 NR Description: 33 kDa ribonucleoprotein, chloroplast
  misc_feature (73)..(261): NCBI GI NO: 38346724 NR Description: OSJNBa0086O06.22
  misc_feature (95)..(261): NCBI GI NO: 34394882 NR Description: putative RNA-binding protein
  misc_feature (90)..(261): NCBI GI NO: 8163877 NR Description: enhancer binding protein-1; EBP1
  misc_feature (75)..(261): NCBI GI NO: 7446361 NR Description: RNA-binding protein - fava bean (fragment)
  misc_feature (33)..(261): NCBI GI NO: 133246 NR Description: 28 kDa ribonucleoprotein, chloroplast precursor
  misc_feature (70)..(259): NCBI GI NO: 1076509 NR Description: RNA-binding protein RNP1 precursor - kidney bean
MALLRLPGISLQILGHKSNQKNPNPNVAFTNHSLSLSTPSLCRLHRHATFPDSIPAKSRNLTSYFSTTTQEPVLESSSSSSSAPEVVEEEISKTRLIAQNVPWTSTPEDIRSLFEKYGSVIDIEMSMHKKERNRGLVFIEMASPEEAATALKSLESCEYEGRRLKVDYAKTKKKKTYAPRETPSPVPTFNLFVANLAFEARAKHLKEFFDADTGNVVSTEVIFHENPRRSSGYGFVSFKTKKQAEAALIEFQGKDFLGRPIH

SEQ ID NO: 4375 - protein, 138 aa, Arabidopsis thaliana
  peptide (1)..(138): Ceres Seq. ID no. 13580368
  misc_feature (67)..(137): Pfam Name: a.k.a. RRM, RBD, or RNP domain Pfam Description: RNA recognition motif.
  misc_feature (1)..(138): NCBI GI NO: 22328520 NR Description: RNA recognition motif (RRM)-containing protein
  misc_feature (1)..(33): NCBI GI NO: 25407474 NR Description: hypothetical protein AT4g09050
  misc_feature (11)..(138): NCBI GI NO: 25407472 NR Description: hypothetical protein AT4g09040
  misc_feature (1)..(137): NCBI GI NO: 15226983 NR Description: 33 kDa ribonucleoprotein, chloroplast
  misc_feature (1)..(137): NCBI GI NO: 38346724 NR Description: OSJNBa0086O06.22
  misc_feature (1)..(137): NCBI GI NO: 34394882 NR Description: putative RNA-binding protein
  misc_feature (1)..(137): NCBI GI NO: 8163877 NR Description: enhancer binding protein-1; EBP1
  misc_feature (1)..(137): NCBI GI NO: 7446361 NR Description: RNA-binding protein - fava bean (fragment)
  misc_feature (1)..(137): NCBI GI NO: 133246 NR Description: 28 kDa ribonucleoprotein, chloroplast precursor
  misc_feature (1)..(135): NCBI GI NO: 1076509 NR Description: RNA-binding protein RNP1 precursor - kidney bean
MSMHKKERNRGLVFIEMASPEEAATALKSLESCEYEGRRLKVDYAKTKKKKTYAPRETPSPVPTFNLFVANLAFEARAKHLKEFFDADTGNVVSTEVIFHENPRRSSGYGFVSFKTKKQAEAALIEFQGKDFLGRPIH

SEQ ID NO: 4376 - DNA, 1278 bp, Arabidopsis thaliana
  misc_feature (1)..(1278): Ceres Seq. ID no. 12329059
tccggcgtgattcttgagaagaactgaagtgtagagagagatctgaaatctcaatctccgatttaacttgcgacaatgcttcaaattcgtcttcggagggattccccgacggaaactggaaatggtgcgaggccttctccgacggagacggttactgtagcctgtcccgaccatctcgtcctcgccgatcttcctgttgcgaaaggaatcggttccgtgactcccaccacagtaatcaagcccgtcggtcgtcgttctcgccgtcagctaggcgagagagttcacttctgcgttcgttgcgattttccgattgcaatctatggtcgtctgattccttgtgatcatgccttttgccttgaatgtgctcgcagtgattccatctgctatctatgtgatgagcggattcagaagattcaaacaatcaagatgatggaagggatcttcatctgtgcagctcctcattgtcttaggtctttcctgaagaaacttgactttgaagcccatgtccatgacctccatggaagcctattacaagccgatgcagagaaagaagatggtaaccagtcagatgttcagagcacaatgcagcagtcttcagcttcaaaatccaccttgcgagctcctttaagatcccagctgcaacaatcccgtgaactaaacaggtcggcgtcatttgcaaagtcacagtctggatttagtcaagtccagaattaccctccagatagcgataactctcgccctcctggattcgaaaccgctagtcctaaaccaggaatccggttcccagactacccccagcctatgaatcttatgcaaccgcccagcttgcccgttccaatgaatcaaaacccgggtttaccacagcagtttggttttccttcgtatccaacaacagagagtggatcatctcaacaattctttaacggtgctcagtacgagatgacaagaacagagagcggcggcggatcagaacaaagttcattgctcgggtatcccccgccttcaccaatgacgaatctgaatttccaaggatcgtatcctcctccatcatggaatcccggaatggcaccgcctcacacgacccagcaggttaaccggggtagagacggtcaaagttttgggtggccacaagagaaccgtgatggctttgggcaggagtaagagtagtctagtttgaatttgtgcaatgttaaacttgtcgtttgaaagtttcaagtgcttttgtttctaaaaactgtgtcgtttgttgttggtctaacatgtaattcgagtaaaccc

SEQ ID NO: 4377 - protein, 361 aa, Arabidopsis thaliana
  peptide (1)..(361): Ceres Seq. ID no. 12329060
  misc_feature (1)..(361): NCBI GI NO: 21536615 NR Description: unknown [Arabidopsis thaliana]
  misc_feature (1)..(361): NCBI GI NO: 15240902 NR Description: putative protein; protein id: At5g01160
  misc_feature (11)..(256): NCBI GI NO: 37535662 NR Description: hypothetical protein
  misc_feature (65)..(148): NCBI GI NO: 26339810 NR Description: unnamed protein product [Mus musculus]
  misc_feature (65)..(148): NCBI GI NO: 13376204 NR Description: E-cadherin binding protein E7 [Homo sapiens]
  misc_feature (65)..(148): NCBI GI NO: 34785057 NR Description: E-cadherin binding protein E7 [Homo sapiens]
  misc_feature (65)..(148): NCBI GI NO: 9622093 NR Description: E-cadherin binding protein E7 [Mus musculus]
  misc_feature (65)..(148): NCBI GI NO: 19527264 NR Description: E-cadherin binding protein E7 [Mus musculus]
  misc_feature (20)..(148): NCBI GI NO: 19921556 NR Description: CG10263-PA [Drosophila melanogaster]
  misc_feature (65)..(148): NCBI GI NO: 34864203 NR Description: similar to Casitas B-lineage lymphoma-like 1
MLQIRLRRDSPTETGNGARPSPTETVTVACPDHLVLADLPVAKGIGSVTPTTVIKPVGRRSRRQLGERVHFCVRCDFPIAIYGRLIPCDHAFCLECARSDSICYLCDERIQKIQTIKMMEGIFICAAPHCLRSFLKKLDFEAHVHDLHGSLLQADAEKEDGNQSDVQSTMQQSSASKSTLRAPLRSQLQQSRELNRSASFAKSQSGFSQVQNYPPDSDNSRPPGFETASPKPGIRFPDYPQPMNLMQPPSLPVPMNQNPGLPQQFGFPSYPTTESGSSQQFFNGAQYEMTRTESGGGSEQSSLLGYPPPSPMTNLNFQGSYPPPSWNPGMAPPHTTQQVNRGRDGQSFGWPQENRDGFGQE

SEQ ID NO: 4378 - protein, 244 aa, Arabidopsis thaliana
  peptide (1)..(244): Ceres Seq. ID no. 12329061
  misc_feature (1)..(244): NCBI GI NO: 21536615 NR Description: unknown [Arabidopsis thaliana]
  misc_feature (1)..(244): NCBI GI NO: 15240902 NR Description: putative protein; protein id: At5g01160
  misc_feature (1)..(139): NCBI GI NO: 37535662 NR Description: hypothetical protein
  misc_feature (1)..(31): NCBI GI NO: 26339810 NR Description: unnamed protein product [Mus musculus]
  misc_feature (1)..(31): NCBI GI NO: 13376204 NR Description: E-cadherin binding protein E7 [Homo sapiens]
  misc_feature (1)..(31): NCBI GI NO: 34785057 NR Description: E-cadherin binding protein E7 [Homo sapiens]
  misc_feature (1)..(31): NCBI GI NO: 9622093 NR Description: E-cadherin binding protein E7 [Mus musculus]
  misc_feature (1)..(31): NCBI GI NO: 19527264 NR Description: E-cadherin binding protein E7 [Mus musculus]
  misc_feature (1)..(31): NCBI GI NO: 19921556 NR Description: CG10263-PA [Drosophila melanogaster]
  misc_feature (1)..(31): NCBI GI NO: 34864203 NR Description: similar to Casitas B-lineage lymphoma-like 1
MMEGIFICAAPHCLRSFLKKLDFEAHVHDLHGSLLQADAEKEDGNQSDVQSTMQQSSASKSTLRAPLRSQLQQSRELNRSASFAKSQSGFSQVQNYPPDSDNSRPPGFETASPKPGIRFPDYPQPMNLMQPPSLPVPMNQNPGLPQQFGFPSYPTTESGSSQQFFNGAQYEMTRTESGGGSEQSSLLGYPPPSPMTNLNFQGSYPPPSWNPGMAPPHTTQQVNRGRDGQSFGWPQENRDGFGQE

SEQ ID NO: 4379 - protein, 243 aa, Arabidopsis thaliana
  peptide (1)..(243): Ceres Seq. ID no. 12329062
  misc_feature (1)..(243): NCBI GI NO: 21536615 NR Description: unknown [Arabidopsis thaliana]
  misc_feature (1)..(243): NCBI GI NO: 15240902 NR Description: putative protein; protein id: At5g01160
  misc_feature (1)..(138): NCBI GI NO: 37535662 NR Description: hypothetical protein
  misc_feature (1)..(30): NCBI GI NO: 26339810 NR Description: unnamed protein product [Mus musculus]
  misc_feature (1)..(30): NCBI GI NO: 13376204 NR Description: E-cadherin binding protein E7 [Homo sapiens]
  misc_feature (1)..(30): NCBI GI NO: 34785057 NR Description: E-cadherin binding protein E7 [Homo sapiens]
  misc_feature (1)..(30): NCBI GI NO: 9622093 NR Description: E-cadherin binding protein E7 [Mus musculus]
  misc_feature (1)..(30): NCBI GI NO: 19527264 NR Description: E-cadherin binding protein E7 [Mus musculus]
  misc_feature (1)..(30): NCBI GI NO: 19921556 NR Description: CG10263-PA [Drosophila melanogaster]
  misc_feature (1)..(30): NCBI GI NO: 34864203 NR Description: similar to Casitas B-lineage lymphoma-like 1
MEGIFICAAPHCLRSFLKKLDFEAHVHDLHGSLLQADAEKEDGNQSDVQSTMQQSSASKSTLRAPLRSQLQQSRELNRSASFAKSQSGFSQVQNYPPDSDNSRPPGFETASPKPGIRFPDYPQPMNLMQPPSLPVPMNQNPGLPQQFGFPSYPTTESGSSQQFFNGAQYEMTRTESGGGSEQSSLLGYPPPSPMTNLNFQGSYPPPSWNPGMAPPHTTQQVNRGRDGQSFGWPQENRDGFGQE

SEQ ID NO: 4380 - DNA, 1943 bp, Arabidopsis thaliana
  misc_feature (1)..(1943): Ceres Seq. ID no. 13495871
  misc_feature (325)..(325): n is a, c, t, g, unknown, or other
gattgattccaatcttctttcattttcttcttcttcttcttcttcttcttctgctggggaaggggcaggttaaaattatgccatctattcaaatcgtgcctatcctcagatcttaactcttttctctacgagattcggcatctgggttttattcttcttgagcaaaatgcaatcggataatggaaagcttttcatcggtgggatatcttgggacaccaatgaggaacgtctcaaggagtatttcagcagttttggagaagtgatcgaagctgtcatcttgaaagatcgtaccactggtcgtgctcgtggtttcggttttgttgtntttgctgatcctgctgttgctgagattgttatcaccgaaaaacataatattgatggcagattggttgaagccaagaaagctgttcccagagatgaccaaaacatggtaaatagaagcaacagcagtagcatccaaggttctcccggtggtccaggtcgcacaaggaagatatttgttggaggattaccttcttcggttacagagagtgatttcaagacgtattttgagcagtttggtacaactacggatgtggttgtcatgtatgatcacaacacacaaaggcctagaggtttcgggtttataacctacgattccgaggaggcggttgaaaaggtattgctcaagacattccatgaactaaatggtaaaatggttgaggttaagcgagctgttccaaaggagttatctccaggtccaagtcgcagtcctyttggtgcaggttacakctatggagttaatagggtcaataacctccttaatgggtatgctcaagggtttaatcccgctgcagttggaggctacggacttakgattggatggtcggttcagtccggttggtgctggaagaagcgggtttgcaaattacagttctggatacgggatgaatgtgaactttgatcagggattgcccacagggttcacgggaggtacaaaattacaatggaaatgttgactatggccgatgaatgagcccgtactacattggtaacaacaaacaggtttggtcctgcggttggctatgaagggggcaacggaggaggaaactcatccttyttcagttcggttacacggaacttatggggaaacaatggtggtcttaactataacaacaataatacaaactcaaactccaatacatatatgggaggatcatcaagtgggaacaacacacttagtggtccatttggaaattcaggagtcaattggggtgctcctggaggaggaaacaatgctgtgagtaacgagaatgtgaagtttggttatggaggaaacggtgaatctggttttgggttgggaacaggtggttatgcagcaagaaacccaggggctaacaaggcagcaccatcctcttcattctcttctgcctcagcaaccaacaacacgggttatgatacagcaggacttgcagagttttacgggratggtscagtttatagtgaccctacatggagatcaaccaactcctgagacagaagggcctgctccttttagctatgggattggaggaggggttccttcttcagatgtttcagctagaagttcatctccaggttatgttggcagttacagtgtgaacaagagacaaccaaacagaggcgagccatcacggtgaacgatctgtgtcttttggcgaatcttttagattatcttcttttcccttcatacaaagccagtgaggacgaaacttgatcatatcatcacctagagctaaccagagaatcccgcagacttttctgtcatggtttggttttctaaattcattgttcctcctaggcttttttctgctttcttttttttctatttttgttttcttttcttctttcaatgagggacagaagaaactgtatcagtctccggcgaggcggtaatacataaggagagttcaaaacaaaaaccc

SEQ ID NO: 4381 - protein, 258 aa, Arabidopsis thaliana
  peptide (1)..(258): Ceres Seq. ID no. 15222963
  misc_feature (110)..(180): Pfam Name: a.k.a. RRM, RBD, or RNP domain Pfam Description: RNA recognition motif.
  misc_feature (1)..(229): NCBI GI NO: 30680456 NR Description: heterogeneous nuclear ribonucleoprotein
  misc_feature (1)..(229): NCBI GI NO: 6648193 NR Description: putative RNA-binding protein
  misc_feature (1)..(229): NCBI GI NO: 18398061 NR Description: heterogeneous nuclear ribonucleoprotein
  misc_feature (1)..(229): NCBI GI NO: 15292697 NR Description: putative RNA-binding protein
  misc_feature (1)..(231): NCBI GI NO: 38175737 NR Description: putative heterogeneous nuclear ribonucleoprotein A1
  misc_feature (1)..(229): NCBI GI NO: 9758790 NR Description: RNA-binding protein-like [Arabidopsis thaliana]
  misc_feature (1)..(229): NCBI GI NO: 18422817 NR Description: heterogeneous nuclear ribonucleoprotein
  misc_feature (1)..(229): NCBI GI NO: 21553963 NR Description: RNA-binding protein-like [Arabidopsis thaliana]
  misc_feature (1)..(218): NCBI GI NO: 9758187 NR Description: RNA-binding protein-like [Arabidopsis thaliana]
  misc_feature (1)..(218): NCBI GI NO: 22531168 NR Description: RNA-binding protein-like [Arabidopsis thaliana]
  misc_feature (53)..(53): Xaa is any aa, unknown or other
  misc_feature (197)..(197): Xaa is any aa, unknown or other
  misc_feature (202)..(202): Xaa is any aa, unknown or other
  misc_feature (230)..(230): Xaa is any aa, unknown or other
MQSDNGKLFIGGISWDTNEERLKEYFSSFGEVIEAVILKDRTTGRARGFGFVXFADPAVAEIVITEKHNIDGRLVEAKKAVPRDDQNMVNRSNSSSIQGSPGGPGRTRKIFVGGLPSSVTESDFKTYFEQFGTTTDVVVMYDHNTQRPRGFGFITYDSEEAVEKVLLKTFHELNGKMVEVKRAVPKELSPGPSRSPXGAGYXYGVNRVNNLLNGYAQGFNPAAVGGYGLXIGWSVQSGWCWKKRVCKLQFWIRDECEL

SEQ ID NO: 4382 - protein, 171 aa, Arabidopsis thaliana
  peptide (1)..(171): Ceres Seq. ID no. 15222964
  misc_feature (23)..(93): Pfam Name: a.k.a. RRM, RBD, or RNP domain Pfam Description: RNA recognition motif.
  misc_feature (1)..(142): NCBI GI NO: 30680456 NR Description: heterogeneous nuclear ribonucleoprotein
  misc_feature (1)..(142): NCBI GI NO: 6648193 NR Description: putative RNA-binding protein
  misc_feature (1)..(142): NCBI GI NO: 18398061 NR Description: heterogeneous nuclear ribonucleoprotein
  misc_feature (1)..(142): NCBI GI NO: 15292697 NR Description: putative RNA-binding protein
  misc_feature (1)..(144): NCBI GI NO: 38175737 NR Description: putative heterogeneous nuclear ribonucleoprotein A1
  misc_feature (1)..(142): NCBI GI NO: 9758790 NR Description: RNA-binding protein-like [Arabidopsis thaliana]
  misc_feature (1)..(142): NCBI GI NO: 18422817 NR Description: heterogeneous nuclear ribonucleoprotein
  misc_feature (1)..(142): NCBI GI NO: 21553963 NR Description: RNA-binding protein-like [Arabidopsis thaliana]
  misc_feature (1)..(131): NCBI GI NO: 9758187 NR Description: RNA-binding protein-like [Arabidopsis thaliana]
  misc_feature (1)..(131): NCBI GI NO: 18423760 NR Description: RNA recognition motif (RRM)-containing protein
  misc_feature (110)..(110): Xaa is any aa, unknown or other
  misc_feature (115)..(115): Xaa is any aa, unknown or other
  misc_feature (143)..(143): Xaa is any aa, unknown or other
MVNRSNSSSIQGSPGGPGRTRKIFVGGLPSSVTESDFKTYFEQFGTTTDVVVMYDHNTQRPRGFGFITYDSEEAVEKVLLKTFHELNGKMVEVKRAVPKELSPGPSRSPXGAGYXYGVNRVNNLLNGYAQGFNPAAVGGYGLXIGWSVQSGWCWKKRVCKLQFWIRDECEL

SEQ ID NO: 4383 - DNA, 1698 bp, Arabidopsis thaliana
  misc_feature (1)..(1698): Ceres Seq. ID no. 12370784
cttttatagtaatctaaaccatattgagaactagctaatagatatggatatggcctttacgcacgtttgtctatggacgctactcgccttcgtgctgacctggacggtgttctgcgttaccaacaggaagaagaaggcgccggaattggcagatgcggcagcagaggagagaagagacagtgctgctgatgttatcatcgtcggggctggtgtgggtggctcggctctcgcatattctcttgctaaggacgggcgccgagtacttgtgatagagagggatatgagagaaccagagagaatgatgggtgagtttatgcagccaggaggacgactcatgctttctaagcttggccttgaagattgtctgaatgatatagatgcccaaaaagccacgggcatggcagtttataaggacggaaaagaagctgtcgcatcttttccggtggacgacaacaattttccatatgatccgtcggctcgaacttttcacaatggtcgattcgtccaacgtctgcgccaaaaggcttcttctcttcctagtgtgcggctcgaagaaggaacggtgaagtctttaatagaagaaaaaggagtgatcaaaggagtgacatacaaaaataaagcaggcgaagaaacaacagccttggcacctctcactgtagtatgcgacggttgctactcaaaccttcgtcggtctctaaacgataacaatgctgaggttctgtcttaccaagttgcttacatctcgaagaattgtcggcttgatgatcccaaaaaccttcatttgataatgtccaaaccctcctacatcatgttgtaccaattaagcagcactgatgttcgttgtggttttgaacttttctccgccaattttccttccattgcaaaaggtgaaatggctacttttgcgaagaacactctagctcctcaggtacctccaaaacttcgcaaaatattcttgaaaggtctagatgaaggagcacacataaaagcggtgccagcaaagcgcatgacagcttctttaaccaagaaaaatggattgattgtgttgggagatgcattcaacatgcgtcatccttcggtcgcggctggtatgatggttttattgtctgacattctcattctacgtcgtcttctccagccactaagcaaccttggtgatgcaaacaaagtctcagaagtcattaagtcctttaatattatccgcaagccaatgtcagcgacggtgaacacattaggaaatgcattttctcaagttctaattgcatcaactgacgaagcaaaagaggcaatgagacaaggttgctatgattacctctctagtggtggtttttgcacgtcggggatgatggctctactaggtggcatgaatcctcgtccgctctctctcatatatcatctatgtgctatcactttacattcaattggccatcttctatctccatttccttccccccttagcatttggcatagcctcaggctttttggtttggctttgaaaatgttggttccccatctcaaggctgagggagttagcgaaatgttttttccagcaaacgcagccgcatatcgcaaaagctatatggccgcatctggtctttaaacattgatgctctaaacagcaacatacgtaagcttgtaaactcgttgaaatgttattgtaatgcttagcttacataatattacttaatgagtttctcc

SEQ ID NO: 4384 - protein, 518 aa, Arabidopsis thaliana
  peptide (1)..(518): Ceres Seq. ID no. 12370785
  misc_feature (200)..(399): Pfam Name: Pfam Description:  Monooxygenase
  misc_feature (3)..(518): NCBI GI NO: 15237902 NR Description: squalene monooxygenase 1,1
  misc_feature (5)..(518): NCBI GI NO: 11358675 NR Description: probable squalene monooxygenase (EC 1
  misc_feature (3)..(518): NCBI GI NO: 15237903 NR Description: squalene monooxygenase 1,2
  misc_feature (1)..(518): NCBI GI NO: 6685411 NR Description: Squalene monooxygenase 1,1
  misc_feature (1)..(516): NCBI GI NO: 6685410 NR Description: Squalene monooxygenase 1,2
  misc_feature (6)..(516): NCBI GI NO: 15237900 NR Description: squalene monooxygenase 2
  misc_feature (45)..(511): NCBI GI NO: 27311241 NR Description: Putative Squalene monooxygenase
  misc_feature (49)..(511): NCBI GI NO: 27311240 NR Description: Putative Squalene monooxygenase
  misc_feature (49)..(511): NCBI GI NO: 27475612 NR Description: squalene monooxygenase 1 [Medicago truncatula]
  misc_feature (45)..(508): NCBI GI NO: 18406296 NR Description: squalene monooxygenase, putative
MDMAFTHVCLWTLLAFVLTWTVFCVTNRKKKAPELADAAAEERRDSAADVIIVGAGVGGSALAYSLAKDGRRVLVIERDMREPERMMGEFMQPGGRLMLSKLGLEDCLNDIDAQKATGMAVYKDGKEAVASFPVDDNNFPYDPSARTFHNGRFVQRLRQKASSLPSVRLEEGTVKSLIEEKGVIKGVTYKNKAGEETTALAPLTVVCDGCYSNLRRSLNDNNAEVLSYQVAYISKNCRLDDPKNLHLIMSKPSYIMLYQLSSTDVRCGFELFSANFPSIAKGEMATFAKNTLAPQVPPKLRKIFLKGLDEGAHIKAVPAKRMTASLTKKNGLIVLGDAFNMRHPSVAAGMMVLLSDILILRRLLQPLSNLGDANKVSEVIKSFNIIRKPMSATVNTLGNAFSQVLIASTDEAKEAMRQGCYDYLSSGGFCTSGMMALLGGMNPRPLSLIYHLCAITLHSIGHLLSPFPSPLSIWHSLRLFGLALKMLVPHLKAEGVSEMFFPANAAAYRKSYMAASGL

SEQ ID NO: 4385 - protein, 516 aa, Arabidopsis thaliana
  peptide (1)..(516): Ceres Seq. ID no. 12370786
  misc_feature (198)..(397): Pfam Name: Pfam Description:  Monooxygenase
  misc_feature (1)..(516): NCBI GI NO: 15237902 NR Description: squalene monooxygenase 1,1
  misc_feature (3)..(516): NCBI GI NO: 11358675 NR Description: probable squalene monooxygenase (EC 1
  misc_feature (1)..(516): NCBI GI NO: 15237903 NR Description: squalene monooxygenase 1,2
  misc_feature (1)..(516): NCBI GI NO: 6685411 NR Description: Squalene monooxygenase 1,1
  misc_feature (1)..(514): NCBI GI NO: 6685410 NR Description: Squalene monooxygenase 1,2
  misc_feature (4)..(514): NCBI GI NO: 15237900 NR Description: squalene monooxygenase 2
  misc_feature (43)..(509): NCBI GI NO: 27311241 NR Description: Putative Squalene monooxygenase
  misc_feature (47)..(509): NCBI GI NO: 27311240 NR Description: Putative Squalene monooxygenase
  misc_feature (47)..(509): NCBI GI NO: 27475612 NR Description: squalene monooxygenase 1 [Medicago truncatula]
  misc_feature (43)..(506): NCBI GI NO: 18406296 NR Description: squalene monooxygenase, putative
MAFTHVCLWTLLAFVLTWTVFCVTNRKKKAPELADAAAEERRDSAADVIIVGAGVGGSALAYSLAKDGRRVLVIERDMREPERMMGEFMQPGGRLMLSKLGLEDCLNDIDAQKATGMAVYKDGKEAVASFPVDDNNFPYDPSARTFHNGRFVQRLRQKASSLPSVRLEEGTVKSLIEEKGVIKGVTYKNKAGEETTALAPLTVVCDGCYSNLRRSLNDNNAEVLSYQVAYISKNCRLDDPKNLHLIMSKPSYIMLYQLSSTDVRCGFELFSANFPSIAKGEMATFAKNTLAPQVPPKLRKIFLKGLDEGAHIKAVPAKRMTASLTKKNGLIVLGDAFNMRHPSVAAGMMVLLSDILILRRLLQPLSNLGDANKVSEVIKSFNIIRKPMSATVNTLGNAFSQVLIASTDEAKEAMRQGCYDYLSSGGFCTSGMMALLGGMNPRPLSLIYHLCAITLHSIGHLLSPFPSPLSIWHSLRLFGLALKMLVPHLKAEGVSEMFFPANAAAYRKSYMAASGL

SEQ ID NO: 4386 - protein, 439 aa, Arabidopsis thaliana
  peptide (1)..(439): Ceres Seq. ID no. 12370787
  misc_feature (121)..(320): Pfam Name: Pfam Description:  Monooxygenase
  misc_feature (1)..(439): NCBI GI NO: 15237902 NR Description: squalene monooxygenase 1,1
  misc_feature (1)..(439): NCBI GI NO: 11358675 NR Description: probable squalene monooxygenase (EC 1
  misc_feature (1)..(439): NCBI GI NO: 15237903 NR Description: squalene monooxygenase 1,2
  misc_feature (1)..(439): NCBI GI NO: 6685411 NR Description: Squalene monooxygenase 1,1
  misc_feature (1)..(437): NCBI GI NO: 6685410 NR Description: Squalene monooxygenase 1,2
  misc_feature (1)..(437): NCBI GI NO: 15237900 NR Description: squalene monooxygenase 2
  misc_feature (1)..(432): NCBI GI NO: 27311241 NR Description: Putative Squalene monooxygenase
  misc_feature (1)..(432): NCBI GI NO: 27311240 NR Description: Putative Squalene monooxygenase
  misc_feature (1)..(432): NCBI GI NO: 27475612 NR Description: squalene monooxygenase 1 [Medicago truncatula]
  misc_feature (1)..(429): NCBI GI NO: 18406296 NR Description: squalene monooxygenase, putative
MREPERMMGEFMQPGGRLMLSKLGLEDCLNDIDAQKATGMAVYKDGKEAVASFPVDDNNFPYDPSARTFHNGRFVQRLRQKASSLPSVRLEEGTVKSLIEEKGVIKGVTYKNKAGEETTALAPLTVVCDGCYSNLRRSLNDNNAEVLSYQVAYISKNCRLDDPKNLHLIMSKPSYIMLYQLSSTDVRCGFELFSANFPSIAKGEMATFAKNTLAPQVPPKLRKIFLKGLDEGAHIKAVPAKRMTASLTKKNGLIVLGDAFNMRHPSVAAGMMVLLSDILILRRLLQPLSNLGDANKVSEVIKSFNIIRKPMSATVNTLGNAFSQVLIASTDEAKEAMRQGCYDYLSSGGFCTSGMMALLGGMNPRPLSLIYHLCAITLHSIGHLLSPFPSPLSIWHSLRLFGLALKMLVPHLKAEGVSEMFFPANAAAYRKSYMAASGL

SEQ ID NO: 4387 - DNA, 1368 bp, Arabidopsis thaliana
  misc_feature (1)..(1368): Ceres Seq. ID no. 12558338
ttccaaggaaaaaaaaagtctttacccgtaaacattttttctccatcttcttgatatcaacaaaacacacctcaacaaaaaaaaaaaaacttcatctctctcagatttcgaaattgacccgtcggtgattcttaatctctcctctctgttcttctccgatcaaacctcattccaaagaaacaaaccatggatctccaaccagaagagcttcaattcttgacaatacctcaactacttcaagaatcaatctcaatcaagaaacgatctccaagaaccttctacctcataaccctctccttcatcttccctctctccttcgctatcctcgctcactcactcttcactcaaccaatcttagccaaactcgacaaatccgacccaccaaactcagatcgttcacgtcatgattggactgttcttctaatcttccagttcagttacttgatcttcctctttgccttctctcttctctcaaccgctgctgttgtcttcaccgtcgcttctctttacaccggaaagcctgtttctttctcgtcaactctctctgcgattcccaaagtctttaaacgactctttataactttcctttgggttgctctgttgatgtttgcttataacgcagtcttctttgtcttcctcgtgatgcttctcgtagctcttgatttgaatagtttaggtttagctattgtagccggggttataatctctgttctatactttggtgttcatgtttatttcactgctttatggcatttaggtagtgtaatctctgttcttgaaccggtttacggaatcgccgctatgagaaaagcttatgagttgcttaaagggaagactaagatggctatggggttaatctttgtttatcttttcctctgtggattgattggagttgtttttggtgctgttgtggttcatggtggtgggaagtatggaacttttactaggactttggttggtggattgttagttggtgttcttgtgatggttaatcttgtgggtttgttggttcagagtgtgttttactatgtttgtaagagttatcatcatcagactattgataagaccgctttgtatgatcaacttggtgggtatcttggagattatgtgcctcttaagagcaacattcagttggaggatttagatatttgaagatttgtcaagatgatgattctcttgtactgtttttcttctcttattaccattctctctctctctttgtagtttgtaatattggagaagaagaagaaatttggaatctgaacaatagttttaatgtaatgtgtatgtattagactcaacactctttgttgttgttttcatttgattattattacatgatttgagtttactaatttattcttgttg

SEQ ID NO: 4388 - protein, 321 aa, Arabidopsis thaliana
  peptide (1)..(321): Ceres Seq. ID no. 12558339
  misc_feature (1)..(321): NCBI GI NO: 18397813 NR Description: expressed protein; protein id: At1g31130
  misc_feature (1)..(321): NCBI GI NO: 15241607 NR Description: putative protein; protein id: At5g44860
  misc_feature (1)..(321): NCBI GI NO: 30684945 NR Description: expressed protein [Arabidopsis thaliana]
  misc_feature (1)..(321): NCBI GI NO: 7485737 NR Description: hypothetical protein F18F4
  misc_feature (1)..(320): NCBI GI NO: 34908936 NR Description: P0691E06.20
  misc_feature (15)..(292): NCBI GI NO: 15222319 NR Description: unknown protein; protein id: At1g69430.1
  misc_feature (15)..(287): NCBI GI NO: 9295718 NR Description: T24P13.3 [Arabidopsis thaliana]
  misc_feature (15)..(292): NCBI GI NO: 27817928 NR Description: P0453E05.2
  misc_feature (32)..(292): NCBI GI NO: 18398818 NR Description: expressed protein; protein id: At2g18690
  misc_feature (63)..(300): NCBI GI NO: 18398816 NR Description: unknown protein; protein id: At2g18680.1
MDLQPEELQFLTIPQLLQESISIKKRSPRTFYLITLSFIFPLSFAILAHSLFTQPILAKLDKSDPPNSDRSRHDWTVLLIFQFSYLIFLFAFSLLSTAAVVFTVASLYTGKPVSFSSTLSAIPKVFKRLFITFLWVALLMFAYNAVFFVFLVMLLVALDLNSLGLAIVAGVIISVLYFGVHVYFTALWHLGSVISVLEPVYGIAAMRKAYELLKGKTKMAMGLIFVYLFLCGLIGVVFGAVVVHGGGKYGTFTRTLVGGLLVGVLVMVNLVGLLVQSVFYYVCKSYHHQTIDKTALYDQLGGYLGDYVPLKSNIQLEDLDI

SEQ ID NO: 4389 - protein, 182 aa, Arabidopsis thaliana
  peptide (1)..(182): Ceres Seq. ID no. 12558340
  misc_feature (1)..(182): NCBI GI NO: 18397813 NR Description: expressed protein; protein id: At1g31130
  misc_feature (1)..(182): NCBI GI NO: 15241607 NR Description: putative protein; protein id: At5g44860
  misc_feature (1)..(182): NCBI GI NO: 30684945 NR Description: expressed protein [Arabidopsis thaliana]
  misc_feature (1)..(182): NCBI GI NO: 7485737 NR Description: hypothetical protein F18F4
  misc_feature (1)..(181): NCBI GI NO: 34908936 NR Description: P0691E06.20
  misc_feature (1)..(153): NCBI GI NO: 15222319 NR Description: unknown protein; protein id: At1g69430.1
  misc_feature (1)..(148): NCBI GI NO: 9295718 NR Description: T24P13.3 [Arabidopsis thaliana]
  misc_feature (1)..(153): NCBI GI NO: 27817928 NR Description: P0453E05.2
  misc_feature (1)..(153): NCBI GI NO: 18398818 NR Description: expressed protein; protein id: At2g18690
  misc_feature (1)..(161): NCBI GI NO: 18398816 NR Description: unknown protein; protein id: At2g18680.1
MFAYNAVFFVFLVMLLVALDLNSLGLAIVAGVIISVLYFGVHVYFTALWHLGSVISVLEPVYGIAAMRKAYELLKGKTKMAMGLIFVYLFLCGLIGVVFGAVVVHGGGKYGTFTRTLVGGLLVGVLVMVNLVGLLVQSVFYYVCKSYHHQTIDKTALYDQLGGYLGDYVPLKSNIQLEDLDI

SEQ ID NO: 4390 - protein, 169 aa, Arabidopsis thaliana
  peptide (1)..(169): Ceres Seq. ID no. 12558341
  misc_feature (1)..(169): NCBI GI NO: 18397813 NR Description: expressed protein; protein id: At1g31130
  misc_feature (1)..(169): NCBI GI NO: 15241607 NR Description: putative protein; protein id: At5g44860
  misc_feature (1)..(169): NCBI GI NO: 30684945 NR Description: expressed protein [Arabidopsis thaliana]
  misc_feature (1)..(169): NCBI GI NO: 7485737 NR Description: hypothetical protein F18F4
  misc_feature (1)..(168): NCBI GI NO: 34908936 NR Description: P0691E06.20
  misc_feature (1)..(140): NCBI GI NO: 15222319 NR Description: unknown protein; protein id: At1g69430.1
  misc_feature (1)..(135): NCBI GI NO: 9295718 NR Description: T24P13.3 [Arabidopsis thaliana]
  misc_feature (1)..(140): NCBI GI NO: 27817928 NR Description: P0453E05.2
  misc_feature (1)..(140): NCBI GI NO: 18398818 NR Description: expressed protein; protein id: At2g18690
  misc_feature (1)..(148): NCBI GI NO: 18398816 NR Description: unknown protein; protein id: At2g18680.1
MLLVALDLNSLGLAIVAGVIISVLYFGVHVYFTALWHLGSVISVLEPVYGIAAMRKAYELLKGKTKMAMGLIFVYLFLCGLIGVVFGAVVVHGGGKYGTFTRTLVGGLLVGVLVMVNLVGLLVQSVFYYVCKSYHHQTIDKTALYDQLGGYLGDYVPLKSNIQLEDLDI

SEQ ID NO: 4391 - DNA, 2811 bp, Arabidopsis thaliana
  misc_feature (1)..(2811): Ceres Seq. ID no. 13491848
ctgcaggcttcgatagagatagagctaagcacgaaaatcccgagtaattgaccttctcttcttcccagtgttgtcttctcttctccacgaacttaattttttcaaaaccctagcaactttgattcattcaaaatccgatccaacgatgactattgaagaagtttccggtgagactcctccgtctacgcctccttcttcttctacgccttctccgtcttcctccaccaccaacgccgcgccgttgggatcctctgtgattccgattgtaaacaagctacaagacatattcgctcagctcggaagccagtctacgatcgcgcttcctcaggttgttgttgttggaagccaaagcagtggcaagtctagcgtccttgaagcactcgtcggccgtgactttctccctcgtggtaatgatatctgcacgcgtcgtcctcttgttctccagctcctccagactaaaagccgcgctaatggcggatccgatgatgagtggggggagtttcgtcaccttcctgaaactcgtttctatgatttctctgagattcgtcgagaaattgaggctgagacgaatagattagttggagagaacaaaggtgtagcagatacacagattcgtcttaaaatttcttcacctaatgtattgaacatcacgcttgtggatctgcctggtattaccaaggtgccagttggtgaccagccatccgacattgaagcacgtataagaacgatgatcttgtcttacatcaagcaagatacttgcttgatattggctgttacccctgctaataccgatctagcaaactctgatgcccttcaaattgctagcattgtagatcctgatggtcacagaacgataggtgtaatcacaaagttggatattatggacaaaggtactgatgctcgaaaactccttcttggaaatgttgttcctcttcgacttggatacgtgggagttgtaaatcgttgccaggaggatattttgctaaaccgcacagtcaaggaagcacttctcgcagaggagaagttcttccggagtcacccggtttaccatggtcttgccgatcgtttgggtgttcctcagctagcaaagaagttaaatcagatccttgttcaacatatcaaggtcttgcttccggatttgaagtcgcggataagtaatgctttggttgctacagcaaaagagcatcagagctatggtgaattaacagaatcaagggctgggcaaggagctcttctcctcaactttctctccaaatactgtgaagcatactcttcattgctggaagggaaaagtgaagaaatgtctacgtcagagctctctggaggagcaagaattcactatattttccagtcaatctttgttaagagtttggaggaggttgatccatgcgaggacttgacagatgatgatattcggactgcaattcagaatgcaactggtccaagatctgcattatttgttccagatgttccatttgaagttcttgttaggaggcagatatctcgtttgttagatcctagccttcagtgtgcccggttcatttttgaagagctaataaagattagccatagatgtatgatgaatgagttacaacgatttccagtcctacgaaagcgcatggatgaggttatcggggatttcctgcgagaaggtcttgaaccctcagaagcaatgatcggggatatcattgatatggagatggattacataaacacttcacatccaaattttattggtggaaccaaggccgtggaagctgcaatgcatcaagtgaagtcttcgaggattccccatcctgtggcacgaccaaaggacactgtggagcctgatagaacatcttcttccacgagtcaagtgaaatctagatcgtttctcggcaggcaagctaatggaattgttactgatcagggagttgtatctgcagatgctgaaaaagctcaacctgctgcaaatgcgagtgatacaaggtggggtatcccttcaattttccgagggggtgatactagagcagttactaaagatagcttattaaacaaaccattcagtgaagctgttgaggatatgtctcacaacttatccatgatctatctaaaggagcccccagctgtcttgaggccaaccgaaacccattcagaacaggaagcagttgagattcagataacaaagctgttactaagatcatactatgacattgtaaggaagaatattgaggactcggtaccaaaagcaatcatgcatttcctggtaaaccacacaaaacgtgagctgcataacgtcttcatcaagaagctttacagggagaacttgtttgaagaaatgttgcaagagccagatgagatagcagttaagaggaaacgcacacaagagactctccacgttcttcagcaagcttacaggacactagatgagttgccactggaagcagattcggtgtcagcaggaatgtcaaaacatcaggagttactgacatcttcaaagtattcgacaagcagctcatactcggcatctccaagtacgacaagaagatcgagaagagcaggagatcaacaccaaaatggatacggattctaacatgatccaaatatctcgaatatctctcgactgtgataacgcatttcattcatttaatggctctttcaggttttggtattaaattatgtgttggtcatatgaagaatttatataggaaaccagtacacagtgtgggttttggtccttttggactctgcattggttgacttgataagggagtgaaaggtgatatagtttttttttccaaaaaaaaaaaaaaaaaactcgagggggggccc

SEQ ID NO: 4392 - protein, 808 aa, Arabidopsis thaliana
  peptide (1)..(808): Ceres Seq. ID no. 13491849
  misc_feature (252)..(545): Pfam Name: Pfam Description:  Dynamin central region
  misc_feature (1)..(474): NCBI GI NO: 14334428 NR Description: putative dynamin protein ADL2
  misc_feature (17)..(373): NCBI GI NO: 19386736 NR Description: putative dynamin-like protein ADL2
  misc_feature (570)..(808): NCBI GI NO: 19386736 NR Description: putative dynamin-like protein ADL2
  misc_feature (410)..(575): NCBI GI NO: 19386736 NR Description: putative dynamin-like protein ADL2
  misc_feature (21)..(802): NCBI GI NO: 38346632 NR Description: OSJNBa0072D21.2
  misc_feature (37)..(538): NCBI GI NO: 2689219 NR Description: dynamin like protein [Dictyostelium discoideum]
  misc_feature (649)..(756): NCBI GI NO: 2689219 NR Description: dynamin like protein [Dictyostelium discoideum]
  misc_feature (36)..(557): NCBI GI NO: 33416854 NR Description: Unknown (protein for MGC:66163) [Danio rerio]
  misc_feature (663)..(756): NCBI GI NO: 33416854 NR Description: Unknown (protein for MGC:66163) [Danio rerio]
  misc_feature (12)..(546): NCBI GI NO: 30048092 NR Description: DNM1 protein [Homo sapiens]
MTIEEVSGETPPSTPPSSSTPSPSSSTTNAAPLGSSVIPIVNKLQDIFAQLGSQSTIALPQVVVVGSQSSGKSSVLEALVGRDFLPRGNDICTRRPLVLQLLQTKSRANGGSDDEWGEFRHLPETRFYDFSEIRREIEAETNRLVGENKGVADTQIRLKISSPNVLNITLVDLPGITKVPVGDQPSDIEARIRTMILSYIKQDTCLILAVTPANTDLANSDALQIASIVDPDGHRTIGVITKLDIMDKGTDARKLLLGNVVPLRLGYVGVVNRCQEDILLNRTVKEALLAEEKFFRSHPVYHGLADRLGVPQLAKKLNQILVQHIKVLLPDLKSRISNALVATAKEHQSYGELTESRAGQGALLLNFLSKYCEAYSSLLEGKSEEMSTSELSGGARIHYIFQSIFVKSLEEVDPCEDLTDDDIRTAIQNATGPRSALFVPDVPFEVLVRRQISRLLDPSLQCARFIFEELIKISHRCMMNELQRFPVLRKRMDEVIGDFLREGLEPSEAMIGDIIDMEMDYINTSHPNFIGGTKAVEAAMHQVKSSRIPHPVARPKDTVEPDRTSSSTSQVKSRSFLGRQANGIVTDQGVVSADAEKAQPAANASDTRWGIPSIFRGGDTRAVTKDSLLNKPFSEAVEDMSHNLSMIYLKEPPAVLRPTETHSEQEAVEIQITKLLLRSYYDIVRKNIEDSVPKAIMHFLVNHTKRELHNVFIKKLYRENLFEEMLQEPDEIAVKRKRTQETLHVLQQAYRTLDELPLEADSVSAGMSKHQELLTSSKYSTSSSYSASPSTTRRSRRAGDQHQNGYGF

SEQ ID NO: 4393 - protein, 614 aa, Arabidopsis thaliana
  peptide (1)..(614): Ceres Seq. ID no. 13491850
  misc_feature (58)..(351): Pfam Name: Pfam Description:  Dynamin central region
  misc_feature (1)..(280): NCBI GI NO: 14334428 NR Description: putative dynamin protein ADL2
  misc_feature (1)..(179): NCBI GI NO: 19386736 NR Description: putative dynamin-like protein ADL2
  misc_feature (376)..(614): NCBI GI NO: 19386736 NR Description: putative dynamin-like protein ADL2
  misc_feature (216)..(381): NCBI GI NO: 19386736 NR Description: putative dynamin-like protein ADL2
  misc_feature (1)..(608): NCBI GI NO: 38346632 NR Description: OSJNBa0072D21.2
  misc_feature (1)..(344): NCBI GI NO: 2689219 NR Description: dynamin like protein [Dictyostelium discoideum]
  misc_feature (455)..(562): NCBI GI NO: 2689219 NR Description: dynamin like protein [Dictyostelium discoideum]
  misc_feature (1)..(363): NCBI GI NO: 33416854 NR Description: Unknown (protein for MGC:66163) [Danio rerio]
  misc_feature (469)..(562): NCBI GI NO: 33416854 NR Description: Unknown (protein for MGC:66163) [Danio rerio]
  misc_feature (1)..(352): NCBI GI NO: 30048092 NR Description: DNM1 protein [Homo sapiens]
MILSYIKQDTCLILAVTPANTDLANSDALQIASIVDPDGHRTIGVITKLDIMDKGTDARKLLLGNVVPLRLGYVGVVNRCQEDILLNRTVKEALLAEEKFFRSHPVYHGLADRLGVPQLAKKLNQILVQHIKVLLPDLKSRISNALVATAKEHQSYGELTESRAGQGALLLNFLSKYCEAYSSLLEGKSEEMSTSELSGGARIHYIFQSIFVKSLEEVDPCEDLTDDDIRTAIQNATGPRSALFVPDVPFEVLVRRQISRLLDPSLQCARFIFEELIKISHRCMMNELQRFPVLRKRMDEVIGDFLREGLEPSEAMIGDIIDMEMDYINTSHPNFIGGTKAVEAAMHQVKSSRIPHPVARPKDTVEPDRTSSSTSQVKSRSFLGRQANGIVTDQGVVSADAEKAQPAANASDTRWGIPSIFRGGDTRAVTKDSLLNKPFSEAVEDMSHNLSMIYLKEPPAVLRPTETHSEQEAVEIQITKLLLRSYYDIVRKNIEDSVPKAIMHFLVNHTKRELHNVFIKKLYRENLFEEMLQEPDEIAVKRKRTQETLHVLQQAYRTLDELPLEADSVSAGMSKHQELLTSSKYSTSSSYSASPSTTRRSRRAGDQHQNGYGF

SEQ ID NO: 4394 - protein, 563 aa, Arabidopsis thaliana
  peptide (1)..(563): Ceres Seq. ID no. 13491851
  misc_feature (7)..(300): Pfam Name: Pfam Description:  Dynamin central region
  misc_feature (1)..(229): NCBI GI NO: 14334428 NR Description: putative dynamin protein ADL2
  misc_feature (1)..(128): NCBI GI NO: 19386736 NR Description: putative dynamin-like protein ADL2
  misc_feature (325)..(563): NCBI GI NO: 19386736 NR Description: putative dynamin-like protein ADL2
  misc_feature (165)..(330): NCBI GI NO: 19386736 NR Description: putative dynamin-like protein ADL2
  misc_feature (1)..(557): NCBI GI NO: 38346632 NR Description: OSJNBa0072D21.2
  misc_feature (1)..(293): NCBI GI NO: 2689219 NR Description: dynamin like protein [Dictyostelium discoideum]
  misc_feature (404)..(511): NCBI GI NO: 2689219 NR Description: dynamin like protein [Dictyostelium discoideum]
  misc_feature (1)..(312): NCBI GI NO: 33416854 NR Description: Unknown (protein for MGC:66163) [Danio rerio]
  misc_feature (418)..(511): NCBI GI NO: 33416854 NR Description: Unknown (protein for MGC:66163) [Danio rerio]
  misc_feature (1)..(301): NCBI GI NO: 30048092 NR Description: DNM1 protein [Homo sapiens]
MDKGTDARKLLLGNVVPLRLGYVGVVNRCQEDILLNRTVKEALLAEEKFFRSHPVYHGLADRLGVPQLAKKLNQILVQHIKVLLPDLKSRISNALVATAKEHQSYGELTESRAGQGALLLNFLSKYCEAYSSLLEGKSEEMSTSELSGGARIHYIFQSIFVKSLEEVDPCEDLTDDDIRTAIQNATGPRSALFVPDVPFEVLVRRQISRLLDPSLQCARFIFEELIKISHRCMMNELQRFPVLRKRMDEVIGDFLREGLEPSEAMIGDIIDMEMDYINTSHPNFIGGTKAVEAAMHQVKSSRIPHPVARPKDTVEPDRTSSSTSQVKSRSFLGRQANGIVTDQGVVSADAEKAQPAANASDTRWGIPSIFRGGDTRAVTKDSLLNKPFSEAVEDMSHNLSMIYLKEPPAVLRPTETHSEQEAVEIQITKLLLRSYYDIVRKNIEDSVPKAIMHFLVNHTKRELHNVFIKKLYRENLFEEMLQEPDEIAVKRKRTQETLHVLQQAYRTLDELPLEADSVSAGMSKHQELLTSSKYSTSSSYSASPSTTRRSRRAGDQHQNGYGF

SEQ ID NO: 4395 - DNA, 1850 bp, Arabidopsis thaliana
  misc_feature (1)..(1850): Ceres Seq. ID no. 13575016
gtcgtctcatattctcgtttgattcaaaacgatagaaatcgacaaagaaggtgtgaagaagttgggaaaacaaaattaacgcttgaagaatctaaaggtttagcttttttctcaatccgatcattcaccgagaaatattctattttatatatttatgtgaagctcttcaattgaagaaagaagaagaaaagacaatcgtcaaatgcttgactttggtttcagttcttcttcacgacagctcaaggaagatcggctctttgatgggatgggacaccaagaaatcaccatgggtttatgatgctatcaattactagtagtacgtgttatcttctgaatatatatcatggcatcctctggactgggaaatggagtaggcacttcgagatctgccaaaggtttaaagagctcttctagttctgtcgattggttgaccagagatttggctgagacgaggataagggacaaagtagagaccgatgatgagagagatagtgaaccagatattattgatggggctggtgctgagcctggtcatgtgattagaaccacactccgtggtcgaaatggtcaatcaagacagacagtcagttacatatcagaacatgttgttggtactggttcctttggcatggttttccaagctaaatgtagggaaactggggaggttgttgccatcaagaaggttctacaagacaaacgctacaagaacagggagctacaaataatgcagatgctagaccatcccaatgccgttgctttaaagcatagctttttctcaagaacagacaacgaagaggtttatttgaatcttgtccttgaatttgtgcctgagaccgtcaatcgtgttgcaagaagttatagtaggacaaaccagctgatgccattgatatatgttaaactctacacctatcagatttgcagggcgcttgcttacatccataattcctttggtctttgtcaccgtgatatcaagcctcaaaacctgctggtgaacccacacacgcatcagctaaaaatatgtgatttcgggagtgcaaaagtgttggtaaaaggagaacccaatgtttcttacatctgttctagatactatcgtgctccagaactcatttttggtgccagtgaatacacaactgcaattgatatatggtccactggttgtgtgatggccgaactgcttcttggacagcctctgtttcctggtgagagcggagttgatcagcttgttgaaatcattaaggttttaggtacaccaacaagggaagaaatcaagtgcatgaatccaaactatacagaatttaagtttccgcagataaaacctcatccatggcacaaggtgttccaaaaacgtttgccaccagaagcagttgatcttctttgtaggttcttccaatattcccccaatttgagatgtacagctttggaagcttgtatccatccgttatttgatgagctaagggacccaaacactcgtcttcccaatggccgaccacttcctccacttttcaactttaaaccgcaagagctatctggcatacctcctgaaatcgtgaacaggcttgtcccagagcatgcccgtaagcagaacctcttcatggctttgcattcgtaagacgcttatcggtttttgcatctgtataagcaagctctcttgatatcaatatttggagcagccagttttcagccatttggcttttgtttttggtgagttctttttctttattttttttctgtttggttggttatatgtcgatgaggatgcatgaatacaaacagtacttgaggtttgctggttacagaccacttgtttgtttcacggccaccatataaccttatctatcgcaaactgtttt

SEQ ID NO: 4396 - protein, 421 aa, Arabidopsis thaliana
  peptide (1)..(421): Ceres Seq. ID no. 13575017
  misc_feature (83)..(367): Pfam Name: Pfam Description:  Protein kinase domain
  misc_feature (1)..(421): NCBI GI NO: 15218288 NR Description: shaggy-related protien kinase kappa
  misc_feature (48)..(421): NCBI GI NO: 25287630 NR Description: hypothetical protein
  misc_feature (1)..(48): NCBI GI NO: 25287630 NR Description: hypothetical protein
  misc_feature (4)..(421): NCBI GI NO: 15217795 NR Description: shaggy-related protein kinase kappa, putative
  misc_feature (47)..(421): NCBI GI NO: 1504063 NR Description: shaggy-like kinase kappa [Arabidopsis thaliana]
  misc_feature (1)..(421): NCBI GI NO: 24637171 NR Description: GSK-3-like protein MsK4 [Medicago sativa]
  misc_feature (1)..(419): NCBI GI NO: 33591204 NR Description: shaggy-related protein kinase 1
  misc_feature (1)..(419): NCBI GI NO: 33591208 NR Description: shaggy-related protein kinase 3
  misc_feature (1)..(419): NCBI GI NO: 33591210 NR Description: shaggy-related protein kinase 4
  misc_feature (1)..(419): NCBI GI NO: 33591206 NR Description: shaggy-related protein kinase 2
MASSGLGNGVGTSRSAKGLKSSSSSVDWLTRDLAETRIRDKVETDDERDSEPDIIDGAGAEPGHVIRTTLRGRNGQSRQTVSYISEHVVGTGSFGMVFQAKCRETGEVVAIKKVLQDKRYKNRELQIMQMLDHPNAVALKHSFFSRTDNEEVYLNLVLEFVPETVNRVARSYSRTNQLMPLIYVKLYTYQICRALAYIHNSFGLCHRDIKPQNLLVNPHTHQLKICDFGSAKVLVKGEPNVSYICSRYYRAPELIFGASEYTTAIDIWSTGCVMAELLLGQPLFPGESGVDQLVEIIKVLGTPTREEIKCMNPNYTEFKFPQIKPHPWHKVFQKRLPPEAVDLLCRFFQYSPNLRCTALEACIHPLFDELRDPNTRLPNGRPLPPLFNFKPQELSGIPPEIVNRLVPEHARKQNLFMALHS

SEQ ID NO: 4397 - protein, 326 aa, Arabidopsis thaliana
  peptide (1)..(326): Ceres Seq. ID no. 13575018
  misc_feature (1)..(272): Pfam Name: Pfam Description:  Protein kinase domain
  misc_feature (1)..(326): NCBI GI NO: 15218288 NR Description: shaggy-related protien kinase kappa
  misc_feature (1)..(326): NCBI GI NO: 25287630 NR Description: hypothetical protein
  misc_feature (1)..(326): NCBI GI NO: 15217795 NR Description: shaggy-related protein kinase kappa, putative
  misc_feature (1)..(326): NCBI GI NO: 1504063 NR Description: shaggy-like kinase kappa [Arabidopsis thaliana]
  misc_feature (1)..(326): NCBI GI NO: 24637171 NR Description: GSK-3-like protein MsK4 [Medicago sativa]
  misc_feature (1)..(324): NCBI GI NO: 33591204 NR Description: shaggy-related protein kinase 1
  misc_feature (1)..(324): NCBI GI NO: 33591208 NR Description: shaggy-related protein kinase 3
  misc_feature (1)..(324): NCBI GI NO: 33591210 NR Description: shaggy-related protein kinase 4
  misc_feature (1)..(324): NCBI GI NO: 33591206 NR Description: shaggy-related protein kinase 2
  misc_feature (1)..(324): NCBI GI NO: 22326813 NR Description: serine/threonine protein kinase, Msk family
MVFQAKCRETGEVVAIKKVLQDKRYKNRELQIMQMLDHPNAVALKHSFFSRTDNEEVYLNLVLEFVPETVNRVARSYSRTNQLMPLIYVKLYTYQICRALAYIHNSFGLCHRDIKPQNLLVNPHTHQLKICDFGSAKVLVKGEPNVSYICSRYYRAPELIFGASEYTTAIDIWSTGCVMAELLLGQPLFPGESGVDQLVEIIKVLGTPTREEIKCMNPNYTEFKFPQIKPHPWHKVFQKRLPPEAVDLLCRFFQYSPNLRCTALEACIHPLFDELRDPNTRLPNGRPLPPLFNFKPQELSGIPPEIVNRLVPEHARKQNLFMALHS

SEQ ID NO: 4398 - protein, 294 aa, Arabidopsis thaliana
  peptide (1)..(294): Ceres Seq. ID no. 13575019
  misc_feature (1)..(240): Pfam Name: Pfam Description:  Protein kinase domain
  misc_feature (1)..(294): NCBI GI NO: 15218288 NR Description: shaggy-related protien kinase kappa
  misc_feature (1)..(294): NCBI GI NO: 25287630 NR Description: hypothetical protein
  misc_feature (1)..(294): NCBI GI NO: 15217795 NR Description: shaggy-related protein kinase kappa, putative
  misc_feature (1)..(294): NCBI GI NO: 1504063 NR Description: shaggy-like kinase kappa [Arabidopsis thaliana]
  misc_feature (1)..(294): NCBI GI NO: 24637171 NR Description: GSK-3-like protein MsK4 [Medicago sativa]
  misc_feature (1)..(292): NCBI GI NO: 33591204 NR Description: shaggy-related protein kinase 1
  misc_feature (1)..(292): NCBI GI NO: 33591208 NR Description: shaggy-related protein kinase 3
  misc_feature (1)..(292): NCBI GI NO: 33591210 NR Description: shaggy-related protein kinase 4
  misc_feature (1)..(292): NCBI GI NO: 33591206 NR Description: shaggy-related protein kinase 2
  misc_feature (1)..(292): NCBI GI NO: 22326813 NR Description: serine/threonine protein kinase, Msk family
MQMLDHPNAVALKHSFFSRTDNEEVYLNLVLEFVPETVNRVARSYSRTNQLMPLIYVKLYTYQICRALAYIHNSFGLCHRDIKPQNLLVNPHTHQLKICDFGSAKVLVKGEPNVSYICSRYYRAPELIFGASEYTTAIDIWSTGCVMAELLLGQPLFPGESGVDQLVEIIKVLGTPTREEIKCMNPNYTEFKFPQIKPHPWHKVFQKRLPPEAVDLLCRFFQYSPNLRCTALEACIHPLFDELRDPNTRLPNGRPLPPLFNFKPQELSGIPPEIVNRLVPEHARKQNLFMALHS

SEQ ID NO: 4399 - DNA, 1174 bp, Arabidopsis thaliana
  misc_feature (1)..(1174): Ceres Seq. ID no. 13488707
agaagaagaagaaccctttcgtcgtcaaggtctagctttctcaaatcctctctctctcgtttctccgattccgatatcaccgtctcctccaccggaaaatccataacgcgattaggtttttagcctagttccttaatctctggttattgattctttcaatttctgatcgatgacattgtccaagcgattggctctattgggagctcaatctgcgattactctcgctaaacctcgaggtctcggttcctctctcgggttacttgatcgtcgtccatttccgtatcgtcaattttctgagctcacgaaagctaatgggagacgtgcttttctcgttgatacattggctctggtgaggagtcttgaagctcaaggagttccatcgaaacaagctgaggcaataacttctgctattactgaggttttgaatgatagcttggaaaatgtctctgagtcttttgtgtcgaaagcggaaatgcagaagattgaaatgattcaagattcaaatttatcgaaatttaaatctgaagtcaaaagttctcaggagcatcattttactgtattgcaacgtgagactgaaaaattgagaggcgatatagagaagatgcgaagtgagctaaggtacgaaattgataaggtcacagcgggacaacgcttggatttgaatcttgaaagaggccgaatacgtgatgagctagctaatcagaataccgaaacaacaaacctcacaaacaagcttgacagggaaattcatgcgttgagagctcaattagaagcttcaaaatacgaagtcatcaaatattgcataggtacacttgtgtcgatttcagcagtgggactcgccgtccttcgtatcatgatttaaagtacgatcccaacactcaacactgctctctgcttacaggcttaaaagccaaattgataacttgtcatttttatttgaatcccatcaatatgccatattatttttttctggcgatcagagaatattattgtttctgtgatctattttgccatcatcctttctaggtgtcagggtttgaaaatttgcaccgagaattatgttaatccaaggattattggtttcttccatttgcattattagttttctagctccttatatgatatgtcaatgactcaatgttacaaattgtcccaactgattttgtttctaagc

SEQ ID NO: 4400 - protein, 230 aa, Arabidopsis thaliana
  peptide (1)..(230): Ceres Seq. ID no. 13488708
  misc_feature (1)..(230): NCBI GI NO: 18398123 NR Description: expressed protein [Arabidopsis thaliana]
  misc_feature (34)..(230): NCBI GI NO: 18409266 NR Description: expressed protein [Arabidopsis thaliana]
  misc_feature (34)..(230): NCBI GI NO: 11357624 NR Description: hypothetical protein F24M12
  misc_feature (1)..(124): NCBI GI NO: 25411710 NR Description: hypothetical protein At2g16460
  misc_feature (73)..(229): NCBI GI NO: 14318473 NR Description: Hypothetical ORF; Yfl046wp
  misc_feature (56)..(230): NCBI GI NO: 40743676 NR Description: hypothetical protein AN5773.2
  misc_feature (56)..(230): NCBI GI NO: 19115424 NR Description: hypothetical conserved protein
  misc_feature (97)..(230): NCBI GI NO: 32422519 NR Description: predicted protein [Neurospora crassa]
  misc_feature (32)..(230): NCBI GI NO: 10197624 NR Description: MDS025 [Homo sapiens]
  misc_feature (32)..(230): NCBI GI NO: 20149663 NR Description: hypothetical protein MDS025 [Homo sapiens]
MTLSKRLALLGAQSAITLAKPRGLGSSLGLLDRRPFPYRQFSELTKANGRRAFLVDTLALVRSLEAQGVPSKQAEAITSAITEVLNDSLENVSESFVSKAEMQKIEMIQDSNLSKFKSEVKSSQEHHFTVLQRETEKLRGDIEKMRSELRYEIDKVTAGQRLDLNLERGRIRDELANQNTETTNLTNKLDREIHALRAQLEASKYEVIKYCIGTLVSISAVGLAVLRIMI

SEQ ID NO: 4401 - protein, 129 aa, Arabidopsis thaliana
  peptide (1)..(129): Ceres Seq. ID no. 13488709
  misc_feature (1)..(129): NCBI GI NO: 18398123 NR Description: expressed protein [Arabidopsis thaliana]
  misc_feature (1)..(129): NCBI GI NO: 18409266 NR Description: expressed protein [Arabidopsis thaliana]
  misc_feature (1)..(129): NCBI GI NO: 11357624 NR Description: hypothetical protein F24M12
  misc_feature (1)..(23): NCBI GI NO: 25411710 NR Description: hypothetical protein At2g16460
  misc_feature (1)..(128): NCBI GI NO: 14318473 NR Description: Hypothetical ORF; Yfl046wp
  misc_feature (1)..(129): NCBI GI NO: 40743676 NR Description: hypothetical protein AN5773.2
  misc_feature (1)..(129): NCBI GI NO: 19115424 NR Description: hypothetical conserved protein
  misc_feature (1)..(129): NCBI GI NO: 32422519 NR Description: predicted protein [Neurospora crassa]
  misc_feature (1)..(129): NCBI GI NO: 10197624 NR Description: MDS025 [Homo sapiens]
  misc_feature (1)..(129): NCBI GI NO: 20149663 NR Description: hypothetical protein MDS025 [Homo sapiens]
MQKIEMIQDSNLSKFKSEVKSSQEHHFTVLQRETEKLRGDIEKMRSELRYEIDKVTAGQRLDLNLERGRIRDELANQNTETTNLTNKLDREIHALRAQLEASKYEVIKYCIGTLVSISAVGLAVLRIMI

SEQ ID NO: 4402 - protein, 124 aa, Arabidopsis thaliana
  peptide (1)..(124): Ceres Seq. ID no. 13488710
  misc_feature (1)..(124): NCBI GI NO: 18398123 NR Description: expressed protein [Arabidopsis thaliana]
  misc_feature (1)..(124): NCBI GI NO: 18409266 NR Description: expressed protein [Arabidopsis thaliana]
  misc_feature (1)..(124): NCBI GI NO: 11357624 NR Description: hypothetical protein F24M12
  misc_feature (1)..(18): NCBI GI NO: 25411710 NR Description: hypothetical protein At2g16460
  misc_feature (1)..(123): NCBI GI NO: 14318473 NR Description: Hypothetical ORF; Yfl046wp
  misc_feature (1)..(124): NCBI GI NO: 40743676 NR Description: hypothetical protein AN5773.2
  misc_feature (1)..(124): NCBI GI NO: 19115424 NR Description: hypothetical conserved protein
  misc_feature (1)..(124): NCBI GI NO: 32422519 NR Description: predicted protein [Neurospora crassa]
  misc_feature (1)..(124): NCBI GI NO: 10197624 NR Description: MDS025 [Homo sapiens]
  misc_feature (1)..(124): NCBI GI NO: 20149663 NR Description: hypothetical protein MDS025 [Homo sapiens]
MIQDSNLSKFKSEVKSSQEHHFTVLQRETEKLRGDIEKMRSELRYEIDKVTAGQRLDLNLERGRIRDELANQNTETTNLTNKLDREIHALRAQLEASKYEVIKYCIGTLVSISAVGLAVLRIMI

SEQ ID NO: 4403 - DNA, 831 bp, Arabidopsis thaliana
  misc_feature (1)..(831): Ceres Seq. ID no. 12385287
aatcaccgattgttctgagccggacgaaggagaggcagccgcctaagaagttgccgtcgtgcgccatggccgtgaaggcttctggattcattgggaaatcagcaatctctgttcatctagatttctcttcgtttcctgtgaaattttcatgcttgaaacagttttctgtatcttcaccaaagccactggtcgttttatccgttgccttatcgtcgccggcaagaacagttgagtctccgcctgttggttaccggaagaatgttgggatttgtctcgttagcccatgtagaaagatttttacggcgtcaaagattcacattccggatacatggcagatgcctcagggtggtgctgatgagggagaagatttgaggaacgctgcctttagagaactgagagaagaaacaggggttacttcggcagaattcattgcggagataccaaactggctgacctatgattttccccgagaagtaaaggacaaactaaaccggaaatggcgaacaagttacaaaggccaagctcagaagtggtttctctttaagttcacgggcaaggaagaagagataaatctccttggagacggtactgcaaaaccagagtttaaggtgtggtcgtggatgctaccggaacaagttattgaacatgctgtatatttcaagagacctgtttatgagcatgtcataaagcaattcaacccttattttgtggatgaagaaaaggattccatgaactcgtctaaggattgaatgtgcacaaagattcaccaagtgaatactgattagaagcaaatcaatcaattcattatactggtttctcttgaatctcatc

SEQ ID NO: 4404 - protein, 248 aa, Arabidopsis thaliana
  peptide (1)..(248): Ceres Seq. ID no. 12385288
  misc_feature (83)..(230): Pfam Name: Pfam Description:  NUDIX domain
  misc_feature (22)..(248): NCBI GI NO: 15240003 NR Description: diadenosine 5
  misc_feature (65)..(234): NCBI GI NO: 1888557 NR Description: diadenosine 5'
  misc_feature (72)..(234): NCBI GI NO: 14488439 NR Description: Chain A
  misc_feature (42)..(234): NCBI GI NO: 7489414 NR Description: probable bis
  misc_feature (40)..(231): NCBI GI NO: 15228345 NR Description: putative diadenosine 5'
  misc_feature (40)..(231): NCBI GI NO: 8567796 NR Description: diadenosine 5'
  misc_feature (76)..(237): NCBI GI NO: 15220667 NR Description: diadenosine 5
  misc_feature (74)..(234): NCBI GI NO: 22959957 NR Description: hypothetical protein [Rhodobacter sphaeroides]
  misc_feature (71)..(238): NCBI GI NO: 22967686 NR Description: hypothetical protein [Rhodospirillum rubrum]
  misc_feature (83)..(232): NCBI GI NO: 22962168 NR Description: hypothetical protein [Rhodopseudomonas palustris]
SPIVLSRTKERQPPKKLPSCAMAVKASGFIGKSAISVHLDFSSFPVKFSCLKQFSVSSPKPLVVLSVALSSPARTVESPPVGYRKNVGICLVSPCRKIFTASKIHIPDTWQMPQGGADEGEDLRNAAFRELREETGVTSAEFIAEIPNWLTYDFPREVKDKLNRKWRTSYKGQAQKWFLFKFTGKEEEINLLGDGTAKPEFKVWSWMLPEQVIEHAVYFKRPVYEHVIKQFNPYFVDEEKDSMNSSKD

SEQ ID NO: 4405 - protein, 227 aa, Arabidopsis thaliana
  peptide (1)..(227): Ceres Seq. ID no. 12385289
  misc_feature (62)..(209): Pfam Name: Pfam Description:  NUDIX domain
  misc_feature (1)..(227): NCBI GI NO: 15240003 NR Description: diadenosine 5
  misc_feature (44)..(213): NCBI GI NO: 1888557 NR Description: diadenosine 5'
  misc_feature (51)..(213): NCBI GI NO: 14488439 NR Description: Chain A
  misc_feature (21)..(213): NCBI GI NO: 7489414 NR Description: probable bis
  misc_feature (19)..(210): NCBI GI NO: 15228345 NR Description: putative diadenosine 5'
  misc_feature (19)..(210): NCBI GI NO: 8567796 NR Description: diadenosine 5'
  misc_feature (55)..(216): NCBI GI NO: 15220667 NR Description: diadenosine 5
  misc_feature (53)..(213): NCBI GI NO: 22959957 NR Description: hypothetical protein [Rhodobacter sphaeroides]
  misc_feature (50)..(217): NCBI GI NO: 22967686 NR Description: hypothetical protein [Rhodospirillum rubrum]
  misc_feature (62)..(211): NCBI GI NO: 22962168 NR Description: hypothetical protein [Rhodopseudomonas palustris]
MAVKASGFIGKSAISVHLDFSSFPVKFSCLKQFSVSSPKPLVVLSVALSSPARTVESPPVGYRKNVGICLVSPCRKIFTASKIHIPDTWQMPQGGADEGEDLRNAAFRELREETGVTSAEFIAEIPNWLTYDFPREVKDKLNRKWRTSYKGQAQKWFLFKFTGKEEEINLLGDGTAKPEFKVWSWMLPEQVIEHAVYFKRPVYEHVIKQFNPYFVDEEKDSMNSSKD

SEQ ID NO: 4406 - protein, 137 aa, Arabidopsis thaliana
  peptide (1)..(137): Ceres Seq. ID no. 12385290
  misc_feature (1)..(119): Pfam Name: Pfam Description:  NUDIX domain
  misc_feature (1)..(137): NCBI GI NO: 15240003 NR Description: diadenosine 5
  misc_feature (1)..(123): NCBI GI NO: 1888557 NR Description: diadenosine 5'
  misc_feature (1)..(123): NCBI GI NO: 14488439 NR Description: Chain A
  misc_feature (1)..(123): NCBI GI NO: 7489414 NR Description: probable bis
  misc_feature (1)..(120): NCBI GI NO: 15228345 NR Description: putative diadenosine 5'
  misc_feature (1)..(120): NCBI GI NO: 8567796 NR Description: diadenosine 5'
  misc_feature (1)..(126): NCBI GI NO: 15220667 NR Description: diadenosine 5
  misc_feature (1)..(123): NCBI GI NO: 22959957 NR Description: hypothetical protein [Rhodobacter sphaeroides]
  misc_feature (1)..(127): NCBI GI NO: 22967686 NR Description: hypothetical protein [Rhodospirillum rubrum]
  misc_feature (1)..(121): NCBI GI NO: 22962168 NR Description: hypothetical protein [Rhodopseudomonas palustris]
MPQGGADEGEDLRNAAFRELREETGVTSAEFIAEIPNWLTYDFPREVKDKLNRKWRTSYKGQAQKWFLFKFTGKEEEINLLGDGTAKPEFKVWSWMLPEQVIEHAVYFKRPVYEHVIKQFNPYFVDEEKDSMNSSKD

SEQ ID NO: 4407 - DNA, 1180 bp, Arabidopsis thaliana
  misc_feature (1)..(1180): Ceres Seq. ID no. 12330478
accactatgagaggatcctagggttactactaatctcgaaatcaatcaaatcaaagcatccatttttgattcagacttcagagagacagagaaggaagaagaagaagaagaagaagaaaaaactatggagaatgagagggaaaagcaggtttacttggctaagctctccgagcaaaccgaaagatacgatgaaatggtggaggcgatgaagaaagttgctcagcttgatgtggagctaactgtggaagagaggaatcttgtatctgtagggtacaagaatgtgattggtgcaaggagagcatcatggagaatactatcttccattgagcagaaggaagagtccaagggaaatgatgaaaatgtcaagaggcttaagaattatcgtaagagagttgaagatgagcttgctaaagtttgtaatgacatcttgtctgtcattgataagcatctcattccatcgtctaacgctgtggagtcaactgtctttttctacaaaatgaaaggagattactatcgctatcttgcggagttcagttctggtgctgaacgcaaggaagctgcagatcagtctcttgaagcatataaggctgctgttgctgctgcagagaatggtttggcacccacacatccagttagacttggcttggcgttgaacttttcagttttctactatgagatcttgaactctcccgaaagcgcatgccaattggctaagcaagcattcgatgatgcaattgctgaacttgacagcctcaacgaggaatcatacaaagacagcactcttattatgcagctacttagagacaatctcaccttgtggacttcagaccttaatgaggaaggagatgagagaaccaaaggtgctgatgagcctcaagatgagaactaaatcctctgtgagaagagaaacgactcttgctgcatcctgaatcttgaagtgaagacagtaagtgtcgttgtttgttactcgaatgtgtaatttttaatctatgtctttcttgatggtgttttccagattcttgaacttttcacaacacaacactgcgttgcgtatcttcaaccctcttatgatgtggttgaattctgttttacgcttagtttgcttcttttgttgttgaattgagccagcaggcatgatttgggtttttgtttatcagaatattaggcgtatcatggtctc

SEQ ID NO: 4408 - protein, 254 aa, Arabidopsis thaliana
  peptide (1)..(254): Ceres Seq. ID no. 12330479
  misc_feature (5)..(240): Pfam Name: Pfam Description:  14-3-3 protein
  misc_feature (1)..(254): NCBI GI NO: 18395103 NR Description: 14-3-3 protein GF14 epsilon
  misc_feature (1)..(253): NCBI GI NO: 30687814 NR Description: 14-3-3 protein GF14 epsilon (grf10)
  misc_feature (1)..(254): NCBI GI NO: 26454609 NR Description: 14-3-3 protein 7
  misc_feature (1)..(254): NCBI GI NO: 3925703 NR Description: 14-3-3 protein [Lycopersicon esculentum]
  misc_feature (1)..(254): NCBI GI NO: 2492490 NR Description: 14-3-3-LIKE PROTEIN
  misc_feature (1)..(240): NCBI GI NO: 18399427 NR Description: 14-3-3 protein GF14 omicron
  misc_feature (1)..(245): NCBI GI NO: 3023197 NR Description: 14-3-3-LIKE PROTEIN D (SGF14D)
  misc_feature (4)..(243): NCBI GI NO: 8515890 NR Description: 14-3-3 protein [Populus x canescens]
  misc_feature (4)..(243): NCBI GI NO: 8099061 NR Description: 14-3-3 protein [Populus x canescens]
  misc_feature (4)..(243): NCBI GI NO: 6752903 NR Description: 14-3-3-like protein [Euphorbia esula]
MENEREKQVYLAKLSEQTERYDEMVEAMKKVAQLDVELTVEERNLVSVGYKNVIGARRASWRILSSIEQKEESKGNDENVKRLKNYRKRVEDELAKVCNDILSVIDKHLIPSSNAVESTVFFYKMKGDYYRYLAEFSSGAERKEAADQSLEAYKAAVAAAENGLAPTHPVRLGLALNFSVFYYEILNSPESACQLAKQAFDDAIAELDSLNEESYKDSTLIMQLLRDNLTLWTSDLNEEGDERTKGADEPQDEN

SEQ ID NO: 4409 - protein, 231 aa, Arabidopsis thaliana
  peptide (1)..(231): Ceres Seq. ID no. 12330480
  misc_feature (1)..(217): Pfam Name: Pfam Description:  14-3-3 protein
  misc_feature (1)..(231): NCBI GI NO: 18395103 NR Description: 14-3-3 protein GF14 epsilon
  misc_feature (1)..(230): NCBI GI NO: 30687814 NR Description: 14-3-3 protein GF14 epsilon (grf10)
  misc_feature (1)..(231): NCBI GI NO: 26454609 NR Description: 14-3-3 protein 7
  misc_feature (1)..(231): NCBI GI NO: 3925703 NR Description: 14-3-3 protein [Lycopersicon esculentum]
  misc_feature (1)..(231): NCBI GI NO: 2492490 NR Description: 14-3-3-LIKE PROTEIN
  misc_feature (1)..(217): NCBI GI NO: 18399427 NR Description: 14-3-3 protein GF14 omicron
  misc_feature (1)..(222): NCBI GI NO: 3023197 NR Description: 14-3-3-LIKE PROTEIN D (SGF14D)
  misc_feature (1)..(220): NCBI GI NO: 8515890 NR Description: 14-3-3 protein [Populus x canescens]
  misc_feature (1)..(220): NCBI GI NO: 8099061 NR Description: 14-3-3 protein [Populus x canescens]
  misc_feature (1)..(220): NCBI GI NO: 6752903 NR Description: 14-3-3-like protein [Euphorbia esula]
MVEAMKKVAQLDVELTVEERNLVSVGYKNVIGARRASWRILSSIEQKEESKGNDENVKRLKNYRKRVEDELAKVCNDILSVIDKHLIPSSNAVESTVFFYKMKGDYYRYLAEFSSGAERKEAADQSLEAYKAAVAAAENGLAPTHPVRLGLALNFSVFYYEILNSPESACQLAKQAFDDAIAELDSLNEESYKDSTLIMQLLRDNLTLWTSDLNEEGDERTKGADEPQDEN

SEQ ID NO: 4410 - protein, 227 aa, Arabidopsis thaliana
  peptide (1)..(227): Ceres Seq. ID no. 12330481
  misc_feature (1)..(213): Pfam Name: Pfam Description:  14-3-3 protein
  misc_feature (1)..(227): NCBI GI NO: 18395103 NR Description: 14-3-3 protein GF14 epsilon
  misc_feature (1)..(226): NCBI GI NO: 30687814 NR Description: 14-3-3 protein GF14 epsilon (grf10)
  misc_feature (1)..(227): NCBI GI NO: 26454609 NR Description: 14-3-3 protein 7
  misc_feature (1)..(227): NCBI GI NO: 3925703 NR Description: 14-3-3 protein [Lycopersicon esculentum]
  misc_feature (1)..(227): NCBI GI NO: 2492490 NR Description: 14-3-3-LIKE PROTEIN
  misc_feature (1)..(213): NCBI GI NO: 18399427 NR Description: 14-3-3 protein GF14 omicron
  misc_feature (1)..(218): NCBI GI NO: 3023197 NR Description: 14-3-3-LIKE PROTEIN D (SGF14D)
  misc_feature (1)..(216): NCBI GI NO: 8515890 NR Description: 14-3-3 protein [Populus x canescens]
  misc_feature (1)..(216): NCBI GI NO: 8099061 NR Description: 14-3-3 protein [Populus x canescens]
  misc_feature (1)..(216): NCBI GI NO: 6752903 NR Description: 14-3-3-like protein [Euphorbia esula]
MKKVAQLDVELTVEERNLVSVGYKNVIGARRASWRILSSIEQKEESKGNDENVKRLKNYRKRVEDELAKVCNDILSVIDKHLIPSSNAVESTVFFYKMKGDYYRYLAEFSSGAERKEAADQSLEAYKAAVAAAENGLAPTHPVRLGLALNFSVFYYEILNSPESACQLAKQAFDDAIAELDSLNEESYKDSTLIMQLLRDNLTLWTSDLNEEGDERTKGADEPQDEN

SEQ ID NO: 4411 - DNA, 929 bp, Arabidopsis thaliana
  misc_feature (1)..(929): Ceres Seq. ID no. 12325534
attcccaccattagggctctctctaaattcctcagtctcgtgagaatcgtcatcgtcttcacggagctcactcgaagatgttaacggcagatataccaccgaatcattcaatctacatccaaaacctcaatgaaaggatcaagaaagaggaattgaagagatctctttactgtttgttctctcagtttgggagaatacttgatgtggttgctttgaagactccgaagctccgaggacaagcttgggttacttttagtgaagtcactgctgctggtcatgctgttcgtcagatgcaaaattttcccttctatgataaaccaatgcgcttacaatatgcaaaagcaaagtcagattgtctagctaaagctgagggaactttcgttccaaaagataagaagaggaagcaagaagaaaaagttgaaagaaagcgtgaagaatcccaacgaccaaacacagctaatggtccaagtgctaatggtccaagtgccaataacggagtccctgcgccttcgttccagccgagcgggcaagaaacaatgccaccaaacaacatactcttcattcagaatctcccacacgagacaacaagcatgatgctccagcttctcttcgaacagtaccctggattcaaagagataagaatgatcgacgcaaaaccaggaatcgcgtttgtagagtacgaagacgatgttcaagcttccatagctatgcaacctcttcaaggtttcaaaatcactccccagaatccaatggtcatctctttcgccaagaaatgataagagtcttgtttttgtttgtttgttgtcctttaagacgatagtactggaccaaccaaacctggtgtgtataaccaaccaacggttctattggttaacggattaatccggttttggtttaatcattgaaagagacccttgaaacgcggtttc

SEQ ID NO: 4412 - protein, 232 aa, Arabidopsis thaliana
  peptide (1)..(232): Ceres Seq. ID no. 12325535
  misc_feature (12)..(84): Pfam Name: a.k.a. RRM, RBD, or RNP domain Pfam Description: RNA recognition motif.
  misc_feature (1)..(232): NCBI GI NO: 21593001 NR Description: putative small nuclear ribonucleoprotein U2B
  misc_feature (1)..(232): NCBI GI NO: 15227729 NR Description: small nuclear ribonucleoprotein U2B, putative
  misc_feature (1)..(232): NCBI GI NO: 30679892 NR Description: small nuclear ribonucleoprotein U2B
  misc_feature (1)..(232): NCBI GI NO: 30679897 NR Description: small nuclear ribonucleoprotein U2B
  misc_feature (1)..(232): NCBI GI NO: 19347861 NR Description: putative spliceosomal protein (U2B)
  misc_feature (1)..(232): NCBI GI NO: 25294325 NR Description: hypothetical protein
  misc_feature (1)..(232): NCBI GI NO: 421960 NR Description: small nuclear ribonucleoprotein U2B'' - potato
  misc_feature (5)..(232): NCBI GI NO: 2119045 NR Description: small nuclear ribonucleoprotein U1A - potato
  misc_feature (7)..(232): NCBI GI NO: 34897622 NR Description: putative small nuclear ribonucleoprotein U1A
  misc_feature (4)..(232): NCBI GI NO: 15226631 NR Description: small nuclear ribonucleoprotein U1A
MLTADIPPNHSIYIQNLNERIKKEELKRSLYCLFSQFGRILDVVALKTPKLRGQAWVTFSEVTAAGHAVRQMQNFPFYDKPMRLQYAKAKSDCLAKAEGTFVPKDKKRKQEEKVERKREESQRPNTANGPSANGPSANNGVPAPSFQPSGQETMPPNNILFIQNLPHETTSMMLQLLFEQYPGFKEIRMIDAKPGIAFVEYEDDVQASIAMQPLQGFKITPQNPMVISFAKK

SEQ ID NO: 4413 - protein, 161 aa, Arabidopsis thaliana
  peptide (1)..(161): Ceres Seq. ID no. 12325536
  misc_feature (1)..(161): NCBI GI NO: 21593001 NR Description: putative small nuclear ribonucleoprotein U2B
  misc_feature (1)..(161): NCBI GI NO: 15227729 NR Description: small nuclear ribonucleoprotein U2B, putative
  misc_feature (1)..(161): NCBI GI NO: 30679892 NR Description: small nuclear ribonucleoprotein U2B
  misc_feature (1)..(161): NCBI GI NO: 30679897 NR Description: small nuclear ribonucleoprotein U2B
  misc_feature (1)..(161): NCBI GI NO: 19347861 NR Description: putative spliceosomal protein (U2B)
  misc_feature (1)..(161): NCBI GI NO: 25294325 NR Description: hypothetical protein
  misc_feature (1)..(161): NCBI GI NO: 421960 NR Description: small nuclear ribonucleoprotein U2B'' - potato
  misc_feature (1)..(161): NCBI GI NO: 2119045 NR Description: small nuclear ribonucleoprotein U1A - potato
  misc_feature (1)..(161): NCBI GI NO: 34897622 NR Description: putative small nuclear ribonucleoprotein U1A
  misc_feature (1)..(161): NCBI GI NO: 15226631 NR Description: small nuclear ribonucleoprotein U1A
MQNFPFYDKPMRLQYAKAKSDCLAKAEGTFVPKDKKRKQEEKVERKREESQRPNTANGPSANGPSANNGVPAPSFQPSGQETMPPNNILFIQNLPHETTSMMLQLLFEQYPGFKEIRMIDAKPGIAFVEYEDDVQASIAMQPLQGFKITPQNPMVISFAKK

SEQ ID NO: 4414 - protein, 151 aa, Arabidopsis thaliana
  peptide (1)..(151): Ceres Seq. ID no. 12325537
  misc_feature (1)..(151): NCBI GI NO: 21593001 NR Description: putative small nuclear ribonucleoprotein U2B
  misc_feature (1)..(151): NCBI GI NO: 15227729 NR Description: small nuclear ribonucleoprotein U2B, putative
  misc_feature (1)..(151): NCBI GI NO: 30679892 NR Description: small nuclear ribonucleoprotein U2B
  misc_feature (1)..(151): NCBI GI NO: 30679897 NR Description: small nuclear ribonucleoprotein U2B
  misc_feature (1)..(151): NCBI GI NO: 19347861 NR Description: putative spliceosomal protein (U2B)
  misc_feature (1)..(151): NCBI GI NO: 25294325 NR Description: hypothetical protein
  misc_feature (1)..(151): NCBI GI NO: 421960 NR Description: small nuclear ribonucleoprotein U2B'' - potato
  misc_feature (1)..(151): NCBI GI NO: 2119045 NR Description: small nuclear ribonucleoprotein U1A - potato
  misc_feature (1)..(151): NCBI GI NO: 34897622 NR Description: putative small nuclear ribonucleoprotein U1A
  misc_feature (1)..(151): NCBI GI NO: 15226631 NR Description: small nuclear ribonucleoprotein U1A
MRLQYAKAKSDCLAKAEGTFVPKDKKRKQEEKVERKREESQRPNTANGPSANGPSANNGVPAPSFQPSGQETMPPNNILFIQNLPHETTSMMLQLLFEQYPGFKEIRMIDAKPGIAFVEYEDDVQASIAMQPLQGFKITPQNPMVISFAKK

SEQ ID NO: 4415 - DNA, 1431 bp, Arabidopsis thaliana
  misc_feature (1)..(1431): Ceres Seq. ID no. 12328852
aaattgggttaagtcaattgttgtcactatagatgtttagttctacaactctgcatcatcttcctcgtccgaatcttcttcttcccagctctcgtgtctgcaggaaagttatttcgagaagaatgagtacgaatcctgcaattgaaccaaaagttcgcaaatttgaatctgttgaaggagttgatattggttcaagaaataaatccgatggtatcagattccgtcttgtttcatataacatattagctcaggtttatgtgaagagtgcacttctcccacactctccacctgcctgtctcaaatggaaagctcgttcacatgcaattctcagcgttctcaaaaatctccaggctgatttcttttgtctgcaggaagtagatgagtacgatagcttttacagaaataacatggactctctgggatattctgggatttatattcagagaaccggccagaggaagcgtgatggttgtgcaatcttctacaagccaagctgtgcagagttagtcacaaaggaacggatcgaatataatgatcttgtggactcaataaaagcagatagtgtttcctgcagcgaacagaagattgagacatccaacgaaggaaaaggtgatgagaaagcgaaagattctcgaaaagacagtcgtgaccttaatgatccactagtgagactaaaacgtgattgcgttggaataatggctgcttttaggatcaacaagccgtttcagcatatcgttatcgtggcaaacacacatctttactgggaccctgaattggctgatgtcaagcttgctcaagccaagtatctactgtcacgactagctcagttcaaaacactaatatcagatgaatttgagtgcacaccttcattgctactagctggcgacttcaattcaattcctggggatatggtttatagttacctagtatcgggtaatgctaaacccacagagaccatagaagaagaagaagctccagttcctctgtctagtgtctatgaagtcacaagaggagagcctaagttcacaaattgcactcctggcttcacaaacacacttgactacatcttcatctctccttcagacttcatcaaacctgtgagtatccttcaactacctgagccggattctccagatgttgtcggtttcttaccgaatcatcatcacccgagtgatcatttacctataggagctgagtttgagattcgtcgggaataggaagtttcgttctttagaaagttttgtcgcataactccattgtttcagcatttgaatatggttcttgtagaaatcatgaagcagtgaatcatacacacacaacacaaagtattaaaggacttggatcatttttgtctcgataaactcgaaatcgttgtgtgcattgaattactgagaatatttgaattttcttgagaagaaattgtttaatgtc

SEQ ID NO: 4416 - protein, 394 aa, Arabidopsis thaliana
  peptide (1)..(394): Ceres Seq. ID no. 12328853
  misc_feature (98)..(389): Pfam Name: Pfam Description:  Endonuclease/Exonuclease/phosphatase family
  misc_feature (88)..(394): NCBI GI NO: 15222367 NR Description: hypothetical protein; protein id: At1g31500.1
  misc_feature (88)..(394): NCBI GI NO: 28973671 NR Description: unknown protein [Arabidopsis thaliana]
  misc_feature (221)..(393): NCBI GI NO: 15222370 NR Description: hypothetical protein; protein id: At1g31530.1
  misc_feature (78)..(190): NCBI GI NO: 15222370 NR Description: hypothetical protein; protein id: At1g31530.1
  misc_feature (221)..(393): NCBI GI NO: 12322536 NR Description: hypothetical protein [Arabidopsis thaliana]
  misc_feature (89)..(190): NCBI GI NO: 12322536 NR Description: hypothetical protein [Arabidopsis thaliana]
  misc_feature (199)..(393): NCBI GI NO: 7493814 NR Description: transcription effector - yeast
  misc_feature (45)..(169): NCBI GI NO: 7493814 NR Description: transcription effector - yeast
  misc_feature (18)..(394): NCBI GI NO: 19075401 NR Description: putative global transcriptional regulator
  misc_feature (35)..(389): NCBI GI NO: 11282423 NR Description: hypothetical protein F14P22
MFSSTTLHHLPRPNLLLPSSRVCRKVISRRMSTNPAIEPKVRKFESVEGVDIGSRNKSDGIRFRLVSYNILAQVYVKSALLPHSPPACLKWKARSHAILSVLKNLQADFFCLQEVDEYDSFYRNNMDSLGYSGIYIQRTGQRKRDGCAIFYKPSCAELVTKERIEYNDLVDSIKADSVSCSEQKIETSNEGKGDEKAKDSRKDSRDLNDPLVRLKRDCVGIMAAFRINKPFQHIVIVANTHLYWDPELADVKLAQAKYLLSRLAQFKTLISDEFECTPSLLLAGDFNSIPGDMVYSYLVSGNAKPTETIEEEEAPVPLSSVYEVTRGEPKFTNCTPGFTNTLDYIFISPSDFIKPVSILQLPEPDSPDVVGFLPNHHHPSDHLPIGAEFEIRRE

SEQ ID NO: 4417 - protein, 364 aa, Arabidopsis thaliana
  peptide (1)..(364): Ceres Seq. ID no. 12328854
  misc_feature (68)..(359): Pfam Name: Pfam Description:  Endonuclease/Exonuclease/phosphatase family
  misc_feature (58)..(364): NCBI GI NO: 15222367 NR Description: hypothetical protein; protein id: At1g31500.1
  misc_feature (58)..(364): NCBI GI NO: 28973671 NR Description: unknown protein [Arabidopsis thaliana]
  misc_feature (191)..(363): NCBI GI NO: 15222370 NR Description: hypothetical protein; protein id: At1g31530.1
  misc_feature (48)..(160): NCBI GI NO: 15222370 NR Description: hypothetical protein; protein id: At1g31530.1
  misc_feature (191)..(363): NCBI GI NO: 12322536 NR Description: hypothetical protein [Arabidopsis thaliana]
  misc_feature (59)..(160): NCBI GI NO: 12322536 NR Description: hypothetical protein [Arabidopsis thaliana]
  misc_feature (169)..(363): NCBI GI NO: 7493814 NR Description: transcription effector - yeast
  misc_feature (15)..(139): NCBI GI NO: 7493814 NR Description: transcription effector - yeast
  misc_feature (1)..(364): NCBI GI NO: 19075401 NR Description: putative global transcriptional regulator
  misc_feature (5)..(359): NCBI GI NO: 11282423 NR Description: hypothetical protein F14P22
MSTNPAIEPKVRKFESVEGVDIGSRNKSDGIRFRLVSYNILAQVYVKSALLPHSPPACLKWKARSHAILSVLKNLQADFFCLQEVDEYDSFYRNNMDSLGYSGIYIQRTGQRKRDGCAIFYKPSCAELVTKERIEYNDLVDSIKADSVSCSEQKIETSNEGKGDEKAKDSRKDSRDLNDPLVRLKRDCVGIMAAFRINKPFQHIVIVANTHLYWDPELADVKLAQAKYLLSRLAQFKTLISDEFECTPSLLLAGDFNSIPGDMVYSYLVSGNAKPTETIEEEEAPVPLSSVYEVTRGEPKFTNCTPGFTNTLDYIFISPSDFIKPVSILQLPEPDSPDVVGFLPNHHHPSDHLPIGAEFEIRRE

SEQ ID NO: 4418 - protein, 269 aa, Arabidopsis thaliana
  peptide (1)..(269): Ceres Seq. ID no. 12328855
  misc_feature (1)..(264): Pfam Name: Pfam Description:  Endonuclease/Exonuclease/phosphatase family
  misc_feature (1)..(269): NCBI GI NO: 15222367 NR Description: hypothetical protein; protein id: At1g31500.1
  misc_feature (1)..(269): NCBI GI NO: 28973671 NR Description: unknown protein [Arabidopsis thaliana]
  misc_feature (96)..(268): NCBI GI NO: 15222370 NR Description: hypothetical protein; protein id: At1g31530.1
  misc_feature (1)..(65): NCBI GI NO: 15222370 NR Description: hypothetical protein; protein id: At1g31530.1
  misc_feature (96)..(268): NCBI GI NO: 12322536 NR Description: hypothetical protein [Arabidopsis thaliana]
  misc_feature (1)..(65): NCBI GI NO: 12322536 NR Description: hypothetical protein [Arabidopsis thaliana]
  misc_feature (74)..(268): NCBI GI NO: 7493814 NR Description: transcription effector - yeast
  misc_feature (1)..(44): NCBI GI NO: 7493814 NR Description: transcription effector - yeast
  misc_feature (1)..(269): NCBI GI NO: 19075401 NR Description: putative global transcriptional regulator
  misc_feature (1)..(264): NCBI GI NO: 11282423 NR Description: hypothetical protein F14P22
MDSLGYSGIYIQRTGQRKRDGCAIFYKPSCAELVTKERIEYNDLVDSIKADSVSCSEQKIETSNEGKGDEKAKDSRKDSRDLNDPLVRLKRDCVGIMAAFRINKPFQHIVIVANTHLYWDPELADVKLAQAKYLLSRLAQFKTLISDEFECTPSLLLAGDFNSIPGDMVYSYLVSGNAKPTETIEEEEAPVPLSSVYEVTRGEPKFTNCTPGFTNTLDYIFISPSDFIKPVSILQLPEPDSPDVVGFLPNHHHPSDHLPIGAEFEIRRE

SEQ ID NO: 4419 - DNA, 1279 bp, Arabidopsis thaliana
  misc_feature (1)..(1279): Ceres Seq. ID no. 13491536
acaatcacttgtctgattctctcatataatagagttttctttctattctcctctgcttaatttcccagaaattactctttctgtgcttatcggattcaatagattcttagtaaatcgtaatggagacaccatcatcgacaagaagagtcacgagatctcagacccgctgtgctatcaataatctcttatcctcaaagaaagcggatgattggtcagataaatgtcaatcgaagtcggtacaaagaaacggtgcaaaagacaggtctgcgttgtttgacataaccaacgactcaccgatcgtaggtctggcgatgcagacaccgtcctcaggagttgttgggaagaggaacatgagcagaatcaataacactcctggatctggtgaggctctcttgagaggccaagtcaagactctcttgcagaaggttgaggaagaagcagatctcaccaagatttcgttggaatctcgtcctttcatccatctcgttacttctcccatgggtcttctcgccccaactccggccaacaccccccaagttcttggtttctcagacgaagtgcaggttgtgatcacttctccggtagttgcaggacaattcagagcaccgtctcaggtggtggaaagcaacatgtttgatgagaaagaagaaagcttggagttagagaagagcccgagcattactcggtcattgcttctggactttagtgataaatcagaattatgggagagctcagactgctcatctgtggtgactcaaaacccagaggatgataactcgtcggtgtggtcgatgcaggccaatgcaagtgccaaagacgaagagtatgatgatgaagaggaagaagcctattcttacggtgaggaatatgatgaggaatactacgacgaggaagaggaggaagaagagggagggattgtggatgggttgtgtgagggaattaggaagatgagcgtagagactgactttgcagggaaacacactagatttgtgtatgacagtgaagatgaagagattgtggaggccaaagatcaatctccaggagtgttgcgtttgaaaggctttcctacaccgacaggaaaacatgtcagatttgccggtgatgaatgagttcagtttgaatctttcttcttggagttgtgacaaaaagcctcatatgtctcgactttttttttttttttcttgttgttgcttgaagattcacaaatctgattcttgttattaccttgttgttatttttcaataactaaaagtgtaatcggaatatgactcttttcatt

SEQ ID NO: 4420 - protein, 329 aa, Arabidopsis thaliana
  peptide (1)..(329): Ceres Seq. ID no. 13491537
  misc_feature (1)..(329): NCBI GI NO: 15239303 NR Description: expressed protein [Arabidopsis thaliana]
  misc_feature (1)..(182): NCBI GI NO: 15230432 NR Description: hypothetical protein [Arabidopsis thaliana]
  misc_feature (274)..(329): NCBI GI NO: 15230432 NR Description: hypothetical protein [Arabidopsis thaliana]
  misc_feature (1)..(328): NCBI GI NO: 37537140 NR Description: putative proline and glutamic acid rich nuclear protein
METPSSTRRVTRSQTRCAINNLLSSKKADDWSDKCQSKSVQRNGAKDRSALFDITNDSPIVGLAMQTPSSGVVGKRNMSRINNTPGSGEALLRGQVKTLLQKVEEEADLTKISLESRPFIHLVTSPMGLLAPTPANTPQVLGFSDEVQVVITSPVVAGQFRAPSQVVESNMFDEKEESLELEKSPSITRSLLLDFSDKSELWESSDCSSVVTQNPEDDNSSVWSMQANASAKDEEYDDEEEEAYSYGEEYDEEYYDEEEEEEEGGIVDGLCEGIRKMSVETDFAGKHTRFVYDSEDEEIVEAKDQSPGVLRLKGFPTPTGKHVRFAGDE

SEQ ID NO: 4421 - protein, 265 aa, Arabidopsis thaliana
  peptide (1)..(265): Ceres Seq. ID no. 13491538
  misc_feature (1)..(265): NCBI GI NO: 15239303 NR Description: expressed protein [Arabidopsis thaliana]
  misc_feature (1)..(118): NCBI GI NO: 15230432 NR Description: hypothetical protein [Arabidopsis thaliana]
  misc_feature (210)..(265): NCBI GI NO: 15230432 NR Description: hypothetical protein [Arabidopsis thaliana]
  misc_feature (1)..(264): NCBI GI NO: 37537140 NR Description: putative proline and glutamic acid rich nuclear protein
MQTPSSGVVGKRNMSRINNTPGSGEALLRGQVKTLLQKVEEEADLTKISLESRPFIHLVTSPMGLLAPTPANTPQVLGFSDEVQVVITSPVVAGQFRAPSQVVESNMFDEKEESLELEKSPSITRSLLLDFSDKSELWESSDCSSVVTQNPEDDNSSVWSMQANASAKDEEYDDEEEEAYSYGEEYDEEYYDEEEEEEEGGIVDGLCEGIRKMSVETDFAGKHTRFVYDSEDEEIVEAKDQSPGVLRLKGFPTPTGKHVRFAGDE

SEQ ID NO: 4422 - protein, 252 aa, Arabidopsis thaliana
  peptide (1)..(252): Ceres Seq. ID no. 13491539
  misc_feature (1)..(252): NCBI GI NO: 15239303 NR Description: expressed protein [Arabidopsis thaliana]
  misc_feature (1)..(105): NCBI GI NO: 15230432 NR Description: hypothetical protein [Arabidopsis thaliana]
  misc_feature (197)..(252): NCBI GI NO: 15230432 NR Description: hypothetical protein [Arabidopsis thaliana]
  misc_feature (1)..(251): NCBI GI NO: 37537140 NR Description: putative proline and glutamic acid rich nuclear protein
MSRINNTPGSGEALLRGQVKTLLQKVEEEADLTKISLESRPFIHLVTSPMGLLAPTPANTPQVLGFSDEVQVVITSPVVAGQFRAPSQVVESNMFDEKEESLELEKSPSITRSLLLDFSDKSELWESSDCSSVVTQNPEDDNSSVWSMQANASAKDEEYDDEEEEAYSYGEEYDEEYYDEEEEEEEGGIVDGLCEGIRKMSVETDFAGKHTRFVYDSEDEEIVEAKDQSPGVLRLKGFPTPTGKHVRFAGDE

SEQ ID NO: 4423 - DNA, 1335 bp, Arabidopsis thaliana
  misc_feature (1)..(1335): Ceres Seq. ID no. 12330247
acactcctctccttcttctttacacctctccaatggtaaaatctctcattcactaactttctctgcttctctctatctttctctgtgcataccaactctaaagtctctcatcaatggcggctcgaaaactagggtcgttgttacgtcaatactttttctctctatgcttcctcttcctcggttgcttcttcttccctaaagacgcagactataaacaaaagagaagaaagaagaagcttagaagagtttcttcttcttctggttcatctctatcctcttcttggacgtatttaaaacgagttttcttatccacgacaaggatatccaaatcccgtaaccaaacacatcctaacgttactttaacatccgcaagatcatctcaaaactccctcgtcactctcgtccaacccgataccacaaaccaacccgacccggaaacacgtattcatcagcaaaccgaattcgagatctcctcttccgacgagattttcccttgtaactcgtgtggcgagattttcccaaaaatcaatctcctcgagaatcacatcgcgatcaaacacgccgtgtcggagctaatcgccggagaatcaagcacgaacatcgtcaagatcatattcaaatctggttggccggagcaaggtaattacaaatctccggtgatcaatcgaatcttaaaaatccacaacagttcaaagattctcaccagattcgaagagtatcgtgagttcgtgaaagctaaagccgctcgtagcaacggcggtggaagacggtgggacgatgaacgttgcgtcgccgacggaaacgaacttttacgattttactgctcgacgtttatgtgtgatttagggcaaaacggtaaatcaaatctctgtggtcatcagtattgtagtatctgtggtatcatcggatctggattctcgccgaagctcgacgggatcgcgacgttggcgacggggtggagaggacacgtggcggttccggaggaggttgaagaagagtttgggtttatgaatgtgaaacgggccatgttggtttgtcgggttgtagcgggtcgggtcgggtgtgatttgattgatgatgatgacgtggataagagtgatggtggagggtatgattctctggttgggcagagtgggaacaagagtggggctctgttgaggatcgacgatgatgagcttttggtttttaatccaagggctgtgcttccttgttttgttattgtgtatactgtgtaaccggatttgtgatcctgtgtgtttttgtttatattttgttacaattgtgaagtgtgaaacgctttaggtttgtttggaaaatggtaaaatctttgtggtg

SEQ ID NO: 4424 - protein, 373 aa, Arabidopsis thaliana
  peptide (1)..(373): Ceres Seq. ID no. 12330248
  misc_feature (126)..(149): Pfam Name: Pfam Description:  Zinc finger, C2H2 type
  misc_feature (1)..(373): NCBI GI NO: 18402112 NR Description: expressed protein; protein id: At2g29660
  misc_feature (45)..(372): NCBI GI NO: 34901982 NR Description: hypothetical protein
  misc_feature (117)..(371): NCBI GI NO: 38345520 NR Description: OSJNBa0039K24.23
  misc_feature (125)..(371): NCBI GI NO: 5777616 NR Description: CAA30374.1 protein [Oryza sativa]
  misc_feature (122)..(373): NCBI GI NO: 15222333 NR Description: unknown protein; protein id: At1g75710.1
  misc_feature (125)..(373): NCBI GI NO: 9802582 NR Description: T2E6.3 [Arabidopsis thaliana]
  misc_feature (128)..(370): NCBI GI NO: 15239695 NR Description: putative protein; protein id: At5g54630
  misc_feature (151)..(373): NCBI GI NO: 38346001 NR Description: OSJNBa0073L13.11
  misc_feature (46)..(151): NCBI GI NO: 38346001 NR Description: OSJNBa0073L13.11
  misc_feature (81)..(370): NCBI GI NO: 18416951 NR Description: expressed protein; protein id: At4g27240
MAARKLGSLLRQYFFSLCFLFLGCFFFPKDADYKQKRRKKKLRRVSSSSGSSLSSSWTYLKRVFLSTTRISKSRNQTHPNVTLTSARSSQNSLVTLVQPDTTNQPDPETRIHQQTEFEISSSDEIFPCNSCGEIFPKINLLENHIAIKHAVSELIAGESSTNIVKIIFKSGWPEQGNYKSPVINRILKIHNSSKILTRFEEYREFVKAKAARSNGGGRRWDDERCVADGNELLRFYCSTFMCDLGQNGKSNLCGHQYCSICGIIGSGFSPKLDGIATLATGWRGHVAVPEEVEEEFGFMNVKRAMLVCRVVAGRVGCDLIDDDDVDKSDGGGYDSLVGQSGNKSGALLRIDDDELLVFNPRAVLPCFVIVYTV

SEQ ID NO: 4425 - DNA, 1854 bp, Arabidopsis thaliana
  misc_feature (1)..(1854): Ceres Seq. ID no. 12330847
caataggcgttgattcttcttttgttggattccaacaatattactcagaccctccgtatgaaagtgctgcatcttcgcctacttatgttccatatgttattcagcctgatatggtctcgaatagttcaacagactctttggtagcgaatggtggtcaatctgatggaagaggatccatgcagagaaatggttcagcaattgccggactcccaaaagatgctccaaagtctaccactactggccagtataaacagccaggaatccccaagaatgtttccacaacagcttctgcacattctctccagggaaaaactgcttacgcgaacacactcttgccttatgggaaatcagacattgctaatggggtctcatcaattgcttcatatagttataaaccttgttccaagatttatgataccagaggtgataacaacacaactggaagtacatatacgagtgaacaaaatcgaggatcgagaacgagaagatcaagaaatcaactaattgtcaaagcatatacaaccaaagctggaaatgctgatgcggaaggaaatattgtgataaatcctgatcgatataataaagaagatttcagtattgaatacagcgatgccaggttttttgtgattaagtcgtatagtgaagatgatgttcacaagagcatcaaatatggtgtctggtcatctacattgaatgggaacaagaaattgcagagtgtatatgaagatgctcagagaatagccactgagaagtctcgtgaatgtcctattttcttattcttttctgtcaattccagtggtctgttctgtggcgtggctgagatgaccggtccagtttccttcgaccgagacatggatttttggcagcaagacaaatggagtggaagctttcctgtcaagtggcacattattaaagatgttcctaatagctatttcaggcacattattttacataataacgagaataagccagtgaccaacagccgagacacacaagagataatactgaaacaaggactcgaggtgctaaaactattcaaacatcatgcggaaaagacttcactattagatgattttatgtactacgaagaccgccagagactcatgcaggaagagagagctagacttccatttaggacctttcgcaggccatttcccgtgctcaatctagatttttctgacagaagcaagaaaagctccaaggatgtcggtaagaagccttcagtgacctctgcagaaacaaaggttgtgcaattaaaaaactcagatggggatgaaaagagcaatacacaggaagcaacagacgaaactactccttccactctgaagtttggctctctcgccattaaaccaactgctggtaccacctttaacccaacccaagccaagcctaaaccgaccccatctctcggctctgaccacaagtcagactcttctgaagaggttactgggtctctggctgatgacattgtcagtgtaggatcgttgcccataaaagtaaagggatctaaagaattatcctccaagatcgcagcggtgggtacaagtcctctctcaactcaagatcagttcagaagtaaaccagggttttgacattgtctttgtctaacttgtttatgcataatagaaagcatggtcgatatggttcgagaaagagaaagagattgagtatgtatagattggttggttttaccttttaaatggtctgattggtcgtttgagaatccttgtttatcgtctcagtttggacaaatgattgttgccagtggttgcgttttggtttgttgggtttgattaaacagttggttccgtcttttgatcgaaatttatgtgtttgtcatgctatattaatgtt

SEQ ID NO: 4426 - protein, 529 aa, Arabidopsis thaliana
  peptide (1)..(529): Ceres Seq. ID no. 12330848
  misc_feature (258)..(348): Pfam Name: Pfam Description:  YT521-B-like family
  misc_feature (1)..(529): NCBI GI NO: 30684473 NR Description: expressed protein [Arabidopsis thaliana]
  misc_feature (1)..(524): NCBI GI NO: 11994550 NR Description: gene_id:MGD8.17~unknown protein
  misc_feature (10)..(517): NCBI GI NO: 15221079 NR Description: unknown protein; protein id: At1g48110.1
  misc_feature (10)..(333): NCBI GI NO: 8778514 NR Description: F21D18.17 [Arabidopsis thaliana]
  misc_feature (332)..(517): NCBI GI NO: 8778514 NR Description: F21D18.17 [Arabidopsis thaliana]
  misc_feature (34)..(374): NCBI GI NO: 22773231 NR Description: Putative RNA-binding protein
  misc_feature (41)..(374): NCBI GI NO: 18087662 NR Description: putative RNA-binding protein [Oryza sativa]
  misc_feature (31)..(416): NCBI GI NO: 34911170 NR Description: B1144G04.32
  misc_feature (113)..(376): NCBI GI NO: 7487895 NR Description: hypothetical protein YUP8H12R
  misc_feature (113)..(376): NCBI GI NO: 18412316 NR Description: expressed protein; protein id: At1g79270
IGVDSSFVGFQQYYSDPPYESAASSPTYVPYVIQPDMVSNSSTDSLVANGGQSDGRGSMQRNGSAIAGLPKDAPKSTTTGQYKQPGIPKNVSTTASAHSLQGKTAYANTLLPYGKSDIANGVSSIASYSYKPCSKIYDTRGDNNTTGSTYTSEQNRGSRTRRSRNQLIVKAYTTKAGNADAEGNIVINPDRYNKEDFSIEYSDARFFVIKSYSEDDVHKSIKYGVWSSTLNGNKKLQSVYEDAQRIATEKSRECPIFLFFSVNSSGLFCGVAEMTGPVSFDRDMDFWQQDKWSGSFPVKWHIIKDVPNSYFRHIILHNNENKPVTNSRDTQEIILKQGLEVLKLFKHHAEKTSLLDDFMYYEDRQRLMQEERARLPFRTFRRPFPVLNLDFSDRSKKSSKDVGKKPSVTSAETKVVQLKNSDGDEKSNTQEATDETTPSTLKFGSLAIKPTAGTTFNPTQAKPKPTPSLGSDHKSDSSEEVTGSLADDIVSVGSLPIKVKGSKELSSKIAAVGTSPLSTQDQFRSKPGF

SEQ ID NO: 4427 - protein, 493 aa, Arabidopsis thaliana
  peptide (1)..(493): Ceres Seq. ID no. 12330849
  misc_feature (222)..(312): Pfam Name: Pfam Description:  YT521-B-like family
  misc_feature (1)..(493): NCBI GI NO: 30684473 NR Description: expressed protein [Arabidopsis thaliana]
  misc_feature (1)..(488): NCBI GI NO: 11994550 NR Description: gene_id:MGD8.17~unknown protein
  misc_feature (1)..(481): NCBI GI NO: 15221079 NR Description: unknown protein; protein id: At1g48110.1
  misc_feature (1)..(297): NCBI GI NO: 8778514 NR Description: F21D18.17 [Arabidopsis thaliana]
  misc_feature (296)..(481): NCBI GI NO: 8778514 NR Description: F21D18.17 [Arabidopsis thaliana]
  misc_feature (1)..(338): NCBI GI NO: 22773231 NR Description: Putative RNA-binding protein
  misc_feature (5)..(338): NCBI GI NO: 18087662 NR Description: putative RNA-binding protein [Oryza sativa]
  misc_feature (1)..(380): NCBI GI NO: 34911170 NR Description: B1144G04.32
  misc_feature (77)..(340): NCBI GI NO: 7487895 NR Description: hypothetical protein YUP8H12R
  misc_feature (77)..(340): NCBI GI NO: 18412316 NR Description: expressed protein; protein id: At1g79270
MVSNSSTDSLVANGGQSDGRGSMQRNGSAIAGLPKDAPKSTTTGQYKQPGIPKNVSTTASAHSLQGKTAYANTLLPYGKSDIANGVSSIASYSYKPCSKIYDTRGDNNTTGSTYTSEQNRGSRTRRSRNQLIVKAYTTKAGNADAEGNIVINPDRYNKEDFSIEYSDARFFVIKSYSEDDVHKSIKYGVWSSTLNGNKKLQSVYEDAQRIATEKSRECPIFLFFSVNSSGLFCGVAEMTGPVSFDRDMDFWQQDKWSGSFPVKWHIIKDVPNSYFRHIILHNNENKPVTNSRDTQEIILKQGLEVLKLFKHHAEKTSLLDDFMYYEDRQRLMQEERARLPFRTFRRPFPVLNLDFSDRSKKSSKDVGKKPSVTSAETKVVQLKNSDGDEKSNTQEATDETTPSTLKFGSLAIKPTAGTTFNPTQAKPKPTPSLGSDHKSDSSEEVTGSLADDIVSVGSLPIKVKGSKELSSKIAAVGTSPLSTQDQFRSKPGF

SEQ ID NO: 4428 - protein, 471 aa, Arabidopsis thaliana
  peptide (1)..(471): Ceres Seq. ID no. 12330850
  misc_feature (200)..(290): Pfam Name: Pfam Description:  YT521-B-like family
  misc_feature (1)..(471): NCBI GI NO: 30684473 NR Description: expressed protein [Arabidopsis thaliana]
  misc_feature (1)..(466): NCBI GI NO: 11994550 NR Description: gene_id:MGD8.17~unknown protein
  misc_feature (1)..(459): NCBI GI NO: 15221079 NR Description: unknown protein; protein id: At1g48110.1
  misc_feature (1)..(275): NCBI GI NO: 8778514 NR Description: F21D18.17 [Arabidopsis thaliana]
  misc_feature (274)..(459): NCBI GI NO: 8778514 NR Description: F21D18.17 [Arabidopsis thaliana]
  misc_feature (1)..(316): NCBI GI NO: 22773231 NR Description: Putative RNA-binding protein
  misc_feature (1)..(316): NCBI GI NO: 18087662 NR Description: putative RNA-binding protein [Oryza sativa]
  misc_feature (1)..(358): NCBI GI NO: 34911170 NR Description: B1144G04.32
  misc_feature (55)..(318): NCBI GI NO: 7487895 NR Description: hypothetical protein YUP8H12R
  misc_feature (55)..(318): NCBI GI NO: 18412316 NR Description: expressed protein; protein id: At1g79270
MQRNGSAIAGLPKDAPKSTTTGQYKQPGIPKNVSTTASAHSLQGKTAYANTLLPYGKSDIANGVSSIASYSYKPCSKIYDTRGDNNTTGSTYTSEQNRGSRTRRSRNQLIVKAYTTKAGNADAEGNIVINPDRYNKEDFSIEYSDARFFVIKSYSEDDVHKSIKYGVWSSTLNGNKKLQSVYEDAQRIATEKSRECPIFLFFSVNSSGLFCGVAEMTGPVSFDRDMDFWQQDKWSGSFPVKWHIIKDVPNSYFRHIILHNNENKPVTNSRDTQEIILKQGLEVLKLFKHHAEKTSLLDDFMYYEDRQRLMQEERARLPFRTFRRPFPVLNLDFSDRSKKSSKDVGKKPSVTSAETKVVQLKNSDGDEKSNTQEATDETTPSTLKFGSLAIKPTAGTTFNPTQAKPKPTPSLGSDHKSDSSEEVTGSLADDIVSVGSLPIKVKGSKELSSKIAAVGTSPLSTQDQFRSKPGF

SEQ ID NO: 4429 - DNA, 1562 bp, Arabidopsis thaliana
  misc_feature (1)..(1562): Ceres Seq. ID no. 12395256
attcgcttttctgaatcctttagagtattgttttctccgtcgaattcgcatgaacacttgagctcaacaagacggcgtggaagtggacggtgaggtagttttttttagtttttgaaagacatggcgcaaaacgggtacttggttccagcggatccttcggcggttgtgacggtgaagaagaaaacgccacaagcgtcgtgggctcttattgacgcgacgggacagagtgagccactcgatgttgataagtatgagatcatgcaccgtgtccagatccacgctcgcgatctccggattctagaccccaatttatcttacccttccactattcttggccgagagagagccattgttctcaatttggagcatatcaaggctattatcacttccgaagaggttttgcttcgggatccgtctgatgaaaatgttattccagttgtggaggagcttcgaagacgcttacctgttggaaatgcatcacacaatggtggtcaaggagacgggaaagagatcgcaggtgctcaaaacgacggtgatactggtgacgaagatgaatccccatttgaatttcgggcgctggaagtagctttggaagcaatctgtagcttcttagctgcaaggacagcagaattagaaacagctgcttatcctgctttggatgagcttacctcaaagatcagtagccgtaatttggatagagttcggaaattgaagagtgccatgactcggttgacagctcgggttcaaaaggtaagagatgaactcgaacagttgctggatgatgacgatgatatggcagatctttacctttcaaggaaactttcaagtgcttcctcaccgattagtagtattggtgaaccaaattggtatactacttccccaacaataggctctaagatttcaagagcaagtagagcgagtttagccacagttcatggggatgagaatgatgttgaagaacttgaaatgttactcgaggcatacttcatgcagatcgacagcactttgaacagattaacaacactacgtgagtatattgatgacacagaggactacattaacatccagcttgacaatcatcggaatcagcttattcagttggagctagtgttaagttctggaacagtttgcttatcgatgtactctcttgtcgctggaattttcgggatgaacattccatacacatggaacgacggtcatggatacatgttcaaatacgtggtgggcttgacggggacactttgtgtagtcgtgtttgtgatcataatgtcgtacgctaggtacaaaggacttgtgggatcttgatggctgaatttgggttagatggagagattgtgaaggggcattgggcagatcttgttttcgattattatacttgtggtcgttctgagttttgaacgagcttcacaattattttagttgtcgcatcataaaatttaatcaaacatattgaaaaaagcagaagcattgtgacttgtaattgcaaagataagctctaccatcgattccttacaattagagcatagaaatcaaatttaggatccttgattccttattagctc

SEQ ID NO: 4430 - protein, 394 aa, Arabidopsis thaliana
  peptide (1)..(394): Ceres Seq. ID no. 12395257
  misc_feature (1)..(394): NCBI GI NO: 30698045 NR Description: expressed protein [Arabidopsis thaliana]
  misc_feature (1)..(367): NCBI GI NO: 30698047 NR Description: expressed protein [Arabidopsis thaliana]
  misc_feature (1)..(394): NCBI GI NO: 25360941 NR Description: MRS2-7 [Arabidopsis thaliana]
  misc_feature (1)..(394): NCBI GI NO: 30682808 NR Description: expressed protein [Arabidopsis thaliana]
  misc_feature (1)..(394): NCBI GI NO: 11282359 NR Description: hypothetical protein F17I14
  misc_feature (1)..(332): NCBI GI NO: 9758997 NR Description: gene_id:MTH16.11~unknown protein
  misc_feature (15)..(393): NCBI GI NO: 25360964 NR Description: MRS2-8 [Arabidopsis thaliana]
  misc_feature (1)..(326): NCBI GI NO: 30682814 NR Description: expressed protein [Arabidopsis thaliana]
  misc_feature (85)..(394): NCBI GI NO: 40539050 NR Description: putative  CorA-like Mg2+ transporter protein
  misc_feature (15)..(292): NCBI GI NO: 9759003 NR Description: contains similarity to unknownprotein~emb|CAB89361
MAQNGYLVPADPSAVVTVKKKTPQASWALIDATGQSEPLDVDKYEIMHRVQIHARDLRILDPNLSYPSTILGRERAIVLNLEHIKAIITSEEVLLRDPSDENVIPVVEELRRRLPVGNASHNGGQGDGKEIAGAQNDGDTGDEDESPFEFRALEVALEAICSFLAARTAELETAAYPALDELTSKISSRNLDRVRKLKSAMTRLTARVQKVRDELEQLLDDDDDMADLYLSRKLSSASSPISSIGEPNWYTTSPTIGSKISRASRASLATVHGDENDVEELEMLLEAYFMQIDSTLNRLTTLREYIDDTEDYINIQLDNHRNQLIQLELVLSSGTVCLSMYSLVAGIFGMNIPYTWNDGHGYMFKYVVGLTGTLCVVVFVIIMSYARYKGLVGS

SEQ ID NO: 4431 - protein, 348 aa, Arabidopsis thaliana
  peptide (1)..(348): Ceres Seq. ID no. 12395258
  misc_feature (1)..(348): NCBI GI NO: 30698045 NR Description: expressed protein [Arabidopsis thaliana]
  misc_feature (1)..(321): NCBI GI NO: 30698047 NR Description: expressed protein [Arabidopsis thaliana]
  misc_feature (1)..(348): NCBI GI NO: 25360941 NR Description: MRS2-7 [Arabidopsis thaliana]
  misc_feature (1)..(348): NCBI GI NO: 30682808 NR Description: expressed protein [Arabidopsis thaliana]
  misc_feature (1)..(348): NCBI GI NO: 11282359 NR Description: hypothetical protein F17I14
  misc_feature (1)..(286): NCBI GI NO: 9758997 NR Description: gene_id:MTH16.11~unknown protein
  misc_feature (1)..(347): NCBI GI NO: 25360964 NR Description: MRS2-8 [Arabidopsis thaliana]
  misc_feature (1)..(280): NCBI GI NO: 30682814 NR Description: expressed protein [Arabidopsis thaliana]
  misc_feature (39)..(348): NCBI GI NO: 40539050 NR Description: putative  CorA-like Mg2+ transporter protein
  misc_feature (1)..(246): NCBI GI NO: 9759003 NR Description: contains similarity to unknownprotein~emb|CAB89361
MHRVQIHARDLRILDPNLSYPSTILGRERAIVLNLEHIKAIITSEEVLLRDPSDENVIPVVEELRRRLPVGNASHNGGQGDGKEIAGAQNDGDTGDEDESPFEFRALEVALEAICSFLAARTAELETAAYPALDELTSKISSRNLDRVRKLKSAMTRLTARVQKVRDELEQLLDDDDDMADLYLSRKLSSASSPISSIGEPNWYTTSPTIGSKISRASRASLATVHGDENDVEELEMLLEAYFMQIDSTLNRLTTLREYIDDTEDYINIQLDNHRNQLIQLELVLSSGTVCLSMYSLVAGIFGMNIPYTWNDGHGYMFKYVVGLTGTLCVVVFVIIMSYARYKGLVGS

SEQ ID NO: 4432 - DNA, 1376 bp, Arabidopsis thaliana
  misc_feature (1)..(1376): Ceres Seq. ID no. 13575406
aaaacgaatttttttaaagaaaataaaaatcaagtctttctcttcgtctatctctctctctgctcagactctctggtgttgaagactaatcactgaagcagatctattatacggaggacgaagaagatgtatgagcagcagcaacatttcatggatttgcaaagcgattctgggtttggggacgatagctcctggctcgccggcgatgacgatcttcgtctctctcctcaccaatctgccgccggtacgaactccggcaatgagaatctagatcgtcgtctcttaaaagatctcgtcgagatggttccccttatcgagcattacatggaacataaagaaaggagttcgtttaagcggcgtggttccatgatctacactaagatgccttcaaaagaatccttgtcccgaaggggaagaaatgcttctcaaacagtcccaggaagaaagaagagagaccaagagggaaatgacgatgttatgaacaattctagggaagatgatgaaaacgcaaaggctttggctggtgcagaaaaggaagaaatgagtagactaagagagcaagtgaatgacttgcagacaaaattatcggagaaagaagaggttttaaagtcaatggagatgtcaaagaatcaggtaaacgagatacaagaaaagcttgaagcaacaaatcgattggttgctgagaaggatatgttgatcaagtctatgcagttacaattatcggacacaaagatcaaacttgctgacaagcaagcagcccttgagaagactcaatgggaagcaaagacaacaggaacaagagcaatcaagcttcaagaacagctagatgctgttgaaggagacatctctacattcacacgggtgttcgaaactttggcaaaaactgattccaagaaacccgatagggattatgatgcagtcccatatgaatttgatcatcttccatatttagacgatgtagatgaaactgacctgaggaaaatggaagaagcaagattagcttatgtagcagcagtgaataccgcaaaggaacgagaagatgaagaatctctggtcatggctgctcaagctcgagcttacctgcaatcactagcctttacatattaatcatcttcaggtacttacttctttataggatatttctctccttgggttgttttaggagtatgtagatttgtaccatgaagaaattggagaagaaaagcttatgtgagaaacataaagttatggttttcccctaaaccaatgaacgcaactctgagtttttgtttcttcatttgagcatgtatgtatctatatgatcttctacattattgggaacataaaatcagattgtataatgcatctgttcaatagtttactttagatatactctt

SEQ ID NO: 4433 - protein, 326 aa, Arabidopsis thaliana
  peptide (1)..(326): Ceres Seq. ID no. 13575407
  misc_feature (1)..(318): Pfam Name: Pfam Description:  Myosin tail
  misc_feature (1)..(326): NCBI GI NO: 15241531 NR Description: myosin heavy chain-related protein
  misc_feature (118)..(326): NCBI GI NO: 1732515 NR Description: myosin heavy chain-like protein
  misc_feature (9)..(322): NCBI GI NO: 19716176 NR Description: TMV-MP30 binding protein 2C [Nicotiana tabacum]
MYEQQQHFMDLQSDSGFGDDSSWLAGDDDLRLSPHQSAAGTNSGNENLDRRLLKDLVEMVPLIEHYMEHKERSSFKRRGSMIYTKMPSKESLSRRGRNASQTVPGRKKRDQEGNDDVMNNSREDDENAKALAGAEKEEMSRLREQVNDLQTKLSEKEEVLKSMEMSKNQVNEIQEKLEATNRLVAEKDMLIKSMQLQLSDTKIKLADKQAALEKTQWEAKTTGTRAIKLQEQLDAVEGDISTFTRVFETLAKTDSKKPDRDYDAVPYEFDHLPYLDDVDETDLRKMEEARLAYVAAVNTAKEREDEESLVMAAQARAYLQSLAFTY

SEQ ID NO: 4434 - protein, 318 aa, Arabidopsis thaliana
  peptide (1)..(318): Ceres Seq. ID no. 13575408
  misc_feature (1)..(310): Pfam Name: Pfam Description:  Myosin tail
  misc_feature (1)..(318): NCBI GI NO: 15241531 NR Description: myosin heavy chain-related protein
  misc_feature (110)..(318): NCBI GI NO: 1732515 NR Description: myosin heavy chain-like protein
  misc_feature (1)..(314): NCBI GI NO: 19716176 NR Description: TMV-MP30 binding protein 2C [Nicotiana tabacum]
MDLQSDSGFGDDSSWLAGDDDLRLSPHQSAAGTNSGNENLDRRLLKDLVEMVPLIEHYMEHKERSSFKRRGSMIYTKMPSKESLSRRGRNASQTVPGRKKRDQEGNDDVMNNSREDDENAKALAGAEKEEMSRLREQVNDLQTKLSEKEEVLKSMEMSKNQVNEIQEKLEATNRLVAEKDMLIKSMQLQLSDTKIKLADKQAALEKTQWEAKTTGTRAIKLQEQLDAVEGDISTFTRVFETLAKTDSKKPDRDYDAVPYEFDHLPYLDDVDETDLRKMEEARLAYVAAVNTAKEREDEESLVMAAQARAYLQSLAFTY

SEQ ID NO: 4435 - protein, 268 aa, Arabidopsis thaliana
  peptide (1)..(268): Ceres Seq. ID no. 13575409
  misc_feature (1)..(260): Pfam Name: Pfam Description:  Myosin tail
  misc_feature (1)..(268): NCBI GI NO: 15241531 NR Description: myosin heavy chain-related protein
  misc_feature (60)..(268): NCBI GI NO: 1732515 NR Description: myosin heavy chain-like protein
  misc_feature (1)..(264): NCBI GI NO: 19716176 NR Description: TMV-MP30 binding protein 2C [Nicotiana tabacum]
MVPLIEHYMEHKERSSFKRRGSMIYTKMPSKESLSRRGRNASQTVPGRKKRDQEGNDDVMNNSREDDENAKALAGAEKEEMSRLREQVNDLQTKLSEKEEVLKSMEMSKNQVNEIQEKLEATNRLVAEKDMLIKSMQLQLSDTKIKLADKQAALEKTQWEAKTTGTRAIKLQEQLDAVEGDISTFTRVFETLAKTDSKKPDRDYDAVPYEFDHLPYLDDVDETDLRKMEEARLAYVAAVNTAKEREDEESLVMAAQARAYLQSLAFTY

SEQ ID NO: 4436 - DNA, 1191 bp, Arabidopsis thaliana
  misc_feature (1)..(1191): Ceres Seq. ID no. 13489080
aaaatctctcgctctgttacgccattttcgtgagtaagaagaagaaaccctaagagtctctccccaaaacctcaaaccatggccgagggactcgtattgaagggcattatgcgcgcccacaccgacattgtcacggccatcgctacgccgatcgacaattccgacatcatcgtcacagcgtcgcgtgacaaatcaatcatcctctggaaactcacaaaggacgagaagtcttacggtgttgctcagcgtaggctcacaggtcactctcacttcgtggaagatgttgttctctcatcggacggtcagtttgcactctccggaagttgggacggtgagctccgtctctgggatctcgccacgggagaaacaactcgtcgattcgttggtcacacgaaagatgtgctctctgttgctttctctactgataaccgtcagatcgtgtctgcttctcgtgatcgtacgattaagctttggaacacacttggtgagtgcaagtataccatctctgaaggtgatggtcacaaggaatgggttagttgtgttaggtttagtcctaatactcttgtaccaactattgtatctgcttcttgggataaaactgtgaaagtttggaatctccagaactgtaagctgaggaactctcttgttggtcactctggttacctcaacactgttgctgtctcgcctgatggttcgctatgcgccagtggtgggaaagatggtgttatcttgttgtgggatttggctgaaggaaagaagctttactcgcttgaggctggttcgattattcactcgctttgcttcagtcctaacagatactggttgtgtgctgctactgagaatagcattaggatttgggatcttgagagcaagtctgttgttgaggacttgaaggttgatctcaagtctgaggcagagaagaatgaaggtggtgttggaactggtaaccagaagaaggttatctactgcacaagcttgaactggagtgcagatggaagcacattgttcagtggttacactgatggagttgtcagggtctggggtattggtcgttactagagatcacaacaagatgaagaagaagtcacgaaatctccggaaaaaagtagctgcttttaatttttccagactgcgtcagtattgtattagtctctcgcaaacttctattttggcaatttttgtttaatttcc

SEQ ID NO: 4437 - protein, 326 aa, Arabidopsis thaliana
  peptide (1)..(326): Ceres Seq. ID no. 13489081
  misc_feature (1)..(326): NCBI GI NO: 15229589 NR Description: guanine nucleotide-binding protein / activated proteinkinase C receptor RACK1
  misc_feature (1)..(326): NCBI GI NO: 15221916 NR Description: WD-40 repeat auxin-dependent protein ARCA
  misc_feature (1)..(326): NCBI GI NO: 21593440 NR Description: guanine nucleotide-binding protein, putative
  misc_feature (1)..(326): NCBI GI NO: 15220941 NR Description: WD-40 repeat auxin-dependent protein ARCA
  misc_feature (1)..(326): NCBI GI NO: 2289095 NR Description: WD-40 repeat protein [Arabidopsis thaliana]
  misc_feature (1)..(326): NCBI GI NO: 3023857 NR Description: GUANINE NUCLEOTIDE-BINDING PROTEIN BETA SUBUNIT-LIKE PROTEIN
  misc_feature (1)..(326): NCBI GI NO: 3023858 NR Description: GUANINE NUCLEOTIDE-BINDING PROTEIN BETA SUBUNIT-LIKE PROTEIN
  misc_feature (1)..(326): NCBI GI NO: 3023847 NR Description: GUANINE NUCLEOTIDE-BINDING PROTEIN BETA SUBUNIT-LIKE PROTEIN
  misc_feature (3)..(326): NCBI GI NO: 4589836 NR Description: LeArcA2 protein [Lycopersicon esculentum]
  misc_feature (3)..(326): NCBI GI NO: 4589834 NR Description: LeArcA1 protein [Lycopersicon esculentum]
MAEGLVLKGIMRAHTDIVTAIATPIDNSDIIVTASRDKSIILWKLTKDEKSYGVAQRRLTGHSHFVEDVVLSSDGQFALSGSWDGELRLWDLATGETTRRFVGHTKDVLSVAFSTDNRQIVSASRDRTIKLWNTLGECKYTISEGDGHKEWVSCVRFSPNTLVPTIVSASWDKTVKVWNLQNCKLRNSLVGHSGYLNTVAVSPDGSLCASGGKDGVILLWDLAEGKKLYSLEAGSIIHSLCFSPNRYWLCAATENSIRIWDLESKSVVEDLKVDLKSEAEKNEGGVGTGNQKKVIYCTSLNWSADGSTLFSGYTDGVVRVWGIGRY

SEQ ID NO: 4438 - protein, 316 aa, Arabidopsis thaliana
  peptide (1)..(316): Ceres Seq. ID no. 13489082
  misc_feature (1)..(316): NCBI GI NO: 15229589 NR Description: guanine nucleotide-binding protein / activated proteinkinase C receptor RACK1
  misc_feature (1)..(316): NCBI GI NO: 15221916 NR Description: WD-40 repeat auxin-dependent protein ARCA
  misc_feature (1)..(316): NCBI GI NO: 21593440 NR Description: guanine nucleotide-binding protein, putative
  misc_feature (1)..(316): NCBI GI NO: 15220941 NR Description: WD-40 repeat auxin-dependent protein ARCA
  misc_feature (1)..(316): NCBI GI NO: 2289095 NR Description: WD-40 repeat protein [Arabidopsis thaliana]
  misc_feature (1)..(316): NCBI GI NO: 3023857 NR Description: GUANINE NUCLEOTIDE-BINDING PROTEIN BETA SUBUNIT-LIKE PROTEIN
  misc_feature (1)..(316): NCBI GI NO: 3023858 NR Description: GUANINE NUCLEOTIDE-BINDING PROTEIN BETA SUBUNIT-LIKE PROTEIN
  misc_feature (1)..(316): NCBI GI NO: 3023847 NR Description: GUANINE NUCLEOTIDE-BINDING PROTEIN BETA SUBUNIT-LIKE PROTEIN
  misc_feature (1)..(316): NCBI GI NO: 4589836 NR Description: LeArcA2 protein [Lycopersicon esculentum]
  misc_feature (1)..(316): NCBI GI NO: 4589834 NR Description: LeArcA1 protein [Lycopersicon esculentum]
MRAHTDIVTAIATPIDNSDIIVTASRDKSIILWKLTKDEKSYGVAQRRLTGHSHFVEDVVLSSDGQFALSGSWDGELRLWDLATGETTRRFVGHTKDVLSVAFSTDNRQIVSASRDRTIKLWNTLGECKYTISEGDGHKEWVSCVRFSPNTLVPTIVSASWDKTVKVWNLQNCKLRNSLVGHSGYLNTVAVSPDGSLCASGGKDGVILLWDLAEGKKLYSLEAGSIIHSLCFSPNRYWLCAATENSIRIWDLESKSVVEDLKVDLKSEAEKNEGGVGTGNQKKVIYCTSLNWSADGSTLFSGYTDGVVRVWGIGRY

SEQ ID NO: 4439 - DNA, 1004 bp, Arabidopsis thaliana
  misc_feature (1)..(1004): Ceres Seq. ID no. 12559953
aagatcatggtggggttttttattttctccttatcaagaatcctctgatcagtcaaatacccatcaatcaatcaaatccccaaacactcccaaaaaaagatcagcttccaatatttttccccttcttacaaaaaagatgtctatgtcgtctatgtcctccccttcctcagctgtttgttcaccggaccacttctctccttccgaccatctctgctatgtccaatgcaacttttgccaaaccatccttgcggttaatgttccttacacaagcttgttcaagaccgtaactgtccgatgtggttgctgtaccaatctcctttcggtgaacatgagatcatatgtcctcccagcttctaaccagctccagctccagctcggtcctcactcttacttcaatccccaggatattctggaggagctgagagatgcaccgtctaacatgaatatgatgatgatgaatcaacatcctactatgaatgacataccatctttcatggatcttcatcaacaacatgagattcctaaagcaccacccgttaaccgccctccagagaaaagacagagagtcccatccgcatataaccgattcatcaaggaggagatccaacgtatcaaagctggtaatcctgatataagccacagagaagcctttagtgctgctgccaagaattgggcccacttcccccacatacacttcgggctcgtgccagacaatcaacccgtgaagaaaaccaacatgccccaacaggagggagaggataacatggtgatgaaagaagggttctacgctcctgcagctgctaacgttggtgtgactccttattaaagagataaatataatcgactaagtatttgaggaattgaaatccaatttcttagggtttatcatgtccaaaagttgtggtttcttttcctttcttgaacttatttatatatattataaatatgcatgtgtctttttctgttgttgtaatcaaaaatcttgctaattaatggggtttctt

SEQ ID NO: 4440 - protein, 274 aa, Arabidopsis thaliana
  peptide (1)..(274): Ceres Seq. ID no. 12559954
  misc_feature (61)..(234): Pfam Name: Pfam Description:  YABBY protein
  misc_feature (46)..(274): NCBI GI NO: 18406725 NR Description: expressed protein; protein id: At2g45190
  misc_feature (55)..(274): NCBI GI NO: 27804377 NR Description: MADS-box transcription factor CDM51
  misc_feature (46)..(271): NCBI GI NO: 18411242 NR Description: putative YABBY3 axial regulator
  misc_feature (179)..(274): NCBI GI NO: 37535908 NR Description: hypothetical protein
  misc_feature (47)..(118): NCBI GI NO: 37535908 NR Description: hypothetical protein
  misc_feature (177)..(274): NCBI GI NO: 37551421 NR Description: FIL-like protein [Triticum aestivum]
  misc_feature (47)..(118): NCBI GI NO: 37551421 NR Description: FIL-like protein [Triticum aestivum]
  misc_feature (183)..(262): NCBI GI NO: 7486543 NR Description: hypothetical protein F6N15
  misc_feature (46)..(110): NCBI GI NO: 7486543 NR Description: hypothetical protein F6N15
  misc_feature (179)..(242): NCBI GI NO: 30683176 NR Description: expressed protein [Arabidopsis thaliana]
RSWWGFLFSPYQESSDQSNTHQSIKSPNTPKKRSASNIFPLLTKKMSMSSMSSPSSAVCSPDHFSPSDHLCYVQCNFCQTILAVNVPYTSLFKTVTVRCGCCTNLLSVNMRSYVLPASNQLQLQLGPHSYFNPQDILEELRDAPSNMNMMMMNQHPTMNDIPSFMDLHQQHEIPKAPPVNRPPEKRQRVPSAYNRFIKEEIQRIKAGNPDISHREAFSAAAKNWAHFPHIHFGLVPDNQPVKKTNMPQQEGEDNMVMKEGFYAPAAANVGVTPY

SEQ ID NO: 4441 - protein, 229 aa, Arabidopsis thaliana
  peptide (1)..(229): Ceres Seq. ID no. 12559955
  misc_feature (16)..(189): Pfam Name: Pfam Description:  YABBY protein
  misc_feature (1)..(229): NCBI GI NO: 18406725 NR Description: expressed protein; protein id: At2g45190
  misc_feature (10)..(229): NCBI GI NO: 27804377 NR Description: MADS-box transcription factor CDM51
  misc_feature (1)..(226): NCBI GI NO: 18411242 NR Description: putative YABBY3 axial regulator
  misc_feature (134)..(229): NCBI GI NO: 37535908 NR Description: hypothetical protein
  misc_feature (2)..(73): NCBI GI NO: 37535908 NR Description: hypothetical protein
  misc_feature (132)..(229): NCBI GI NO: 37551421 NR Description: FIL-like protein [Triticum aestivum]
  misc_feature (2)..(73): NCBI GI NO: 37551421 NR Description: FIL-like protein [Triticum aestivum]
  misc_feature (138)..(217): NCBI GI NO: 7486543 NR Description: hypothetical protein F6N15
  misc_feature (1)..(65): NCBI GI NO: 7486543 NR Description: hypothetical protein F6N15
  misc_feature (134)..(197): NCBI GI NO: 30683176 NR Description: expressed protein [Arabidopsis thaliana]
MSMSSMSSPSSAVCSPDHFSPSDHLCYVQCNFCQTILAVNVPYTSLFKTVTVRCGCCTNLLSVNMRSYVLPASNQLQLQLGPHSYFNPQDILEELRDAPSNMNMMMMNQHPTMNDIPSFMDLHQQHEIPKAPPVNRPPEKRQRVPSAYNRFIKEEIQRIKAGNPDISHREAFSAAAKNWAHFPHIHFGLVPDNQPVKKTNMPQQEGEDNMVMKEGFYAPAAANVGVTPY

SEQ ID NO: 4442 - protein, 227 aa, Arabidopsis thaliana
  peptide (1)..(227): Ceres Seq. ID no. 12559956
  misc_feature (14)..(187): Pfam Name: Pfam Description:  YABBY protein
  misc_feature (1)..(227): NCBI GI NO: 18406725 NR Description: expressed protein; protein id: At2g45190
  misc_feature (8)..(227): NCBI GI NO: 27804377 NR Description: MADS-box transcription factor CDM51
  misc_feature (1)..(224): NCBI GI NO: 18411242 NR Description: putative YABBY3 axial regulator
  misc_feature (132)..(227): NCBI GI NO: 37535908 NR Description: hypothetical protein
  misc_feature (1)..(71): NCBI GI NO: 37535908 NR Description: hypothetical protein
  misc_feature (130)..(227): NCBI GI NO: 37551421 NR Description: FIL-like protein [Triticum aestivum]
  misc_feature (1)..(71): NCBI GI NO: 37551421 NR Description: FIL-like protein [Triticum aestivum]
  misc_feature (136)..(215): NCBI GI NO: 7486543 NR Description: hypothetical protein F6N15
  misc_feature (1)..(63): NCBI GI NO: 7486543 NR Description: hypothetical protein F6N15
  misc_feature (132)..(195): NCBI GI NO: 30683176 NR Description: expressed protein [Arabidopsis thaliana]
MSSMSSPSSAVCSPDHFSPSDHLCYVQCNFCQTILAVNVPYTSLFKTVTVRCGCCTNLLSVNMRSYVLPASNQLQLQLGPHSYFNPQDILEELRDAPSNMNMMMMNQHPTMNDIPSFMDLHQQHEIPKAPPVNRPPEKRQRVPSAYNRFIKEEIQRIKAGNPDISHREAFSAAAKNWAHFPHIHFGLVPDNQPVKKTNMPQQEGEDNMVMKEGFYAPAAANVGVTPY

SEQ ID NO: 4443 - DNA, 1394 bp, Arabidopsis thaliana
  misc_feature (1)..(1394): Ceres Seq. ID no. 12394405
aaagatgaaaagtaatacccttcctctcttgccctttttgctggtctgggtgaaacatagaaaagtttctcttgctcaagttaatgataaaaggttgttgtaggatttgttgctctggctctggtggtaggtctatgaaatcaacccatatcgtgaatggactgcaacatggtatcttcgtcccagtgggattgggagcatttgatcatgtccaatccgtcaaggactgaagatgacagcaaacagctacctactgagtgggaaattgaaaaaggtgaaggaattgaatctatagttccacatttctcaggccttgagagagtcagtagtggctctgccaccagcttctggcacactgctgtatcgaaaagctcacagtcgacctctatcaactcatcatctcccgaagccaaacgatgcaagcttgcatcagaaagttcccctggagattcttgcagcaacatagactttgtccaggtgaaggctcccacagctctcgaggtatccgttgcctcagctgaatcagatctttgtttaaaactaggaaagcggacatactctgaagaatactggggtagaaacaataatgaaatttcagcggtttctatgaagttgttaactccatctgttgtcgctgggaaatccaaattgtgtggtcagagcatgccagtcccgcgttgccaaattgatggctgtgaactggatctctcatctgctaagggttatcatcgtaagcacaaagtctgcgaaaagcattcaaagtgcccaaaagttagcgtgagtggcctggaacgtcggttctgccaacagtgtagcaggttccatgctgtctctgaatttgatgagaagaaacgaagctgccgaaaacgtctttctcatcataatgcgaggcgtcgtaagccacaaggagtattttcaatgaatcccgagagggtgtatgatcgaagacagcatacaaatatgttgtggaatggggtgtcccttaacgcgagatctgaagaaatgtatgaatggggtaataacacttatgatacaaagcctagacaaacggaaaaaagctttactctgagcttccagagaggtaatggctctgaggaccagctggttgctagtagcagccgtatgttctctacatctcaaacctcaggtgggttcccagcaggaaagtccaagtttcaacttcatggcgaagatgtgggagaatactcaggagtcctccatgaatctcaagatatccaccgtgctctctctcttctgtcaacctcttcggatcccctggcccaaccacatgtgcagccattttctctactctgttcatatgatgttgtaccaaaatagatgagtaagtaatgtgtaatttgtaaacctgttactcagttggtggatacttttcc

SEQ ID NO: 4444 - protein, 393 aa, Arabidopsis thaliana; identical to SEQ ID NO: 2859
  peptide (1)..(393): Ceres Seq. ID no. 12394406
  misc_feature (174)..(252): Pfam Name: Pfam Description:  SBP domain
  misc_feature (1)..(393): NCBI GI NO: 18396302 NR Description: putative squamosa-promoter binding protein 2
  misc_feature (5)..(393): NCBI GI NO: 25403307 NR Description: protein F17L21.14
  misc_feature (1)..(378): NCBI GI NO: 22329813 NR Description: putative squamosa-promoter binding protein 2
  misc_feature (1)..(378): NCBI GI NO: 18650611 NR Description: At1g27370/F17L21_16 [Arabidopsis thaliana]
  misc_feature (5)..(378): NCBI GI NO: 9802546 NR Description: F17L21.15 [Arabidopsis thaliana]
  misc_feature (1)..(371): NCBI GI NO: 25456646 NR Description: squamosa promoter binding protein 2
  misc_feature (1)..(291): NCBI GI NO: 15239820 NR Description: squamosa promoter binding protein-like 2
  misc_feature (117)..(381): NCBI GI NO: 18423163 NR Description: putative protein; protein id: At5g50570
  misc_feature (117)..(381): NCBI GI NO: 21536841 NR Description: unknown [Arabidopsis thaliana]
  misc_feature (127)..(373): NCBI GI NO: 15227896 NR Description: putative squamosa-promoter binding protein

SEQ ID NO: 4445 - protein, 389 aa, Arabidopsis thaliana; identical to SEQ ID NO: 2860
  peptide (1)..(389): Ceres Seq. ID no. 12394407
  misc_feature (170)..(248): Pfam Name: Pfam Description:  SBP domain
  misc_feature (1)..(389): NCBI GI NO: 18396302 NR Description: putative squamosa-promoter binding protein 2
  misc_feature (1)..(389): NCBI GI NO: 25403307 NR Description: protein F17L21.14
  misc_feature (1)..(374): NCBI GI NO: 22329813 NR Description: putative squamosa-promoter binding protein 2
  misc_feature (1)..(374): NCBI GI NO: 18650611 NR Description: At1g27370/F17L21_16 [Arabidopsis thaliana]
  misc_feature (1)..(374): NCBI GI NO: 9802546 NR Description: F17L21.15 [Arabidopsis thaliana]
  misc_feature (1)..(367): NCBI GI NO: 25456646 NR Description: squamosa promoter binding protein 2
  misc_feature (1)..(287): NCBI GI NO: 15239820 NR Description: squamosa promoter binding protein-like 2
  misc_feature (113)..(377): NCBI GI NO: 18423163 NR Description: putative protein; protein id: At5g50570
  misc_feature (113)..(377): NCBI GI NO: 21536841 NR Description: unknown [Arabidopsis thaliana]
  misc_feature (123)..(369): NCBI GI NO: 15227896 NR Description: putative squamosa-promoter binding protein

SEQ ID NO: 4446 - protein, 376 aa, Arabidopsis thaliana; identical to SEQ ID NO: 2861
  peptide (1)..(376): Ceres Seq. ID no. 12394408
  misc_feature (157)..(235): Pfam Name: Pfam Description:  SBP domain
  misc_feature (1)..(376): NCBI GI NO: 18396302 NR Description: putative squamosa-promoter binding protein 2
  misc_feature (1)..(376): NCBI GI NO: 25403307 NR Description: protein F17L21.14
  misc_feature (1)..(361): NCBI GI NO: 22329813 NR Description: putative squamosa-promoter binding protein 2
  misc_feature (1)..(361): NCBI GI NO: 18650611 NR Description: At1g27370/F17L21_16 [Arabidopsis thaliana]
  misc_feature (1)..(361): NCBI GI NO: 9802546 NR Description: F17L21.15 [Arabidopsis thaliana]
  misc_feature (1)..(354): NCBI GI NO: 25456646 NR Description: squamosa promoter binding protein 2
  misc_feature (1)..(274): NCBI GI NO: 15239820 NR Description: squamosa promoter binding protein-like 2
  misc_feature (100)..(364): NCBI GI NO: 18423163 NR Description: putative protein; protein id: At5g50570
  misc_feature (100)..(364): NCBI GI NO: 21536841 NR Description: unknown [Arabidopsis thaliana]
  misc_feature (110)..(356): NCBI GI NO: 15227896 NR Description: putative squamosa-promoter binding protein

SEQ ID NO: 4447 - DNA, 1284 bp, Arabidopsis thaliana
  misc_feature (1)..(1284): Ceres Seq. ID no. 12328584
atgtactaagcacattttctttttctggtatagggtttacgtaaaacatgcgacaacgacaaagattgccggaaaactagccggaacttaggggagctaggtgagaccagcggcggttccatcctcgtgagtaaagcagtgatcgtcggtccgttcaaatccgacaacttcacaaccatcaccgatgctattgcagccgcacctaataacactagaccagaggatggttactttgttatctacgcaagagaaggtgtctatgaagaatatattgttgttcccatcaacaaaaagaacttaatgcttatcggagatgggatcaagaagacgattattacagggaaccataatgttgttgatggttggactacgtataattgctcgagcttcgctgtggttggagagcggttcatggcggttgatgttacattcagaaacacagctggacctgaaaaacatcaggctgtggctttgaggaacaatgcggaaggatcaagtttttatcggtgtagttttgaaggctatcaagatactctctacgtccattctcttagacaattctatcgcgaatgcgatatatatggtaccgtcgattttatattcggaaatgcagccgcaatttttcaaaactgcaacatatatgctcgaaaaccgatggccaagcaaaagaacgcaataacagcgcatggaagactcgatccaaaccagaataccggaatctctatcatcaattgtacaataaaagccgccccagatcttgcagctgatcctaaatcagccatgacatttttagggagaccgtggaagccctactcaaggacggttttcatgcaatcatacattagtgacattgttcaaccagtcggatggctcgaatggaacggtacaattggactagacacaatctactacggtgagtatagtaactttggaccaggtgctaacacgaaccagagagtgcagtggttagggtacaatttattgaacttggcagaagccatgaacttcacggtctacaacttcaccatgggagatacatggttgcctcaaaccgatattcctttctatggtggtttgcttagcaaagaatgaaattgatgaacaacatattatatgtaaacatatttaattatacgtacttcctcatttaaaaaataaatcaagaaattttcatttgttctagttgttgggacgagtcaatgggagtggttctcatgtaaatctagacgtgcttctaactttatttattgcttcagataaccaataaagctaagttttgatgcc

SEQ ID NO: 4448 - protein, 263 aa, Arabidopsis thaliana
  peptide (1)..(263): Ceres Seq. ID no. 12328585
  misc_feature (1)..(245): Pfam Name: Pfam Description:  Pectinesterase
  misc_feature (1)..(263): NCBI GI NO: 6630558 NR Description: putative pectinesterase [Arabidopsis thaliana]
  misc_feature (1)..(263): NCBI GI NO: 30681457 NR Description: pectinesterase, putative [Arabidopsis thaliana]
  misc_feature (1)..(263): NCBI GI NO: 15238378 NR Description: pectinesterase; protein id: At5g04970.1
  misc_feature (1)..(263): NCBI GI NO: 21618192 NR Description: putative pectinesterase [Arabidopsis thaliana]
  misc_feature (1)..(263): NCBI GI NO: 18398974 NR Description: putative pectinesterase [Arabidopsis thaliana]
  misc_feature (1)..(261): NCBI GI NO: 18411914 NR Description: hypothetical protein; protein id: At4g02330
  misc_feature (1)..(261): NCBI GI NO: 19424045 NR Description: unknown protein [Arabidopsis thaliana]
  misc_feature (1)..(261): NCBI GI NO: 18379010 NR Description: pectinesterase family; protein id: At1g02810.1
  misc_feature (1)..(259): NCBI GI NO: 34894528 NR Description: putative pectinesterase
  misc_feature (1)..(261): NCBI GI NO: 18407388 NR Description: pectinesterase family; protein id: At2g47550
MLIGDGIKKTIITGNHNVVDGWTTYNCSSFAVVGERFMAVDVTFRNTAGPEKHQAVALRNNAEGSSFYRCSFEGYQDTLYVHSLRQFYRECDIYGTVDFIFGNAAAIFQNCNIYARKPMAKQKNAITAHGRLDPNQNTGISIINCTIKAAPDLAADPKSAMTFLGRPWKPYSRTVFMQSYISDIVQPVGWLEWNGTIGLDTIYYGEYSNFGPGANTNQRVQWLGYNLLNLAEAMNFTVYNFTMGDTWLPQTDIPFYGGLLSKE

SEQ ID NO: 4449 - protein, 226 aa, Arabidopsis thaliana
  peptide (1)..(226): Ceres Seq. ID no. 12328586
  misc_feature (1)..(208): Pfam Name: Pfam Description:  Pectinesterase
  misc_feature (1)..(226): NCBI GI NO: 6630558 NR Description: putative pectinesterase [Arabidopsis thaliana]
  misc_feature (1)..(226): NCBI GI NO: 30681457 NR Description: pectinesterase, putative [Arabidopsis thaliana]
  misc_feature (1)..(226): NCBI GI NO: 15238378 NR Description: pectinesterase; protein id: At5g04970.1
  misc_feature (1)..(226): NCBI GI NO: 21618192 NR Description: putative pectinesterase [Arabidopsis thaliana]
  misc_feature (1)..(226): NCBI GI NO: 18398974 NR Description: putative pectinesterase [Arabidopsis thaliana]
  misc_feature (1)..(224): NCBI GI NO: 18411914 NR Description: hypothetical protein; protein id: At4g02330
  misc_feature (1)..(224): NCBI GI NO: 19424045 NR Description: unknown protein [Arabidopsis thaliana]
  misc_feature (1)..(224): NCBI GI NO: 18379010 NR Description: pectinesterase family; protein id: At1g02810.1
  misc_feature (1)..(222): NCBI GI NO: 34894528 NR Description: putative pectinesterase
  misc_feature (1)..(224): NCBI GI NO: 18407388 NR Description: pectinesterase family; protein id: At2g47550
MAVDVTFRNTAGPEKHQAVALRNNAEGSSFYRCSFEGYQDTLYVHSLRQFYRECDIYGTVDFIFGNAAAIFQNCNIYARKPMAKQKNAITAHGRLDPNQNTGISIINCTIKAAPDLAADPKSAMTFLGRPWKPYSRTVFMQSYISDIVQPVGWLEWNGTIGLDTIYYGEYSNFGPGANTNQRVQWLGYNLLNLAEAMNFTVYNFTMGDTWLPQTDIPFYGGLLSKE

SEQ ID NO: 4450 - protein, 145 aa, Arabidopsis thaliana
  peptide (1)..(145): Ceres Seq. ID no. 12328587
  misc_feature (1)..(127): Pfam Name: Pfam Description:  Pectinesterase
  misc_feature (1)..(145): NCBI GI NO: 6630558 NR Description: putative pectinesterase [Arabidopsis thaliana]
  misc_feature (1)..(145): NCBI GI NO: 30681457 NR Description: pectinesterase, putative [Arabidopsis thaliana]
  misc_feature (1)..(145): NCBI GI NO: 15238378 NR Description: pectinesterase; protein id: At5g04970.1
  misc_feature (1)..(145): NCBI GI NO: 21618192 NR Description: putative pectinesterase [Arabidopsis thaliana]
  misc_feature (1)..(145): NCBI GI NO: 18398974 NR Description: putative pectinesterase [Arabidopsis thaliana]
  misc_feature (1)..(143): NCBI GI NO: 18411914 NR Description: hypothetical protein; protein id: At4g02330
  misc_feature (1)..(143): NCBI GI NO: 19424045 NR Description: unknown protein [Arabidopsis thaliana]
  misc_feature (1)..(143): NCBI GI NO: 18379010 NR Description: pectinesterase family; protein id: At1g02810.1
  misc_feature (1)..(141): NCBI GI NO: 34894528 NR Description: putative pectinesterase
  misc_feature (1)..(143): NCBI GI NO: 18407388 NR Description: pectinesterase family; protein id: At2g47550
MAKQKNAITAHGRLDPNQNTGISIINCTIKAAPDLAADPKSAMTFLGRPWKPYSRTVFMQSYISDIVQPVGWLEWNGTIGLDTIYYGEYSNFGPGANTNQRVQWLGYNLLNLAEAMNFTVYNFTMGDTWLPQTDIPFYGGLLSKE

SEQ ID NO: 4451 - DNA, 1045 bp, Arabidopsis thaliana
  misc_feature (1)..(1045): Ceres Seq. ID no. 12339663
aataaaaatttgtttctttcttctctgtttttttttgctttcgtcttcaagagagagagagagagagatacaaagagagaaatttggttgtttgttgacggaagcttcttcggtctctcttctccgtcttacgattgtcaacgcgtggttccatcttcaattttgtttctattttagcagaagtttctcgagcttcaaatactgtttcagatcaatcaatcagtcaatcatggctagctctggaaacaagaacatcaacgccaaattggtattactaggagatgttggagctggaaaatcaagtcttgtgctacggtttgtgaaagatcagtttgttgaatttcaggaatcaaccattggtgcagcttttttctctcaaacattggctgtgaatgatgcgactgtgaagtttgagatatgggatacagctggtcaggaacgataccacagtttggctccaatgtactacaggggtgcagctgctgctattattgtctttgacattactaatcaagcctcatttgagagggcgaagaaatgggttcaggaactgcaggcacaaggtaaccctaatatggtgatggctcttgctggaaacaaagctgatttattagacgcaaggaaggtgtctgcagaggaggcagagatatatgctcaagagaacagccttttctttatggaaacctcagcgaagaccgcaacaaatgtcaaagacatattctacgaaatagcgaaaaggctaccacgtgtacagccagctgaaaacccgacaggaatggttctcccaaacgggccaggggctacggcagtgagttcatcgtgttgtgcttagattcgtacctgaagagagatctcatttggttagtcacatagtagagaacatctggactttcatgtgtttgcttcttcttcgtctttgttactttactttgcttgcattgacaacaacaacagtgtatatcatgatgatacttattctgcctttgtgaaatctgaagatatttgtatttggagagatttatatatatatatctcttttgtaaag

SEQ ID NO: 4452 - protein, 276 aa, Arabidopsis thaliana
  peptide (1)..(276): Ceres Seq. ID no. 12339664
  misc_feature (88)..(249): Pfam Name: Pfam Description:  Ras family
  misc_feature (77)..(276): NCBI GI NO: 15242309 NR Description: ras-related GTP-binding protein RHA1
  misc_feature (77)..(276): NCBI GI NO: 15235113 NR Description: GTP-binding protein, putative
  misc_feature (77)..(276): NCBI GI NO: 421941 NR Description: GTP-binding protein, ras-related - common tobacco
  misc_feature (77)..(276): NCBI GI NO: 1370178 NR Description: RAB5A [Lotus japonicus]
  misc_feature (77)..(276): NCBI GI NO: 12311684 NR Description: GTP binding protein
  misc_feature (77)..(276): NCBI GI NO: 12311682 NR Description: GTP binding protein
  misc_feature (77)..(276): NCBI GI NO: 1076545 NR Description: guanine nucleotide regulatory protein - fava bean
  misc_feature (77)..(276): NCBI GI NO: 6010033 NR Description: GTP binding protein
  misc_feature (77)..(276): NCBI GI NO: 6010031 NR Description: GTP binding protein
  misc_feature (77)..(275): NCBI GI NO: 266879 NR Description: RAS-RELATED PROTEIN RAB5
IKICFFLLCFFLLSSSREREREIQREKFGCLLTEASSVSLLRLTIVNAWFHLQFCFYFSRSFSSFKYCFRSINQSIMASSGNKNINAKLVLLGDVGAGKSSLVLRFVKDQFVEFQESTIGAAFFSQTLAVNDATVKFEIWDTAGQERYHSLAPMYYRGAAAAIIVFDITNQASFERAKKWVQELQAQGNPNMVMALAGNKADLLDARKVSAEEAEIYAQENSLFFMETSAKTATNVKDIFYEIAKRLPRVQPAENPTGMVLPNGPGATAVSSSCCA

SEQ ID NO: 4453 - protein, 200 aa, Arabidopsis thaliana
  peptide (1)..(200): Ceres Seq. ID no. 12339665
  misc_feature (12)..(173): Pfam Name: Pfam Description:  Ras family
  misc_feature (1)..(200): NCBI GI NO: 15242309 NR Description: ras-related GTP-binding protein RHA1
  misc_feature (1)..(200): NCBI GI NO: 15235113 NR Description: GTP-binding protein, putative
  misc_feature (1)..(200): NCBI GI NO: 421941 NR Description: GTP-binding protein, ras-related - common tobacco
  misc_feature (1)..(200): NCBI GI NO: 1370178 NR Description: RAB5A [Lotus japonicus]
  misc_feature (1)..(200): NCBI GI NO: 12311684 NR Description: GTP binding protein
  misc_feature (1)..(200): NCBI GI NO: 12311682 NR Description: GTP binding protein
  misc_feature (1)..(200): NCBI GI NO: 1076545 NR Description: guanine nucleotide regulatory protein - fava bean
  misc_feature (1)..(200): NCBI GI NO: 6010033 NR Description: GTP binding protein
  misc_feature (1)..(200): NCBI GI NO: 6010031 NR Description: GTP binding protein
  misc_feature (1)..(199): NCBI GI NO: 266879 NR Description: RAS-RELATED PROTEIN RAB5
MASSGNKNINAKLVLLGDVGAGKSSLVLRFVKDQFVEFQESTIGAAFFSQTLAVNDATVKFEIWDTAGQERYHSLAPMYYRGAAAAIIVFDITNQASFERAKKWVQELQAQGNPNMVMALAGNKADLLDARKVSAEEAEIYAQENSLFFMETSAKTATNVKDIFYEIAKRLPRVQPAENPTGMVLPNGPGATAVSSSCCA

SEQ ID NO: 4454 - DNA, 1309 bp, Arabidopsis thaliana
  misc_feature (1)..(1309): Ceres Seq. ID no. 13501404
aaatatttaaggaaacaaataaaaaacaaaaagattcatcttccaatacccaacgcatattacgcagccaccacacagcggagagagagagagaagaaacagaaacagaaacagagctcgagctcgagacgctcaatattaatggcggccgcatcagcacgagctttcttcatgctctctcgtgtaactgacctttcaaagaaaaagctaatccttcaccaaccaccaccgtcgtcatctcctcaccggctaccttatgctccgaatcgtgcggtgtcttcctccgctgtaatcagctgtctcagcggtggtggtgtttcctccgacgattcgtatgtatctactcgtcggtctaagttagatcgaggtttcgctgtgatcgcgaatttggtgaatcggatccagccgcttgatacgtctgttatctctaaaggcttatctgattcagctaaggattcgatgaaacagacgatttcttctatgcttggtcttcttccttccgatcaattttccgtttccgttactatctccgaacagcctctttatcgtctccttatttcttccatcatcaccgggtatacattgtggaatgcggagtatcgtgtatcactgaggaggaattttgatataccgattgatcctagaaaggaggaggaggatcaatcttcgaaagacaatgttagatttggttcagagaagggaatgagtgaggatttagggaattgtgttgaggaatttgagagactgagtcctcaggtgtttggagacttgtcacctgaagcgttgagttatattcagcttttgcagtctgagctatcttccatgaaagaggagctagattcacaaaagaagaaagctttgaggatagaatgtgagaaaggaaacaggaatgatttgttggattatttgcgttctttagatcccgagatggtgactgagttatctcaactgtcttcaccggaagtggaagagattgtgaaccagcttgtccaaaacgtattagagaggctcttcgaagaccagactacttcaaatttcatgcaaaatcctggcataaggactacagaaggtggtgatggaactggtagaaaggtggacacatccagggattaccttgcaaagctccttttctggtgcatgctattgggacatcatttaagaggtttggagaatagattacatctcagctgtgttgttgggttgctgtaatatcagagaatcataaaaaggagacaagataaaaaagaaacacaaatgtatattcttctcccccattttgatttctttaatctaagcgttaagttattat

SEQ ID NO: 4455 - protein, 402 aa, Arabidopsis thaliana
  peptide (1)..(402): Ceres Seq. ID no. 13501405
  misc_feature (48)..(402): NCBI GI NO: 15242177 NR Description: seed maturation -related protein
  misc_feature (48)..(402): NCBI GI NO: 21536629 NR Description: seed maturation-like protein
  misc_feature (75)..(337): NCBI GI NO: 40538958 NR Description: expressed protein
  misc_feature (125)..(358): NCBI GI NO: 6648962 NR Description: seed maturation protein PM23 [Glycine max]
  misc_feature (84)..(337): NCBI GI NO: 15226027 NR Description: expressed protein [Arabidopsis thaliana]
  misc_feature (73)..(279): NCBI GI NO: 25404427 NR Description: unknown protein, 83181-85105
  misc_feature (253)..(345): NCBI GI NO: 25404427 NR Description: unknown protein, 83181-85105
  misc_feature (366)..(400): NCBI GI NO: 25404427 NR Description: unknown protein, 83181-85105
  misc_feature (73)..(279): NCBI GI NO: 30696873 NR Description: expressed protein [Arabidopsis thaliana]
  misc_feature (253)..(345): NCBI GI NO: 30696873 NR Description: expressed protein [Arabidopsis thaliana]
KYLRKQIKNKKIHLPIPNAYYAATTQRREREKKQKQKQSSSSRRSILMAAASARAFFMLSRVTDLSKKKLILHQPPPSSSPHRLPYAPNRAVSSSAVISCLSGGGVSSDDSYVSTRRSKLDRGFAVIANLVNRIQPLDTSVISKGLSDSAKDSMKQTISSMLGLLPSDQFSVSVTISEQPLYRLLISSIITGYTLWNAEYRVSLRRNFDIPIDPRKEEEDQSSKDNVRFGSEKGMSEDLGNCVEEFERLSPQVFGDLSPEALSYIQLLQSELSSMKEELDSQKKKALRIECEKGNRNDLLDYLRSLDPEMVTELSQLSSPEVEEIVNQLVQNVLERLFEDQTTSNFMQNPGIRTTEGGDGTGRKVDTSRDYLAKLLFWCMLLGHHLRGLENRLHLSCVVGLL

SEQ ID NO: 4456 - protein, 355 aa, Arabidopsis thaliana
  peptide (1)..(355): Ceres Seq. ID no. 13501406
  misc_feature (1)..(355): NCBI GI NO: 15242177 NR Description: seed maturation -related protein
  misc_feature (1)..(355): NCBI GI NO: 21536629 NR Description: seed maturation-like protein
  misc_feature (28)..(290): NCBI GI NO: 40538958 NR Description: expressed protein
  misc_feature (78)..(311): NCBI GI NO: 6648962 NR Description: seed maturation protein PM23 [Glycine max]
  misc_feature (37)..(290): NCBI GI NO: 15226027 NR Description: expressed protein [Arabidopsis thaliana]
  misc_feature (26)..(232): NCBI GI NO: 25404427 NR Description: unknown protein, 83181-85105
  misc_feature (206)..(298): NCBI GI NO: 25404427 NR Description: unknown protein, 83181-85105
  misc_feature (319)..(353): NCBI GI NO: 25404427 NR Description: unknown protein, 83181-85105
  misc_feature (26)..(232): NCBI GI NO: 30696873 NR Description: expressed protein [Arabidopsis thaliana]
  misc_feature (206)..(298): NCBI GI NO: 30696873 NR Description: expressed protein [Arabidopsis thaliana]
MAAASARAFFMLSRVTDLSKKKLILHQPPPSSSPHRLPYAPNRAVSSSAVISCLSGGGVSSDDSYVSTRRSKLDRGFAVIANLVNRIQPLDTSVISKGLSDSAKDSMKQTISSMLGLLPSDQFSVSVTISEQPLYRLLISSIITGYTLWNAEYRVSLRRNFDIPIDPRKEEEDQSSKDNVRFGSEKGMSEDLGNCVEEFERLSPQVFGDLSPEALSYIQLLQSELSSMKEELDSQKKKALRIECEKGNRNDLLDYLRSLDPEMVTELSQLSSPEVEEIVNQLVQNVLERLFEDQTTSNFMQNPGIRTTEGGDGTGRKVDTSRDYLAKLLFWCMLLGHHLRGLENRLHLSCVVGLL

SEQ ID NO: 4457 - protein, 345 aa, Arabidopsis thaliana
  peptide (1)..(345): Ceres Seq. ID no. 13501407
  misc_feature (1)..(345): NCBI GI NO: 15242177 NR Description: seed maturation -related protein
  misc_feature (1)..(345): NCBI GI NO: 21536629 NR Description: seed maturation-like protein
  misc_feature (18)..(280): NCBI GI NO: 40538958 NR Description: expressed protein
  misc_feature (68)..(301): NCBI GI NO: 6648962 NR Description: seed maturation protein PM23 [Glycine max]
  misc_feature (27)..(280): NCBI GI NO: 15226027 NR Description: expressed protein [Arabidopsis thaliana]
  misc_feature (16)..(222): NCBI GI NO: 25404427 NR Description: unknown protein, 83181-85105
  misc_feature (196)..(288): NCBI GI NO: 25404427 NR Description: unknown protein, 83181-85105
  misc_feature (309)..(343): NCBI GI NO: 25404427 NR Description: unknown protein, 83181-85105
  misc_feature (16)..(222): NCBI GI NO: 30696873 NR Description: expressed protein [Arabidopsis thaliana]
  misc_feature (196)..(288): NCBI GI NO: 30696873 NR Description: expressed protein [Arabidopsis thaliana]
MLSRVTDLSKKKLILHQPPPSSSPHRLPYAPNRAVSSSAVISCLSGGGVSSDDSYVSTRRSKLDRGFAVIANLVNRIQPLDTSVISKGLSDSAKDSMKQTISSMLGLLPSDQFSVSVTISEQPLYRLLISSIITGYTLWNAEYRVSLRRNFDIPIDPRKEEEDQSSKDNVRFGSEKGMSEDLGNCVEEFERLSPQVFGDLSPEALSYIQLLQSELSSMKEELDSQKKKALRIECEKGNRNDLLDYLRSLDPEMVTELSQLSSPEVEEIVNQLVQNVLERLFEDQTTSNFMQNPGIRTTEGGDGTGRKVDTSRDYLAKLLFWCMLLGHHLRGLENRLHLSCVVGLL

SEQ ID NO: 4458 - DNA, 1906 bp, Arabidopsis thaliana
  misc_feature (1)..(1906): Ceres Seq. ID no. 13489601
atcttcttcgcaaatctcaacaatggtgtttgaagcattcgaagtcggcacagtcccattcaattccgatggttggggaccaccagatgcttccgacacttcctccaccagcgtcgcggcggcgaatctcctcccaaacgtccccttcgcttccttctcacgatccgaaaaactcggacgcgttgctgattggactcgagctctctcaaatccatcagctcgtcctcacaccggatccaaatcagatccatcagcgatcttcgatttctcagcttttgcagtagatgaaggatttggtctaacaaactcaggtggaaacgccgacgaagacgccgctttccgattagtcgacggaaaaccaccgccgcgtcctaaattcggacctaaatggagattcaatcaataccataaccgaaatcagcttcctcaacgtcgtgatgaagaagttgaagctaagaaacgtgaagctgagaaagatcgagctcgtcgtgatcgtctctacaataacaatcgtaacaatattcatcagcaacgccgtgaagccgccgcgtttaaatcatcagttgatattcaaccggaatggaatatgcttgagcagattccgttttcgactttctctaagctttcgtttacagtttctgaacctgaagatcttcttctttgtggtggacttgagtcttatgatcggagttttgatcgtattactcctaaagctgatcgtagacttgagcgtttcaagaacagaagctttaaggttactacaagtgatgatcttgtgatcagacgtcttgctaaagaagataaagctactgtttttgctactgatgctattctagctgctcttatgtgtgctcctagatcggtttattcatgggatcttgtgattcaacgtgttgggaataagcttttctttgataagagagatgggtcaccgcttgatttgttatctgttcatgagacttctcaagagcctttgcctgagggtaaagatgatattaactctgctcattctctaggtctggaggctgcttatattaatcagaattttgctcagcaggttttggttaagaatgggaaaagggaaacttttgatgagccaattcctaatgttaatgaaggtgaagagaatgcttctattgcttataggtataggagatggaagcttgatgatagtatgtatctagttgctaggtgtgagttacagagcactgttgatttgaataaccagagatcgtttttaactttgaatgctcttaacgagtttgatcctaagtactctggtgttgattggagacagaagcttgagactcagagaggtgcggttttagctaatgagttgaagaacaatggtaataagttagctaaatggactgcgcaggctctcttggctaatgcggatatgatgaagattgggtttgtttcgagggttcatcctcgtgatcattttaaccatgttatattatcggttttggggtataagccgaaagatttcgctgggcagatcaatctgaacactaacaatatgtggggaattgtgaagtcgattgttgatctgtgtatgaagttaagtgaaggaaagtatgttctagtgaaggatccatcgaagcctcaagttaggatttacgaagttccggctgatgcatttgacaatgattatgtggaggagccactccctgaagatgaacaggttcagccacctgaggagaacactgatgcaggagcagagactaatggggtttcctctactaatgtagctgtagaggataagaaatccgaagttgaagcctgattttgatgatatgggtatatttcaagtcgtgttgttttgagttacttttaaaaaatgttcgaaagcttgttcactttttcatagactatttatgttccaaaatgttggttcatgcct

SEQ ID NO: 4459 - protein, 595 aa, Arabidopsis thaliana
  peptide (1)..(595): Ceres Seq. ID no. 13489602
  misc_feature (10)..(561): Pfam Name: eIF-3 Pfam Description: Eukaryotic translation initiation factor 3 subunit 7
  misc_feature (8)..(595): NCBI GI NO: 15233469 NR Description: translation initiation factor eIF3 - like protein
  misc_feature (8)..(595): NCBI GI NO: 17528988 NR Description: putative translation initiation factor eIF3
  misc_feature (177)..(595): NCBI GI NO: 12407755 NR Description: initiation factor 3d [Arabidopsis thaliana]
  misc_feature (13)..(595): NCBI GI NO: 31207329 NR Description: ENSANGP00000015368 [Anopheles gambiae]
  misc_feature (13)..(569): NCBI GI NO: 31418925 NR Description: Unknown (protein for MGC:64097) [Danio rerio]
  misc_feature (13)..(567): NCBI GI NO: 27882463 NR Description: Similar to eukaryotic translation initiation factor 3
  misc_feature (13)..(568): NCBI GI NO: 4503523 NR Description: eukaryotic translation initiation factor 3 subunit 7
  misc_feature (13)..(570): NCBI GI NO: 38174024 NR Description: Unknown (protein for MGC:75703)
  misc_feature (13)..(568): NCBI GI NO: 34866902 NR Description: similar to eukaryotic translation initiation factor 3 subunit 7
  misc_feature (2)..(564): NCBI GI NO: 24649360 NR Description: Eukaryotic initiation factor 3 p66 subunit CG10161-PB
SSSQISTMVFEAFEVGTVPFNSDGWGPPDASDTSSTSVAAANLLPNVPFASFSRSEKLGRVADWTRALSNPSARPHTGSKSDPSAIFDFSAFAVDEGFGLTNSGGNADEDAAFRLVDGKPPPRPKFGPKWRFNQYHNRNQLPQRRDEEVEAKKREAEKDRARRDRLYNNNRNNIHQQRREAAAFKSSVDIQPEWNMLEQIPFSTFSKLSFTVSEPEDLLLCGGLESYDRSFDRITPKADRRLERFKNRSFKVTTSDDLVIRRLAKEDKATVFATDAILAALMCAPRSVYSWDLVIQRVGNKLFFDKRDGSPLDLLSVHETSQEPLPEGKDDINSAHSLGLEAAYINQNFAQQVLVKNGKRETFDEPIPNVNEGEENASIAYRYRRWKLDDSMYLVARCELQSTVDLNNQRSFLTLNALNEFDPKYSGVDWRQKLETQRGAVLANELKNNGNKLAKWTAQALLANADMMKIGFVSRVHPRDHFNHVILSVLGYKPKDFAGQINLNTNNMWGIVKSIVDLCMKLSEGKYVLVKDPSKPQVRIYEVPADAFDNDYVEEPLPEDEQVQPPEENTDAGAETNGVSSTNVAVEDKKSEVEA

SEQ ID NO: 4460 - protein, 588 aa, Arabidopsis thaliana
  peptide (1)..(588): Ceres Seq. ID no. 13489603
  misc_feature (3)..(554): Pfam Name: eIF-3 Pfam Description: Eukaryotic translation initiation factor 3 subunit 7
  misc_feature (1)..(588): NCBI GI NO: 15233469 NR Description: translation initiation factor eIF3 - like protein
  misc_feature (1)..(588): NCBI GI NO: 17528988 NR Description: putative translation initiation factor eIF3
  misc_feature (170)..(588): NCBI GI NO: 12407755 NR Description: initiation factor 3d [Arabidopsis thaliana]
  misc_feature (6)..(588): NCBI GI NO: 31207329 NR Description: ENSANGP00000015368 [Anopheles gambiae]
  misc_feature (6)..(562): NCBI GI NO: 31418925 NR Description: Unknown (protein for MGC:64097) [Danio rerio]
  misc_feature (6)..(560): NCBI GI NO: 27882463 NR Description: Similar to eukaryotic translation initiation factor 3
  misc_feature (6)..(561): NCBI GI NO: 4503523 NR Description: eukaryotic translation initiation factor 3 subunit 7
  misc_feature (6)..(563): NCBI GI NO: 38174024 NR Description: Unknown (protein for MGC:75703)
  misc_feature (6)..(561): NCBI GI NO: 34866902 NR Description: similar to eukaryotic translation initiation factor 3 subunit 7
  misc_feature (1)..(557): NCBI GI NO: 24649360 NR Description: Eukaryotic initiation factor 3 p66 subunit CG10161-PB
MVFEAFEVGTVPFNSDGWGPPDASDTSSTSVAAANLLPNVPFASFSRSEKLGRVADWTRALSNPSARPHTGSKSDPSAIFDFSAFAVDEGFGLTNSGGNADEDAAFRLVDGKPPPRPKFGPKWRFNQYHNRNQLPQRRDEEVEAKKREAEKDRARRDRLYNNNRNNIHQQRREAAAFKSSVDIQPEWNMLEQIPFSTFSKLSFTVSEPEDLLLCGGLESYDRSFDRITPKADRRLERFKNRSFKVTTSDDLVIRRLAKEDKATVFATDAILAALMCAPRSVYSWDLVIQRVGNKLFFDKRDGSPLDLLSVHETSQEPLPEGKDDINSAHSLGLEAAYINQNFAQQVLVKNGKRETFDEPIPNVNEGEENASIAYRYRRWKLDDSMYLVARCELQSTVDLNNQRSFLTLNALNEFDPKYSGVDWRQKLETQRGAVLANELKNNGNKLAKWTAQALLANADMMKIGFVSRVHPRDHFNHVILSVLGYKPKDFAGQINLNTNNMWGIVKSIVDLCMKLSEGKYVLVKDPSKPQVRIYEVPADAFDNDYVEEPLPEDEQVQPPEENTDAGAETNGVSSTNVAVEDKKSEVEA

SEQ ID NO: 4461 - protein, 400 aa, Arabidopsis thaliana
  peptide (1)..(400): Ceres Seq. ID no. 13489604
  misc_feature (1)..(366): Pfam Name: eIF-3 Pfam Description: Eukaryotic translation initiation factor 3 subunit 7
  misc_feature (1)..(400): NCBI GI NO: 15233469 NR Description: translation initiation factor eIF3 - like protein
  misc_feature (1)..(400): NCBI GI NO: 17528988 NR Description: putative translation initiation factor eIF3
  misc_feature (1)..(400): NCBI GI NO: 12407755 NR Description: initiation factor 3d [Arabidopsis thaliana]
  misc_feature (1)..(400): NCBI GI NO: 31207329 NR Description: ENSANGP00000015368 [Anopheles gambiae]
  misc_feature (1)..(374): NCBI GI NO: 31418925 NR Description: Unknown (protein for MGC:64097) [Danio rerio]
  misc_feature (1)..(372): NCBI GI NO: 27882463 NR Description: Similar to eukaryotic translation initiation factor 3
  misc_feature (1)..(373): NCBI GI NO: 4503523 NR Description: eukaryotic translation initiation factor 3 subunit 7
  misc_feature (1)..(375): NCBI GI NO: 38174024 NR Description: Unknown (protein for MGC:75703)
  misc_feature (1)..(373): NCBI GI NO: 34866902 NR Description: similar to eukaryotic translation initiation factor 3 subunit 7
  misc_feature (1)..(369): NCBI GI NO: 24649360 NR Description: Eukaryotic initiation factor 3 p66 subunit CG10161-PB
MLEQIPFSTFSKLSFTVSEPEDLLLCGGLESYDRSFDRITPKADRRLERFKNRSFKVTTSDDLVIRRLAKEDKATVFATDAILAALMCAPRSVYSWDLVIQRVGNKLFFDKRDGSPLDLLSVHETSQEPLPEGKDDINSAHSLGLEAAYINQNFAQQVLVKNGKRETFDEPIPNVNEGEENASIAYRYRRWKLDDSMYLVARCELQSTVDLNNQRSFLTLNALNEFDPKYSGVDWRQKLETQRGAVLANELKNNGNKLAKWTAQALLANADMMKIGFVSRVHPRDHFNHVILSVLGYKPKDFAGQINLNTNNMWGIVKSIVDLCMKLSEGKYVLVKDPSKPQVRIYEVPADAFDNDYVEEPLPEDEQVQPPEENTDAGAETNGVSSTNVAVEDKKSEVEA

SEQ ID NO: 4462 - DNA, 1289 bp, Arabidopsis thaliana
  misc_feature (1)..(1289): Ceres Seq. ID no. 12329055
atcttaccctaaaaaccacatttcttaacttcctcaataaaaaaaagaaaagcttcaccctttaattttaccctcaaccccaaaacaaaaaccccttcctccacgagggcatacagaaatatcaaagacccaatctttctttcacttccccaatctctagatgacaatctaacgatacagttccttttagatcgattaccaaatacaaaggatcaatttttcttacatgaacactctgttgtaatggcagaggaaaatctagaactgagtcttttatgtacagagagcaacgttgatgatgagggcatgattgttgacgaaactccgattgaaatttcgattcctcagatgggtttttctcaatcggagagtgaggagattatcatggagatggtggagaaggagaagcagcatttgccaagtgatgattacatcaagagacttagaagtggagatttggatttgaatgttggaagaagagatgccctcaattggatttggaaggcttgtgaagtacaccagtttggaccattgtgtttttgcttagcaatgaactacttggatcgattcttatcggttcatgatttgcctagtggcaaaggttggatattgcagttgttggctgtggcttgtttatcattggcagccaaaattgaagaaactgaagttccaatgttgatagatcttcaggttggagatcctcagtttgtgtttgaggctaaatcagtccaaagaatggagcttttggtgttgaacaaattgaaatggagattgagagcaataactccatgctcatacataagatatttcctgagaaagatgagtaaatgtgatcaagaaccatccaacacattgatatctagatcattacaagtgatagccagcacaaccaaaggtattgactttttggagtttagaccttctgaagctgctgctgctgtggcactttctgtttctggagaattgcagagagtacactttgacaactcttccttctctcctcttttctcactacttcaaaaggagagagtgaagaagataggggaaatgatagagagtgatggctcagacttatgttcacaaacacccaatggggttttagaagtatcggcttgttgtttcagctttaagacccatgattcttcttcttcttatacacatctttcttaaaaaaaaaactgtttttttcttacattattataatcagtatgatgtctgatgagaggttgaaaaaagaggacaataaatcaaagcaaaaatttttaaataaataaaagtgtattaatttc

SEQ ID NO: 4463 - protein, 308 aa, Arabidopsis thaliana
  peptide (1)..(308): Ceres Seq. ID no. 12329056
  misc_feature (45)..(178): Pfam Name: Pfam Description:  Cyclin, N-terminal domain
  misc_feature (1)..(308): NCBI GI NO: 4688615 NR Description: D-type cyclin [Arabidopsis thaliana]
  misc_feature (1)..(308): NCBI GI NO: 15238462 NR Description: Cyclin D4;1; protein id: At5g65420
  misc_feature (1)..(308): NCBI GI NO: 21536631 NR Description: D-type cyclin [Arabidopsis thaliana]
  misc_feature (15)..(308): NCBI GI NO: 30683167 NR Description: cyclin family [Arabidopsis thaliana]
  misc_feature (15)..(303): NCBI GI NO: 11357238 NR Description: cyclin protein-like - Arabidopsis thaliana
  misc_feature (9)..(299): NCBI GI NO: 4160298 NR Description: cyclin D2.1 protein [Nicotiana tabacum]
  misc_feature (22)..(303): NCBI GI NO: 7484663 NR Description: cyclin D-like protein - red goosefoot
  misc_feature (9)..(299): NCBI GI NO: 22091622 NR Description: cyclin D2 [Daucus carota]
  misc_feature (32)..(272): NCBI GI NO: 1076312 NR Description: cyclin delta-2 - Arabidopsis thaliana
  misc_feature (32)..(272): NCBI GI NO: 15227224 NR Description: Cyclin D2;1; protein id: At2g22490.1
MAEENLELSLLCTESNVDDEGMIVDETPIEISIPQMGFSQSESEEIIMEMVEKEKQHLPSDDYIKRLRSGDLDLNVGRRDALNWIWKACEVHQFGPLCFCLAMNYLDRFLSVHDLPSGKGWILQLLAVACLSLAAKIEETEVPMLIDLQVGDPQFVFEAKSVQRMELLVLNKLKWRLRAITPCSYIRYFLRKMSKCDQEPSNTLISRSLQVIASTTKGIDFLEFRPSEAAAAVALSVSGELQRVHFDNSSFSPLFSLLQKERVKKIGEMIESDGSDLCSQTPNGVLEVSACCFSFKTHDSSSSYTHLS

SEQ ID NO: 4464 - protein, 287 aa, Arabidopsis thaliana
  peptide (1)..(287): Ceres Seq. ID no. 12329057
  misc_feature (24)..(157): Pfam Name: Pfam Description:  Cyclin, N-terminal domain
  misc_feature (1)..(287): NCBI GI NO: 4688615 NR Description: D-type cyclin [Arabidopsis thaliana]
  misc_feature (1)..(287): NCBI GI NO: 15238462 NR Description: Cyclin D4;1; protein id: At5g65420
  misc_feature (1)..(287): NCBI GI NO: 21536631 NR Description: D-type cyclin [Arabidopsis thaliana]
  misc_feature (1)..(287): NCBI GI NO: 30683167 NR Description: cyclin family [Arabidopsis thaliana]
  misc_feature (1)..(282): NCBI GI NO: 11357238 NR Description: cyclin protein-like - Arabidopsis thaliana
  misc_feature (1)..(278): NCBI GI NO: 4160298 NR Description: cyclin D2.1 protein [Nicotiana tabacum]
  misc_feature (1)..(282): NCBI GI NO: 7484663 NR Description: cyclin D-like protein - red goosefoot
  misc_feature (1)..(278): NCBI GI NO: 22091622 NR Description: cyclin D2 [Daucus carota]
  misc_feature (11)..(251): NCBI GI NO: 1076312 NR Description: cyclin delta-2 - Arabidopsis thaliana
  misc_feature (11)..(251): NCBI GI NO: 15227224 NR Description: Cyclin D2;1; protein id: At2g22490.1
MIVDETPIEISIPQMGFSQSESEEIIMEMVEKEKQHLPSDDYIKRLRSGDLDLNVGRRDALNWIWKACEVHQFGPLCFCLAMNYLDRFLSVHDLPSGKGWILQLLAVACLSLAAKIEETEVPMLIDLQVGDPQFVFEAKSVQRMELLVLNKLKWRLRAITPCSYIRYFLRKMSKCDQEPSNTLISRSLQVIASTTKGIDFLEFRPSEAAAAVALSVSGELQRVHFDNSSFSPLFSLLQKERVKKIGEMIESDGSDLCSQTPNGVLEVSACCFSFKTHDSSSSYTHLS

SEQ ID NO: 4465 - protein, 273 aa, Arabidopsis thaliana
  peptide (1)..(273): Ceres Seq. ID no. 12329058
  misc_feature (10)..(143): Pfam Name: Pfam Description:  Cyclin, N-terminal domain
  misc_feature (1)..(273): NCBI GI NO: 4688615 NR Description: D-type cyclin [Arabidopsis thaliana]
  misc_feature (1)..(273): NCBI GI NO: 15238462 NR Description: Cyclin D4;1; protein id: At5g65420
  misc_feature (1)..(273): NCBI GI NO: 21536631 NR Description: D-type cyclin [Arabidopsis thaliana]
  misc_feature (1)..(273): NCBI GI NO: 30683167 NR Description: cyclin family [Arabidopsis thaliana]
  misc_feature (1)..(268): NCBI GI NO: 11357238 NR Description: cyclin protein-like - Arabidopsis thaliana
  misc_feature (1)..(264): NCBI GI NO: 4160298 NR Description: cyclin D2.1 protein [Nicotiana tabacum]
  misc_feature (1)..(268): NCBI GI NO: 7484663 NR Description: cyclin D-like protein - red goosefoot
  misc_feature (1)..(264): NCBI GI NO: 22091622 NR Description: cyclin D2 [Daucus carota]
  misc_feature (1)..(237): NCBI GI NO: 1076312 NR Description: cyclin delta-2 - Arabidopsis thaliana
  misc_feature (1)..(237): NCBI GI NO: 15227224 NR Description: Cyclin D2;1; protein id: At2g22490.1
MGFSQSESEEIIMEMVEKEKQHLPSDDYIKRLRSGDLDLNVGRRDALNWIWKACEVHQFGPLCFCLAMNYLDRFLSVHDLPSGKGWILQLLAVACLSLAAKIEETEVPMLIDLQVGDPQFVFEAKSVQRMELLVLNKLKWRLRAITPCSYIRYFLRKMSKCDQEPSNTLISRSLQVIASTTKGIDFLEFRPSEAAAAVALSVSGELQRVHFDNSSFSPLFSLLQKERVKKIGEMIESDGSDLCSQTPNGVLEVSACCFSFKTHDSSSSYTHLS

SEQ ID NO: 4466 - DNA, 1389 bp, Arabidopsis thaliana
  misc_feature (1)..(1389): Ceres Seq. ID no. 12328262
ccacaaagatatttttctttattctctcgcagttcaattagggtttcaatctctctgctctgcttgtcatcaccaccaccaccaccaccgtcgtcgtctctctgtatctctccggcgggttctctctctacttcccccggaggattaaaagatggaccagtcttttattttgatattccgttagcttgttcagttattgtagaagctgtgtcgtcaagacttttaatatctcaaatggatgatggtgggcatcgtgagaatggtcggcataaagcagcagttcagggccagcatcagccgtcgatgaaacaagtgatgtcgataatagcagagcgcgatgcagcgattcaggagagaaatctgacgatatcagagaaaaaagcagcagtagctgaaagggacatggcgtttcttcagagggacaccgccattgctgagcgcaacaatgcgataatggagagagacagtgctcttacagctctccaataccgtgagaactctatggttactgctcctgctgccaatatgtcagcatgtccaccgggttgtcaaatatcacgtggtgtaaaacacttgcaccatccgcacatgcatcatcatcatcaacaacatcacatacctcagttgactgaaaatgcatatgaaaccagagaaatggagccaaacgatggtctcccgacatcaccacctgctggatccaccttggaatctgccaaaccaaagcgcggtaaaagagtgaacccaaaggcgacaacacaaaccgctgctaataagagagggccaaaaaatcagaggaaggttaagaaagagagcgaggacgacttaaacaagataatgtttgtaaagacgacccatgactacacagacgaagattcaagtaagcatatcttaataggatcaaaatctgactggaaaagtcaagaaatggtggggctgaaccaagtggtttacgacgagacaacgatgccaccacctgtatgttcatgtacaggagttctcagacagtgctacaaatggggaaatggaggttggcaatcatcgtgttgcacaactacactatcaatgtatcctttacctgcactgcccaacaaaaggcatgctcgagttggtggacggaaaatgagcggaagcgcgttcaacaagcttctaagccggcttgctgcagaagggcatcatgatctttcaaacctggtcgatctgaaggaccattgggcaaagcacggtacaaaccgctacattacgattaaatgatatgtgcatttaggtgtgagttgttcttacgacattatctgattttaaatcatgtgtactaaattcaaataaactcgagaggaaaagaattgtatgtggagccaatgttatgttgtattatataattcgaaaaatttt

SEQ ID NO: 4467 - protein, 416 aa, Arabidopsis thaliana
  peptide (1)..(416): Ceres Seq. ID no. 12328263
  misc_feature (79)..(416): NCBI GI NO: 18422219 NR Description: putative protein; protein id: At5g42520
  misc_feature (139)..(416): NCBI GI NO: 9759488 NR Description: gb|AAF18661
  misc_feature (78)..(168): NCBI GI NO: 15234867 NR Description: putative protein; protein id: At4g38910.1
  misc_feature (300)..(387): NCBI GI NO: 15234867 NR Description: putative protein; protein id: At4g38910.1
  misc_feature (246)..(416): NCBI GI NO: 18399638 NR Description: expressed protein; protein id: At2g21240
  misc_feature (79)..(180): NCBI GI NO: 9759488 NR Description: gb|AAF18661
  misc_feature (353)..(416): NCBI GI NO: 6006362 NR Description: Similar to Arabidopsis thaliana chromosome II BAC T32F12
  misc_feature (111)..(162): NCBI GI NO: 6006362 NR Description: Similar to Arabidopsis thaliana chromosome II BAC T32F12
  misc_feature (191)..(416): NCBI GI NO: 26190436 NR Description: barley B recombinant [Hordeum vulgare]
  misc_feature (224)..(416): NCBI GI NO: 20530716 NR Description: GAGA-binding protein [Glycine max]
PQRYFSLFSRSSIRVSISLLCLSSPPPPPPSSSLCISPAGSLSTSPGGLKDGPVFYFDIPLACSVIVEAVSSRLLISQMDDGGHRENGRHKAAVQGQHQPSMKQVMSIIAERDAAIQERNLTISEKKAAVAERDMAFLQRDTAIAERNNAIMERDSALTALQYRENSMVTAPAANMSACPPGCQISRGVKHLHHPHMHHHHQQHHIPQLTENAYETREMEPNDGLPTSPPAGSTLESAKPKRGKRVNPKATTQTAANKRGPKNQRKVKKESEDDLNKIMFVKTTHDYTDEDSSKHILIGSKSDWKSQEMVGLNQVVYDETTMPPPVCSCTGVLRQCYKWGNGGWQSSCCTTTLSMYPLPALPNKRHARVGGRKMSGSAFNKLLSRLAAEGHHDLSNLVDLKDHWAKHGTNRYITIK

SEQ ID NO: 4468 - protein, 338 aa, Arabidopsis thaliana
  peptide (1)..(338): Ceres Seq. ID no. 12328264
  misc_feature (1)..(338): NCBI GI NO: 18422219 NR Description: putative protein; protein id: At5g42520
  misc_feature (61)..(338): NCBI GI NO: 9759488 NR Description: gb|AAF18661
  misc_feature (1)..(90): NCBI GI NO: 15234867 NR Description: putative protein; protein id: At4g38910.1
  misc_feature (222)..(309): NCBI GI NO: 15234867 NR Description: putative protein; protein id: At4g38910.1
  misc_feature (168)..(338): NCBI GI NO: 18399638 NR Description: expressed protein; protein id: At2g21240
  misc_feature (1)..(102): NCBI GI NO: 9759488 NR Description: gb|AAF18661
  misc_feature (275)..(338): NCBI GI NO: 6006362 NR Description: Similar to Arabidopsis thaliana chromosome II BAC T32F12
  misc_feature (33)..(84): NCBI GI NO: 6006362 NR Description: Similar to Arabidopsis thaliana chromosome II BAC T32F12
  misc_feature (113)..(338): NCBI GI NO: 26190436 NR Description: barley B recombinant [Hordeum vulgare]
  misc_feature (146)..(338): NCBI GI NO: 20530716 NR Description: GAGA-binding protein [Glycine max]
MDDGGHRENGRHKAAVQGQHQPSMKQVMSIIAERDAAIQERNLTISEKKAAVAERDMAFLQRDTAIAERNNAIMERDSALTALQYRENSMVTAPAANMSACPPGCQISRGVKHLHHPHMHHHHQQHHIPQLTENAYETREMEPNDGLPTSPPAGSTLESAKPKRGKRVNPKATTQTAANKRGPKNQRKVKKESEDDLNKIMFVKTTHDYTDEDSSKHILIGSKSDWKSQEMVGLNQVVYDETTMPPPVCSCTGVLRQCYKWGNGGWQSSCCTTTLSMYPLPALPNKRHARVGGRKMSGSAFNKLLSRLAAEGHHDLSNLVDLKDHWAKHGTNRYITIK

SEQ ID NO: 4469 - protein, 315 aa, Arabidopsis thaliana
  peptide (1)..(315): Ceres Seq. ID no. 12328265
  misc_feature (1)..(315): NCBI GI NO: 18422219 NR Description: putative protein; protein id: At5g42520
  misc_feature (38)..(315): NCBI GI NO: 9759488 NR Description: gb|AAF18661
  misc_feature (1)..(67): NCBI GI NO: 15234867 NR Description: putative protein; protein id: At4g38910.1
  misc_feature (199)..(286): NCBI GI NO: 15234867 NR Description: putative protein; protein id: At4g38910.1
  misc_feature (145)..(315): NCBI GI NO: 18399638 NR Description: expressed protein; protein id: At2g21240
  misc_feature (1)..(79): NCBI GI NO: 9759488 NR Description: gb|AAF18661
  misc_feature (252)..(315): NCBI GI NO: 6006362 NR Description: Similar to Arabidopsis thaliana chromosome II BAC T32F12
  misc_feature (10)..(61): NCBI GI NO: 6006362 NR Description: Similar to Arabidopsis thaliana chromosome II BAC T32F12
  misc_feature (90)..(315): NCBI GI NO: 26190436 NR Description: barley B recombinant [Hordeum vulgare]
  misc_feature (123)..(315): NCBI GI NO: 20530716 NR Description: GAGA-binding protein [Glycine max]
MKQVMSIIAERDAAIQERNLTISEKKAAVAERDMAFLQRDTAIAERNNAIMERDSALTALQYRENSMVTAPAANMSACPPGCQISRGVKHLHHPHMHHHHQQHHIPQLTENAYETREMEPNDGLPTSPPAGSTLESAKPKRGKRVNPKATTQTAANKRGPKNQRKVKKESEDDLNKIMFVKTTHDYTDEDSSKHILIGSKSDWKSQEMVGLNQVVYDETTMPPPVCSCTGVLRQCYKWGNGGWQSSCCTTTLSMYPLPALPNKRHARVGGRKMSGSAFNKLLSRLAAEGHHDLSNLVDLKDHWAKHGTNRYITIK

SEQ ID NO: 4470 - DNA, 2646 bp, Arabidopsis thaliana
  misc_feature (1)..(2646): Ceres Seq. ID no. 13491697
acacactagggaaaccacagttctcttctatcctctctttctccgcttctgtagcaatgtcaatgtggtaccctctaccttcttcttcttcctccactcactaaccaaatccagaatcaacaataatagaaaaagccctaactttctctgtcaatggctttcttcttctactttttcttcctcttgactctttcttctccttcttcttctgcttcctcttcaaactccttgacttacatcgtccacgtcgaccacgaagctaaaccctcaatcttccccactcatcttcactggtacacttcctctcttgcctcactcacatcttctcctccctccattatccacacatacaacaccgttttccatggcttctccgctagactcacttcacaagacgctagtcaactcttagaccatcctcatgtcatctccgttatcccggaacaagtccgtcacttgcacaccactcgttcccctgagtttcttggactcaggtccaccgacaaagcgggtctactcgaagagtctgatttcgggtcggatctagttatcggagttatcgatactggtgtttggcccgaaagacctagctttgatgaccgtggtcttggtcctgttcccattaaatggaaaggccaatgtatcgcttcccaagattttccggagtctgcttgtaaccgtaaactcgtcggagctagattcttctgcggtgggtatgaagcaaccaacgggaaaatgaatgaaacgactgagtttcgctctccgcgtgactccgatggacatgggactcacacagcttcaatctccgcgggccgttacgtttttccggcatcaactctcggctacgctcacggtgtcgctgctgggatggctccgaaagctagactcgctgcgtacaaagtctgttggaactccggttgttacgactcagatatcttagccgctttcgacaccgccgttgccgacggtgtcgatgtcatctctctctccgttggaggcgttgtggttccttattacctagacgctatcgccataggagcttttggagctattgacagaggaatattcgtctctgcttccgccggaaacggaggtcccggtgctttaacggtgacgaatgttgctccgtggatgacaacagtcggagctggaacaatcgatagggattttccagccaatgtgaaactcggtaacggaaagatgatttctggtgttagtgtatacggtggaccgggtctggatccgggtcgaatgtacccgcttgtttacggtggtagtttactaggcggcgatggttactcatcgtctctgtgtcttgaaggctcgttggatccgaatttggtgacgggaaagatcgttctttgtgatagaggaatcaattctagagcaaccaaaggtgagatcgtacggaaaaatggaggcttggggatgattatagcgaatggtgtgtttgacggtgaaggtttagtagctgattgccacgtgttaccggcgacatctgttggtgcttctggaggagatgagattcgtaggtatatctctgaatcatccaaatctcgttcatcgaaacatccaacggctacgattgttttcaaagggactcgacttgggatccgacctgcaccggttgttgcatctttctctgcacgtggtcctaatccagagacgccggagattcttaaaccggatgtaatcgcacctggtttgaatattctagctgcttggcctgaccggattggtccatctggtgttacttctgataaccggagaactgagttcaacattttatcaggcacttcgatggcgtgccctcatgtttctggtctagctgctttgcttaaggcggctcatccggattggagccccgcggcgataagatcagcattgatgaccacggcttacacggttgataacagcggtgagccgatgatggatgagtccactggcaatacgtcttcggttacggattatggttcgggtcatgttcacccaaccagagctatggatccgggactagtctacgatataacatcttatgattatatcaacttcttgtgtaattctaactacactggaaccaacattgtgacgataacccgtcgccaagcggactgcgacggtgcgaggcgagcgggacacgtcggaaatttgaactacccgtcgttctctgtcgtgtttcagcagtatggagagagtaaaatgtcgacacatttcattaggactgtgacaaatgtaggcgattcggattcggtttacgagattaagattaggccgcctagagggactacagtgacggttgagccggagaagctatcgttcagacgggtggggcagaaactgagttttgttgttagggttaagaccacagaggtgaagttgtcaccaggagcgacaaatgtggagactggtcatatggtttggtcagatgggaaacggaatgtgacaagtcccttggtggtcactcttcaacaacctctttgaagggttttagaatctggtgaccgggaaaattctggtctctgtttgttgtactagtgaaaaagaaagatcataagttgttgttgtcgtcgtctatgatctttgttggtgtaatataaatatgtatctttgttttgttgttaagaaagatagagcgtctaaagaaat

SEQ ID NO: 4471 - protein, 775 aa, Arabidopsis thaliana
  peptide (1)..(775): Ceres Seq. ID no. 15222869
  misc_feature (361)..(462): Pfam Name: Pfam Description:  PA domain
  misc_feature (195)..(775): NCBI GI NO: 16930701 NR Description: AT3g14240/MLN21_2 [Arabidopsis thaliana]
  misc_feature (10)..(775): NCBI GI NO: 18418552 NR Description: subtilisin-like serine protease
  misc_feature (14)..(770): NCBI GI NO: 14488360 NR Description: putative serine protease
  misc_feature (7)..(770): NCBI GI NO: 1076414 NR Description: subtilisin-like proteinase (EC 3
  misc_feature (7)..(748): NCBI GI NO: 18425181 NR Description: subtilisin-like serine protease ARA12
  misc_feature (7)..(748): NCBI GI NO: 20147211 NR Description: AT5g67360/K8K14_8 [Arabidopsis thaliana]
  misc_feature (1)..(767): NCBI GI NO: 7435657 NR Description: subtilisin-like proteinase (EC 3
  misc_feature (1)..(769): NCBI GI NO: 22331076 NR Description: subtilisin-like serine protease, putative
  misc_feature (1)..(775): NCBI GI NO: 18423316 NR Description: subtilisin-like serine protease
  misc_feature (63)..(769): NCBI GI NO: 18414296 NR Description: subtilisin-like serine protease
MAFFFYFFFLLTLSSPSSSASSSNSLTYIVHVDHEAKPSIFPTHLHWYTSSLASLTSSPPSIIHTYNTVFHGFSARLTSQDASQLLDHPHVISVIPEQVRHLHTTRSPEFLGLRSTDKAGLLEESDFGSDLVIGVIDTGVWPERPSFDDRGLGPVPIKWKGQCIASQDFPESACNRKLVGARFFCGGYEATNGKMNETTEFRSPRDSDGHGTHTASISAGRYVFPASTLGYAHGVAAGMAPKARLAAYKVCWNSGCYDSDILAAFDTAVADGVDVISLSVGGVVVPYYLDAIAIGAFGAIDRGIFVSASAGNGGPGALTVTNVAPWMTTVGAGTIDRDFPANVKLGNGKMISGVSVYGGPGLDPGRMYPLVYGGSLLGGDGYSSSLCLEGSLDPNLVTGKIVLCDRGINSRATKGEIVRKNGGLGMIIANGVFDGEGLVADCHVLPATSVGASGGDEIRRYISESSKSRSSKHPTATIVFKGTRLGIRPAPVVASFSARGPNPETPEILKPDVIAPGLNILAAWPDRIGPSGVTSDNRRTEFNILSGTSMACPHVSGLAALLKAAHPDWSPAAIRSALMTTAYTVDNSGEPMMDESTGNTSSVTDYGSGHVHPTRAMDPGLVYDITSYDYINFLCNSNYTGTNIVTITRRQADCDGARRAGHVGNLNYPSFSVVFQQYGESKMSTHFIRTVTNVGDSDSVYEIKIRPPRGTTVTVEPEKLSFRRVGQKLSFVVRVKTTEVKLSPGATNVETGHMVWSDGKRNVTSPLVVTLQQPL

SEQ ID NO: 4472 - protein, 581 aa, Arabidopsis thaliana
  peptide (1)..(581): Ceres Seq. ID no. 15222870
  misc_feature (167)..(268): Pfam Name: Pfam Description:  PA domain
  misc_feature (1)..(581): NCBI GI NO: 16930701 NR Description: AT3g14240/MLN21_2 [Arabidopsis thaliana]
  misc_feature (1)..(581): NCBI GI NO: 18418552 NR Description: subtilisin-like serine protease
  misc_feature (1)..(576): NCBI GI NO: 14488360 NR Description: putative serine protease
  misc_feature (1)..(576): NCBI GI NO: 1076414 NR Description: subtilisin-like proteinase (EC 3
  misc_feature (1)..(554): NCBI GI NO: 18425181 NR Description: subtilisin-like serine protease ARA12
  misc_feature (1)..(554): NCBI GI NO: 20147211 NR Description: AT5g67360/K8K14_8 [Arabidopsis thaliana]
  misc_feature (1)..(573): NCBI GI NO: 7435657 NR Description: subtilisin-like proteinase (EC 3
  misc_feature (1)..(575): NCBI GI NO: 22331076 NR Description: subtilisin-like serine protease, putative
  misc_feature (1)..(581): NCBI GI NO: 18423316 NR Description: subtilisin-like serine protease
  misc_feature (1)..(575): NCBI GI NO: 18414296 NR Description: subtilisin-like serine protease
MNETTEFRSPRDSDGHGTHTASISAGRYVFPASTLGYAHGVAAGMAPKARLAAYKVCWNSGCYDSDILAAFDTAVADGVDVISLSVGGVVVPYYLDAIAIGAFGAIDRGIFVSASAGNGGPGALTVTNVAPWMTTVGAGTIDRDFPANVKLGNGKMISGVSVYGGPGLDPGRMYPLVYGGSLLGGDGYSSSLCLEGSLDPNLVTGKIVLCDRGINSRATKGEIVRKNGGLGMIIANGVFDGEGLVADCHVLPATSVGASGGDEIRRYISESSKSRSSKHPTATIVFKGTRLGIRPAPVVASFSARGPNPETPEILKPDVIAPGLNILAAWPDRIGPSGVTSDNRRTEFNILSGTSMACPHVSGLAALLKAAHPDWSPAAIRSALMTTAYTVDNSGEPMMDESTGNTSSVTDYGSGHVHPTRAMDPGLVYDITSYDYINFLCNSNYTGTNIVTITRRQADCDGARRAGHVGNLNYPSFSVVFQQYGESKMSTHFIRTVTNVGDSDSVYEIKIRPPRGTTVTVEPEKLSFRRVGQKLSFVVRVKTTEVKLSPGATNVETGHMVWSDGKRNVTSPLVVTLQQPL

SEQ ID NO: 4473 - protein, 537 aa, Arabidopsis thaliana
  peptide (1)..(537): Ceres Seq. ID no. 15222871
  misc_feature (123)..(224): Pfam Name: Pfam Description:  PA domain
  misc_feature (1)..(537): NCBI GI NO: 16930701 NR Description: AT3g14240/MLN21_2 [Arabidopsis thaliana]
  misc_feature (1)..(537): NCBI GI NO: 18418552 NR Description: subtilisin-like serine protease
  misc_feature (1)..(532): NCBI GI NO: 14488360 NR Description: putative serine protease
  misc_feature (1)..(532): NCBI GI NO: 1076414 NR Description: subtilisin-like proteinase (EC 3
  misc_feature (1)..(510): NCBI GI NO: 18425181 NR Description: subtilisin-like serine protease ARA12
  misc_feature (1)..(510): NCBI GI NO: 20147211 NR Description: AT5g67360/K8K14_8 [Arabidopsis thaliana]
  misc_feature (1)..(529): NCBI GI NO: 7435657 NR Description: subtilisin-like proteinase (EC 3
  misc_feature (1)..(531): NCBI GI NO: 22331076 NR Description: subtilisin-like serine protease, putative
  misc_feature (1)..(537): NCBI GI NO: 18423316 NR Description: subtilisin-like serine protease
  misc_feature (1)..(531): NCBI GI NO: 18414296 NR Description: subtilisin-like serine protease
MAPKARLAAYKVCWNSGCYDSDILAAFDTAVADGVDVISLSVGGVVVPYYLDAIAIGAFGAIDRGIFVSASAGNGGPGALTVTNVAPWMTTVGAGTIDRDFPANVKLGNGKMISGVSVYGGPGLDPGRMYPLVYGGSLLGGDGYSSSLCLEGSLDPNLVTGKIVLCDRGINSRATKGEIVRKNGGLGMIIANGVFDGEGLVADCHVLPATSVGASGGDEIRRYISESSKSRSSKHPTATIVFKGTRLGIRPAPVVASFSARGPNPETPEILKPDVIAPGLNILAAWPDRIGPSGVTSDNRRTEFNILSGTSMACPHVSGLAALLKAAHPDWSPAAIRSALMTTAYTVDNSGEPMMDESTGNTSSVTDYGSGHVHPTRAMDPGLVYDITSYDYINFLCNSNYTGTNIVTITRRQADCDGARRAGHVGNLNYPSFSVVFQQYGESKMSTHFIRTVTNVGDSDSVYEIKIRPPRGTTVTVEPEKLSFRRVGQKLSFVVRVKTTEVKLSPGATNVETGHMVWSDGKRNVTSPLVVTLQQPL

SEQ ID NO: 4474 - DNA, 1071 bp, Arabidopsis thaliana
  misc_feature (1)..(1071): Ceres Seq. ID no. 13487212
agagaaactttcaatttaattggttcaaaatcatcctaaatcgagtagattgttttgaatcgatttttgaagttgattcgaagttcagtgattgtgattagaatttataaccagacccagtttttgaggtgaagaaaaagcagattttgtgttcaatttccatggaagacgaaccaggaagcgaaaatgaagcagacaccatagttgcttcaccacttgcaaaatggagaatcgaattctcgaaatcgtttcagaattacttagacagatctgctcctaacattgttcgaagatggcttgtgactttagtcgctgcagtgatctatatctatagggtttactctgtttatggatacttcgttatctcttatggcttagctacttatatcttaaatctcttgattggtttcctttcccctaaagttgatcctgaacttgaagctttggatcctgattctttacctgttgatgagtctgatgagtataagccctttgttcgtcgtcttcctgagttcaagttctggtatgcagcgactaaagcatttgttgttgcatttgtgatgacattcttctctttcctggatgtgcctgtgttctggccgatcttgttgtgttactggttggttttgtattctttaactatgaaacgcttaatcgtgcacatgttcaagtatagatactttcctttcgatgtaagaaagcctgtgaagctgctcaagtttcttgtaaacagtgtcctgacctttttaagactcaagaagggtgatggtggagatgataggcccagcagcagcaattcatctcagggaaatgaaaaacaagattagatgcgaacagtagatcaggtactgatctcgacgtggtgataggcgaagcaagaaaggatacaaactaaggatatcaaagtaaaatatactatagccatgctggtggaataggaaaacaaagttcttgaagcttaacagaactaagaaatctctctgagttttgagtaatctcctgcattttccggtttttgcattgtaatgtgtaacagtgtattttacaattatacgtttaaatgaatttggg

SEQ ID NO: 4475 - protein, 221 aa, Arabidopsis thaliana
  peptide (1)..(221): Ceres Seq. ID no. 13487213
  misc_feature (5)..(186): Pfam Name: Pfam Description:  Rer1 family
  misc_feature (1)..(221): NCBI GI NO: 18398679 NR Description: integral membrane protein -related
  misc_feature (1)..(221): NCBI GI NO: 30680307 NR Description: integral membrane protein -related
  misc_feature (1)..(200): NCBI GI NO: 25411844 NR Description: probable integral membrane protein
  misc_feature (6)..(180): NCBI GI NO: 34894094 NR Description: putative Rer1A protein (AtRer1A)
  misc_feature (6)..(180): NCBI GI NO: 11281669 NR Description: endoplasmatic reticulum retrieval protein Rer1B
  misc_feature (6)..(180): NCBI GI NO: 15226596 NR Description: AtRer1B [Arabidopsis thaliana]
  misc_feature (3)..(180): NCBI GI NO: 15234975 NR Description: AtRer1A [Arabidopsis thaliana]
  misc_feature (27)..(122): NCBI GI NO: 35210534 NR Description: putative endoplasmatic reticulum retrieval protein Rer1B
  misc_feature (122)..(182): NCBI GI NO: 35210534 NR Description: putative endoplasmatic reticulum retrieval protein Rer1B
  misc_feature (26)..(182): NCBI GI NO: 7488292 NR Description: probable integral membrane protein At2g23310
MEDEPGSENEADTIVASPLAKWRIEFSKSFQNYLDRSAPNIVRRWLVTLVAAVIYIYRVYSVYGYFVISYGLATYILNLLIGFLSPKVDPELEALDPDSLPVDESDEYKPFVRRLPEFKFWYAATKAFVVAFVMTFFSFLDVPVFWPILLCYWLVLYSLTMKRLIVHMFKYRYFPFDVRKPVKLLKFLVNSVLTFLRLKKGDGGDDRPSSSNSSQGNEKQD

SEQ ID NO: 4476 - DNA, 1369 bp, Arabidopsis thaliana
  misc_feature (1)..(1369): Ceres Seq. ID no. 13491698
tggatttgagaaatctttttcatcatcatcactcttcctccttccccattgcttagtgttggttcccaagtcccaacctgcttcaatttaggtcgcaaacgatctcaattattcacaatccaatcttttcttcaatcgatcttcgtttctgatcaagctaataataagctaggaagagagtttagtgaagtagtgaagatgcagaatcagattgatatggtgaaggatgaagcggaagtagctgcatcgatttcagcaattaagggtgaagaatggggaaattgttcatcagtggaagatcaaccatcttttcaagaagaagaagctgctaaagttccttatgttggtgataaggaacctctgtctagtttagctgcagagtatcaatcagggagtcccattttgctggagaagattaagatactggacagtcaatatatcggaatccggcgaacaagaggagatggaaattgcttcttccgaagttttatgttctcttaccttgagcatatattggaatcacaagatcgtgctgaagtcgatcgtatcaaggtcaatgttgagaaatgtagaaagactctgcaaaacttaggttatacagattttacatttgaggacttctttgcgttgttccttgagcaactagatgacattctccaaggaactgaagagtctataagctacgatgagctggttaacagaagtagagatcagtcagtctcagattacattgtaatgttctttaggtttgttactgctggtgatatacgaacgcgtgccgattttttcgagccttttataacaggcttatcaaatgcaacagtggatcagttttgcaagtcctcggtcgaaccaatgggggaagagagtgaccatattcacataactgctttgtcggacgcacttggtgttgcaatccgtgttgtgtatcttgaccgtagctcatgtgatagtgggggcgtcactgtgaatcatcatgactttgttcctgtgggcattaccaatgagaaagatgaagaagcttctgctccatttataaccttgctgtatcgtccaggccattacgatatcctctaccccaagccatcttgtaaggtatcagacaatgtggggaaatgatcatttgacatatcgtaaatcgcattaggagacgtttacaaaaaactgtggtaatatggattcatgtggatgaaaccatggaacaatcaacaattaccccatcgatttgcattttgattatgataaaagaaccctttttgcaacactatagaatggaccgtctctttactttgatattgccttgtatttttcatgaatcatgataatatcctttatgatatttctgatgagcaagtggaatcaaagggtt

SEQ ID NO: 4477 - protein, 306 aa, Arabidopsis thaliana
  peptide (1)..(306): Ceres Seq. ID no. 13491699
  misc_feature (87)..(289): Pfam Name: Pfam Description:  OTU-like cysteine protease
  misc_feature (1)..(306): NCBI GI NO: 18396650 NR Description: expressed protein [Arabidopsis thaliana]
  misc_feature (1)..(306): NCBI GI NO: 21536634 NR Description: unknown [Arabidopsis thaliana]
  misc_feature (98)..(295): NCBI GI NO: 38175546 NR Description: putative ubiquitin-specific protease otubain 1
  misc_feature (32)..(294): NCBI GI NO: 19921060 NR Description: CG4968-PA [Drosophila melanogaster]
  misc_feature (35)..(293): NCBI GI NO: 27717729 NR Description: similar to expressed sequence AI850305
  misc_feature (35)..(266): NCBI GI NO: 6841176 NR Description: HSPC263 [Homo sapiens]
  misc_feature (35)..(266): NCBI GI NO: 13960159 NR Description: Unknown (protein for MGC:4584) [Homo sapiens]
  misc_feature (35)..(266): NCBI GI NO: 19527388 NR Description: expressed sequence AI850305 [Mus musculus]
  misc_feature (35)..(266): NCBI GI NO: 34861851 NR Description: similar to HSPC263 [Rattus norvegicus]
  misc_feature (35)..(266): NCBI GI NO: 8923114 NR Description: ubiquitin-specific protease otubain 1
MQNQIDMVKDEAEVAASISAIKGEEWGNCSSVEDQPSFQEEEAAKVPYVGDKEPLSSLAAEYQSGSPILLEKIKILDSQYIGIRRTRGDGNCFFRSFMFSYLEHILESQDRAEVDRIKVNVEKCRKTLQNLGYTDFTFEDFFALFLEQLDDILQGTEESISYDELVNRSRDQSVSDYIVMFFRFVTAGDIRTRADFFEPFITGLSNATVDQFCKSSVEPMGEESDHIHITALSDALGVAIRVVYLDRSSCDSGGVTVNHHDFVPVGITNEKDEEASAPFITLLYRPGHYDILYPKPSCKVSDNVGK

SEQ ID NO: 4478 - protein, 300 aa, Arabidopsis thaliana
  peptide (1)..(300): Ceres Seq. ID no. 13491700
  misc_feature (81)..(283): Pfam Name: Pfam Description:  OTU-like cysteine protease
  misc_feature (1)..(300): NCBI GI NO: 18396650 NR Description: expressed protein [Arabidopsis thaliana]
  misc_feature (1)..(300): NCBI GI NO: 21536634 NR Description: unknown [Arabidopsis thaliana]
  misc_feature (92)..(289): NCBI GI NO: 38175546 NR Description: putative ubiquitin-specific protease otubain 1
  misc_feature (26)..(288): NCBI GI NO: 19921060 NR Description: CG4968-PA [Drosophila melanogaster]
  misc_feature (29)..(287): NCBI GI NO: 27717729 NR Description: similar to expressed sequence AI850305
  misc_feature (29)..(260): NCBI GI NO: 6841176 NR Description: HSPC263 [Homo sapiens]
  misc_feature (29)..(260): NCBI GI NO: 13960159 NR Description: Unknown (protein for MGC:4584) [Homo sapiens]
  misc_feature (29)..(260): NCBI GI NO: 19527388 NR Description: expressed sequence AI850305 [Mus musculus]
  misc_feature (29)..(260): NCBI GI NO: 34861851 NR Description: similar to HSPC263 [Rattus norvegicus]
  misc_feature (29)..(260): NCBI GI NO: 8923114 NR Description: ubiquitin-specific protease otubain 1
MVKDEAEVAASISAIKGEEWGNCSSVEDQPSFQEEEAAKVPYVGDKEPLSSLAAEYQSGSPILLEKIKILDSQYIGIRRTRGDGNCFFRSFMFSYLEHILESQDRAEVDRIKVNVEKCRKTLQNLGYTDFTFEDFFALFLEQLDDILQGTEESISYDELVNRSRDQSVSDYIVMFFRFVTAGDIRTRADFFEPFITGLSNATVDQFCKSSVEPMGEESDHIHITALSDALGVAIRVVYLDRSSCDSGGVTVNHHDFVPVGITNEKDEEASAPFITLLYRPGHYDILYPKPSCKVSDNVGK

SEQ ID NO: 4479 - protein, 209 aa, Arabidopsis thaliana
  peptide (1)..(209): Ceres Seq. ID no. 13491701
  misc_feature (1)..(192): Pfam Name: Pfam Description:  OTU-like cysteine protease
  misc_feature (1)..(209): NCBI GI NO: 18396650 NR Description: expressed protein [Arabidopsis thaliana]
  misc_feature (1)..(209): NCBI GI NO: 21536634 NR Description: unknown [Arabidopsis thaliana]
  misc_feature (1)..(198): NCBI GI NO: 38175546 NR Description: putative ubiquitin-specific protease otubain 1
  misc_feature (1)..(197): NCBI GI NO: 19921060 NR Description: CG4968-PA [Drosophila melanogaster]
  misc_feature (1)..(196): NCBI GI NO: 27717729 NR Description: similar to expressed sequence AI850305
  misc_feature (1)..(169): NCBI GI NO: 6841176 NR Description: HSPC263 [Homo sapiens]
  misc_feature (1)..(169): NCBI GI NO: 19527388 NR Description: expressed sequence AI850305 [Mus musculus]
  misc_feature (1)..(169): NCBI GI NO: 13960159 NR Description: Unknown (protein for MGC:4584) [Homo sapiens]
  misc_feature (1)..(169): NCBI GI NO: 34861851 NR Description: similar to HSPC263 [Rattus norvegicus]
  misc_feature (1)..(169): NCBI GI NO: 8923114 NR Description: ubiquitin-specific protease otubain 1
MFSYLEHILESQDRAEVDRIKVNVEKCRKTLQNLGYTDFTFEDFFALFLEQLDDILQGTEESISYDELVNRSRDQSVSDYIVMFFRFVTAGDIRTRADFFEPFITGLSNATVDQFCKSSVEPMGEESDHIHITALSDALGVAIRVVYLDRSSCDSGGVTVNHHDFVPVGITNEKDEEASAPFITLLYRPGHYDILYPKPSCKVSDNVGK

SEQ ID NO: 4480 - DNA, 1621 bp, Arabidopsis thaliana
  misc_feature (1)..(1621): Ceres Seq. ID no. 12328588
aattgatgctatgacaaacaacaacagcaagaaatttgtgtgagagtagagagtcttgcttcagttgaatcaaagattggtcctttttttttcgttttctctttcctgctttttttgtttgtagtttctgatctctcaggaaggctttttataaatttgccctcaatttctccgtccctactactctttttgatcaatttctacgggaaaaagcaccaatctttaaacccgggcatgtccttgtaatcgagtatgttgtgtaagtgatgaatttgtggtgagatctggtgagaagtttcctcttttttctcagattgcggtaaaaaaaaagagtttttaataaggaagagattgagattagattttatcgcttttgtttgtgtgatatgggtaacgtgaacgcgagagaagaagcgaatagtaacaacgcttctgctgttgaagacgaagacgctgagatttgttctcgtgaagctatgtctgctgcttctgatggtaaccatgtcgctcctcctgagcttatgggtcaatctcctcctcatagccctcgagctactcagtctcctctcatgtttgctcctcaggttccggtgcttccacttcaaagacctgatgaaattcatatccctaatccttcgtggatgcaatcgccatcttcgttgtatgaagaagcttctaacgaacaaggaatccctacgatgatcacttggtgtcatggaggcaaggagattgctgtggagggatcatgggataattggaagacaagaagtcggctgcagagatctgggaaggacttcactatcatgaaagtgttaccttcaggagtctatgagtacaggttcattgtggatggacagtggaggcatgcccctgagctccctttagctagagatgatgctgggaacactttcaacattttggatcttcaggactatgttcctgaagacattcaaagcatatctgggtttgagcctccgcaatctccagagaatagttacagcaacttgcttctcggagctgaggactactctaaagaaccgcctgtggttcccccgcacctacaaatgacactgctgaacttgccggcagccaatcctgacattccatctccgctgccgagacctcagcatgtcattctcaatcatctttacatgcagaagggcaaaagtggtccttctgtggttgcgcttggttccactcaccgatttctagcaaagtatgtaactgtggtgctctacaaatccctgcagaggtgagtgaagatgatgcaattccaatgggtagttagcatgtggatcctcggcatgctcttatctattttggtgttaaaacgttaactcatggagtatgggtgaggctatatagaaaggagacacacgaagagagttatttccaggcaaagtattccctcgatacagcgaattttgttgtctttaaaagttgtcaataaggtttaccaacagaatgaagatgcagtattcagtcagtgtctgtgtaatcttttgatttgaagacttcatcatctgttttttttttagcatagaagaatgcaggaacgacttcacttgtaaaaccggcaaatcttttttatggttttgttttggggctttcaagttttcac

SEQ ID NO: 4481 - protein, 289 aa, Arabidopsis thaliana
  peptide (1)..(289): Ceres Seq. ID no. 12328589
  misc_feature (197)..(287): Pfam Name: Pfam Description:  5'-AMP-activated protein kinase
  misc_feature (1)..(289): NCBI GI NO: 6686784 NR Description: AKIN beta2 [Arabidopsis thaliana]
  misc_feature (31)..(289): NCBI GI NO: 15234895 NR Description: kinase like protein; protein id: At4g16360.1
  misc_feature (62)..(289): NCBI GI NO: 11935162 NR Description: SNF1-related kinase complex anchoring protein SIP1
  misc_feature (1)..(289): NCBI GI NO: 5702015 NR Description: GAL83 protein [Solanum tuberosum]
  misc_feature (1)..(289): NCBI GI NO: 15242175 NR Description: AKIN beta1; protein id: At5g21170
  misc_feature (1)..(289): NCBI GI NO: 6686782 NR Description: AKIN gamma [Arabidopsis thaliana]
  misc_feature (38)..(247): NCBI GI NO: 29725558 NR Description: SNF1 kinase complex anchoring protein
  misc_feature (49)..(289): NCBI GI NO: 22324436 NR Description: AKIN beta1-like protein
  misc_feature (29)..(287): NCBI GI NO: 37805455 NR Description: Prkab2 protein [Mus musculus]
  misc_feature (29)..(287): NCBI GI NO: 12018316 NR Description: AMP-activated protein kinase beta-2 regulatory subunit
MGNVNAREEANSNNASAVEDEDAEICSREAMSAASDGNHVAPPELMGQSPPHSPRATQSPLMFAPQVPVLPLQRPDEIHIPNPSWMQSPSSLYEEASNEQGIPTMITWCHGGKEIAVEGSWDNWKTRSRLQRSGKDFTIMKVLPSGVYEYRFIVDGQWRHAPELPLARDDAGNTFNILDLQDYVPEDIQSISGFEPPQSPENSYSNLLLGAEDYSKEPPVVPPHLQMTLLNLPAANPDIPSPLPRPQHVILNHLYMQKGKSGPSVVALGSTHRFLAKYVTVVLYKSLQR

SEQ ID NO: 4482 - protein, 259 aa, Arabidopsis thaliana
  peptide (1)..(259): Ceres Seq. ID no. 12328590
  misc_feature (167)..(257): Pfam Name: Pfam Description:  5'-AMP-activated protein kinase
  misc_feature (1)..(259): NCBI GI NO: 6686784 NR Description: AKIN beta2 [Arabidopsis thaliana]
  misc_feature (1)..(259): NCBI GI NO: 15234895 NR Description: kinase like protein; protein id: At4g16360.1
  misc_feature (32)..(259): NCBI GI NO: 11935162 NR Description: SNF1-related kinase complex anchoring protein SIP1
  misc_feature (1)..(259): NCBI GI NO: 5702015 NR Description: GAL83 protein [Solanum tuberosum]
  misc_feature (1)..(259): NCBI GI NO: 15242175 NR Description: AKIN beta1; protein id: At5g21170
  misc_feature (1)..(259): NCBI GI NO: 6686782 NR Description: AKIN gamma [Arabidopsis thaliana]
  misc_feature (8)..(217): NCBI GI NO: 29725558 NR Description: SNF1 kinase complex anchoring protein
  misc_feature (19)..(259): NCBI GI NO: 22324436 NR Description: AKIN beta1-like protein
  misc_feature (1)..(257): NCBI GI NO: 37805455 NR Description: Prkab2 protein [Mus musculus]
  misc_feature (1)..(257): NCBI GI NO: 12018316 NR Description: AMP-activated protein kinase beta-2 regulatory subunit
MSAASDGNHVAPPELMGQSPPHSPRATQSPLMFAPQVPVLPLQRPDEIHIPNPSWMQSPSSLYEEASNEQGIPTMITWCHGGKEIAVEGSWDNWKTRSRLQRSGKDFTIMKVLPSGVYEYRFIVDGQWRHAPELPLARDDAGNTFNILDLQDYVPEDIQSISGFEPPQSPENSYSNLLLGAEDYSKEPPVVPPHLQMTLLNLPAANPDIPSPLPRPQHVILNHLYMQKGKSGPSVVALGSTHRFLAKYVTVVLYKSLQR

SEQ ID NO: 4483 - protein, 244 aa, Arabidopsis thaliana
  peptide (1)..(244): Ceres Seq. ID no. 12328591
  misc_feature (152)..(242): Pfam Name: Pfam Description:  5'-AMP-activated protein kinase
  misc_feature (1)..(244): NCBI GI NO: 6686784 NR Description: AKIN beta2 [Arabidopsis thaliana]
  misc_feature (1)..(244): NCBI GI NO: 15234895 NR Description: kinase like protein; protein id: At4g16360.1
  misc_feature (17)..(244): NCBI GI NO: 11935162 NR Description: SNF1-related kinase complex anchoring protein SIP1
  misc_feature (1)..(244): NCBI GI NO: 5702015 NR Description: GAL83 protein [Solanum tuberosum]
  misc_feature (1)..(244): NCBI GI NO: 15242175 NR Description: AKIN beta1; protein id: At5g21170
  misc_feature (1)..(244): NCBI GI NO: 6686782 NR Description: AKIN gamma [Arabidopsis thaliana]
  misc_feature (1)..(202): NCBI GI NO: 29725558 NR Description: SNF1 kinase complex anchoring protein
  misc_feature (4)..(244): NCBI GI NO: 22324436 NR Description: AKIN beta1-like protein
  misc_feature (1)..(242): NCBI GI NO: 37805455 NR Description: Prkab2 protein [Mus musculus]
  misc_feature (1)..(242): NCBI GI NO: 12018316 NR Description: AMP-activated protein kinase beta-2 regulatory subunit
MGQSPPHSPRATQSPLMFAPQVPVLPLQRPDEIHIPNPSWMQSPSSLYEEASNEQGIPTMITWCHGGKEIAVEGSWDNWKTRSRLQRSGKDFTIMKVLPSGVYEYRFIVDGQWRHAPELPLARDDAGNTFNILDLQDYVPEDIQSISGFEPPQSPENSYSNLLLGAEDYSKEPPVVPPHLQMTLLNLPAANPDIPSPLPRPQHVILNHLYMQKGKSGPSVVALGSTHRFLAKYVTVVLYKSLQR

SEQ ID NO: 4484 - DNA, 1758 bp, Arabidopsis thaliana; identical to SEQ ID NO: 2771
  misc_feature (1)..(1758): Ceres Seq. ID no. 13580639

SEQ ID NO: 4485 - protein, 474 aa, Arabidopsis thaliana; identical to SEQ ID NO: 2772
  peptide (1)..(474): Ceres Seq. ID no. 13580640
  misc_feature (87)..(471): Pfam Name: Pfam Description:  Eukaryotic aspartyl protease
  misc_feature (1)..(474): NCBI GI NO: 22326716 NR Description: nucleoid DNA-binding protein cnd41 - like protein
  misc_feature (59)..(474): NCBI GI NO: 11358588 NR Description: nucleoid DNA-binding protein cnd41-like protein -Arabidopsis thaliana
  misc_feature (1)..(473): NCBI GI NO: 24417232 NR Description: unknown [Arabidopsis thaliana]
  misc_feature (1)..(473): NCBI GI NO: 15238250 NR Description: nucleoid DNA-binding protein cnd41 - like protein
  misc_feature (12)..(474): NCBI GI NO: 7489168 NR Description: nucleoid DNA-binding protein cnd41
  misc_feature (30)..(474): NCBI GI NO: 24430421 NR Description: 41 kD chloroplast nucleoid DNA binding protein
  misc_feature (1)..(473): NCBI GI NO: 21595063 NR Description: putative aspartyl protease [Arabidopsis thaliana]
  misc_feature (1)..(473): NCBI GI NO: 18412482 NR Description: aspartyl protease -related [Arabidopsis thaliana]
  misc_feature (54)..(473): NCBI GI NO: 25406599 NR Description: probable aspartyl proteinase, 105611-106921
  misc_feature (60)..(473): NCBI GI NO: 34912520 NR Description: chloroplast nucleoid DNA-binding protein cnd41-like

SEQ ID NO: 4486 - DNA, 1309 bp, Arabidopsis thaliana
  misc_feature (1)..(1309): Ceres Seq. ID no. 12330719
cacttttaattaaaacggtgccgtttctcccaggaacctctttcggtcggacgagaaagccaaaaacgtagcaaaacatcgatcctccgagtccgagattcaggaattggtaatggcggctatgtcagcggttctttctctgggtttaggaacactccgcccttcgcatcgttccttgtcctgtttcgattccctccggcaccaccagacatcttttctccgttgccaccaaagtctcatctctagaaataccacgaggtctccgctcaacaagattcttcaggcttgccttcaatccagtggattctgcaaatggtgatgctttggtgtcatcatccgatgaaagttctgagattgtatttatgggtaccggaaccagtgaagggattcctcgtgtcagctgcctcactaatcctttgaaaacatgttcggtatgcacaaaagcaacagaaccaggaaacagaaataggagacttaacaccagcattcttgttcggtacattagaccatccggaacaagtaatatcctcattgattgtggcaagttcttctaccatagtgcccttcgatggtttcccaccttcgggctaagaacacttgatgcagttgtaattactcattctcatgctgacgcaattggaggtctctgaaactgacaagtcttgatgatcttcgtgattggacaaacaatgtccaacctcacattccaatttacactgctatacgtgatctcgaggtgatgaagaagacccattattacttggttgatacaagtgtcatcatacccggagctgcagtctcagagttggagtttaaagtcatacacgaggaccagccatttgtggtaaacgatctgaagatcaccccattacctgtatggcatggaagtaactaccgttcccttggtttccgctttggtaatgtctgctacataagcgatgtcagtgacataccggaagaaacctacccgctccttaaagactgtgatctcctaattatggatgctttgaggcctgaccggtcttcagcaacacactttggcctcccaagggcgttagaggaagttcggaaaatcaaaccaaaaagaacccttttcaccggaatgatgcatttgatggaccacgagaaggtgagcgaagaactggagaaacttaggaacacagaaggcctcgatatccaactgagctacgatggtcttcgtgtaccaatctcaatttaactcggtttattccttttttccctggtataaccggtttataattatatacataaaataaatttccttttttgtaatgacctgtatatgtgc

SEQ ID NO: 4487 - protein, 159 aa, Arabidopsis thaliana
  peptide (1)..(159): Ceres Seq. ID no. 12330720
  misc_feature (1)..(122): Pfam Name: Pfam Description:  Metallo-beta-lactamase superfamily
  misc_feature (1)..(159): NCBI GI NO: 9294602 NR Description: hydrolase-like protein [Arabidopsis thaliana]
  misc_feature (1)..(113): NCBI GI NO: 15231379 NR Description: hydrolase, putative; protein id: At3g13800.1
  misc_feature (112)..(159): NCBI GI NO: 15231379 NR Description: hydrolase, putative; protein id: At3g13800.1
  misc_feature (1)..(159): NCBI GI NO: 25513552 NR Description: 36
  misc_feature (1)..(159): NCBI GI NO: 30691663 NR Description: expressed protein [Arabidopsis thaliana]
  misc_feature (1)..(152): NCBI GI NO: 19075752 NR Description: putative hydrolase [Schizosaccharomyces pombe]
  misc_feature (1)..(135): NCBI GI NO: 15236346 NR Description: putative hydrolase; protein id: At4g03610.1
  misc_feature (1)..(157): NCBI GI NO: 15594878 NR Description: phnP protein (phnP) [Borrelia burgdorferi]
  misc_feature (1)..(155): NCBI GI NO: 29346777 NR Description: hydrolase, metal-dependent
  misc_feature (1)..(159): NCBI GI NO: 17987268 NR Description: PHNP PROTEIN [Brucella melitensis]
MKKTHYYLVDTSVIIPGAAVSELEFKVIHEDQPFVVNDLKITPLPVWHGSNYRSLGFRFGNVCYISDVSDIPEETYPLLKDCDLLIMDALRPDRSSATHFGLPRALEEVRKIKPKRTLFTGMMHLMDHEKVSEELEKLRNTEGLDIQLSYDGLRVPISI

SEQ ID NO: 4488 - protein, 95 aa, Arabidopsis thaliana
  peptide (1)..(95): Ceres Seq. ID no. 12330721
  misc_feature (38)..(95): Pfam Name: Pfam Description:  Metallo-beta-lactamase superfamily
  misc_feature (1)..(95): NCBI GI NO: 9294602 NR Description: hydrolase-like protein [Arabidopsis thaliana]
  misc_feature (1)..(95): NCBI GI NO: 15231379 NR Description: hydrolase, putative; protein id: At3g13800.1
  misc_feature (1)..(95): NCBI GI NO: 25513552 NR Description: 36
  misc_feature (1)..(95): NCBI GI NO: 30691663 NR Description: expressed protein [Arabidopsis thaliana]
  misc_feature (1)..(95): NCBI GI NO: 19075752 NR Description: putative hydrolase [Schizosaccharomyces pombe]
MGTGTSEGIPRVSCLTNPLKTCSVCTKATEPGNRNRRLNTSILVRYIRPSGTSNILIDCGKFFYHSALRWFPTFGLRTLDAVVITHSHADAIGGL

SEQ ID NO: 4489 - DNA, 1094 bp, Arabidopsis thaliana
  misc_feature (1)..(1094): Ceres Seq. ID no. 12422438
gcaattcaccggaacttagccgacgagcactgatcaaatcaaccggagaagcgaagctatagatctactatctccttcacagttgctatcagagatgtataataatatgggaccccggcctggaatggcaatgcctcaggcaaatcctcagcctagcccatttgggaatccgttctctggacctggctctggacttatccggagtggcttgggagcttatggggagaagattttcggttctagctctgagtatgtgcagagcaacataagtcgctacttctccgatcctcaatactattttcaagtgaatgaccagtatgtgaggaacaagttgaagattgttctacttccattccttcacaggggacactggactcgaatatcagaaccagttgggggtagactttcatacaaaccaccgatatacgatataaatgcaccagacttatacattccgctcatggcctttggcacttacgttgttcttgctggtttgtcactaggactctatggaaagtttactccagaagctctgaactggctttttgtgaaaggaatggttggctggtttttgcaagtgatgctgctgaagataacattgctttcacttggaagcggagaagcccctctcttggatattgtggcatatgcaggctatactttcacaggcctttgtctagctgttcttggcaagataatctggggatactcttactatgttttgattccgtggacctgcttatgcactggggttttcttagtgaagacaatgaagcgagttctctttgcagaatctaggagttatgactcaagcaggcatcactatctcttgatctttgttgctttagcccagtttcctcttttgatctggcttggtaacattagtgtgaattggctattttgaaacgcagtacgtttatattgttgtgaaaaacacctctgaggttatgtagcagaatttggaatgtcctcctgatggatatattatatggtagttgagctttttttggtttagacttctgtatgtcaaacatcaatatggaaagaaaagtgttatctctctttcatatcttcttttatgaatctcacttttc

SEQ ID NO: 4490 - protein, 269 aa, Arabidopsis thaliana
  peptide (1)..(269): Ceres Seq. ID no. 12422439
  misc_feature (1)..(269): NCBI GI NO: 30695009 NR Description: expressed protein [Arabidopsis thaliana]
  misc_feature (11)..(269): NCBI GI NO: 11282553 NR Description: hypothetical protein T16L24
  misc_feature (11)..(269): NCBI GI NO: 33589682 NR Description: At3g59500 [Arabidopsis thaliana]
  misc_feature (1)..(268): NCBI GI NO: 18397705 NR Description: expressed protein; protein id: At1g30890
  misc_feature (1)..(268): NCBI GI NO: 9755388 NR Description: F17F8.24 [Arabidopsis thaliana]
  misc_feature (1)..(263): NCBI GI NO: 38346458 NR Description: OSJNBa0019G23.6
  misc_feature (129)..(263): NCBI GI NO: 10241632 NR Description: putative protein
  misc_feature (10)..(260): NCBI GI NO: 14043299 NR Description: Similar to RIKEN cDNA 9430029K10 gene
  misc_feature (10)..(260): NCBI GI NO: 24308364 NR Description: similar to putative transmembrane protein
  misc_feature (19)..(260): NCBI GI NO: 12861030 NR Description: unnamed protein product [Mus musculus]
MYNNMGPRPGMAMPQANPQPSPFGNPFSGPGSGLIRSGLGAYGEKIFGSSSEYVQSNISRYFSDPQYYFQVNDQYVRNKLKIVLLPFLHRGHWTRISEPVGGRLSYKPPIYDINAPDLYIPLMAFGTYVVLAGLSLGLYGKFTPEALNWLFVKGMVGWFLQVMLLKITLLSLGSGEAPLLDIVAYAGYTFTGLCLAVLGKIIWGYSYYVLIPWTCLCTGVFLVKTMKRVLFAESRSYDSSRHHYLLIFVALAQFPLLIWLGNISVNWLF

SEQ ID NO: 4491 - protein, 265 aa, Arabidopsis thaliana
  peptide (1)..(265): Ceres Seq. ID no. 12422440
  misc_feature (1)..(265): NCBI GI NO: 30695009 NR Description: expressed protein [Arabidopsis thaliana]
  misc_feature (7)..(265): NCBI GI NO: 11282553 NR Description: hypothetical protein T16L24
  misc_feature (7)..(265): NCBI GI NO: 33589682 NR Description: At3g59500 [Arabidopsis thaliana]
  misc_feature (1)..(264): NCBI GI NO: 18397705 NR Description: expressed protein; protein id: At1g30890
  misc_feature (1)..(264): NCBI GI NO: 9755388 NR Description: F17F8.24 [Arabidopsis thaliana]
  misc_feature (1)..(259): NCBI GI NO: 38346458 NR Description: OSJNBa0019G23.6
  misc_feature (125)..(259): NCBI GI NO: 10241632 NR Description: putative protein
  misc_feature (6)..(256): NCBI GI NO: 14043299 NR Description: Similar to RIKEN cDNA 9430029K10 gene
  misc_feature (6)..(256): NCBI GI NO: 24308364 NR Description: similar to putative transmembrane protein
  misc_feature (15)..(256): NCBI GI NO: 12861030 NR Description: unnamed protein product [Mus musculus]
MGPRPGMAMPQANPQPSPFGNPFSGPGSGLIRSGLGAYGEKIFGSSSEYVQSNISRYFSDPQYYFQVNDQYVRNKLKIVLLPFLHRGHWTRISEPVGGRLSYKPPIYDINAPDLYIPLMAFGTYVVLAGLSLGLYGKFTPEALNWLFVKGMVGWFLQVMLLKITLLSLGSGEAPLLDIVAYAGYTFTGLCLAVLGKIIWGYSYYVLIPWTCLCTGVFLVKTMKRVLFAESRSYDSSRHHYLLIFVALAQFPLLIWLGNISVNWLF

SEQ ID NO: 4492 - protein, 259 aa, Arabidopsis thaliana
  peptide (1)..(259): Ceres Seq. ID no. 12422441
  misc_feature (1)..(259): NCBI GI NO: 30695009 NR Description: expressed protein [Arabidopsis thaliana]
  misc_feature (1)..(259): NCBI GI NO: 11282553 NR Description: hypothetical protein T16L24
  misc_feature (1)..(259): NCBI GI NO: 33589682 NR Description: At3g59500 [Arabidopsis thaliana]
  misc_feature (1)..(258): NCBI GI NO: 18397705 NR Description: expressed protein; protein id: At1g30890
  misc_feature (1)..(258): NCBI GI NO: 9755388 NR Description: F17F8.24 [Arabidopsis thaliana]
  misc_feature (1)..(253): NCBI GI NO: 38346458 NR Description: OSJNBa0019G23.6
  misc_feature (119)..(253): NCBI GI NO: 10241632 NR Description: putative protein
  misc_feature (1)..(250): NCBI GI NO: 14043299 NR Description: Similar to RIKEN cDNA 9430029K10 gene
  misc_feature (1)..(250): NCBI GI NO: 24308364 NR Description: similar to putative transmembrane protein
  misc_feature (9)..(250): NCBI GI NO: 12861030 NR Description: unnamed protein product [Mus musculus]
MAMPQANPQPSPFGNPFSGPGSGLIRSGLGAYGEKIFGSSSEYVQSNISRYFSDPQYYFQVNDQYVRNKLKIVLLPFLHRGHWTRISEPVGGRLSYKPPIYDINAPDLYIPLMAFGTYVVLAGLSLGLYGKFTPEALNWLFVKGMVGWFLQVMLLKITLLSLGSGEAPLLDIVAYAGYTFTGLCLAVLGKIIWGYSYYVLIPWTCLCTGVFLVKTMKRVLFAESRSYDSSRHHYLLIFVALAQFPLLIWLGNISVNWLF

SEQ ID NO: 4493 - DNA, 1341 bp, Arabidopsis thaliana
  misc_feature (1)..(1341): Ceres Seq. ID no. 12371095
aaaatgacagtaacaatataagtgaaaaacataatttcattagctttaagtcacgaggcacgaccattgaacatgcgagaaacgcgtgtacccaaactcattggttagttttgagagcagcagcgtattcttacacagttctcatatgtttaactccattcactctctcaaaaggttcccatctttatcaaaagacttgctaaaatcttctctttctttctcctttcatcacactcttgagtccttgtctctgtttttagtcacctgaagaaaaaatatatggagaacggagaatctaaccaagaaaatctcaaatctctcaaccacgacgaatcgcttaagaagccatctgcttcctccgtcgttgtagataggttaaaacgtgatgaatggagcgaaggagctgtttcgactttactcgaagcttatgagtcaaaatgggttctcagaaacagagccaagcttaagggacaagactgggaagacgtggctaaacacgtgtcctcacgcgccactcacaccaagtcaccaaagactcagactcagtgcaagaacaagatcgagtccatgaagaaacggtaccgttctgagtccgctactgctgatggctcctcttggcctctttatcctcgtcttgatcatctcctacgtggaactcagcctcagcctcagcctcaagctgttctgcctctgaattgctctgttcctctgctcttacttgagccgccgttgcctgcggtggctcatccgccgcagatttcttacggatccaacggcgtcggcaagattcctaaggaagacggattcaagccggagaacaaaccggaaaaagatgcggagatggatacagacagtagtacgcctgtggttaaaacgaaggtgagagggaagaaagtgaagagaagatataaagaagagaaggaagagatcgccggaagtatacggtggttagcggaggtggtgatgagatcagagagagcaagaatggagacgatgaaagagatagagagaatgagagctgaagctgaagctaagagaggagaattggatttgaaacggacggagataatggcgaatactcagctagagattgctagaatctttgctgctgcagcttcttctggacagaacaaaggtgttgattcttcattaaggatcggaagaaattgagttctgctttttatattggagactcaagatgttgtgtgtacataccaagtgttgttttgtcaaaatttctcagagagagaccaataattgtttcctggggtagatggcgatttccacatttctaccagcaaatgtatgcttttgccatatgaatatcatcaatctttagtc

SEQ ID NO: 4494 - protein, 296 aa, Arabidopsis thaliana
  peptide (1)..(296): Ceres Seq. ID no. 12371096
  misc_feature (1)..(296): NCBI GI NO: 15232501 NR Description: putative protein; protein id: At3g54390
  misc_feature (22)..(281): NCBI GI NO: 18149189 NR Description: 6b-interacting protein 1 [Nicotiana tabacum]
  misc_feature (34)..(274): NCBI GI NO: 38344545 NR Description: OSJNBa0027P08.13
  misc_feature (32)..(268): NCBI GI NO: 37536908 NR Description: hypothetical protein
  misc_feature (38)..(135): NCBI GI NO: 26451533 NR Description: unknown protein [Arabidopsis thaliana]
  misc_feature (215)..(280): NCBI GI NO: 26451533 NR Description: unknown protein [Arabidopsis thaliana]
  misc_feature (23)..(123): NCBI GI NO: 10178132 NR Description: gb|AAF01512
  misc_feature (23)..(123): NCBI GI NO: 18414919 NR Description: putative protein; protein id: At5g05550
  misc_feature (23)..(123): NCBI GI NO: 30680994 NR Description: expressed protein [Arabidopsis thaliana]
  misc_feature (15)..(120): NCBI GI NO: 15224948 NR Description: unknown protein; protein id: At2g44730.1
MENGESNQENLKSLNHDESLKKPSASSVVVDRLKRDEWSEGAVSTLLEAYESKWVLRNRAKLKGQDWEDVAKHVSSRATHTKSPKTQTQCKNKIESMKKRYRSESATADGSSWPLYPRLDHLLRGTQPQPQPQAVLPLNCSVPLLLLEPPLPAVAHPPQISYGSNGVGKIPKEDGFKPENKPEKDAEMDTDSSTPVVKTKVRGKKVKRRYKEEKEEIAGSIRWLAEVVMRSERARMETMKEIERMRAEAEAKRGELDLKRTEIMANTQLEIARIFAAAASSGQNKGVDSSLRIGRN

SEQ ID NO: 4495 - protein, 200 aa, Arabidopsis thaliana
  peptide (1)..(200): Ceres Seq. ID no. 12371097
  misc_feature (1)..(200): NCBI GI NO: 15232501 NR Description: putative protein; protein id: At3g54390
  misc_feature (1)..(185): NCBI GI NO: 18149189 NR Description: 6b-interacting protein 1 [Nicotiana tabacum]
  misc_feature (1)..(178): NCBI GI NO: 38344545 NR Description: OSJNBa0027P08.13
  misc_feature (1)..(172): NCBI GI NO: 37536908 NR Description: hypothetical protein
  misc_feature (1)..(39): NCBI GI NO: 26451533 NR Description: unknown protein [Arabidopsis thaliana]
  misc_feature (119)..(184): NCBI GI NO: 26451533 NR Description: unknown protein [Arabidopsis thaliana]
  misc_feature (1)..(27): NCBI GI NO: 10178132 NR Description: gb|AAF01512
  misc_feature (1)..(27): NCBI GI NO: 18414919 NR Description: putative protein; protein id: At5g05550
  misc_feature (1)..(27): NCBI GI NO: 30680994 NR Description: expressed protein [Arabidopsis thaliana]
  misc_feature (1)..(24): NCBI GI NO: 15224948 NR Description: unknown protein; protein id: At2g44730.1
MKKRYRSESATADGSSWPLYPRLDHLLRGTQPQPQPQAVLPLNCSVPLLLLEPPLPAVAHPPQISYGSNGVGKIPKEDGFKPENKPEKDAEMDTDSSTPVVKTKVRGKKVKRRYKEEKEEIAGSIRWLAEVVMRSERARMETMKEIERMRAEAEAKRGELDLKRTEIMANTQLEIARIFAAAASSGQNKGVDSSLRIGRN

SEQ ID NO: 4496 - DNA, 1509 bp, Arabidopsis thaliana
  misc_feature (1)..(1509): Ceres Seq. ID no. 13491876
tctcgctatcaatcacacacatgcaacagtacaagatttgtcagagtccacagaaatcgatcttttcgagtcaagattttcagctctgttcaggactccggcggagatgaagagtgtgttgcgtattgcggcggcgatattctggctttggctgtttatcgtgttaggtgtgattgggagtgggaatgtgagagatacagacgatgagatctcgttactcgaaagtcaattggtggtgacatctccgtcgcagcttcttatggtgcctctcactttgattcaggctgctgcctccaaaggagctgtgtgcctggatggaacactacctggttatcatctacaccctggttctggatcaggagctaaccggtggctcatccaactcgagggtggaggatggtgcaacacacgtaggagctgtatcttccggaaaaccactcgccgtggttcatcaaatcatatggagaaagttttggccttcactggaatattgagcaataaatctaatgagaatcctgacttcttcaactggaacagagtcaaattgcgttactgcgatggtgcctctttcaccggcgatagtcaggatgagagctcacaactttactatagaggacaacgaatctggcattcagctatggaagaactactctctaaaggcatgcaaaaagcagaacaggctctactttctggatgttcagctgggggattagcttccatcctacactgcgatcagttcaaggaactatttccgggcactacgacagtgaaatgcttaagtgatgctggaatgtttatggatgcagtggatgtctctgggggccactcgctccggaaaatgttccaaggtgttgttacagtacagaacctccaaaaggaactgtccactgcttgtacaaagcatttggatccaacttcgtgcttctttccccagaacttggtttcaggcattaagactccaatgtttcttctcaatgcagcatatgacgcttggcaggtacaagagagtttagctccaccatcagttgacctaagcggctcttggaaggcatgcaaatctgatcactcgcattgtaattcatctcagatccagttcttccaagacttcaggactcatatggtagatgctgtaaagtctttcgcgacatcgacacataacggtgtgttcataaactcatgcttcgctcactgccaatctgaaagacaggacacttggtatgcaccagattctcctactcttcatggcaagaccgttgctgaatctgttggtgattggtactttgacagaacaacagtgaaagccattgactgtccttacccctgtgacaaaacatgtcacaatctcatcttcaagtgagatgacaaatgacatatactcttcaaactcaaacagcttacttgattcttataccatactaccattagtaacaacaattcctgaaaaaccgcatttcatcttttacataatatgtgctattttgactcaaataaagttagtttttcgtgtgt

SEQ ID NO: 4497 - protein, 451 aa, Arabidopsis thaliana
  peptide (1)..(451): Ceres Seq. ID no. 13491877
  misc_feature (72)..(435): Pfam Name: Pfam Description:  Pectinacetylesterase
  misc_feature (36)..(451): NCBI GI NO: 15226462 NR Description: pectinacetylesterase, putative
  misc_feature (59)..(451): NCBI GI NO: 28392968 NR Description: putative pectinacetylesterase
  misc_feature (59)..(451): NCBI GI NO: 15228677 NR Description: pectinacetylesterase family [Arabidopsis thaliana]
  misc_feature (46)..(451): NCBI GI NO: 25347293 NR Description: probable pectinacetylesterase precursor T8L23.6
  misc_feature (46)..(451): NCBI GI NO: 30696158 NR Description: pectinacetylesterase, putative
  misc_feature (46)..(451): NCBI GI NO: 21703105 NR Description: At1g57590/T8L23_6 [Arabidopsis thaliana]
  misc_feature (86)..(451): NCBI GI NO: 18397406 NR Description: pectinacetylesterase, putative
  misc_feature (86)..(451): NCBI GI NO: 7487997 NR Description: pectin acetylesterase homolog F21E10
  misc_feature (50)..(451): NCBI GI NO: 34913332 NR Description: putative pectin acetylesterase precursor
  misc_feature (154)..(451): NCBI GI NO: 30690308 NR Description: pectinacetylesterase, putative
LAINHTHATVQDLSESTEIDLFESRFSALFRTPAEMKSVLRIAAAIFWLWLFIVLGVIGSGNVRDTDDEISLLESQLVVTSPSQLLMVPLTLIQAAASKGAVCLDGTLPGYHLHPGSGSGANRWLIQLEGGGWCNTRRSCIFRKTTRRGSSNHMEKVLAFTGILSNKSNENPDFFNWNRVKLRYCDGASFTGDSQDESSQLYYRGQRIWHSAMEELLSKGMQKAEQALLSGCSAGGLASILHCDQFKELFPGTTTVKCLSDAGMFMDAVDVSGGHSLRKMFQGVVTVQNLQKELSTACTKHLDPTSCFFPQNLVSGIKTPMFLLNAAYDAWQVQESLAPPSVDLSGSWKACKSDHSHCNSSQIQFFQDFRTHMVDAVKSFATSTHNGVFINSCFAHCQSERQDTWYAPDSPTLHGKTVAESVGDWYFDRTTVKAIDCPYPCDKTCHNLIFK

SEQ ID NO: 4498 - protein, 416 aa, Arabidopsis thaliana
  peptide (1)..(416): Ceres Seq. ID no. 13491878
  misc_feature (37)..(400): Pfam Name: Pfam Description:  Pectinacetylesterase
  misc_feature (1)..(416): NCBI GI NO: 15226462 NR Description: pectinacetylesterase, putative
  misc_feature (24)..(416): NCBI GI NO: 28392968 NR Description: putative pectinacetylesterase
  misc_feature (24)..(416): NCBI GI NO: 15228677 NR Description: pectinacetylesterase family [Arabidopsis thaliana]
  misc_feature (11)..(416): NCBI GI NO: 25347293 NR Description: probable pectinacetylesterase precursor T8L23.6
  misc_feature (11)..(416): NCBI GI NO: 30696158 NR Description: pectinacetylesterase, putative
  misc_feature (11)..(416): NCBI GI NO: 21703105 NR Description: At1g57590/T8L23_6 [Arabidopsis thaliana]
  misc_feature (51)..(416): NCBI GI NO: 18397406 NR Description: pectinacetylesterase, putative
  misc_feature (51)..(416): NCBI GI NO: 7487997 NR Description: pectin acetylesterase homolog F21E10
  misc_feature (15)..(416): NCBI GI NO: 34913332 NR Description: putative pectin acetylesterase precursor
  misc_feature (119)..(416): NCBI GI NO: 30690308 NR Description: pectinacetylesterase, putative
MKSVLRIAAAIFWLWLFIVLGVIGSGNVRDTDDEISLLESQLVVTSPSQLLMVPLTLIQAAASKGAVCLDGTLPGYHLHPGSGSGANRWLIQLEGGGWCNTRRSCIFRKTTRRGSSNHMEKVLAFTGILSNKSNENPDFFNWNRVKLRYCDGASFTGDSQDESSQLYYRGQRIWHSAMEELLSKGMQKAEQALLSGCSAGGLASILHCDQFKELFPGTTTVKCLSDAGMFMDAVDVSGGHSLRKMFQGVVTVQNLQKELSTACTKHLDPTSCFFPQNLVSGIKTPMFLLNAAYDAWQVQESLAPPSVDLSGSWKACKSDHSHCNSSQIQFFQDFRTHMVDAVKSFATSTHNGVFINSCFAHCQSERQDTWYAPDSPTLHGKTVAESVGDWYFDRTTVKAIDCPYPCDKTCHNLIFK

SEQ ID NO: 4499 - protein, 365 aa, Arabidopsis thaliana
  peptide (1)..(365): Ceres Seq. ID no. 13491879
  misc_feature (1)..(349): Pfam Name: Pfam Description:  Pectinacetylesterase
  misc_feature (1)..(365): NCBI GI NO: 15226462 NR Description: pectinacetylesterase, putative
  misc_feature (1)..(365): NCBI GI NO: 28392968 NR Description: putative pectinacetylesterase
  misc_feature (1)..(365): NCBI GI NO: 15228677 NR Description: pectinacetylesterase family [Arabidopsis thaliana]
  misc_feature (1)..(365): NCBI GI NO: 25347293 NR Description: probable pectinacetylesterase precursor T8L23.6
  misc_feature (1)..(365): NCBI GI NO: 30696158 NR Description: pectinacetylesterase, putative
  misc_feature (1)..(365): NCBI GI NO: 21703105 NR Description: At1g57590/T8L23_6 [Arabidopsis thaliana]
  misc_feature (1)..(365): NCBI GI NO: 18397406 NR Description: pectinacetylesterase, putative
  misc_feature (1)..(365): NCBI GI NO: 7487997 NR Description: pectin acetylesterase homolog F21E10
  misc_feature (1)..(365): NCBI GI NO: 34913332 NR Description: putative pectin acetylesterase precursor
  misc_feature (68)..(365): NCBI GI NO: 30690308 NR Description: pectinacetylesterase, putative
MVPLTLIQAAASKGAVCLDGTLPGYHLHPGSGSGANRWLIQLEGGGWCNTRRSCIFRKTTRRGSSNHMEKVLAFTGILSNKSNENPDFFNWNRVKLRYCDGASFTGDSQDESSQLYYRGQRIWHSAMEELLSKGMQKAEQALLSGCSAGGLASILHCDQFKELFPGTTTVKCLSDAGMFMDAVDVSGGHSLRKMFQGVVTVQNLQKELSTACTKHLDPTSCFFPQNLVSGIKTPMFLLNAAYDAWQVQESLAPPSVDLSGSWKACKSDHSHCNSSQIQFFQDFRTHMVDAVKSFATSTHNGVFINSCFAHCQSERQDTWYAPDSPTLHGKTVAESVGDWYFDRTTVKAIDCPYPCDKTCHNLIFK

SEQ ID NO: 4500 - DNA, 1116 bp, Arabidopsis thaliana
  misc_feature (1)..(1116): Ceres Seq. ID no. 13487214
atggtgcttgacatggcttctcacttgtacacaaatccacctcaaaaccttcactttatttcttcttcttcttcccttaaacctcatttatgcctctctttcaaacgcataaaccctaaacacaaatcctcttcctcttccgtcttcgtcccttacgcatcacagagttccattgccattacctccaaggaaagatggtctctcaatggaatgtctgctcttgtcaccggcggcactcgtggaattgggcgtgcgattgtggaggaattggctggtcttggagcagaagttcacacttgcgctcggaatgagtacgagctggagaattgtttgagtgattggaaccgttctggttttcgagttgctggatccgtttgcgatgtctctgatcgatctcagagagaggctttgatggagaccgtgtcatctgtgtttgaagggaagcttcatatccttgtaaacaatgttgggacgaacattaggaaaccaatggtagagtttactgctggagaattttcgactctgatgtctacgaatttcgaatcggttttccatttatgtcaacttgcttatccattgcttagagaatctaaagctggaagtgttgtgttcatctcttctgtttctggttttgtttccctcaagaatatgtcggtccaatcttcaaccaaaggagcaattaatcaacttacgagaagtctggcttgcgagtgggccaaagacaatataaggatcaatgctgttgccccgtggtatatcaaaacatctatggtggagcaagtccttagcaacaaagagtacctagaagaagtctactcagtaactcctcttggtcgacttggcgaaccgagagaggtgtcttctgcagtggcttttttatgcctacctgcatcatcatatattacagggcagattctttgtgttgatggtggaatgtcaataaacggtttcttcccacgacatgattaggccactctattgttttactagtttccttgggatcctttttgttttatctttagcatgtctcctttctcccgtgaaagacagttcatcgatatgagatgagaattgaagttgtgctactaagtctactgttaatgaaaaggataattt

SEQ ID NO: 4501 - protein, 322 aa, Arabidopsis thaliana
  peptide (1)..(322): Ceres Seq. ID no. 13487215
  misc_feature (1)..(322): NCBI GI NO: 15227060 NR Description: short-chain dehydrogenase/reductase family protein
  misc_feature (11)..(322): NCBI GI NO: 28393476 NR Description: putative tropinone reductase
  misc_feature (64)..(317): NCBI GI NO: 15239327 NR Description: short-chain dehydrogenase/reductase family protein
  misc_feature (64)..(317): NCBI GI NO: 21536785 NR Description: short chain alcohol dehydrogenase-like
  misc_feature (59)..(317): NCBI GI NO: 15227076 NR Description: short-chain dehydrogenase/reductase family protein
  misc_feature (53)..(261): NCBI GI NO: 29893663 NR Description: unknown protein
  misc_feature (255)..(311): NCBI GI NO: 29893663 NR Description: unknown protein
  misc_feature (59)..(317): NCBI GI NO: 21554716 NR Description: putative tropinone reductase
  misc_feature (59)..(317): NCBI GI NO: 25283134 NR Description: probable tropinone reductase
  misc_feature (64)..(317): NCBI GI NO: 15227069 NR Description: short-chain dehydrogenase/reductase family protein
MVLDMASHLYTNPPQNLHFISSSSSLKPHLCLSFKRINPKHKSSSSSVFVPYASQSSIAITSKERWSLNGMSALVTGGTRGIGRAIVEELAGLGAEVHTCARNEYELENCLSDWNRSGFRVAGSVCDVSDRSQREALMETVSSVFEGKLHILVNNVGTNIRKPMVEFTAGEFSTLMSTNFESVFHLCQLAYPLLRESKAGSVVFISSVSGFVSLKNMSVQSSTKGAINQLTRSLACEWAKDNIRINAVAPWYIKTSMVEQVLSNKEYLEEVYSVTPLGRLGEPREVSSAVAFLCLPASSYITGQILCVDGGMSINGFFPRHD

SEQ ID NO: 4502 - protein, 318 aa, Arabidopsis thaliana
  peptide (1)..(318): Ceres Seq. ID no. 13487216
  misc_feature (1)..(318): NCBI GI NO: 15227060 NR Description: short-chain dehydrogenase/reductase family protein
  misc_feature (7)..(318): NCBI GI NO: 28393476 NR Description: putative tropinone reductase
  misc_feature (60)..(313): NCBI GI NO: 15239327 NR Description: short-chain dehydrogenase/reductase family protein
  misc_feature (60)..(313): NCBI GI NO: 21536785 NR Description: short chain alcohol dehydrogenase-like
  misc_feature (55)..(313): NCBI GI NO: 15227076 NR Description: short-chain dehydrogenase/reductase family protein
  misc_feature (49)..(257): NCBI GI NO: 29893663 NR Description: unknown protein
  misc_feature (251)..(307): NCBI GI NO: 29893663 NR Description: unknown protein
  misc_feature (55)..(313): NCBI GI NO: 21554716 NR Description: putative tropinone reductase
  misc_feature (55)..(313): NCBI GI NO: 25283134 NR Description: probable tropinone reductase
  misc_feature (60)..(313): NCBI GI NO: 15227069 NR Description: short-chain dehydrogenase/reductase family protein
MASHLYTNPPQNLHFISSSSSLKPHLCLSFKRINPKHKSSSSSVFVPYASQSSIAITSKERWSLNGMSALVTGGTRGIGRAIVEELAGLGAEVHTCARNEYELENCLSDWNRSGFRVAGSVCDVSDRSQREALMETVSSVFEGKLHILVNNVGTNIRKPMVEFTAGEFSTLMSTNFESVFHLCQLAYPLLRESKAGSVVFISSVSGFVSLKNMSVQSSTKGAINQLTRSLACEWAKDNIRINAVAPWYIKTSMVEQVLSNKEYLEEVYSVTPLGRLGEPREVSSAVAFLCLPASSYITGQILCVDGGMSINGFFPRHD

SEQ ID NO: 4503 - protein, 252 aa, Arabidopsis thaliana
  peptide (1)..(252): Ceres Seq. ID no. 13487217
  misc_feature (1)..(252): NCBI GI NO: 15227060 NR Description: short-chain dehydrogenase/reductase family protein
  misc_feature (1)..(252): NCBI GI NO: 28393476 NR Description: putative tropinone reductase
  misc_feature (1)..(247): NCBI GI NO: 15239327 NR Description: short-chain dehydrogenase/reductase family protein
  misc_feature (1)..(247): NCBI GI NO: 21536785 NR Description: short chain alcohol dehydrogenase-like
  misc_feature (1)..(247): NCBI GI NO: 15227076 NR Description: short-chain dehydrogenase/reductase family protein
  misc_feature (1)..(191): NCBI GI NO: 29893663 NR Description: unknown protein
  misc_feature (185)..(241): NCBI GI NO: 29893663 NR Description: unknown protein
  misc_feature (1)..(247): NCBI GI NO: 21554716 NR Description: putative tropinone reductase
  misc_feature (1)..(247): NCBI GI NO: 25283134 NR Description: probable tropinone reductase
  misc_feature (1)..(247): NCBI GI NO: 15227069 NR Description: short-chain dehydrogenase/reductase family protein
MSALVTGGTRGIGRAIVEELAGLGAEVHTCARNEYELENCLSDWNRSGFRVAGSVCDVSDRSQREALMETVSSVFEGKLHILVNNVGTNIRKPMVEFTAGEFSTLMSTNFESVFHLCQLAYPLLRESKAGSVVFISSVSGFVSLKNMSVQSSTKGAINQLTRSLACEWAKDNIRINAVAPWYIKTSMVEQVLSNKEYLEEVYSVTPLGRLGEPREVSSAVAFLCLPASSYITGQILCVDGGMSINGFFPRHD

SEQ ID NO: 4504 - DNA, 1191 bp, Arabidopsis thaliana; identical to SEQ ID NO: 807
  misc_feature (1)..(1191): Ceres Seq. ID no. 12328954

SEQ ID NO: 4505 - protein, 258 aa, Arabidopsis thaliana; identical to SEQ ID NO: 808
  peptide (1)..(258): Ceres Seq. ID no. 12328955
  misc_feature (57)..(245): Pfam Name: Pfam Description:  Caldesmon
  misc_feature (17)..(258): NCBI GI NO: 15240607 NR Description: putative protein; protein id: At5g13340.1
  misc_feature (31)..(256): NCBI GI NO: 15220234 NR Description: unknown protein; protein id: At1g10890.1
  misc_feature (98)..(246): NCBI GI NO: 37532486 NR Description: hypothetical protein
  misc_feature (16)..(256): NCBI GI NO: 39795605 NR Description: Unknown (protein for MGC:76303)
  misc_feature (16)..(256): NCBI GI NO: 8922259 NR Description: hypothetical protein FLJ10154 [Homo sapiens]
  misc_feature (16)..(256): NCBI GI NO: 34879649 NR Description: similar to hypothetical protein FLJ10154
  misc_feature (19)..(256): NCBI GI NO: 17862050 NR Description: LD06138p [Drosophila melanogaster]
  misc_feature (16)..(256): NCBI GI NO: 28278343 NR Description: Unknown (protein for MGC:55548) [Danio rerio]
  misc_feature (16)..(256): NCBI GI NO: 38541231 NR Description: Unknown (protein for MGC:77695) [Danio rerio]
  misc_feature (16)..(256): NCBI GI NO: 27881860 NR Description: Unknown (protein for MGC:55375) [Danio rerio]

SEQ ID NO: 4506 - protein, 242 aa, Arabidopsis thaliana; identical to SEQ ID NO: 809
  peptide (1)..(242): Ceres Seq. ID no. 12328956
  misc_feature (41)..(229): Pfam Name: Pfam Description:  Caldesmon
  misc_feature (1)..(242): NCBI GI NO: 15240607 NR Description: putative protein; protein id: At5g13340.1
  misc_feature (15)..(240): NCBI GI NO: 15220234 NR Description: unknown protein; protein id: At1g10890.1
  misc_feature (82)..(230): NCBI GI NO: 37532486 NR Description: hypothetical protein
  misc_feature (1)..(240): NCBI GI NO: 39795605 NR Description: Unknown (protein for MGC:76303)
  misc_feature (1)..(240): NCBI GI NO: 8922259 NR Description: hypothetical protein FLJ10154 [Homo sapiens]
  misc_feature (1)..(240): NCBI GI NO: 34879649 NR Description: similar to hypothetical protein FLJ10154
  misc_feature (3)..(240): NCBI GI NO: 17862050 NR Description: LD06138p [Drosophila melanogaster]
  misc_feature (1)..(240): NCBI GI NO: 28278343 NR Description: Unknown (protein for MGC:55548) [Danio rerio]
  misc_feature (1)..(240): NCBI GI NO: 38541231 NR Description: Unknown (protein for MGC:77695) [Danio rerio]
  misc_feature (1)..(240): NCBI GI NO: 27881860 NR Description: Unknown (protein for MGC:55375) [Danio rerio]

SEQ ID NO: 4507 - protein, 131 aa, Arabidopsis thaliana; identical to SEQ ID NO: 810
  peptide (1)..(131): Ceres Seq. ID no. 12328957
  misc_feature (1)..(118): Pfam Name: Pfam Description:  Caldesmon
  misc_feature (1)..(131): NCBI GI NO: 15240607 NR Description: putative protein; protein id: At5g13340.1
  misc_feature (1)..(129): NCBI GI NO: 15220234 NR Description: unknown protein; protein id: At1g10890.1
  misc_feature (1)..(119): NCBI GI NO: 37532486 NR Description: hypothetical protein
  misc_feature (1)..(129): NCBI GI NO: 39795605 NR Description: Unknown (protein for MGC:76303)
  misc_feature (1)..(129): NCBI GI NO: 8922259 NR Description: hypothetical protein FLJ10154 [Homo sapiens]
  misc_feature (1)..(129): NCBI GI NO: 34879649 NR Description: similar to hypothetical protein FLJ10154
  misc_feature (1)..(129): NCBI GI NO: 17862050 NR Description: LD06138p [Drosophila melanogaster]
  misc_feature (1)..(129): NCBI GI NO: 28278343 NR Description: Unknown (protein for MGC:55548) [Danio rerio]
  misc_feature (1)..(129): NCBI GI NO: 38541231 NR Description: Unknown (protein for MGC:77695) [Danio rerio]
  misc_feature (1)..(129): NCBI GI NO: 27881860 NR Description: Unknown (protein for MGC:55375) [Danio rerio]

SEQ ID NO: 4508 - DNA, 1930 bp, Arabidopsis thaliana
  misc_feature (1)..(1930): Ceres Seq. ID no. 13489532
agctccgtcatcataacagcgttaacaaacggcgtcccctgtcgaaagtctctctctttctcgcttctctgaaaaaattgggatcattttgataggagcgactctgttccttcgccgccgatacgcactcttcttcatcggatttgttcctctggtgggattgtagctctccatgtgttgtactagtgcctcttaggacaatgttttggagcttatagtcaaattctgtgaaaactttgaggtgggaattgtgagatcctgtatgatgaagatatccttgaattgcatatatggctttgttgattgatgttctcatctcttgccacctaagggttttgattcggccactgtatctgctaggggttcgcttctggaagaaatatgggtgagactctcatcaccaccctgtctatggagaactatcacccgtcaacactgctatccatggattcaggtgcttttactcatgaagaatcagagagggatatgaatgggtctctcatacttactggaccgcctgatattaatctaccactctcttctgaagctaggccatctctgcttttgtggaacgaacactgtgacatcttagacgttggacttggacctcagctatatgagcctgaggctgttgttcatgtgcctaaggttgctaagaagtacaacaagcgtgttgatagtgcatggggtgcttggcttttcttcagtttctacttcaaacctgttttggatgagaagtctaaaagtaagttaacgagggacagcaatggcttgtctgggtatgataaatctgatttgcagctcgactcgttcttggttcagcatgacatggagaatatgtacatgtgggtgttcaaggaaaagcctgaaaatgcccttggcaagatgcagctgcggagctacatgaacggacactcacgcgagggtgagcgtcctttcccttttagtgtggacaaaggttttgtccgctctcataggatgcagaggaaacattaccgtggtctctctaacccacagtgcctccatggaatcgaagttgtttattcacccaacctttctgtactcagcgaggatgaaaagaagaagtggacagaactcacaggtcgagatgtgaactttgctattccagctgaagctagtgattacggttcatggaggaatctcccaaacaccgaatttgaggctgagagacctcttcctctggctaaagctaacgggcacacccacctgaaaaagctgaatggtacctgtctaaacctgtctacacattccccagaccatgcagttgatacagtggaagttcaactcgctggtagcaataaacgcaaaagggattgtcttgctctaggaaactgcgatgactcgagctcaagtgagaaatctctggacatgaaaatccatgcaacggagctgccttggtcaaatgattttagcggggtgatgaagaatgtgtacggtccagtcacagccgcaaaaacgatatatgaagacgacagagggttcttgatagttatgagcctgccatttgttgattccggaagggtgaaagtgacatggaggaatacaccagcacatggaatagtgaagatatcatgtgtaagtacagcatgtgagccattcatcaagagacatgatagaacatttaagctaacagatccaacaccagagcattgcccaccgggggaatttgtccgcgaagtctccctgccgaacaggattccagatgacgccaagcttgaagcttaccgggacgaaacaggaacaacactagaggttttagtgcctaaacaccgaatgggaccagaggagcatgaggttcgcgtctgtctccgtccgttcgtgctagagtgagattgtagcgcataacttcttaaaagaattttattgttcatgtatcattggattattcatatttaatcatatttactcc

SEQ ID NO: 4509 - protein, 489 aa, Arabidopsis thaliana
  peptide (1)..(489): Ceres Seq. ID no. 13489533
  misc_feature (1)..(489): NCBI GI NO: 18399669 NR Description: expressed protein [Arabidopsis thaliana]
  misc_feature (1)..(488): NCBI GI NO: 11611667 NR Description: SLT1 protein [Nicotiana tabacum]
  misc_feature (11)..(485): NCBI GI NO: 18404463 NR Description: SLT1 protein [Arabidopsis thaliana]
  misc_feature (1)..(484): NCBI GI NO: 18413934 NR Description: expressed protein [Arabidopsis thaliana]
  misc_feature (11)..(484): NCBI GI NO: 11280862 NR Description: hypothetical protein T22P11
  misc_feature (63)..(485): NCBI GI NO: 34895866 NR Description: P0009G03.13
  misc_feature (45)..(485): NCBI GI NO: 34908142 NR Description: putative SLT1 protein
MGETLITTLSMENYHPSTLLSMDSGAFTHEESERDMNGSLILTGPPDINLPLSSEARPSLLLWNEHCDILDVGLGPQLYEPEAVVHVPKVAKKYNKRVDSAWGAWLFFSFYFKPVLDEKSKSKLTRDSNGLSGYDKSDLQLDSFLVQHDMENMYMWVFKEKPENALGKMQLRSYMNGHSREGERPFPFSVDKGFVRSHRMQRKHYRGLSNPQCLHGIEVVYSPNLSVLSEDEKKKWTELTGRDVNFAIPAEASDYGSWRNLPNTEFEAERPLPLAKANGHTHLKKLNGTCLNLSTHSPDHAVDTVEVQLAGSNKRKRDCLALGNCDDSSSSEKSLDMKIHATELPWSNDFSGVMKNVYGPVTAAKTIYEDDRGFLIVMSLPFVDSGRVKVTWRNTPAHGIVKISCVSTACEPFIKRHDRTFKLTDPTPEHCPPGEFVREVSLPNRIPDDAKLEAYRDETGTTLEVLVPKHRMGPEEHEVRVCLRPFVLE

SEQ ID NO: 4510 - protein, 479 aa, Arabidopsis thaliana
  peptide (1)..(479): Ceres Seq. ID no. 13489534
  misc_feature (1)..(479): NCBI GI NO: 18399669 NR Description: expressed protein [Arabidopsis thaliana]
  misc_feature (1)..(478): NCBI GI NO: 11611667 NR Description: SLT1 protein [Nicotiana tabacum]
  misc_feature (1)..(475): NCBI GI NO: 18404463 NR Description: SLT1 protein [Arabidopsis thaliana]
  misc_feature (1)..(474): NCBI GI NO: 18413934 NR Description: expressed protein [Arabidopsis thaliana]
  misc_feature (1)..(474): NCBI GI NO: 11280862 NR Description: hypothetical protein T22P11
  misc_feature (53)..(475): NCBI GI NO: 34895866 NR Description: P0009G03.13
  misc_feature (35)..(475): NCBI GI NO: 34908142 NR Description: putative SLT1 protein
MENYHPSTLLSMDSGAFTHEESERDMNGSLILTGPPDINLPLSSEARPSLLLWNEHCDILDVGLGPQLYEPEAVVHVPKVAKKYNKRVDSAWGAWLFFSFYFKPVLDEKSKSKLTRDSNGLSGYDKSDLQLDSFLVQHDMENMYMWVFKEKPENALGKMQLRSYMNGHSREGERPFPFSVDKGFVRSHRMQRKHYRGLSNPQCLHGIEVVYSPNLSVLSEDEKKKWTELTGRDVNFAIPAEASDYGSWRNLPNTEFEAERPLPLAKANGHTHLKKLNGTCLNLSTHSPDHAVDTVEVQLAGSNKRKRDCLALGNCDDSSSSEKSLDMKIHATELPWSNDFSGVMKNVYGPVTAAKTIYEDDRGFLIVMSLPFVDSGRVKVTWRNTPAHGIVKISCVSTACEPFIKRHDRTFKLTDPTPEHCPPGEFVREVSLPNRIPDDAKLEAYRDETGTTLEVLVPKHRMGPEEHEVRVCLRPFVLE

SEQ ID NO: 4511 - protein, 468 aa, Arabidopsis thaliana
  peptide (1)..(468): Ceres Seq. ID no. 13489535
  misc_feature (1)..(468): NCBI GI NO: 18399669 NR Description: expressed protein [Arabidopsis thaliana]
  misc_feature (1)..(467): NCBI GI NO: 11611667 NR Description: SLT1 protein [Nicotiana tabacum]
  misc_feature (1)..(464): NCBI GI NO: 18404463 NR Description: SLT1 protein [Arabidopsis thaliana]
  misc_feature (1)..(463): NCBI GI NO: 18413934 NR Description: expressed protein [Arabidopsis thaliana]
  misc_feature (1)..(463): NCBI GI NO: 11280862 NR Description: hypothetical protein T22P11
  misc_feature (42)..(464): NCBI GI NO: 34895866 NR Description: P0009G03.13
  misc_feature (24)..(464): NCBI GI NO: 34908142 NR Description: putative SLT1 protein
MDSGAFTHEESERDMNGSLILTGPPDINLPLSSEARPSLLLWNEHCDILDVGLGPQLYEPEAVVHVPKVAKKYNKRVDSAWGAWLFFSFYFKPVLDEKSKSKLTRDSNGLSGYDKSDLQLDSFLVQHDMENMYMWVFKEKPENALGKMQLRSYMNGHSREGERPFPFSVDKGFVRSHRMQRKHYRGLSNPQCLHGIEVVYSPNLSVLSEDEKKKWTELTGRDVNFAIPAEASDYGSWRNLPNTEFEAERPLPLAKANGHTHLKKLNGTCLNLSTHSPDHAVDTVEVQLAGSNKRKRDCLALGNCDDSSSSEKSLDMKIHATELPWSNDFSGVMKNVYGPVTAAKTIYEDDRGFLIVMSLPFVDSGRVKVTWRNTPAHGIVKISCVSTACEPFIKRHDRTFKLTDPTPEHCPPGEFVREVSLPNRIPDDAKLEAYRDETGTTLEVLVPKHRMGPEEHEVRVCLRPFVLE

SEQ ID NO: 4512 - DNA, 1301 bp, Arabidopsis thaliana
  misc_feature (1)..(1301): Ceres Seq. ID no. 12329272
aaaacaaaatccccaaattttcaacaaggataagagccggaagctcatcgccggtgaacggaactagggtttcattcatccccaaattgataacaagaaaatggctcatgcttgcgtctctacatcggcttcttctctcagattcacagctggattcgtctccgctagtcccaatggctcctctttcgattctcccaagctttctcttcctttcgagcctctccgttcaaggaagacgaataagttagttagcgatagaaagaattggaagaattcaactccgaaagctgtatattccggcaatctctggacaccggagattccgtctcctcaaggagtttggtccattagagatgatttacaagtcccttcttcgccgtattttcctgcttatgctcaaggacaaggaccacctcctatggtgcaagaacgtttccagagtatcattagtcagctcttccaatataggattattcgctgtggtggtgctgtggatgacgatatggcaaacataattgtagctcaactcctgtatcttgatgctgttgatcctactaaggatattgtcatgtatgttaattctcctggtggatcagttacagctggcatggctatattcgatactatgaggcacatccggcctgatgtgtccactgtttgtgttggtctagctgctagtatgggagcttttctgcttagtgctggaaccaaaggaaaaagatacagtctaccaaactcaaggataatgatccatcagccgcttggtggagctcaaggtggccaaaccgacattgacattcaggcaaatgaaatgctgcatcacaaggcaaacctaaacggttacctcgcataccacactggtcaaagcctggagaagataaaccaggacacagaccgtgatttcttcatgagtgccaaagaagcaaaagagtatggacttatcgacggtgttatcatgaaccctcttaaagctctccagccacttgcagcagcttaatcgcctaaaggtagtggttcagctttagcacttgttcttttttgggcctttgatgaactgagattttccatgaaatatgtttctattctacaaggaaaatcagatttgtttgggatcaaactctgtagttgatacatacatgaagaccaaagtaaagtttcttactgtgctgtttgattgaacaacctatgatcttttaatttgttttactgaatctggtagttacacccagctttgtagcaacattcataataaggcttttgatgttgactgtctttagtggtaaggagtagaagattgatgc

SEQ ID NO: 4513 - protein, 298 aa, Arabidopsis thaliana
  peptide (1)..(298): Ceres Seq. ID no. 12329273
  misc_feature (107)..(288): Pfam Name: Pfam Description:  Clp protease
  misc_feature (1)..(298): NCBI GI NO: 18378982 NR Description: ATP-dependent Clp protease proteolytic subunit
  misc_feature (1)..(298): NCBI GI NO: 15485610 NR Description: Clp protease 2 proteolytic subunit
  misc_feature (110)..(298): NCBI GI NO: 23126705 NR Description: hypothetical protein [Nostoc punctiforme]
  misc_feature (110)..(296): NCBI GI NO: 17228733 NR Description: ATP-dependent Clp protease proteolytic subunit
  misc_feature (110)..(296): NCBI GI NO: 23042319 NR Description: hypothetical protein
  misc_feature (110)..(295): NCBI GI NO: 16332037 NR Description: ATP-dependent protease; ClpP
  misc_feature (110)..(285): NCBI GI NO: 23041314 NR Description: hypothetical protein
  misc_feature (110)..(292): NCBI GI NO: 3023500 NR Description: ATP-dependent Clp protease proteolytic subunit 2
  misc_feature (110)..(292): NCBI GI NO: 25019682 NR Description: ClpP2 [Synechococcus sp. PCC 7942]
  misc_feature (110)..(290): NCBI GI NO: 34558484 NR Description: ATP-DEPENDENT CLP PROTEASE PROTEOLYTIC SUBUNIT
MAHACVSTSASSLRFTAGFVSASPNGSSFDSPKLSLPFEPLRSRKTNKLVSDRKNWKNSTPKAVYSGNLWTPEIPSPQGVWSIRDDLQVPSSPYFPAYAQGQGPPPMVQERFQSIISQLFQYRIIRCGGAVDDDMANIIVAQLLYLDAVDPTKDIVMYVNSPGGSVTAGMAIFDTMRHIRPDVSTVCVGLAASMGAFLLSAGTKGKRYSLPNSRIMIHQPLGGAQGGQTDIDIQANEMLHHKANLNGYLAYHTGQSLEKINQDTDRDFFMSAKEAKEYGLIDGVIMNPLKALQPLAAA

SEQ ID NO: 4514 - protein, 192 aa, Arabidopsis thaliana
  peptide (1)..(192): Ceres Seq. ID no. 12329274
  misc_feature (1)..(182): Pfam Name: Pfam Description:  Clp protease
  misc_feature (1)..(192): NCBI GI NO: 18378982 NR Description: ATP-dependent Clp protease proteolytic subunit
  misc_feature (1)..(192): NCBI GI NO: 15485610 NR Description: Clp protease 2 proteolytic subunit
  misc_feature (4)..(192): NCBI GI NO: 23126705 NR Description: hypothetical protein [Nostoc punctiforme]
  misc_feature (4)..(190): NCBI GI NO: 17228733 NR Description: ATP-dependent Clp protease proteolytic subunit
  misc_feature (4)..(190): NCBI GI NO: 23042319 NR Description: hypothetical protein
  misc_feature (4)..(189): NCBI GI NO: 16332037 NR Description: ATP-dependent protease; ClpP
  misc_feature (4)..(179): NCBI GI NO: 23041314 NR Description: hypothetical protein
  misc_feature (4)..(186): NCBI GI NO: 3023500 NR Description: ATP-dependent Clp protease proteolytic subunit 2
  misc_feature (4)..(186): NCBI GI NO: 25019682 NR Description: ClpP2 [Synechococcus sp. PCC 7942]
  misc_feature (4)..(184): NCBI GI NO: 34558484 NR Description: ATP-DEPENDENT CLP PROTEASE PROTEOLYTIC SUBUNIT
MVQERFQSIISQLFQYRIIRCGGAVDDDMANIIVAQLLYLDAVDPTKDIVMYVNSPGGSVTAGMAIFDTMRHIRPDVSTVCVGLAASMGAFLLSAGTKGKRYSLPNSRIMIHQPLGGAQGGQTDIDIQANEMLHHKANLNGYLAYHTGQSLEKINQDTDRDFFMSAKEAKEYGLIDGVIMNPLKALQPLAAA

SEQ ID NO: 4515 - protein, 164 aa, Arabidopsis thaliana
  peptide (1)..(164): Ceres Seq. ID no. 12329275
  misc_feature (1)..(154): Pfam Name: Pfam Description:  Clp protease
  misc_feature (1)..(164): NCBI GI NO: 18378982 NR Description: ATP-dependent Clp protease proteolytic subunit
  misc_feature (1)..(164): NCBI GI NO: 15485610 NR Description: Clp protease 2 proteolytic subunit
  misc_feature (1)..(164): NCBI GI NO: 23126705 NR Description: hypothetical protein [Nostoc punctiforme]
  misc_feature (1)..(162): NCBI GI NO: 17228733 NR Description: ATP-dependent Clp protease proteolytic subunit
  misc_feature (1)..(162): NCBI GI NO: 23042319 NR Description: hypothetical protein
  misc_feature (1)..(161): NCBI GI NO: 16332037 NR Description: ATP-dependent protease; ClpP
  misc_feature (1)..(151): NCBI GI NO: 23041314 NR Description: hypothetical protein
  misc_feature (1)..(158): NCBI GI NO: 3023500 NR Description: ATP-dependent Clp protease proteolytic subunit 2
  misc_feature (1)..(158): NCBI GI NO: 25019682 NR Description: ClpP2 [Synechococcus sp. PCC 7942]
  misc_feature (1)..(156): NCBI GI NO: 34558484 NR Description: ATP-DEPENDENT CLP PROTEASE PROTEOLYTIC SUBUNIT
MANIIVAQLLYLDAVDPTKDIVMYVNSPGGSVTAGMAIFDTMRHIRPDVSTVCVGLAASMGAFLLSAGTKGKRYSLPNSRIMIHQPLGGAQGGQTDIDIQANEMLHHKANLNGYLAYHTGQSLEKINQDTDRDFFMSAKEAKEYGLIDGVIMNPLKALQPLAAA

SEQ ID NO: 4516 - DNA, 1318 bp, Arabidopsis thaliana
  misc_feature (1)..(1318): Ceres Seq. ID no. 13494113
agacaaaacaaacaaacaaaacttcagtctctctgcaaagctccatcctttgtggttgtgtcgtagatagcccattcgagtggttaaaagttgaaacttttatgtccacttgaatcctttttttttggattttatctgatcactcgttttgtgtctctgaatctctatcccgtggattcgcatctggatttgttcttttttcatttttattcgagcggcttatctttctcggatccatctgatatcgatttgattctctttggtcaatcgttgaaatggcggatgcgtggaaggatttagcttcagggacagttggaggagcggctcagctagttgttggtcatccatttgacacaatcaaagtcaaacttcagagccaaccgactccagcaccaggccaacttccaaggtacaccggtgcaatcgatgcggttaaacagaccgttgcttctgaaggaactaaaggtttgtacaaaggtatgggagctccactggcaaccgttgctgccttcaatgcggttttgttcactgtgagaggtcaaatggaagggctgcttaggtctgaagctggaattcctttgaccattagtcaacagtttgtggccggtgcaggcgctggtttcgctgtttcgttccttgcttgtcctactgagttgatcaaatgcaggttgcaagcacaaggtgcattagctggtgcctctactacaagctcagtggttgcagccgtgaaatacggtggaccaatggatgtagcccgtcatgtcctacgatcagaaggcggagcacgaggtctattcaaaggtttattcccgacattcgcccgtgaagtcccgggaaatgcaacaatgtttgcagcctacgaagctttcaagcggtttttagccggtggttcagacacttcaagcttaggacaagggtcattgatcatggcgggtggagtcgctggtgcgtcgttttggggaattgtatatccgacagatgttgtgaagagtgttcttcaagtcgacgattacaaaaacccgaaatacacggggtcgatggatgctttccggaagattctgaaatctgaaggagttaaaggtttgtataaaggatttggtccagctatggctaggagtgttcctgctaatgctgcttgcttcttggcttatgagatgacaaggtcaagcttgggataaaccggttcgttttgggtttaactgttggtcctatttctggatgttccattgtcattaacctctctgtttttagatttgattcttttgaaatttctgcaaaaattatgtatctcttacacagtttatttcaactatctctt

SEQ ID NO: 4517 - protein, 300 aa, Arabidopsis thaliana
  peptide (1)..(300): Ceres Seq. ID no. 15222914
  misc_feature (1)..(300): NCBI GI NO: 18422718 NR Description: mitochondrial carrier protein family
  misc_feature (1)..(300): NCBI GI NO: 9758516 NR Description: carnitine/acylcarnitine translocase-like protein
  misc_feature (1)..(300): NCBI GI NO: 37537070 NR Description: putative carnitine/acylcarnitine translocase
  misc_feature (1)..(300): NCBI GI NO: 37537072 NR Description: putative carnitine/acylcarnitine translocase
  misc_feature (1)..(295): NCBI GI NO: 17539560 NR Description: Embryonic tissue differentiation factor DIF-1
  misc_feature (1)..(295): NCBI GI NO: 39593620 NR Description: Hypothetical protein CBG05908
  misc_feature (6)..(299): NCBI GI NO: 38541954 NR Description: Unknown (protein for MGC:77760) [Danio rerio]
  misc_feature (6)..(299): NCBI GI NO: 27694786 NR Description: Similar to solute carrier family 25
  misc_feature (6)..(299): NCBI GI NO: 38566282 NR Description: Carnitine/acylcarnitine translocase
  misc_feature (1)..(295): NCBI GI NO: 7511491 NR Description: mitochondrial carrier protein DIF-1 homolog
MADAWKDLASGTVGGAAQLVVGHPFDTIKVKLQSQPTPAPGQLPRYTGAIDAVKQTVASEGTKGLYKGMGAPLATVAAFNAVLFTVRGQMEGLLRSEAGIPLTISQQFVAGAGAGFAVSFLACPTELIKCRLQAQGALAGASTTSSVVAAVKYGGPMDVARHVLRSEGGARGLFKGLFPTFAREVPGNATMFAAYEAFKRFLAGGSDTSSLGQGSLIMAGGVAGASFWGIVYPTDVVKSVLQVDDYKNPKYTGSMDAFRKILKSEGVKGLYKGFGPAMARSVPANAACFLAYEMTRSSLG

SEQ ID NO: 4518 - protein, 232 aa, Arabidopsis thaliana
  peptide (1)..(232): Ceres Seq. ID no. 15222915
  misc_feature (1)..(232): NCBI GI NO: 18422718 NR Description: mitochondrial carrier protein family
  misc_feature (1)..(232): NCBI GI NO: 9758516 NR Description: carnitine/acylcarnitine translocase-like protein
  misc_feature (1)..(232): NCBI GI NO: 37537070 NR Description: putative carnitine/acylcarnitine translocase
  misc_feature (1)..(232): NCBI GI NO: 37537072 NR Description: putative carnitine/acylcarnitine translocase
  misc_feature (1)..(227): NCBI GI NO: 17539560 NR Description: Embryonic tissue differentiation factor DIF-1
  misc_feature (1)..(227): NCBI GI NO: 39593620 NR Description: Hypothetical protein CBG05908
  misc_feature (1)..(231): NCBI GI NO: 38541954 NR Description: Unknown (protein for MGC:77760) [Danio rerio]
  misc_feature (1)..(231): NCBI GI NO: 27694786 NR Description: Similar to solute carrier family 25
  misc_feature (1)..(231): NCBI GI NO: 38566282 NR Description: Carnitine/acylcarnitine translocase
  misc_feature (1)..(227): NCBI GI NO: 7511491 NR Description: mitochondrial carrier protein DIF-1 homolog
MGAPLATVAAFNAVLFTVRGQMEGLLRSEAGIPLTISQQFVAGAGAGFAVSFLACPTELIKCRLQAQGALAGASTTSSVVAAVKYGGPMDVARHVLRSEGGARGLFKGLFPTFAREVPGNATMFAAYEAFKRFLAGGSDTSSLGQGSLIMAGGVAGASFWGIVYPTDVVKSVLQVDDYKNPKYTGSMDAFRKILKSEGVKGLYKGFGPAMARSVPANAACFLAYEMTRSSLG

SEQ ID NO: 4519 - protein, 211 aa, Arabidopsis thaliana
  peptide (1)..(211): Ceres Seq. ID no. 15222916
  misc_feature (1)..(211): NCBI GI NO: 18422718 NR Description: mitochondrial carrier protein family
  misc_feature (1)..(211): NCBI GI NO: 9758516 NR Description: carnitine/acylcarnitine translocase-like protein
  misc_feature (1)..(211): NCBI GI NO: 37537070 NR Description: putative carnitine/acylcarnitine translocase
  misc_feature (1)..(211): NCBI GI NO: 37537072 NR Description: putative carnitine/acylcarnitine translocase
  misc_feature (1)..(206): NCBI GI NO: 17539560 NR Description: Embryonic tissue differentiation factor DIF-1
  misc_feature (1)..(206): NCBI GI NO: 39593620 NR Description: Hypothetical protein CBG05908
  misc_feature (1)..(210): NCBI GI NO: 38541954 NR Description: Unknown (protein for MGC:77760) [Danio rerio]
  misc_feature (1)..(210): NCBI GI NO: 27694786 NR Description: Similar to solute carrier family 25
  misc_feature (1)..(210): NCBI GI NO: 38566282 NR Description: Carnitine/acylcarnitine translocase
  misc_feature (1)..(206): NCBI GI NO: 7511491 NR Description: mitochondrial carrier protein DIF-1 homolog
MEGLLRSEAGIPLTISQQFVAGAGAGFAVSFLACPTELIKCRLQAQGALAGASTTSSVVAAVKYGGPMDVARHVLRSEGGARGLFKGLFPTFAREVPGNATMFAAYEAFKRFLAGGSDTSSLGQGSLIMAGGVAGASFWGIVYPTDVVKSVLQVDDYKNPKYTGSMDAFRKILKSEGVKGLYKGFGPAMARSVPANAACFLAYEMTRSSLG

SEQ ID NO: 4520 - DNA, 1294 bp, Arabidopsis thaliana
  misc_feature (1)..(1294): Ceres Seq. ID no. 12328856
atcagacatcagagggaacttggaggacacagagaagcgcaaattatcagacagagtgagaacgaagaagaagaaagcacaggatgctaagcttgagatattcattaccttatcttcttcttcaaacaagggaatcatcaactaagctcttcaccaaaaagcctaacaatgttgtggtttgtgcggcgagaggtccaagacctcggtctcctcgtgtatggaaaacaaggaagaggattggaactatctctaaagctgccaaaatgattgcttgtataaaaggattgtcgaatgttaaagaagaagtttatggagcgcttgattccttcattgcttgggaattagagttccctcttgttatagttaagaaggcattagttatacttgaagatgaaaaagaatggaagaagattattcaggtgacaaaatggatgctgagtaaaggccaaggaagaacaatgggaacttacttctcattactaaatgctttagcagaagataatcgccttgacgaagctgaggaattgtggaacaaattgttcatggaacatttagaaggaactcctagaaagttcttcaacaaaatgatctctatatattacaagagagatatgcaccaaaagctcttcgaggtctttgctgacatggaggagcttggagtgaaaccgaacgttgcgattgtgtctatggttggaaaagtgtttgtgaaactagagatgaaggataagtacgagaaactgatgaagaaatatcctccaccacagtgggagtttagatacatcaaaggaagacgtgttaaggtcaaggcaaagcagctgaatgagctaagcgaaggtgaaggtggtttaagcagcgacgaagataagattgacaatgagattgagagtgaagaagaagatggtgaggatctcagtgaagaggaagaagatgaaaaagaacttttgggtggaagtcaaggacagattacttctagagaacccagtcttgatcatttggactcttcatgagcttttgagatcgtatctaccgttgaatcatctataaggaaaatagatagacggccaaggttcttcaaagaagctttctggggctgagcttgggtttctgacgaaaacatgaccagaaaagttttgaactatctgagcttaagagtcaaaacaaggtatagatttgaagagtcaactaaaaagagtattaaactcagcaaaaagattaaatactgtaaaatcttttagtacgactgtgtaagctctgaaaacaaaaattattgtataatttcagacaataatttcag

SEQ ID NO: 4521 - protein, 307 aa, Arabidopsis thaliana
  peptide (1)..(307): Ceres Seq. ID no. 12328857
  misc_feature (127)..(161): Pfam Name: Pfam Description:  PPR repeat
  misc_feature (1)..(307): NCBI GI NO: 18415645 NR Description: putative protein; protein id: At4g21190
  misc_feature (14)..(307): NCBI GI NO: 7486589 NR Description: hypothetical protein F7J7
  misc_feature (1)..(272): NCBI GI NO: 34909686 NR Description: B1131G08.1
  misc_feature (45)..(241): NCBI GI NO: 18415213 NR Description: putative protein; protein id: At4g18975.1
  misc_feature (45)..(233): NCBI GI NO: 7485419 NR Description: hypothetical protein F13C5
  misc_feature (26)..(241): NCBI GI NO: 34393638 NR Description: pentatricopeptide
  misc_feature (7)..(290): NCBI GI NO: 18390413 NR Description: expressed protein; protein id: At1g04590
  misc_feature (7)..(290): NCBI GI NO: 30678929 NR Description: expressed protein [Arabidopsis thaliana]
  misc_feature (72)..(290): NCBI GI NO: 25406795 NR Description: hypothetical protein
MLSLRYSLPYLLLQTRESSTKLFTKKPNNVVVCAARGPRPRSPRVWKTRKRIGTISKAAKMIACIKGLSNVKEEVYGALDSFIAWELEFPLVIVKKALVILEDEKEWKKIIQVTKWMLSKGQGRTMGTYFSLLNALAEDNRLDEAEELWNKLFMEHLEGTPRKFFNKMISIYYKRDMHQKLFEVFADMEELGVKPNVAIVSMVGKVFVKLEMKDKYEKLMKKYPPPQWEFRYIKGRRVKVKAKQLNELSEGEGGLSSDEDKIDNEIESEEEDGEDLSEEEEDEKELLGGSQGQITSREPSLDHLDSS

SEQ ID NO: 4522 - protein, 247 aa, Arabidopsis thaliana
  peptide (1)..(247): Ceres Seq. ID no. 12328858
  misc_feature (67)..(101): Pfam Name: Pfam Description:  PPR repeat
  misc_feature (1)..(247): NCBI GI NO: 18415645 NR Description: putative protein; protein id: At4g21190
  misc_feature (1)..(247): NCBI GI NO: 7486589 NR Description: hypothetical protein F7J7
  misc_feature (1)..(212): NCBI GI NO: 34909686 NR Description: B1131G08.1
  misc_feature (1)..(181): NCBI GI NO: 18415213 NR Description: putative protein; protein id: At4g18975.1
  misc_feature (1)..(173): NCBI GI NO: 7485419 NR Description: hypothetical protein F13C5
  misc_feature (1)..(181): NCBI GI NO: 34393638 NR Description: pentatricopeptide
  misc_feature (1)..(230): NCBI GI NO: 18390413 NR Description: expressed protein; protein id: At1g04590
  misc_feature (1)..(230): NCBI GI NO: 30678929 NR Description: expressed protein [Arabidopsis thaliana]
  misc_feature (12)..(230): NCBI GI NO: 25406795 NR Description: hypothetical protein
MIACIKGLSNVKEEVYGALDSFIAWELEFPLVIVKKALVILEDEKEWKKIIQVTKWMLSKGQGRTMGTYFSLLNALAEDNRLDEAEELWNKLFMEHLEGTPRKFFNKMISIYYKRDMHQKLFEVFADMEELGVKPNVAIVSMVGKVFVKLEMKDKYEKLMKKYPPPQWEFRYIKGRRVKVKAKQLNELSEGEGGLSSDEDKIDNEIESEEEDGEDLSEEEEDEKELLGGSQGQITSREPSLDHLDSS

SEQ ID NO: 4523 - protein, 191 aa, Arabidopsis thaliana
  peptide (1)..(191): Ceres Seq. ID no. 12328859
  misc_feature (11)..(45): Pfam Name: Pfam Description:  PPR repeat
  misc_feature (1)..(191): NCBI GI NO: 18415645 NR Description: putative protein; protein id: At4g21190
  misc_feature (1)..(191): NCBI GI NO: 7486589 NR Description: hypothetical protein F7J7
  misc_feature (1)..(156): NCBI GI NO: 34909686 NR Description: B1131G08.1
  misc_feature (1)..(125): NCBI GI NO: 18415213 NR Description: putative protein; protein id: At4g18975.1
  misc_feature (1)..(117): NCBI GI NO: 7485419 NR Description: hypothetical protein F13C5
  misc_feature (1)..(125): NCBI GI NO: 34393638 NR Description: pentatricopeptide
  misc_feature (1)..(174): NCBI GI NO: 18390413 NR Description: expressed protein; protein id: At1g04590
  misc_feature (1)..(174): NCBI GI NO: 30678929 NR Description: expressed protein [Arabidopsis thaliana]
  misc_feature (1)..(174): NCBI GI NO: 25406795 NR Description: hypothetical protein
MLSKGQGRTMGTYFSLLNALAEDNRLDEAEELWNKLFMEHLEGTPRKFFNKMISIYYKRDMHQKLFEVFADMEELGVKPNVAIVSMVGKVFVKLEMKDKYEKLMKKYPPPQWEFRYIKGRRVKVKAKQLNELSEGEGGLSSDEDKIDNEIESEEEDGEDLSEEEEDEKELLGGSQGQITSREPSLDHLDSS

SEQ ID NO: 4524 - DNA, 1248 bp, Arabidopsis thaliana
  misc_feature (1)..(1248): Ceres Seq. ID no. 13499909
ctctctctctctttttttctaatcatacgaacacaatctgcttcaagaattagggttttgatcagacacaaaaaagtatctctctccgtagttttgtgtcaaggttttgcaagaagcggcactaggtatgatgggagccaccgtaggcggagacggagacaccgcggtcgtggcggagcagaatagacagttgaaaggtgagatagcgacacatccgatgtatgagcaattattagccgcacacgtggcgtgtttaagagtagctactccaatagatcaacttccgatcattgaagctcagctttctcaatctcatcatcttctccgttcttacgcttccacggccgttggataccatcatgatcgtcacgagctcgataatttcttggcacaatatgtaatggtgttgtgtagcttcaaagaacagctgcaacagcacgtgagggttcatgccgtcgaagctgttatggcttgccgtgaaattgagaacaaccttcattctcttacaggagcaactttaggagaagggtcgggtgcgactatgtcggaggatgaggatgatcttccgatggatttctcgtcagataattccggcgttgattttagcggcggccacgatatgacgggatttggtccgttgctaccgactgaatcggaaagatcccttatggaaagagtcagacaagaactcaaactagaactcaaacagggttttaaatcgagaatcgaagatgtaagagaagagataatgaggaagagaagggctgggaaattgccaggagacacaactactgtcttgaagaattggtggcaacaacattgcaaatggccttaccctacggaagatgacaaggcaaaattggtggaggagacaggattgcagttgaagcaaatcaacaattggttcattaaccaacgcaagaggaattggcacaacaactctcactccctcacttccttgaagtccaagcgcaaacactaatctcttcttactatattagttactacctctacatatattcatactaattacactgctaagacatgcatgatacatacgtaattcatgttactgataataacgaggtgtgatcattcattaatatcatgtacttacttagcttattagatccaccgactactatatgatttgtgcgttgcgtgattactggttgttactagattgtaattcattttgtttgtattgtgcattcaaatttatctttttggtaagaacactgattttgt

SEQ ID NO: 4525 - protein, 284 aa, Arabidopsis thaliana
  peptide (1)..(284): Ceres Seq. ID no. 13499910
  misc_feature (73)..(128): Pfam Name: Pfam Description:  KNOX2 domain
  misc_feature (1)..(284): NCBI GI NO: 18407708 NR Description: homeodomain-containing protein HD1 -related
  misc_feature (1)..(284): NCBI GI NO: 26451690 NR Description: putative homeodomain transcription factor KNAT6
  misc_feature (2)..(284): NCBI GI NO: 25386223 NR Description: hypothetical protein F16P17.16
  misc_feature (2)..(284): NCBI GI NO: 21618231 NR Description: homeodomain-containing protein HD1, putative
  misc_feature (1)..(284): NCBI GI NO: 1170191 NR Description: Homeobox protein HD1
  misc_feature (21)..(283): NCBI GI NO: 4098246 NR Description: homeobox 2 protein [Lycopersicon esculentum]
  misc_feature (13)..(283): NCBI GI NO: 14149141 NR Description: KNOX family class 2 homeodomain protein
  misc_feature (7)..(283): NCBI GI NO: 3023961 NR Description: Homeobox protein knotted-1 like 3 (KNAP3)
  misc_feature (8)..(283): NCBI GI NO: 15238743 NR Description: KNAT3 homeodomain protein [Arabidopsis thaliana]
  misc_feature (8)..(283): NCBI GI NO: 21554222 NR Description: KNAT3 homeodomain protein [Arabidopsis thaliana]
MMGATVGGDGDTAVVAEQNRQLKGEIATHPMYEQLLAAHVACLRVATPIDQLPIIEAQLSQSHHLLRSYASTAVGYHHDRHELDNFLAQYVMVLCSFKEQLQQHVRVHAVEAVMACREIENNLHSLTGATLGEGSGATMSEDEDDLPMDFSSDNSGVDFSGGHDMTGFGPLLPTESERSLMERVRQELKLELKQGFKSRIEDVREEIMRKRRAGKLPGDTTTVLKNWWQQHCKWPYPTEDDKAKLVEETGLQLKQINNWFINQRKRNWHNNSHSLTSLKSKRKH

SEQ ID NO: 4526 - protein, 283 aa, Arabidopsis thaliana
  peptide (1)..(283): Ceres Seq. ID no. 13499911
  misc_feature (72)..(127): Pfam Name: Pfam Description:  KNOX2 domain
  misc_feature (1)..(283): NCBI GI NO: 18407708 NR Description: homeodomain-containing protein HD1 -related
  misc_feature (1)..(283): NCBI GI NO: 26451690 NR Description: putative homeodomain transcription factor KNAT6
  misc_feature (1)..(283): NCBI GI NO: 25386223 NR Description: hypothetical protein F16P17.16
  misc_feature (1)..(283): NCBI GI NO: 21618231 NR Description: homeodomain-containing protein HD1, putative
  misc_feature (1)..(283): NCBI GI NO: 1170191 NR Description: Homeobox protein HD1
  misc_feature (20)..(282): NCBI GI NO: 4098246 NR Description: homeobox 2 protein [Lycopersicon esculentum]
  misc_feature (12)..(282): NCBI GI NO: 14149141 NR Description: KNOX family class 2 homeodomain protein
  misc_feature (6)..(282): NCBI GI NO: 3023961 NR Description: Homeobox protein knotted-1 like 3 (KNAP3)
  misc_feature (7)..(282): NCBI GI NO: 15238743 NR Description: KNAT3 homeodomain protein [Arabidopsis thaliana]
  misc_feature (7)..(282): NCBI GI NO: 21554222 NR Description: KNAT3 homeodomain protein [Arabidopsis thaliana]
MGATVGGDGDTAVVAEQNRQLKGEIATHPMYEQLLAAHVACLRVATPIDQLPIIEAQLSQSHHLLRSYASTAVGYHHDRHELDNFLAQYVMVLCSFKEQLQQHVRVHAVEAVMACREIENNLHSLTGATLGEGSGATMSEDEDDLPMDFSSDNSGVDFSGGHDMTGFGPLLPTESERSLMERVRQELKLELKQGFKSRIEDVREEIMRKRRAGKLPGDTTTVLKNWWQQHCKWPYPTEDDKAKLVEETGLQLKQINNWFINQRKRNWHNNSHSLTSLKSKRKH

SEQ ID NO: 4527 - protein, 254 aa, Arabidopsis thaliana
  peptide (1)..(254): Ceres Seq. ID no. 13499912
  misc_feature (43)..(98): Pfam Name: Pfam Description:  KNOX2 domain
  misc_feature (1)..(254): NCBI GI NO: 18407708 NR Description: homeodomain-containing protein HD1 -related
  misc_feature (1)..(254): NCBI GI NO: 26451690 NR Description: putative homeodomain transcription factor KNAT6
  misc_feature (1)..(254): NCBI GI NO: 25386223 NR Description: hypothetical protein F16P17.16
  misc_feature (1)..(254): NCBI GI NO: 21618231 NR Description: homeodomain-containing protein HD1, putative
  misc_feature (1)..(254): NCBI GI NO: 1170191 NR Description: Homeobox protein HD1
  misc_feature (1)..(253): NCBI GI NO: 4098246 NR Description: homeobox 2 protein [Lycopersicon esculentum]
  misc_feature (1)..(253): NCBI GI NO: 14149141 NR Description: KNOX family class 2 homeodomain protein
  misc_feature (1)..(253): NCBI GI NO: 3023961 NR Description: Homeobox protein knotted-1 like 3 (KNAP3)
  misc_feature (1)..(253): NCBI GI NO: 15238743 NR Description: KNAT3 homeodomain protein [Arabidopsis thaliana]
  misc_feature (1)..(253): NCBI GI NO: 21554222 NR Description: KNAT3 homeodomain protein [Arabidopsis thaliana]
MYEQLLAAHVACLRVATPIDQLPIIEAQLSQSHHLLRSYASTAVGYHHDRHELDNFLAQYVMVLCSFKEQLQQHVRVHAVEAVMACREIENNLHSLTGATLGEGSGATMSEDEDDLPMDFSSDNSGVDFSGGHDMTGFGPLLPTESERSLMERVRQELKLELKQGFKSRIEDVREEIMRKRRAGKLPGDTTTVLKNWWQQHCKWPYPTEDDKAKLVEETGLQLKQINNWFINQRKRNWHNNSHSLTSLKSKRKH

SEQ ID NO: 4528 - DNA, 1146 bp, Arabidopsis thaliana
  misc_feature (1)..(1146): Ceres Seq. ID no. 12489106
ttttctctcaatcctccaattcccaaatttcaacaacaagacgaagcaaacgatgtggattgaaatcatctgcggtctcgtcatttacaaactcgtccgccgtttcttctacgacgatgaattgtccgacgtcgaaacttccgattccactgctctcttctccgtagctcacagacttgagaaactttatggtggaaaagcttatgtaggacttcgaattccagatgccgacactgcttctagacaggacattgatgttgtccttgttactaaaggagatgttgtagtgatttctgtgaagaatctatcggggattgttacggtaactagtgatggtagctgggtttgtgaaggtggcaagcatcatactactgagactttccctgatcctctggcggaggtcaagaaacaagcttcagttcttgaatcatatcttgaacagaggggagttactttacttgaaggaaatgtgtcttgcaaagttgtcattcccaatccaagttttcgtacaattcatgcattcccgagtgaggtaattacctatgaagattggcaacagctaaaaccagtatcgaaaagtaaactttctggttgggttaaaggcgcattcagcaccggaaaagagatgcaggaatcttcgcatcaaaaacttaatttcatccttggcacagcaccaacgtgggatagagtggagcttaaaagtagcaaaattgtgttaggggaattcctagagtttaaaggaaagcaggaagataccctggctttaagaaatatcaaaaggtcaaaagtcgaccgtgtctctattcagaaaacaagcatgtttggattagctccttcgaggttgcaggttctgtattcgtatagggactacagaagtgaaggcagttcagggtcagagtcgaaagaagtgactgtccggtcaagcacagaggttctgtttcaaccacgagactccacaaagatgaagaaattcaagctatcgtcgcttgtctccatttcactaagtgcctaactatgaagtgagcttattagcatgcagcagaggaagttgtcaatgtttattgtaacaattacattgtccatgactgaagtaagcttatgttattctcaagagtattgacctctttatggaaatgttttcttcgt

SEQ ID NO: 4529 - protein, 336 aa, Arabidopsis thaliana
  peptide (1)..(336): Ceres Seq. ID no. 12489107
  misc_feature (18)..(336): NCBI GI NO: 15220924 NR Description: hypothetical protein; protein id: At1g65020.1
  misc_feature (18)..(276): NCBI GI NO: 25373168 NR Description: hypothetical protein F16G16.1
  misc_feature (18)..(336): NCBI GI NO: 37537134 NR Description: unknown protein
FLSILQFPNFNNKTKQTMWIEIICGLVIYKLVRRFFYDDELSDVETSDSTALFSVAHRLEKLYGGKAYVGLRIPDADTASRQDIDVVLVTKGDVVVISVKNLSGIVTVTSDGSWVCEGGKHHTTETFPDPLAEVKKQASVLESYLEQRGVTLLEGNVSCKVVIPNPSFRTIHAFPSEVITYEDWQQLKPVSKSKLSGWVKGAFSTGKEMQESSHQKLNFILGTAPTWDRVELKSSKIVLGEFLEFKGKQEDTLALRNIKRSKVDRVSIQKTSMFGLAPSRLQVLYSYRDYRSEGSSGSESKEVTVRSSTEVLFQPRDSTKMKKFKLSSLVSISLSA

SEQ ID NO: 4530 - protein, 319 aa, Arabidopsis thaliana
  peptide (1)..(319): Ceres Seq. ID no. 12489108
  misc_feature (1)..(319): NCBI GI NO: 15220924 NR Description: hypothetical protein; protein id: At1g65020.1
  misc_feature (1)..(259): NCBI GI NO: 25373168 NR Description: hypothetical protein F16G16.1
  misc_feature (1)..(319): NCBI GI NO: 37537134 NR Description: unknown protein
MWIEIICGLVIYKLVRRFFYDDELSDVETSDSTALFSVAHRLEKLYGGKAYVGLRIPDADTASRQDIDVVLVTKGDVVVISVKNLSGIVTVTSDGSWVCEGGKHHTTETFPDPLAEVKKQASVLESYLEQRGVTLLEGNVSCKVVIPNPSFRTIHAFPSEVITYEDWQQLKPVSKSKLSGWVKGAFSTGKEMQESSHQKLNFILGTAPTWDRVELKSSKIVLGEFLEFKGKQEDTLALRNIKRSKVDRVSIQKTSMFGLAPSRLQVLYSYRDYRSEGSSGSESKEVTVRSSTEVLFQPRDSTKMKKFKLSSLVSISLSA

SEQ ID NO: 4531 - DNA, 1544 bp, Arabidopsis thaliana
  misc_feature (1)..(1544): Ceres Seq. ID no. 13491268
aggaaaactaaaccaaagtctgtttaccagtaatatcaatcgatcgccattctcgacatttctctctctcaagctagtctaaagtttcttcttatctccttcctccgaccaaaacttcgacttctctcttattttcaccctcagagagtaaccatggatgccttgacctcgagtttggttcgatctcccatcgtaccatcgagaacttccgacaacggttctggatctatgttccttaccgccagtggccctggattcacgcgttctggttcttcaagacttcaacttcgtttaaggcaaaacgcgtctgctagatcctcaagatcattacagagcttaacaacgactgctaaaactcggagaagttttgtggttagagcttcttcagcgtctaatgatgcttcatctggttcttcccccaaaccgatcgctccgctccagctgcaatcgcctgctggtcagtttctgtctcagattttggtgagccatcctcatcttgtgcctgcagctgttgaacagcagcttgagcagcttcaaactgatcgggactctcagggacagaacaaagattcagcgtctgtacctggaaccgacatcgttctctacaggagaattgcggagttgaaggaaaacgagagaagaagaacattggaagagattttgtatgcattggtggttcaaaagttcatggaagctaacgtatcacttgtaccttcagtaagcccatcttcagatccgtctggtcgggttgatacttggccgaccaaagtggagaaactcgagcggcttcactcgcccgagatgtacgagatgattcacaaccatcttgccttgattcttggaagcagaatgggtgatctgaactctgttgcacagataagcaagctcagagttggccaagtttacgctgcttctgtgatgtatggatatttcttgaagagggtggaccaaaggtttcagcttgagaagacgatgaagattcttccgggtgggtcggatgaaagtaaaacaagcgttgagcaagccgaggggacggcaacatatcaggcggctgtatcgtctcacccagaggttggtgcatttgcgggcggagttagtgctaagggcttcggcagcgagattaaaccatcccgattaaggtcatatgtgatgtcatttgatgcggagacgctgcagagatacgccactataagatcaagagaagcagttggaatcatcgagaagcacacagaggcattgtttggtaagcctgagattgtaataacaccggagggcacagtcgattcatcgaaggacgaacagataaagatcagcttcggtggaatgaagaggctcgtcttggaggcagttactttcgggtcgttcctttgggatgttgagagccatgtagatgcgaggtaccactttgtattgaactaaaaacatggtctgtaatgcagttgactaacttatgtagcattaagaagatacccattaagggtatcattacacttgtatcaaaaatttgaggaaaagatcgtacattatatatgttattgtgatgc

SEQ ID NO: 4532 - protein, 421 aa, Arabidopsis thaliana
  peptide (1)..(421): Ceres Seq. ID no. 13491269
  misc_feature (11)..(421): Pfam Name: DUF760 Pfam Description: Protein of unknown function
  misc_feature (1)..(421): NCBI GI NO: 18401645 NR Description: expressed protein [Arabidopsis thaliana]
  misc_feature (1)..(421): NCBI GI NO: 17064820 NR Description: Unknown protein [Arabidopsis thaliana]
  misc_feature (1)..(421): NCBI GI NO: 15221185 NR Description: expressed protein [Arabidopsis thaliana]
  misc_feature (165)..(421): NCBI GI NO: 13561930 NR Description: unknown [Brassica napus]
  misc_feature (39)..(421): NCBI GI NO: 28301943 NR Description: unknown protein
  misc_feature (59)..(419): NCBI GI NO: 18398302 NR Description: expressed protein [Arabidopsis thaliana]
  misc_feature (30)..(419): NCBI GI NO: 32489097 NR Description: OSJNBa0093F12.3
  misc_feature (68)..(271): NCBI GI NO: 15239021 NR Description: expressed protein [Arabidopsis thaliana]
  misc_feature (327)..(416): NCBI GI NO: 15239021 NR Description: expressed protein [Arabidopsis thaliana]
  misc_feature (71)..(352): NCBI GI NO: 18397912 NR Description: expressed protein [Arabidopsis thaliana]
MDALTSSLVRSPIVPSRTSDNGSGSMFLTASGPGFTRSGSSRLQLRLRQNASARSSRSLQSLTTTAKTRRSFVVRASSASNDASSGSSPKPIAPLQLQSPAGQFLSQILVSHPHLVPAAVEQQLEQLQTDRDSQGQNKDSASVPGTDIVLYRRIAELKENERRRTLEEILYALVVQKFMEANVSLVPSVSPSSDPSGRVDTWPTKVEKLERLHSPEMYEMIHNHLALILGSRMGDLNSVAQISKLRVGQVYAASVMYGYFLKRVDQRFQLEKTMKILPGGSDESKTSVEQAEGTATYQAAVSSHPEVGAFAGGVSAKGFGSEIKPSRLRSYVMSFDAETLQRYATIRSREAVGIIEKHTEALFGKPEIVITPEGTVDSSKDEQIKISFGGMKRLVLEAVTFGSFLWDVESHVDARYHFVLN

SEQ ID NO: 4533 - protein, 396 aa, Arabidopsis thaliana
  peptide (1)..(396): Ceres Seq. ID no. 13491270
  misc_feature (1)..(396): Pfam Name: DUF760 Pfam Description: Protein of unknown function
  misc_feature (1)..(396): NCBI GI NO: 18401645 NR Description: expressed protein [Arabidopsis thaliana]
  misc_feature (1)..(396): NCBI GI NO: 17064820 NR Description: Unknown protein [Arabidopsis thaliana]
  misc_feature (1)..(396): NCBI GI NO: 15221185 NR Description: expressed protein [Arabidopsis thaliana]
  misc_feature (140)..(396): NCBI GI NO: 13561930 NR Description: unknown [Brassica napus]
  misc_feature (14)..(396): NCBI GI NO: 28301943 NR Description: unknown protein
  misc_feature (34)..(394): NCBI GI NO: 18398302 NR Description: expressed protein [Arabidopsis thaliana]
  misc_feature (5)..(394): NCBI GI NO: 32489097 NR Description: OSJNBa0093F12.3
  misc_feature (43)..(246): NCBI GI NO: 15239021 NR Description: expressed protein [Arabidopsis thaliana]
  misc_feature (302)..(391): NCBI GI NO: 15239021 NR Description: expressed protein [Arabidopsis thaliana]
  misc_feature (46)..(327): NCBI GI NO: 18397912 NR Description: expressed protein [Arabidopsis thaliana]
MFLTASGPGFTRSGSSRLQLRLRQNASARSSRSLQSLTTTAKTRRSFVVRASSASNDASSGSSPKPIAPLQLQSPAGQFLSQILVSHPHLVPAAVEQQLEQLQTDRDSQGQNKDSASVPGTDIVLYRRIAELKENERRRTLEEILYALVVQKFMEANVSLVPSVSPSSDPSGRVDTWPTKVEKLERLHSPEMYEMIHNHLALILGSRMGDLNSVAQISKLRVGQVYAASVMYGYFLKRVDQRFQLEKTMKILPGGSDESKTSVEQAEGTATYQAAVSSHPEVGAFAGGVSAKGFGSEIKPSRLRSYVMSFDAETLQRYATIRSREAVGIIEKHTEALFGKPEIVITPEGTVDSSKDEQIKISFGGMKRLVLEAVTFGSFLWDVESHVDARYHFVLN

SEQ ID NO: 4534 - protein, 243 aa, Arabidopsis thaliana
  peptide (1)..(243): Ceres Seq. ID no. 13491271
  misc_feature (1)..(243): Pfam Name: DUF760 Pfam Description: Protein of unknown function
  misc_feature (1)..(243): NCBI GI NO: 18401645 NR Description: expressed protein [Arabidopsis thaliana]
  misc_feature (1)..(243): NCBI GI NO: 17064820 NR Description: Unknown protein [Arabidopsis thaliana]
  misc_feature (1)..(243): NCBI GI NO: 15221185 NR Description: expressed protein [Arabidopsis thaliana]
  misc_feature (1)..(243): NCBI GI NO: 13561930 NR Description: unknown [Brassica napus]
  misc_feature (1)..(243): NCBI GI NO: 28301943 NR Description: unknown protein
  misc_feature (1)..(241): NCBI GI NO: 18398302 NR Description: expressed protein [Arabidopsis thaliana]
  misc_feature (1)..(241): NCBI GI NO: 32489097 NR Description: OSJNBa0093F12.3
  misc_feature (1)..(93): NCBI GI NO: 15239021 NR Description: expressed protein [Arabidopsis thaliana]
  misc_feature (149)..(238): NCBI GI NO: 15239021 NR Description: expressed protein [Arabidopsis thaliana]
  misc_feature (1)..(174): NCBI GI NO: 18397912 NR Description: expressed protein [Arabidopsis thaliana]
MEANVSLVPSVSPSSDPSGRVDTWPTKVEKLERLHSPEMYEMIHNHLALILGSRMGDLNSVAQISKLRVGQVYAASVMYGYFLKRVDQRFQLEKTMKILPGGSDESKTSVEQAEGTATYQAAVSSHPEVGAFAGGVSAKGFGSEIKPSRLRSYVMSFDAETLQRYATIRSREAVGIIEKHTEALFGKPEIVITPEGTVDSSKDEQIKISFGGMKRLVLEAVTFGSFLWDVESHVDARYHFVLN

SEQ ID NO: 4535 - DNA, 769 bp, Arabidopsis thaliana
  misc_feature (1)..(769): Ceres Seq. ID no. 13646063
aacgaacaaagaaacatacatcaaagctacatatactaaaagatatataatttctcgattgtcctgagccctcagaccaaaatctgaccatggacaaggttatgagaatgtcatcggagaaaggagtcgtgatcttcaccaaaagttcatgttgtctctgctacgccgtgcaaatccttttccgtgatcttagggttcaaccaacaatccacgagatcgacaactcggtcacgttaaggacttggcaacagcctttctcaacgtgcttggtaacgagaaagccagcagagagatattcaacatctcgggggagaaatatgttacctttgatgggttagcaaaagcttgcgcaaagcccggtgggtttccggagccagagattgttcattacaacccgaaagagttcgactttgggaagaagaaggcattccctttccgtgatcagcatttctttgcatcggtggagaaagcaaagcatgtcctcggatggaaaccggagttcgacttagtggagggtctcactgactcatacaaccttgatttcggtcgcggaacattccggaaagaagcggatttcaccactgacgacatgattctgagcaagaaacttgttcttcaataatcgaaatcctaagagttgctcattcttggcttgtatgattctgatcacccggttctcttaaagttctgaactttattgtcatctcacgtatgttatggtccggattttgttcgacttttctctaaagaagtcaagctagggacgatg

SEQ ID NO: 4536 - protein, 82 aa, Arabidopsis thaliana
  peptide (1)..(82): Ceres Seq. ID no. 13646064
  misc_feature (1)..(50): NCBI GI NO: 15227151 NR Description: glutaredoxin protein family [Arabidopsis thaliana]
  misc_feature (1)..(44): NCBI GI NO: 15241297 NR Description: glutaredoxin protein family [Arabidopsis thaliana]
MDKVMRMSSEKGVVIFTKSSCCLCYAVQILFRDLRVQPTIHEIDNSVTLRTWQQPFSTCLVTRKPAERYSTSRGRNMLPLMG

SEQ ID NO: 4537 - protein, 78 aa, Arabidopsis thaliana
  peptide (1)..(78): Ceres Seq. ID no. 13646065
  misc_feature (1)..(46): NCBI GI NO: 15227151 NR Description: glutaredoxin protein family [Arabidopsis thaliana]
  misc_feature (1)..(40): NCBI GI NO: 15241297 NR Description: glutaredoxin protein family [Arabidopsis thaliana]
MRMSSEKGVVIFTKSSCCLCYAVQILFRDLRVQPTIHEIDNSVTLRTWQQPFSTCLVTRKPAERYSTSRGRNMLPLMG

SEQ ID NO: 4538 - protein, 76 aa, Arabidopsis thaliana
  peptide (1)..(76): Ceres Seq. ID no. 13646066
  misc_feature (1)..(44): NCBI GI NO: 15227151 NR Description: glutaredoxin protein family [Arabidopsis thaliana]
  misc_feature (1)..(38): NCBI GI NO: 15241297 NR Description: glutaredoxin protein family [Arabidopsis thaliana]
MSSEKGVVIFTKSSCCLCYAVQILFRDLRVQPTIHEIDNSVTLRTWQQPFSTCLVTRKPAERYSTSRGRNMLPLMG

SEQ ID NO: 4539 - DNA, 2532 bp, Arabidopsis thaliana
  misc_feature (1)..(2532): Ceres Seq. ID no. 13504839
gaatggatataaacatcaaaattcaataattgcgatagagtatcaatcaagatcttacatataaaaaaagattcatcccccaaagaacggaacactcactcttctaaaacgatgggagagatagcaacagagttcacgccggttatggatgatgatgatgaccggtgcgttgtaccggaggtagagctcactgtacccaagaccgacgattcaactttaccggttttaacatttcggatgtgagttcttggtataggcgcgtgcattgtactctcctttatcaaccagtttttctggtacagaacgatgccgttgagtatcaccggaatctccgctcagatcgccgtcgtgccgcttggtcatctcatggcgagagtgcttccgacaaaaagattcttggaaggtacgaggtttcagtttaccttaaacccgggtgccttcaacgtcaaggaacatgttctgataactatctttgcaaattccggcgccggctctgtttacgctactcacatacttagtgctattaagctttactacaaacgttctcttcctttcctccctgcatttctcgtcatgatcaccactcagattcttggatttggttgggctggtctcttcaggaaacaccttgttgagcctggtgaaatgtggtggccaagcaatcttgttcaagtctctctctttggtgcgttacacgagaaagaaaagaaatcaagaggaggcatgagtagaactcaattcttcttaatcgtcctcgtagctagctttgcttactacatctttcctggttatcttttcaccatgttaacatcaatctcatgggtctgttggctcaatcccaaatcaattctggtaaaccaactcggttcaggtgaacatggtcttggcattggttccattggttttgattgggtcactattagtgcttatcttggaagccctttagctagtcctttgttcgcttccgtcaatgtagccattggtttcgtgctggttatgtatatcgtcacgcctgtttgttactggcttaacatttatgatgccaagaccttccctatcttctctagtcagctcttcatggggaatggctcacgttatgatgttttgagcattattgatagcaaattccatcttgaccgtgtggtttactctaggaccgggtccatcaatatgagcaccttctttgctgttacttatggtctcgggtttgctacattgtctgccaccattgtccatgttttagtcttcaacggaagtgacttgtggaagcagacaagaggggcgtttcagaagaataagaaaatggatatacacacgagaatcatgaagaaaaactacagggaagttccattgtggtggtttttggtaatccttttactgaatatcgcgcttatcatgttcatctccgtgcactacaacgctactgtgcagcttccttggtggggagtgttacttgcttgtgccattgccatcagtttcactcctttgatcggtgtcatagctgccaccactaatcaggcaccgggattgaatatcataacagagtatgttatcgggtatatctacccggaacgtcctgttgcaaacatgtgtttcaaggtctatggatacattagtatgactcaagcgctaactttcatttccgacttcaagcttggtcattacatgaagatcccgcctagatccatgttcatggctcaggtggctgggacacttgtggcggtggttgtgtacacaggaacagcctggtggttaatggaagagattcctcatctttgtgatacatccttgcttccttcagacagccaatggacttgtcccatggaccgcgttttctttgacgcctctgtgatttggggactagtgggaccacgcagggtgtttggagaccttggagaatactcaaatgtcaactggttcttcctcgttggagccatagctccactcttagtttggctagccacaaagatgtttccggctcagacatggatcgccaagattcatatccctgtccttgtgggagccaccgcaatgatgccaccagcaacagcagttaacttcactagttggctcatcgtcgcattcatctttggccacttcatcttcaagtacagaagagtgtggtggaccaagtataactatgtgttgtctggtggtttagatgctggctctgcttttatgaccatacttctgtttctagcactcggacgaaaaggaattgaagtgcagtggtggggaaattccggcgaccgagatacatgtcccttagcttcttgtccaactgctaaaggtgttgtcgtcaaaggctgtcccgtcttctagctcatgagtcatgagacaaaagcatataccaagtgctttgtacagaacacacagcaaactgataattgtaattctcggaaatgtctttactctccaagaactatatcttttgtgatagctttaaaactaggtactatcctgttctttgactgaacacaaatgctagtgattctatatgtggttccttaaaatgattttaatgcatgcttc

SEQ ID NO: 4540 - protein, 671 aa, Arabidopsis thaliana
  peptide (1)..(671): Ceres Seq. ID no. 13504840
  misc_feature (1)..(671): NCBI GI NO: 15238763 NR Description: isp4 protein [Arabidopsis thaliana]
  misc_feature (1)..(671): NCBI GI NO: 34898010 NR Description: EST D25093
  misc_feature (1)..(671): NCBI GI NO: 15236912 NR Description: oligopeptide transporter -related
  misc_feature (1)..(670): NCBI GI NO: 25553564 NR Description: putative isp4 protein
  misc_feature (1)..(671): NCBI GI NO: 15218331 NR Description: hypothetical protein [Arabidopsis thaliana]
  misc_feature (11)..(671): NCBI GI NO: 30722286 NR Description: glutathione transporter GT1 [Brassica juncea]
  misc_feature (11)..(547): NCBI GI NO: 7485100 NR Description: hypothetical protein - Arabidopsis thaliana
  misc_feature (11)..(547): NCBI GI NO: 18414644 NR Description: isp4 like protein [Arabidopsis thaliana]
  misc_feature (1)..(651): NCBI GI NO: 19112445 NR Description: sexual differentiation process protein isp4
  misc_feature (1)..(658): NCBI GI NO: 19115899 NR Description: putative pheromone response and mating-type determinationprotein
MPLSITGISAQIAVVPLGHLMARVLPTKRFLEGTRFQFTLNPGAFNVKEHVLITIFANSGAGSVYATHILSAIKLYYKRSLPFLPAFLVMITTQILGFGWAGLFRKHLVEPGEMWWPSNLVQVSLFGALHEKEKKSRGGMSRTQFFLIVLVASFAYYIFPGYLFTMLTSISWVCWLNPKSILVNQLGSGEHGLGIGSIGFDWVTISAYLGSPLASPLFASVNVAIGFVLVMYIVTPVCYWLNIYDAKTFPIFSSQLFMGNGSRYDVLSIIDSKFHLDRVVYSRTGSINMSTFFAVTYGLGFATLSATIVHVLVFNGSDLWKQTRGAFQKNKKMDIHTRIMKKNYREVPLWWFLVILLLNIALIMFISVHYNATVQLPWWGVLLACAIAISFTPLIGVIAATTNQAPGLNIITEYVIGYIYPERPVANMCFKVYGYISMTQALTFISDFKLGHYMKIPPRSMFMAQVAGTLVAVVVYTGTAWWLMEEIPHLCDTSLLPSDSQWTCPMDRVFFDASVIWGLVGPRRVFGDLGEYSNVNWFFLVGAIAPLLVWLATKMFPAQTWIAKIHIPVLVGATAMMPPATAVNFTSWLIVAFIFGHFIFKYRRVWWTKYNYVLSGGLDAGSAFMTILLFLALGRKGIEVQWWGNSGDRDTCPLASCPTAKGVVVKGCPVF

SEQ ID NO: 4541 - protein, 651 aa, Arabidopsis thaliana
  peptide (1)..(651): Ceres Seq. ID no. 13504841
  misc_feature (1)..(651): NCBI GI NO: 15238763 NR Description: isp4 protein [Arabidopsis thaliana]
  misc_feature (1)..(651): NCBI GI NO: 34898010 NR Description: EST D25093
  misc_feature (1)..(651): NCBI GI NO: 15236912 NR Description: oligopeptide transporter -related
  misc_feature (1)..(650): NCBI GI NO: 25553564 NR Description: putative isp4 protein
  misc_feature (1)..(651): NCBI GI NO: 15218331 NR Description: hypothetical protein [Arabidopsis thaliana]
  misc_feature (1)..(651): NCBI GI NO: 30722286 NR Description: glutathione transporter GT1 [Brassica juncea]
  misc_feature (1)..(527): NCBI GI NO: 7485100 NR Description: hypothetical protein - Arabidopsis thaliana
  misc_feature (1)..(527): NCBI GI NO: 18414644 NR Description: isp4 like protein [Arabidopsis thaliana]
  misc_feature (1)..(631): NCBI GI NO: 19112445 NR Description: sexual differentiation process protein isp4
  misc_feature (1)..(638): NCBI GI NO: 19115899 NR Description: putative pheromone response and mating-type determinationprotein
MARVLPTKRFLEGTRFQFTLNPGAFNVKEHVLITIFANSGAGSVYATHILSAIKLYYKRSLPFLPAFLVMITTQILGFGWAGLFRKHLVEPGEMWWPSNLVQVSLFGALHEKEKKSRGGMSRTQFFLIVLVASFAYYIFPGYLFTMLTSISWVCWLNPKSILVNQLGSGEHGLGIGSIGFDWVTISAYLGSPLASPLFASVNVAIGFVLVMYIVTPVCYWLNIYDAKTFPIFSSQLFMGNGSRYDVLSIIDSKFHLDRVVYSRTGSINMSTFFAVTYGLGFATLSATIVHVLVFNGSDLWKQTRGAFQKNKKMDIHTRIMKKNYREVPLWWFLVILLLNIALIMFISVHYNATVQLPWWGVLLACAIAISFTPLIGVIAATTNQAPGLNIITEYVIGYIYPERPVANMCFKVYGYISMTQALTFISDFKLGHYMKIPPRSMFMAQVAGTLVAVVVYTGTAWWLMEEIPHLCDTSLLPSDSQWTCPMDRVFFDASVIWGLVGPRRVFGDLGEYSNVNWFFLVGAIAPLLVWLATKMFPAQTWIAKIHIPVLVGATAMMPPATAVNFTSWLIVAFIFGHFIFKYRRVWWTKYNYVLSGGLDAGSAFMTILLFLALGRKGIEVQWWGNSGDRDTCPLASCPTAKGVVVKGCPVF

SEQ ID NO: 4542 - protein, 582 aa, Arabidopsis thaliana
  peptide (1)..(582): Ceres Seq. ID no. 13504842
  misc_feature (1)..(582): NCBI GI NO: 15238763 NR Description: isp4 protein [Arabidopsis thaliana]
  misc_feature (1)..(582): NCBI GI NO: 34898010 NR Description: EST D25093
  misc_feature (1)..(582): NCBI GI NO: 15236912 NR Description: oligopeptide transporter -related
  misc_feature (1)..(581): NCBI GI NO: 25553564 NR Description: putative isp4 protein
  misc_feature (1)..(582): NCBI GI NO: 15218331 NR Description: hypothetical protein [Arabidopsis thaliana]
  misc_feature (1)..(582): NCBI GI NO: 30722286 NR Description: glutathione transporter GT1 [Brassica juncea]
  misc_feature (1)..(458): NCBI GI NO: 7485100 NR Description: hypothetical protein - Arabidopsis thaliana
  misc_feature (1)..(458): NCBI GI NO: 18414644 NR Description: isp4 like protein [Arabidopsis thaliana]
  misc_feature (1)..(562): NCBI GI NO: 19112445 NR Description: sexual differentiation process protein isp4
  misc_feature (1)..(569): NCBI GI NO: 19115899 NR Description: putative pheromone response and mating-type determinationprotein
MITTQILGFGWAGLFRKHLVEPGEMWWPSNLVQVSLFGALHEKEKKSRGGMSRTQFFLIVLVASFAYYIFPGYLFTMLTSISWVCWLNPKSILVNQLGSGEHGLGIGSIGFDWVTISAYLGSPLASPLFASVNVAIGFVLVMYIVTPVCYWLNIYDAKTFPIFSSQLFMGNGSRYDVLSIIDSKFHLDRVVYSRTGSINMSTFFAVTYGLGFATLSATIVHVLVFNGSDLWKQTRGAFQKNKKMDIHTRIMKKNYREVPLWWFLVILLLNIALIMFISVHYNATVQLPWWGVLLACAIAISFTPLIGVIAATTNQAPGLNIITEYVIGYIYPERPVANMCFKVYGYISMTQALTFISDFKLGHYMKIPPRSMFMAQVAGTLVAVVVYTGTAWWLMEEIPHLCDTSLLPSDSQWTCPMDRVFFDASVIWGLVGPRRVFGDLGEYSNVNWFFLVGAIAPLLVWLATKMFPAQTWIAKIHIPVLVGATAMMPPATAVNFTSWLIVAFIFGHFIFKYRRVWWTKYNYVLSGGLDAGSAFMTILLFLALGRKGIEVQWWGNSGDRDTCPLASCPTAKGVVVKGCPVF

SEQ ID NO: 4543 - DNA, 1435 bp, Arabidopsis thaliana
  misc_feature (1)..(1435): Ceres Seq. ID no. 12562265
atgatgaagtgagaaattctgaaaaatgggattacctcaaaataagctcagttttttctgcttcttcttcctcgtctctgtactaactcttgccccattggctttctccgagatcttcttagaggagcatttcgaaggtggatggaaaagtaggtgggtcttgtctgattggaaaagaaacgaaggcaaagctggaacctttaagcacactgccggtaaatggcccggcgatcctgacaataaaggtattcagacttataatgatgccaagcattatgcgatttctgcaaagattcctgagtttagcaacaaaaaccggactcttgttgtccagtactcagtcaagattgaacaagacattgaatgtggtggtgcttacattaagctcctgtctggctatgttaaccagaagcagtttggtggtgatactccatacagtctaatgtttggaccagatatatgcggaacacagacgaagaagcttcatgttatagtttcatatcagggacagaattatccaatcaaaaaggatttgcaatgtgaaacagacaaattaaatcatttctacacatttattctgcgtcctgacgcttcttacagcgttctggtggataataaagagagagaatttggcagtatgtacacagactgggacatccttcctccaaggaagatcaaggtcaagaatgcaaagaagccagaggactgggatgatagagagtacatcgatgaccccaacgatgtcaaacccgagggttttgattctattccacgtgaaattccagatcgtaaagctaaagagcccgaggactgggacgaggaagaaaatggtctctgggaacctccaaagatcccaaattctgcgtacaaaggtccttggaaagcaaagagaatcaagaacccgaactacaagggaaaatggaagaacccatggatagataatccagaatttgaagatgatccagatctttacgttctgaagtctatcaaatatgcaggcattgaagtatggcaggtgaaggctggctcaatctttgacaatatattgatctgcgatgacccggcatatgcaagaagcatcgtggatgactattttgcccaacacagggagtctgagaaggagttatttgcggaagcagagaaagaaagaaaagctagagaagatgaggaagctcggatagcacgggaagaaggtgaacgcaggcggaaagaaagggaccaccggtatggagacaggaggaggcgttacaaacggccgaatccacgtgattatatggatgattaccatgacgagctatgaggcgcagagtggtgggcatttggcaaagcattgggggaaattatctatattttgctttgaatgtgtgtttgtaatttcataatttgtaaccttttgtattcatattcttataatgtattttggcatgaaaacttg

SEQ ID NO: 4544 - protein, 424 aa, Arabidopsis thaliana
  peptide (1)..(424): Ceres Seq. ID no. 12562266
  misc_feature (30)..(342): Pfam Name: Pfam Description:  Calreticulin family
  misc_feature (1)..(424): NCBI GI NO: 18390896 NR Description: calreticulin, putative; protein id: At1g08450
  misc_feature (1)..(424): NCBI GI NO: 27311777 NR Description: calreticulin, putative [Arabidopsis thaliana]
  misc_feature (1)..(424): NCBI GI NO: 12643531 NR Description: Calreticulin 3 precursor
  misc_feature (74)..(288): NCBI GI NO: 6664320 NR Description: T27G7.13 [Arabidopsis thaliana]
  misc_feature (1)..(74): NCBI GI NO: 6664320 NR Description: T27G7.13 [Arabidopsis thaliana]
  misc_feature (381)..(421): NCBI GI NO: 6664320 NR Description: T27G7.13 [Arabidopsis thaliana]
  misc_feature (356)..(381): NCBI GI NO: 6664320 NR Description: T27G7.13 [Arabidopsis thaliana]
  misc_feature (15)..(423): NCBI GI NO: 9858814 NR Description: calreticulin [Pinus taeda]
  misc_feature (13)..(424): NCBI GI NO: 11131631 NR Description: Calreticulin precursor
  misc_feature (19)..(424): NCBI GI NO: 11131745 NR Description: Calreticulin precursor
MGLPQNKLSFFCFFFLVSVLTLAPLAFSEIFLEEHFEGGWKSRWVLSDWKRNEGKAGTFKHTAGKWPGDPDNKGIQTYNDAKHYAISAKIPEFSNKNRTLVVQYSVKIEQDIECGGAYIKLLSGYVNQKQFGGDTPYSLMFGPDICGTQTKKLHVIVSYQGQNYPIKKDLQCETDKLNHFYTFILRPDASYSVLVDNKEREFGSMYTDWDILPPRKIKVKNAKKPEDWDDREYIDDPNDVKPEGFDSIPREIPDRKAKEPEDWDEEENGLWEPPKIPNSAYKGPWKAKRIKNPNYKGKWKNPWIDNPEFEDDPDLYVLKSIKYAGIEVWQVKAGSIFDNILICDDPAYARSIVDDYFAQHRESEKELFAEAEKERKAREDEEARIAREEGERRRKERDHRYGDRRRRYKRPNPRDYMDDYHDEL

SEQ ID NO: 4545 - protein, 285 aa, Arabidopsis thaliana
  peptide (1)..(285): Ceres Seq. ID no. 12562267
  misc_feature (1)..(203): Pfam Name: Pfam Description:  Calreticulin family
  misc_feature (1)..(285): NCBI GI NO: 18390896 NR Description: calreticulin, putative; protein id: At1g08450
  misc_feature (1)..(285): NCBI GI NO: 27311777 NR Description: calreticulin, putative [Arabidopsis thaliana]
  misc_feature (1)..(285): NCBI GI NO: 12643531 NR Description: Calreticulin 3 precursor
  misc_feature (1)..(149): NCBI GI NO: 6664320 NR Description: T27G7.13 [Arabidopsis thaliana]
  misc_feature (242)..(282): NCBI GI NO: 6664320 NR Description: T27G7.13 [Arabidopsis thaliana]
  misc_feature (217)..(242): NCBI GI NO: 6664320 NR Description: T27G7.13 [Arabidopsis thaliana]
  misc_feature (1)..(284): NCBI GI NO: 9858814 NR Description: calreticulin [Pinus taeda]
  misc_feature (1)..(285): NCBI GI NO: 11131631 NR Description: Calreticulin precursor
  misc_feature (1)..(285): NCBI GI NO: 11131745 NR Description: Calreticulin precursor
  misc_feature (1)..(285): NCBI GI NO: 11131769 NR Description: Calreticulin precursor
MFGPDICGTQTKKLHVIVSYQGQNYPIKKDLQCETDKLNHFYTFILRPDASYSVLVDNKEREFGSMYTDWDILPPRKIKVKNAKKPEDWDDREYIDDPNDVKPEGFDSIPREIPDRKAKEPEDWDEEENGLWEPPKIPNSAYKGPWKAKRIKNPNYKGKWKNPWIDNPEFEDDPDLYVLKSIKYAGIEVWQVKAGSIFDNILICDDPAYARSIVDDYFAQHRESEKELFAEAEKERKAREDEEARIAREEGERRRKERDHRYGDRRRRYKRPNPRDYMDDYHDEL

SEQ ID NO: 4546 - protein, 220 aa, Arabidopsis thaliana
  peptide (1)..(220): Ceres Seq. ID no. 12562268
  misc_feature (1)..(138): Pfam Name: Pfam Description:  Calreticulin family
  misc_feature (1)..(220): NCBI GI NO: 18390896 NR Description: calreticulin, putative; protein id: At1g08450
  misc_feature (1)..(220): NCBI GI NO: 27311777 NR Description: calreticulin, putative [Arabidopsis thaliana]
  misc_feature (1)..(220): NCBI GI NO: 12643531 NR Description: Calreticulin 3 precursor
  misc_feature (1)..(84): NCBI GI NO: 6664320 NR Description: T27G7.13 [Arabidopsis thaliana]
  misc_feature (177)..(217): NCBI GI NO: 6664320 NR Description: T27G7.13 [Arabidopsis thaliana]
  misc_feature (152)..(177): NCBI GI NO: 6664320 NR Description: T27G7.13 [Arabidopsis thaliana]
  misc_feature (1)..(219): NCBI GI NO: 9858814 NR Description: calreticulin [Pinus taeda]
  misc_feature (1)..(220): NCBI GI NO: 11131631 NR Description: Calreticulin precursor
  misc_feature (1)..(220): NCBI GI NO: 11131745 NR Description: Calreticulin precursor
  misc_feature (1)..(220): NCBI GI NO: 11131769 NR Description: Calreticulin precursor
MYTDWDILPPRKIKVKNAKKPEDWDDREYIDDPNDVKPEGFDSIPREIPDRKAKEPEDWDEEENGLWEPPKIPNSAYKGPWKAKRIKNPNYKGKWKNPWIDNPEFEDDPDLYVLKSIKYAGIEVWQVKAGSIFDNILICDDPAYARSIVDDYFAQHRESEKELFAEAEKERKAREDEEARIAREEGERRRKERDHRYGDRRRRYKRPNPRDYMDDYHDEL

SEQ ID NO: 4547 - DNA, 1282 bp, Arabidopsis thaliana
  misc_feature (1)..(1282): Ceres Seq. ID no. 12488272
atcaccattgctttgttttgttcgtcaaatataatcaattttaaatttcttctcttctcttcaaacgaatcgcctttttcgataatctctttgcatcgatttcatcatggctactcaaacggatctcgctcagcccaagcttgatatgaccaaggaggagaaagagaggttgaagtatttgcaattcgtgcaagctgctgctgtggaagctctgcttcgctttgctcttatttacgctaaggcaaaggacaagtctggtcctttgaaacctggtgttgaatctgttgaaggagctgtcaagactgtcgttggtcctgtctacgagaaataccacgacgtccctgttgaggtccttaaatacatggaccagaaggtacaattttgactctttccctatctttggatcttgctgaaagtgcctttgttgatgaacaatgaatgaatctgtgttgttgattgtatatccacttcatcgaacatatgtgattaaaaaagtacagttaaagttgtgatgatttcatatcatctctttggtagaaggttcaggttaacgggtcaatgtcattatgttctgtagagtccctctttttgaagctgacaagtttgttttgcgttgttgcaggttgatatgtctgtgactgagcttgaccgtcgtgtcccaccagtcgtcaagcaagtgtctgcccaagccatctccgctgctcagatagcacccattgtggcacgtgcgttggcctctgaggttcgacgtgctggtgttgttgaaaccgcttctggaatggctaaatccgtctactccaagtacgagcctgctgctaaggagttgtatgcaaactatgagccaaaagcaaagcagtgtgccgtttcagcttggaagaagcttaaccagcttcctctattcccaaggctgggctcaagttgctgtaccaacagctgctttctgctctgagaagtacaatgatactgtggttaaggctgcagagaaagggtacagagtcacatcgtacatgccattggttccaacagagaggatctcaaaaatcttcgctgaggagaaagctgagaccgagcctttggagttccatccacttgattgatatgggtgttttgttagtgtgattttttgttttgttgggattaaggtgaaccggatcttggttagcgattgatctctggttctcgttcttttttttctttgtcatgaacttttgttgtttcgtttaataatcaaaagttgtataatctaagtttgggattaccaccctattgagtattgagtgat

SEQ ID NO: 4548 - protein, 106 aa, Arabidopsis thaliana
  peptide (1)..(106): Ceres Seq. ID no. 12488273
  misc_feature (1)..(104): Pfam Name: REF Pfam Description: Rubber elongation factor protein
  misc_feature (1)..(104): NCBI GI NO: 15230002 NR Description: stress related protein, putative
  misc_feature (1)..(94): NCBI GI NO: 15214303 NR Description: Stress-related protein
  misc_feature (1)..(94): NCBI GI NO: 22831130 NR Description: putative stress-related protein
  misc_feature (1)..(94): NCBI GI NO: 29367349 NR Description: stress-related protein-like protein
  misc_feature (1)..(94): NCBI GI NO: 37622210 NR Description: small rubber particle protein [Hevea brasiliensis]
  misc_feature (1)..(92): NCBI GI NO: 15214353 NR Description: Hypothetical protein from PAC P0001A07
  misc_feature (1)..(96): NCBI GI NO: 14423933 NR Description: Small rubber particle protein
  misc_feature (6)..(94): NCBI GI NO: 15227131 NR Description: unknown protein; protein id: At2g47780.1
  misc_feature (1)..(106): NCBI GI NO: 33332330 NR Description: rubber synthesis protein [Parthenium argentatum]
  misc_feature (32)..(104): NCBI GI NO: 15214302 NR Description: Stress-related protein (PvSRP)
MSVTELDRRVPPVVKQVSAQAISAAQIAPIVARALASEVRRAGVVETASGMAKSVYSKYEPAAKELYANYEPKAKQCAVSAWKKLNQLPLFPRLGSSCCTNSCFLL

SEQ ID NO: 4549 - protein, 92 aa, Arabidopsis thaliana
  peptide (1)..(92): Ceres Seq. ID no. 12488274
  misc_feature (13)..(90): Pfam Name: REF Pfam Description: Rubber elongation factor protein
  misc_feature (1)..(90): NCBI GI NO: 15230002 NR Description: stress related protein, putative
  misc_feature (1)..(91): NCBI GI NO: 15214303 NR Description: Stress-related protein
  misc_feature (1)..(90): NCBI GI NO: 22831130 NR Description: putative stress-related protein
  misc_feature (1)..(90): NCBI GI NO: 29367349 NR Description: stress-related protein-like protein
  misc_feature (18)..(90): NCBI GI NO: 15214353 NR Description: Hypothetical protein from PAC P0001A07
  misc_feature (14)..(90): NCBI GI NO: 14423933 NR Description: Small rubber particle protein
  misc_feature (8)..(90): NCBI GI NO: 15227131 NR Description: unknown protein; protein id: At2g47780.1
  misc_feature (8)..(90): NCBI GI NO: 33332330 NR Description: rubber synthesis protein [Parthenium argentatum]
  misc_feature (37)..(90): NCBI GI NO: 15214302 NR Description: Stress-related protein (PvSRP)
  misc_feature (17)..(90): NCBI GI NO: 38122474 NR Description: rubber elongation factor [Hevea brasiliensis]
MATQTDLAQPKLDMTKEEKERLKYLQFVQAAAVEALLRFALIYAKAKDKSGPLKPGVESVEGAVKTVVGPVYEKYHDVPVEVLKYMDQKVQF

SEQ ID NO: 4550 - protein, 89 aa, Arabidopsis thaliana
  peptide (1)..(89): Ceres Seq. ID no. 12488275
  misc_feature (29)..(89): NCBI GI NO: 15230002 NR Description: stress related protein, putative
  misc_feature (17)..(78): NCBI GI NO: 15214303 NR Description: Stress-related protein
  misc_feature (17)..(82): NCBI GI NO: 22831130 NR Description: putative stress-related protein
  misc_feature (17)..(82): NCBI GI NO: 29367349 NR Description: stress-related protein-like protein
  misc_feature (29)..(83): NCBI GI NO: 37622210 NR Description: small rubber particle protein [Hevea brasiliensis]
  misc_feature (30)..(88): NCBI GI NO: 15214353 NR Description: Hypothetical protein from PAC P0001A07
  misc_feature (29)..(76): NCBI GI NO: 14423933 NR Description: Small rubber particle protein
  misc_feature (29)..(81): NCBI GI NO: 15227131 NR Description: unknown protein; protein id: At2g47780.1
  misc_feature (17)..(80): NCBI GI NO: 33332330 NR Description: rubber synthesis protein [Parthenium argentatum]
  misc_feature (29)..(74): NCBI GI NO: 15214302 NR Description: Stress-related protein (PvSRP)
MQTMSQKQSSVPFQLGRSLTSFLYSQGWAQVAVPTAAFCSEKYNDTVVKAAEKGYRVTSYMPLVPTERISKIFAEEKAETEPLEFHPLD

SEQ ID NO: 4551 - DNA, 745 bp, Arabidopsis thaliana
  misc_feature (1)..(745): Ceres Seq. ID no. 12337880
atttcttcgtctctgtctccaaaatcgaatcaaaatctctaaagtttcaatttttttgttctgttctttttatttttttaaagaatggcttcaatttctgcaactttgccttcgccattgttactcacacagagaaaatccaatctcacatcgattcaaaaactcccattttctctaactcgaggtacgaatgatctttctccattatctcttactcgaaaccctagcagcatcagtctgatggtgaaagctagtggagaaagctcagattcatcgactgatctcgacgttgttagtacgattcagaatgtttgggataagtctgaagataggttaggtcttattggtttgggttttgctggtattgtagctctttgggcatcattgaatctcatcacggcaatcgacaaattgcccgttatctcgagcggattcgaactagttggtatcttgttctccacgtggttcacatatcgatatctcttgttcaaaccggacagacaggagctttcgaaaattgtcaagaaatcagtagcggatatacttggccagtgaaccttgtgtgtgtgataatacttcatctttggaagatgatttgtttgcaagtttgtaaaattacatgacagggtggttgttgtttctagtccaataatgtcatgcatttgaaacctgtaaatactttattgttggtttttggttgtgagcaaaatcaatcttttctaatttcaaagattctcttttatgt

SEQ ID NO: 4552 - protein, 156 aa, Arabidopsis thaliana
  peptide (1)..(156): Ceres Seq. ID no. 12337881
  misc_feature (1)..(156): NCBI GI NO: 18403896 NR Description: expressed protein; protein id: At1g52220
  misc_feature (1)..(156): NCBI GI NO: 21554231 NR Description: unknown [Arabidopsis thaliana]
  misc_feature (1)..(156): NCBI GI NO: 34909746 NR Description: contains ESTsAU066201
  misc_feature (1)..(155): NCBI GI NO: 18407178 NR Description: expressed protein; protein id: At2g46820
  misc_feature (1)..(155): NCBI GI NO: 21555057 NR Description: unknown [Arabidopsis thaliana]
  misc_feature (48)..(155): NCBI GI NO: 34393236 NR Description: unknown protein
  misc_feature (46)..(143): NCBI GI NO: 38175474 NR Description: unknown protein
  misc_feature (3)..(151): NCBI GI NO: 687677 NR Description: unknown
  misc_feature (3)..(151): NCBI GI NO: 18411555 NR Description: expressed protein; protein id: At4g01150
  misc_feature (68)..(154): NCBI GI NO: 37536446 NR Description: hypothetical protein
MASISATLPSPLLLTQRKSNLTSIQKLPFSLTRGTNDLSPLSLTRNPSSISLMVKASGESSDSSTDLDVVSTIQNVWDKSEDRLGLIGLGFAGIVALWASLNLITAIDKLPVISSGFELVGILFSTWFTYRYLLFKPDRQELSKIVKKSVADILGQ

SEQ ID NO: 4553 - protein, 104 aa, Arabidopsis thaliana
  peptide (1)..(104): Ceres Seq. ID no. 12337882
  misc_feature (1)..(104): NCBI GI NO: 18403896 NR Description: expressed protein; protein id: At1g52220
  misc_feature (1)..(104): NCBI GI NO: 21554231 NR Description: unknown [Arabidopsis thaliana]
  misc_feature (1)..(104): NCBI GI NO: 34909746 NR Description: contains ESTsAU066201
  misc_feature (1)..(103): NCBI GI NO: 18407178 NR Description: expressed protein; protein id: At2g46820
  misc_feature (1)..(103): NCBI GI NO: 21555057 NR Description: unknown [Arabidopsis thaliana]
  misc_feature (1)..(103): NCBI GI NO: 34393236 NR Description: unknown protein
  misc_feature (1)..(91): NCBI GI NO: 38175474 NR Description: unknown protein
  misc_feature (1)..(99): NCBI GI NO: 687677 NR Description: unknown
  misc_feature (1)..(99): NCBI GI NO: 18411555 NR Description: expressed protein; protein id: At4g01150
  misc_feature (16)..(102): NCBI GI NO: 37536446 NR Description: hypothetical protein
MVKASGESSDSSTDLDVVSTIQNVWDKSEDRLGLIGLGFAGIVALWASLNLITAIDKLPVISSGFELVGILFSTWFTYRYLLFKPDRQELSKIVKKSVADILGQ

SEQ ID NO: 4554 - DNA, 909 bp, Arabidopsis thaliana
  misc_feature (1)..(909): Ceres Seq. ID no. 13489337
gtaatttttgggtttttttttttcgatttgatcaggcgaattccggcgaagagaagttgaagctctactcttactggagaagctcgtgtgctcatcgtgtccgtatcgccctcgctttgaaagggcttgattatgagtatataccagtgaatttgctcaagggtgatcaattcgattcagtttatcgttttgatcttcaagatttcaagaagatcaatccaatgggaactgtaccagctctggtggatggagatgttgtgattaatgattcttttgcgataataatgtatctggatgagaagtaccctgagccacctttgttacctcgtgacctccataaacgagctgtgaattaccaggcaatgagtattgtcttgtctggcatacagcctcatcaaaatctggctgttattaggtatatcgaggaaaagataaatgtggaggagaagactgcttgggttaataatgctatcacaaaaggatttacagctctcgagaaactgttggtgaattgcgctgggaaacttgcgactggtgatgaaatttacctggctgatctctttctagcaccacagatccacggagcaatcaacagattccagattaacatggaaccatacccaaatcttgcaaaatgttacgaatcatacaaggaactgcctgtgtttcaaaatgcactaccggaaaagcagccagatgctccttcttccaccaactgattccgtgaacccgtaagctacgctcagcttaataaaacctcagacaacaacaacaatgatgagagtaataccttgtactcgtacatgtatcatataaaccagttacatcttagttcctctacttttatcatataaaccagttacatcttactcacagagtttaaaatttgcaaagatatatcatacgttc

SEQ ID NO: 4555 - protein, 238 aa, Arabidopsis thaliana
  peptide (1)..(238): Ceres Seq. ID no. 13489338
  misc_feature (12)..(237): NCBI GI NO: 30677995 NR Description: glutathione transferase, putative
  misc_feature (12)..(237): NCBI GI NO: 15226952 NR Description: glutathione transferase, putative
  misc_feature (12)..(238): NCBI GI NO: 28932698 NR Description: glutathione S-transferase zeta [Brassica napus]
  misc_feature (12)..(238): NCBI GI NO: 28932694 NR Description: glutathione S-transferase zeta [Brassica napus]
  misc_feature (16)..(236): NCBI GI NO: 15226949 NR Description: glutathione transferase, putative
  misc_feature (10)..(237): NCBI GI NO: 11132235 NR Description: Glutathione S-transferase zeta class
  misc_feature (16)..(236): NCBI GI NO: 29420155 NR Description: glutathione S-transferase Z1 [Malva pusilla]
  misc_feature (12)..(235): NCBI GI NO: 24061762 NR Description: glutathione S-transferase [Capsicum annuum]
  misc_feature (12)..(233): NCBI GI NO: 11385465 NR Description: glutathione S-transferase GST 25 [Glycine max]
  misc_feature (21)..(237): NCBI GI NO: 11385485 NR Description: glutathione S-transferase GST 17 [Zea mays]
NFWVFFFRFDQANSGEEKLKLYSYWRSSCAHRVRIALALKGLDYEYIPVNLLKGDQFDSVYRFDLQDFKKINPMGTVPALVDGDVVINDSFAIIMYLDEKYPEPPLLPRDLHKRAVNYQAMSIVLSGIQPHQNLAVIRYIEEKINVEEKTAWVNNAITKGFTALEKLLVNCAGKLATGDEIYLADLFLAPQIHGAINRFQINMEPYPNLAKCYESYKELPVFQNALPEKQPDAPSSTN

SEQ ID NO: 4556 - protein, 165 aa, Arabidopsis thaliana
  peptide (1)..(165): Ceres Seq. ID no. 13489339
  misc_feature (1)..(164): NCBI GI NO: 30677995 NR Description: glutathione transferase, putative
  misc_feature (1)..(164): NCBI GI NO: 15226952 NR Description: glutathione transferase, putative
  misc_feature (1)..(165): NCBI GI NO: 28932698 NR Description: glutathione S-transferase zeta [Brassica napus]
  misc_feature (1)..(165): NCBI GI NO: 28932694 NR Description: glutathione S-transferase zeta [Brassica napus]
  misc_feature (1)..(163): NCBI GI NO: 15226949 NR Description: glutathione transferase, putative
  misc_feature (1)..(164): NCBI GI NO: 11132235 NR Description: Glutathione S-transferase zeta class
  misc_feature (1)..(163): NCBI GI NO: 29420155 NR Description: glutathione S-transferase Z1 [Malva pusilla]
  misc_feature (1)..(162): NCBI GI NO: 24061762 NR Description: glutathione S-transferase [Capsicum annuum]
  misc_feature (1)..(160): NCBI GI NO: 11385465 NR Description: glutathione S-transferase GST 25 [Glycine max]
  misc_feature (1)..(164): NCBI GI NO: 11385485 NR Description: glutathione S-transferase GST 17 [Zea mays]
MGTVPALVDGDVVINDSFAIIMYLDEKYPEPPLLPRDLHKRAVNYQAMSIVLSGIQPHQNLAVIRYIEEKINVEEKTAWVNNAITKGFTALEKLLVNCAGKLATGDEIYLADLFLAPQIHGAINRFQINMEPYPNLAKCYESYKELPVFQNALPEKQPDAPSSTN

SEQ ID NO: 4557 - protein, 144 aa, Arabidopsis thaliana
  peptide (1)..(144): Ceres Seq. ID no. 13489340
  misc_feature (1)..(143): NCBI GI NO: 30677995 NR Description: glutathione transferase, putative
  misc_feature (1)..(143): NCBI GI NO: 15226952 NR Description: glutathione transferase, putative
  misc_feature (1)..(144): NCBI GI NO: 28932698 NR Description: glutathione S-transferase zeta [Brassica napus]
  misc_feature (1)..(144): NCBI GI NO: 28932694 NR Description: glutathione S-transferase zeta [Brassica napus]
  misc_feature (1)..(142): NCBI GI NO: 15226949 NR Description: glutathione transferase, putative
  misc_feature (1)..(143): NCBI GI NO: 11132235 NR Description: Glutathione S-transferase zeta class
  misc_feature (1)..(142): NCBI GI NO: 29420155 NR Description: glutathione S-transferase Z1 [Malva pusilla]
  misc_feature (1)..(141): NCBI GI NO: 24061762 NR Description: glutathione S-transferase [Capsicum annuum]
  misc_feature (1)..(139): NCBI GI NO: 11385465 NR Description: glutathione S-transferase GST 25 [Glycine max]
  misc_feature (1)..(143): NCBI GI NO: 11385485 NR Description: glutathione S-transferase GST 17 [Zea mays]
MYLDEKYPEPPLLPRDLHKRAVNYQAMSIVLSGIQPHQNLAVIRYIEEKINVEEKTAWVNNAITKGFTALEKLLVNCAGKLATGDEIYLADLFLAPQIHGAINRFQINMEPYPNLAKCYESYKELPVFQNALPEKQPDAPSSTN

SEQ ID NO: 4558 - DNA, 1644 bp, Arabidopsis thaliana
  misc_feature (1)..(1644): Ceres Seq. ID no. 13508986
atgtcaggattcgaagatggattttcagctgaaaagctattctcacaaggatactcatacacctacgacgatgtgatatttctaccacacttcatcgacttttccactgacgccgtctcgctatccacgcgtctcagcaagcgcgtcccactctcgatcccatgcgtcgcttcgccgatggacactgtctcggaatcccacatggctgctgcaatggctgctcttggaggaatcggaatcgtgcactataactgcgacatcgatactcaagcttccgttatccgtcacgctaaatcgcttcaagttccgattgcgtctgatgctgtttttaaatgcccagagcaccagattggttctgttgatgattttggtccttcttccttcgtttttgtctcgcagacgggaacattgacaccgaaattgttgggttatgtttcaaaatcggagtggtcgagtatgaaagatgaccaaaaggaggtgaagatatatgattacatgaagagttgtgagaacaaagattactatgtgccatgggatattgatcttgacaagattgaggcggttttggaagataagcagaaagggtttgttgttctggagaaggaaggtgagactgtgaacgtagtaacaaaagacgatgtggagagggttaaaggatatcccaagttagggtcaggaactgttggtgcagacaagaaatggatggttggtgctgctatagggacaagggaatcagacaaggagaggctagagcacttagtgaaagctggagctaatgttgtggtgttggatagttcgcaagggaactcgatttaccagcttgagatgatcaagtatgtgaagaatacgtatccggagttggatgtggtcggtgggaatgtggtgactatgtaccaggctgagaacttgatcaaagcaggagttgatgggttaagagttggtatgggatctggatctatatgcacaacacaagaggtttgtgccgttggacgaggacaggctactgccgtgtacaaagtctcgacactagctgctcagcacggtgtacctgttatcgcagatggtggcatctcaaactcaggtcacattgtgaaggctctagttctgggagcatcaacggtgatgatgggaagcttcttggctggaagcaccgaggctcctggagcctatgaatatcgaaacggtaggagagtgaagaaatacagaggtatgggttcattagaagcaatgaccaaaggaagcgaccagagatacttgggagataccgcgaaactcaagattgcacaaggagtggttggagcggttgcagataaaggctcagtgttgaagtttataccatacacaatgcatgccgtgaagcaaggttttcaagatctcggtgcttcttctttgcagtctgctcacgagctattgagagataatacccttagactcgaggctcgtaccggtgcagcacagatagaaggtggaatccatggactggtgtcttacgaaaagaaatcgttttagctttccccagtttactttcttatgttacaatgcactacagcacttgtagtgtcaacaataaggtcttgtctcacatgtaatcctgtaatagttgaatcgtgtttcttaatgctatttcactgccccatttcaatc

SEQ ID NO: 4559 - protein, 502 aa, Arabidopsis thaliana
  peptide (1)..(502): Ceres Seq. ID no. 13508987
  misc_feature (18)..(100): Pfam Name: Pfam Description:  IMP dehydrogenase / GMP reductase domain
  misc_feature (1)..(502): NCBI GI NO: 15219217 NR Description: inosine-5'-monophosphate dehydrogenase, putative
  misc_feature (1)..(502): NCBI GI NO: 21618070 NR Description: inosine-5'-monophosphate dehydrogenase, putative
  misc_feature (1)..(502): NCBI GI NO: 15219385 NR Description: inosine-5'-monophosphate dehydrogenase
  misc_feature (5)..(502): NCBI GI NO: 28413147 NR Description: inosine monophosphate dehydrogenase
  misc_feature (5)..(502): NCBI GI NO: 4468193 NR Description: inosine monophosphate dehydrogenase [Glycine max]
  misc_feature (153)..(502): NCBI GI NO: 26451248 NR Description: putative inosine-5'-monophosphate dehydrogenase
  misc_feature (5)..(502): NCBI GI NO: 34897074 NR Description: putative inosine monophosphate dehydrogenase
  misc_feature (26)..(502): NCBI GI NO: 38096048 NR Description: inosine-5'-phosphate dehydrogenase
  misc_feature (111)..(502): NCBI GI NO: 16417597 NR Description: inosine-5'-monophosphate dehydrogenase-like
  misc_feature (5)..(502): NCBI GI NO: 4504689 NR Description: IMP
MSGFEDGFSAEKLFSQGYSYTYDDVIFLPHFIDFSTDAVSLSTRLSKRVPLSIPCVASPMDTVSESHMAAAMAALGGIGIVHYNCDIDTQASVIRHAKSLQVPIASDAVFKCPEHQIGSVDDFGPSSFVFVSQTGTLTPKLLGYVSKSEWSSMKDDQKEVKIYDYMKSCENKDYYVPWDIDLDKIEAVLEDKQKGFVVLEKEGETVNVVTKDDVERVKGYPKLGSGTVGADKKWMVGAAIGTRESDKERLEHLVKAGANVVVLDSSQGNSIYQLEMIKYVKNTYPELDVVGGNVVTMYQAENLIKAGVDGLRVGMGSGSICTTQEVCAVGRGQATAVYKVSTLAAQHGVPVIADGGISNSGHIVKALVLGASTVMMGSFLAGSTEAPGAYEYRNGRRVKKYRGMGSLEAMTKGSDQRYLGDTAKLKIAQGVVGAVADKGSVLKFIPYTMHAVKQGFQDLGASSLQSAHELLRDNTLRLEARTGAAQIEGGIHGLVSYEKKSF

SEQ ID NO: 4560 - protein, 443 aa, Arabidopsis thaliana
  peptide (1)..(443): Ceres Seq. ID no. 13508988
  misc_feature (161)..(433): Pfam Name: Pfam Description:  IMP dehydrogenase / GMP reductase domain
  misc_feature (1)..(443): NCBI GI NO: 15219217 NR Description: inosine-5'-monophosphate dehydrogenase, putative
  misc_feature (1)..(443): NCBI GI NO: 21618070 NR Description: inosine-5'-monophosphate dehydrogenase, putative
  misc_feature (1)..(443): NCBI GI NO: 15219385 NR Description: inosine-5'-monophosphate dehydrogenase
  misc_feature (1)..(443): NCBI GI NO: 28413147 NR Description: inosine monophosphate dehydrogenase
  misc_feature (1)..(443): NCBI GI NO: 4468193 NR Description: inosine monophosphate dehydrogenase [Glycine max]
  misc_feature (94)..(443): NCBI GI NO: 26451248 NR Description: putative inosine-5'-monophosphate dehydrogenase
  misc_feature (1)..(443): NCBI GI NO: 34897074 NR Description: putative inosine monophosphate dehydrogenase
  misc_feature (1)..(443): NCBI GI NO: 38096048 NR Description: inosine-5'-phosphate dehydrogenase
  misc_feature (52)..(443): NCBI GI NO: 16417597 NR Description: inosine-5'-monophosphate dehydrogenase-like
  misc_feature (1)..(443): NCBI GI NO: 4504689 NR Description: IMP
MDTVSESHMAAAMAALGGIGIVHYNCDIDTQASVIRHAKSLQVPIASDAVFKCPEHQIGSVDDFGPSSFVFVSQTGTLTPKLLGYVSKSEWSSMKDDQKEVKIYDYMKSCENKDYYVPWDIDLDKIEAVLEDKQKGFVVLEKEGETVNVVTKDDVERVKGYPKLGSGTVGADKKWMVGAAIGTRESDKERLEHLVKAGANVVVLDSSQGNSIYQLEMIKYVKNTYPELDVVGGNVVTMYQAENLIKAGVDGLRVGMGSGSICTTQEVCAVGRGQATAVYKVSTLAAQHGVPVIADGGISNSGHIVKALVLGASTVMMGSFLAGSTEAPGAYEYRNGRRVKKYRGMGSLEAMTKGSDQRYLGDTAKLKIAQGVVGAVADKGSVLKFIPYTMHAVKQGFQDLGASSLQSAHELLRDNTLRLEARTGAAQIEGGIHGLVSYEKKSF

SEQ ID NO: 4561 - protein, 435 aa, Arabidopsis thaliana
  peptide (1)..(435): Ceres Seq. ID no. 13508989
  misc_feature (153)..(425): Pfam Name: Pfam Description:  IMP dehydrogenase / GMP reductase domain
  misc_feature (1)..(435): NCBI GI NO: 15219217 NR Description: inosine-5'-monophosphate dehydrogenase, putative
  misc_feature (1)..(435): NCBI GI NO: 21618070 NR Description: inosine-5'-monophosphate dehydrogenase, putative
  misc_feature (1)..(435): NCBI GI NO: 15219385 NR Description: inosine-5'-monophosphate dehydrogenase
  misc_feature (1)..(435): NCBI GI NO: 28413147 NR Description: inosine monophosphate dehydrogenase
  misc_feature (1)..(435): NCBI GI NO: 4468193 NR Description: inosine monophosphate dehydrogenase [Glycine max]
  misc_feature (86)..(435): NCBI GI NO: 26451248 NR Description: putative inosine-5'-monophosphate dehydrogenase
  misc_feature (1)..(435): NCBI GI NO: 34897074 NR Description: putative inosine monophosphate dehydrogenase
  misc_feature (1)..(435): NCBI GI NO: 38096048 NR Description: inosine-5'-phosphate dehydrogenase
  misc_feature (44)..(435): NCBI GI NO: 16417597 NR Description: inosine-5'-monophosphate dehydrogenase-like
  misc_feature (1)..(435): NCBI GI NO: 4504689 NR Description: IMP
MAAAMAALGGIGIVHYNCDIDTQASVIRHAKSLQVPIASDAVFKCPEHQIGSVDDFGPSSFVFVSQTGTLTPKLLGYVSKSEWSSMKDDQKEVKIYDYMKSCENKDYYVPWDIDLDKIEAVLEDKQKGFVVLEKEGETVNVVTKDDVERVKGYPKLGSGTVGADKKWMVGAAIGTRESDKERLEHLVKAGANVVVLDSSQGNSIYQLEMIKYVKNTYPELDVVGGNVVTMYQAENLIKAGVDGLRVGMGSGSICTTQEVCAVGRGQATAVYKVSTLAAQHGVPVIADGGISNSGHIVKALVLGASTVMMGSFLAGSTEAPGAYEYRNGRRVKKYRGMGSLEAMTKGSDQRYLGDTAKLKIAQGVVGAVADKGSVLKFIPYTMHAVKQGFQDLGASSLQSAHELLRDNTLRLEARTGAAQIEGGIHGLVSYEKKSF

SEQ ID NO: 4562 - DNA, 841 bp, Arabidopsis thaliana
  misc_feature (1)..(841): Ceres Seq. ID no. 13575786
ttttttccgctaggtttctgagatcttccattcgtctcgaattaagttgctacgatgaaaacagcaaaggggaaagataaagttaagaccacaaaggaagccttgaagccagttgatgacagaaaggtgggaaagaggaaggcaccggctgagaagcctactaaacgagagactcgtaaagagaagaaggctaaaaaggacccaaacaaaccaaaaagagctcctagtgccttctttgtctttctagaagattttagggtcacgttcaagaaagaaaatccaaatgtgaaggccgtctctgctgttgggaaagctggagggcagaaatggaagtcaatgtctcaagctgaaaaagctccatatgaagagaaagctgcaaaaaggaaagctgaatatgagaagcaaatggatgcatacaacaaaaacttggaggaagggagtgatgaatctgaaaagtctagatctgagataaatgatgaagatgaagccagtggggaggaagaactattagagaaggaagcggcaggtgatgatgaagaagaagaagaggaagaagatgacgatgatgatgacgacgaggaagaagactaaatcagggatagaaatcagattttgtatctcaagcttaactgcagatccttaagcagaagtaagtattttgtaatttgtgtgtcgacgagaactatagatctaaaatcgtgtgtttttttgtttttcttttcctaagaaagcgaaacagttgttagcatctctcaggatgtctgtttcagctttttgccacaacaaacaatgtaccaatgtctgcgttagtgatcatccaaaccaaaacataaactaatgt

SEQ ID NO: 4563 - protein, 178 aa, Arabidopsis thaliana
  peptide (1)..(178): Ceres Seq. ID no. 13575787
  misc_feature (53)..(122): Pfam Name: high mobility group Pfam Description: HMG
  misc_feature (1)..(178): NCBI GI NO: 15231065 NR Description: high mobility group protein 2-related
  misc_feature (24)..(175): NCBI GI NO: 1052956 NR Description: high mobility group protein 2 HMG2 [Ipomoea nil]
  misc_feature (22)..(170): NCBI GI NO: 7446213 NR Description: high mobility group protein HMG-1 - common tobacco
  misc_feature (36)..(150): NCBI GI NO: 18394900 NR Description: expressed protein [Arabidopsis thaliana]
  misc_feature (11)..(171): NCBI GI NO: 541968 NR Description: high mobility group protein HMG-1 - garden pea
  misc_feature (36)..(150): NCBI GI NO: 25402921 NR Description: protein F2D10.18 [imported] - Arabidopsis thaliana
  misc_feature (24)..(166): NCBI GI NO: 729736 NR Description: HMG1/2-LIKE PROTEIN
  misc_feature (22)..(169): NCBI GI NO: 7446212 NR Description: high mobility group protein - potato
  misc_feature (33)..(164): NCBI GI NO: 25402921 NR Description: protein F2D10.18 [imported] - Arabidopsis thaliana
  misc_feature (33)..(150): NCBI GI NO: 18394898 NR Description: expressed protein [Arabidopsis thaliana]
MKTAKGKDKVKTTKEALKPVDDRKVGKRKAPAEKPTKRETRKEKKAKKDPNKPKRAPSAFFVFLEDFRVTFKKENPNVKAVSAVGKAGGQKWKSMSQAEKAPYEEKAAKRKAEYEKQMDAYNKNLEEGSDESEKSRSEINDEDEASGEEELLEKEAAGDDEEEEEEEDDDDDDDEEED

SEQ ID NO: 4564 - DNA, 634 bp, Arabidopsis thaliana
  misc_feature (1)..(634): Ceres Seq. ID no. 12355519
atctgtcttgtttaatttcgttactcgtcgtcgtcccttaactcgagaaaaattagggttacggattccgattagcaagcatggaagagatcaccgatggagtgaacaacatgaacttagccaccgattcgcagaagaaaaaccggattcaggtttccaacactaagaaaccattgttcttctatgtcaatctcgccaagaggtatatgcagcagtacaatgatgttgaattgtctgcccttggcatggccattgcaactgttgttactgttactgaaatactgaagaacaatggttttgctgttgagaagaagatcatgacttcaactgttgatattaaggatgatgcaagaggacgtcctgtgcagaaagctaagattgagattacgcttgtgaagtcagagaagtttgatgaactaatggctgcagccaatgaagaaaaagaagatgcagaagctcaggtgcagaactgaaaatagcttttaactattttgggtttcttgatgcttattctataaagggctttatttgtttaatttcattaatttttggcttgttatcacaatggatggtttgttgtatctgttaacttttgataggaagaatgatagctaaacaataaaacatctcggcc

SEQ ID NO: 4565 - protein, 130 aa, Arabidopsis thaliana
  peptide (1)..(130): Ceres Seq. ID no. 12355520
  misc_feature (1)..(130): NCBI GI NO: 18403464 NR Description: expressed protein; protein id: At2g34160
  misc_feature (1)..(130): NCBI GI NO: 18397011 NR Description: expressed protein; protein id: At1g29250
  misc_feature (21)..(129): NCBI GI NO: 34910240 NR Description: OSJNBa0089K24.4
  misc_feature (16)..(129): NCBI GI NO: 15229322 NR Description: unknown protein; protein id: At3g04620.1
  misc_feature (23)..(129): NCBI GI NO: 15029401 NR Description: unknown [Leishmania infantum]
  misc_feature (23)..(129): NCBI GI NO: 8745040 NR Description: conserved hypothetical protein L6293.01
MEEITDGVNNMNLATDSQKKNRIQVSNTKKPLFFYVNLAKRYMQQYNDVELSALGMAIATVVTVTEILKNNGFAVEKKIMTSTVDIKDDARGRPVQKAKIEITLVKSEKFDELMAAANEEKEDAEAQVQN

SEQ ID NO: 4566 - protein, 120 aa, Arabidopsis thaliana
  peptide (1)..(120): Ceres Seq. ID no. 12355521
  misc_feature (1)..(120): NCBI GI NO: 18403464 NR Description: expressed protein; protein id: At2g34160
  misc_feature (1)..(120): NCBI GI NO: 18397011 NR Description: expressed protein; protein id: At1g29250
  misc_feature (11)..(119): NCBI GI NO: 34910240 NR Description: OSJNBa0089K24.4
  misc_feature (6)..(119): NCBI GI NO: 15229322 NR Description: unknown protein; protein id: At3g04620.1
  misc_feature (13)..(119): NCBI GI NO: 15029401 NR Description: unknown [Leishmania infantum]
  misc_feature (13)..(119): NCBI GI NO: 8745040 NR Description: conserved hypothetical protein L6293.01
MNLATDSQKKNRIQVSNTKKPLFFYVNLAKRYMQQYNDVELSALGMAIATVVTVTEILKNNGFAVEKKIMTSTVDIKDDARGRPVQKAKIEITLVKSEKFDELMAAANEEKEDAEAQVQN

SEQ ID NO: 4567 - protein, 88 aa, Arabidopsis thaliana
  peptide (1)..(88): Ceres Seq. ID no. 12355522
  misc_feature (1)..(88): NCBI GI NO: 18403464 NR Description: expressed protein; protein id: At2g34160
  misc_feature (1)..(88): NCBI GI NO: 18397011 NR Description: expressed protein; protein id: At1g29250
  misc_feature (1)..(87): NCBI GI NO: 34910240 NR Description: OSJNBa0089K24.4
  misc_feature (1)..(87): NCBI GI NO: 15229322 NR Description: unknown protein; protein id: At3g04620.1
  misc_feature (1)..(87): NCBI GI NO: 15029401 NR Description: unknown [Leishmania infantum]
  misc_feature (1)..(87): NCBI GI NO: 8745040 NR Description: conserved hypothetical protein L6293.01
MQQYNDVELSALGMAIATVVTVTEILKNNGFAVEKKIMTSTVDIKDDARGRPVQKAKIEITLVKSEKFDELMAAANEEKEDAEAQVQN

SEQ ID NO: 4568 - DNA, 1311 bp, Arabidopsis thaliana
  misc_feature (1)..(1311): Ceres Seq. ID no. 13491424
aaccatatgaatctcacgatcaaagataatatctcatcatctatatagtatttgtctcgatattagagacgtacacactttgtttatactcaaatcaatatgggatctttcgtgaaagaagaaacgtcgtcgttgatgacagattttttggagaagtgcggtggttatgcggtggtggatggagggtttgcgacggagctacagcgccacggagctgatatcaatgatccactttggagtgctaagtgccttattacttctcctcaccttgttacaaaggtgcacttggattaccttgaatctggagcaaatatcatcataacagcatcttaccaggcgacgatacaaggttttgtggcaaaaggtctatcggtgggagaagcagaaaatttacttagaaggagcgttgaaatcacgtacgaggcacgtgagattttctacaacagatgcaccaagggttcatgggatttcgcctacgctggaaaagcttcccggagaccaattcttgtcgcagcttccgttggtagctatggagcttatctcgctgacggctccgaatacagtgggatatatggagattctgtgagtaaggagacattaaaggatttccatagaagaagagttcaaatcttagcaaaatctggagccgacctaatagcattcgagactattccaaataagctcgaagcagaggcttatgcggatcttcttgaggaggaagatatcgatattccggcatggttctcgttcacttccaaggacggagtcagtgtgccacgaggagattcagttgtagaatgtgcgaaagtggcagattcatgcaagaacgtggtggccattggaatcaattgtactgcaccaagatacattcatgctttaattatctccttgcgccagatgacacgcaaaccaatcgttgtatacccaaacagcggggaagtctacgacggtctgaacaagaaatggattaagtcagagggagagtcagaggaggattttgtgtcgtacgtgagtaaatggagagatgcaggagcttctctgtttggaggatgttgtcggactactccaaacaccatcagagccattgctaaagttctctccgacgaaccttctgcagcatcaaaacccaaattcgggcaatagacttgtcaacggtgaatttctatgcttgtgatgtcaggaaggagtttaaaatgtacaataacgcaagcgtagttctgtaatctactaatatgttgaaactataaataatggtaaactatgttagagacaactgtgtaattagcgtatgataataatggagtttaaacg

SEQ ID NO: 4569 - protein, 347 aa, Arabidopsis thaliana
  peptide (1)..(347): Ceres Seq. ID no. 13491425
  misc_feature (23)..(335): Pfam Name: Pfam Description:  Homocysteine S-methyltransferase
  misc_feature (1)..(347): NCBI GI NO: 18403505 NR Description: selenocysteine methyltransferase -related
  misc_feature (1)..(347): NCBI GI NO: 21593147 NR Description: putative selenocysteine methyltransferase
  misc_feature (13)..(338): NCBI GI NO: 15229396 NR Description: homocysteine S-methyltransferase AtHMT-2
  misc_feature (13)..(338): NCBI GI NO: 25453566 NR Description: homocysteine S-methyltransferase (EC 2
  misc_feature (9)..(342): NCBI GI NO: 6094303 NR Description: Selenocysteine methyltransferase
  misc_feature (7)..(333): NCBI GI NO: 37534456 NR Description: putative homocysteine S-methyltransferase-2
  misc_feature (16)..(343): NCBI GI NO: 10732787 NR Description: homocysteine S-methyltransferase-2 [Zea mays]
  misc_feature (16)..(334): NCBI GI NO: 10732789 NR Description: homocysteine S-methyltransferase-3 [Zea mays]
  misc_feature (8)..(335): NCBI GI NO: 10732791 NR Description: homocysteine S-methyltransferase-4 [Zea mays]
  misc_feature (5)..(333): NCBI GI NO: 15230929 NR Description: homocysteine S-methyltransferase AtHMT-1
MGSFVKEETSSLMTDFLEKCGGYAVVDGGFATELQRHGADINDPLWSAKCLITSPHLVTKVHLDYLESGANIIITASYQATIQGFVAKGLSVGEAENLLRRSVEITYEAREIFYNRCTKGSWDFAYAGKASRRPILVAASVGSYGAYLADGSEYSGIYGDSVSKETLKDFHRRRVQILAKSGADLIAFETIPNKLEAEAYADLLEEEDIDIPAWFSFTSKDGVSVPRGDSVVECAKVADSCKNVVAIGINCTAPRYIHALIISLRQMTRKPIVVYPNSGEVYDGLNKKWIKSEGESEEDFVSYVSKWRDAGASLFGGCCRTTPNTIRAIAKVLSDEPSAASKPKFGQ

SEQ ID NO: 4570 - protein, 335 aa, Arabidopsis thaliana
  peptide (1)..(335): Ceres Seq. ID no. 13491426
  misc_feature (11)..(323): Pfam Name: Pfam Description:  Homocysteine S-methyltransferase
  misc_feature (1)..(335): NCBI GI NO: 18403505 NR Description: selenocysteine methyltransferase -related
  misc_feature (1)..(335): NCBI GI NO: 21593147 NR Description: putative selenocysteine methyltransferase
  misc_feature (1)..(326): NCBI GI NO: 15229396 NR Description: homocysteine S-methyltransferase AtHMT-2
  misc_feature (1)..(326): NCBI GI NO: 25453566 NR Description: homocysteine S-methyltransferase (EC 2
  misc_feature (1)..(330): NCBI GI NO: 6094303 NR Description: Selenocysteine methyltransferase
  misc_feature (1)..(321): NCBI GI NO: 37534456 NR Description: putative homocysteine S-methyltransferase-2
  misc_feature (4)..(331): NCBI GI NO: 10732787 NR Description: homocysteine S-methyltransferase-2 [Zea mays]
  misc_feature (4)..(322): NCBI GI NO: 10732789 NR Description: homocysteine S-methyltransferase-3 [Zea mays]
  misc_feature (1)..(323): NCBI GI NO: 10732791 NR Description: homocysteine S-methyltransferase-4 [Zea mays]
  misc_feature (1)..(321): NCBI GI NO: 15230929 NR Description: homocysteine S-methyltransferase AtHMT-1
MTDFLEKCGGYAVVDGGFATELQRHGADINDPLWSAKCLITSPHLVTKVHLDYLESGANIIITASYQATIQGFVAKGLSVGEAENLLRRSVEITYEAREIFYNRCTKGSWDFAYAGKASRRPILVAASVGSYGAYLADGSEYSGIYGDSVSKETLKDFHRRRVQILAKSGADLIAFETIPNKLEAEAYADLLEEEDIDIPAWFSFTSKDGVSVPRGDSVVECAKVADSCKNVVAIGINCTAPRYIHALIISLRQMTRKPIVVYPNSGEVYDGLNKKWIKSEGESEEDFVSYVSKWRDAGASLFGGCCRTTPNTIRAIAKVLSDEPSAASKPKFGQ

SEQ ID NO: 4571 - DNA, 1141 bp, Arabidopsis thaliana
  misc_feature (1)..(1141): Ceres Seq. ID no. 13593329
atcttacactaattattaaactaatcacccattaactctaaatctcaacaaatcataatctattataaagaagacacacatctcctaaatcgaawwacccttattattattcattctctctaatcaaatcctcttctctctcaaatctcaatctccgattatgacagactacagagtttaccctgcatcaaaacctcccgccatcgtcggtggcggtgccccaaccaccaatccaactttcccggcgaacaaagctcagctctacaacgcaaatcgtcccgcttaccgtccaccagctggtcgtcgtcgtactagccatacccgtggatgttgctgccgttgctgttgctggacgatattcgtaatcatcctcttactcctcatcgtcgccgccgcatcagccgtcgtatacctaatctaccgtcctcaacgacctagcttcactgtctctgaactcaaaatctccactctcaacttcacatccgccgctcgtctcaccaccgccatttccctctccgtcatcgccagaaaccctaacaaaaacgtcggattcatctacgacgtcaccgacatcacactctataaagtatccaccggcggagatgatgatgtagtcattggtaaaggaacgatcgcggcgttttctcacgggaaagaacacgactacgcttagaagtacgatcggaagtcctccggaagaactcgatgagatctcggcgggtaagctgaaaggagatctgaaggcgaagaaagcagtggcgattaagattgttttgaactcgaaggtgaaagtgaagatgggagctctgaaaactcctaaatcgggaattagggttacttgtgaagggattaaattggtggctccgacgggaaagaaggcgacgacggctacgacttccgccgctaagtgtaaggttgatccaagatttaagatctggaaaattactttctaaatatagtaaacaaataatggaatcacattcttagttttttcttcattttctttttattactccattgtttcaattttcatttctttttaaatttgatttcatatacagttctttgattcctgtaagactttatttttttggtttatgtaaatgaagatataaatatttgtgttcaaawrawraamraa

SEQ ID NO: 4572 - protein, 170 aa, Arabidopsis thaliana
  peptide (1)..(170): Ceres Seq. ID no. 15221211
  misc_feature (1)..(167): NCBI GI NO: 18394509 NR Description: expressed protein [Arabidopsis thaliana]
  misc_feature (1)..(167): NCBI GI NO: 11762174 NR Description: At1g17620 [Arabidopsis thaliana]
  misc_feature (8)..(161): NCBI GI NO: 15239804 NR Description: expressed protein [Arabidopsis thaliana]
  misc_feature (8)..(161): NCBI GI NO: 21536796 NR Description: unknown [Arabidopsis thaliana]
  misc_feature (17)..(170): NCBI GI NO: 34914304 NR Description: B1151A10.19
  misc_feature (7)..(163): NCBI GI NO: 34903552 NR Description: P0001B06.28
  misc_feature (1)..(167): NCBI GI NO: 10178216 NR Description: gb|AAF23842
  misc_feature (5)..(167): NCBI GI NO: 6686408 NR Description: F1E22.7 [Arabidopsis thaliana]
  misc_feature (1)..(167): NCBI GI NO: 15239459 NR Description: hypothetical protein [Arabidopsis thaliana]
  misc_feature (5)..(167): NCBI GI NO: 18408342 NR Description: expressed protein [Arabidopsis thaliana]
MTDYRVYPASKPPAIVGGGAPTTNPTFPANKAQLYNANRPAYRPPAGRRRTSHTRGCCCRCCCWTIFVIILLLLIVAAASAVVYLIYRPQRPSFTVSELKISTLNFTSAARLTTAISLSVIARNPNKNVGFIYDVTDITLYKVSTGGDDDVVIGKGTIAAFSHGKEHDYA

SEQ ID NO: 4573 - DNA, 1404 bp, Arabidopsis thaliana
  misc_feature (1)..(1404): Ceres Seq. ID no. 12379516
aaaaagtttaggttttggtttttttgtccgtcgtagtgatgcagcaaccaccgtcaaacgccgccggagctggacagataccatcaggacaacagcatttgtggatgatgatgcaacagcagcagcagcagcagcagatgcagttgtctgcggcgccactaggtcaacatcagtacggtattggatctcagaatccaggatccgctagcgatgttaagtcgttgtggatcggagacttgcagcaatggatggacgagaactacatcatgagcgtctttgctcagtctggcgaggctacatcagctaaagtcattcgtaataagctgacgggacaatctgaaggttatggattcattgagttcgtcagccactctgtagcagagcgggttttgcagacttacaatggtgctcccatgccgagcactgaacagacgtttaggctcaactgggctcaggctggggctggagagaaaagattccagactgaagggcctgaccataccattttcgtaggtgacttggcacctgaggtgactgactatatgctctcggacacattcaagaatgtgtatgggtctgtcaaaggggctaaagttgtgcttgacaggaccactggaaggtccaaggggtatgggtttgttaggtttgcggatgaaaatgagcagatgcgtgccatgactgaaatgaatggtcaatactgctcgacaaggcctatgcgtattggtccggctgccaataagaatgctcttccgatgcaaccagctatgtatcaaaacactcaaggagcaaatgctggagataatgatcctaataacacaacaatttttgttggaggtctggatgctaatgttacagacgatgaattaaagtcaatttttggtcaatttggtgaacttcttcatgtgaaaatacctccaggaaaacgttgtggattcgttcaatatgccaacaaggcgtctgcagagcatgcactttcggtgctgaatggaacacaattaggtggacaaagcatccgtctttcgtggggacgtagtccaaacaagcagtctgatcaagcgcaatggaacggtggtggatactatggataccctccacagccacagggcggctatggttatgcagctcaaccaccaactcaagaccctaatgcgtactatggtggttacactggctatggcaactatcagcagcaacgtcagtgaaacatcaacatcagctatttctaccaatgtcttggaacaaaagatgagcgattgtgtcttattaggacttctagattaaaagtgctctctttttgtttgagttttattttgcaaatgagtcgatcttgaatttgctatgaacaaagtgtttactgaatgttgaaactttattctgttgttttttaaaataaatatttatcct

SEQ ID NO: 4574 - protein, 387 aa, Arabidopsis thaliana
  peptide (1)..(387): Ceres Seq. ID no. 12379517
  misc_feature (156)..(228): Pfam Name: a.k.a. RRM, RBD, or RNP domain Pfam Description: RNA recognition motif.
  misc_feature (1)..(387): NCBI GI NO: 9758270 NR Description: contains similarity to polyadenylate-binding protein5~gene_id:MBG8
  misc_feature (1)..(387): NCBI GI NO: 18423684 NR Description: RNA binding protein 45
  misc_feature (4)..(387): NCBI GI NO: 7485342 NR Description: hypothetical protein F10M23
  misc_feature (4)..(384): NCBI GI NO: 18416906 NR Description: RNA binding protein 45
  misc_feature (15)..(387): NCBI GI NO: 9663767 NR Description: RNA Binding Protein 45 [Nicotiana plumbaginifolia]
  misc_feature (54)..(384): NCBI GI NO: 34896988 NR Description: putative RNA binding protein [Oryza sativa]
  misc_feature (1)..(387): NCBI GI NO: 15221071 NR Description: RNA binding protein 45
  misc_feature (1)..(387): NCBI GI NO: 21592583 NR Description: putative DNA binding protein
  misc_feature (12)..(384): NCBI GI NO: 40253807 NR Description: putative RNA Binding Protein 45
  misc_feature (2)..(387): NCBI GI NO: 34395214 NR Description: putative RNA Binding Protein
MQQPPSNAAGAGQIPSGQQHLWMMMQQQQQQQQMQLSAAPLGQHQYGIGSQNPGSASDVKSLWIGDLQQWMDENYIMSVFAQSGEATSAKVIRNKLTGQSEGYGFIEFVSHSVAERVLQTYNGAPMPSTEQTFRLNWAQAGAGEKRFQTEGPDHTIFVGDLAPEVTDYMLSDTFKNVYGSVKGAKVVLDRTTGRSKGYGFVRFADENEQMRAMTEMNGQYCSTRPMRIGPAANKNALPMQPAMYQNTQGANAGDNDPNNTTIFVGGLDANVTDDELKSIFGQFGELLHVKIPPGKRCGFVQYANKASAEHALSVLNGTQLGGQSIRLSWGRSPNKQSDQAQWNGGGYYGYPPQPQGGYGYAAQPPTQDPNAYYGGYTGYGNYQQQRQ

SEQ ID NO: 4575 - protein, 365 aa, Arabidopsis thaliana
  peptide (1)..(365): Ceres Seq. ID no. 12379518
  misc_feature (134)..(206): Pfam Name: a.k.a. RRM, RBD, or RNP domain Pfam Description: RNA recognition motif.
  misc_feature (1)..(365): NCBI GI NO: 9758270 NR Description: contains similarity to polyadenylate-binding protein5~gene_id:MBG8
  misc_feature (1)..(365): NCBI GI NO: 18423684 NR Description: RNA binding protein 45
  misc_feature (1)..(365): NCBI GI NO: 7485342 NR Description: hypothetical protein F10M23
  misc_feature (1)..(362): NCBI GI NO: 18416906 NR Description: RNA binding protein 45
  misc_feature (1)..(365): NCBI GI NO: 9663767 NR Description: RNA Binding Protein 45 [Nicotiana plumbaginifolia]
  misc_feature (32)..(362): NCBI GI NO: 34896988 NR Description: putative RNA binding protein [Oryza sativa]
  misc_feature (1)..(365): NCBI GI NO: 15221071 NR Description: RNA binding protein 45
  misc_feature (1)..(365): NCBI GI NO: 21592583 NR Description: putative DNA binding protein
  misc_feature (1)..(362): NCBI GI NO: 40253807 NR Description: putative RNA Binding Protein 45
  misc_feature (1)..(365): NCBI GI NO: 34395214 NR Description: putative RNA Binding Protein
MMMQQQQQQQQMQLSAAPLGQHQYGIGSQNPGSASDVKSLWIGDLQQWMDENYIMSVFAQSGEATSAKVIRNKLTGQSEGYGFIEFVSHSVAERVLQTYNGAPMPSTEQTFRLNWAQAGAGEKRFQTEGPDHTIFVGDLAPEVTDYMLSDTFKNVYGSVKGAKVVLDRTTGRSKGYGFVRFADENEQMRAMTEMNGQYCSTRPMRIGPAANKNALPMQPAMYQNTQGANAGDNDPNNTTIFVGGLDANVTDDELKSIFGQFGELLHVKIPPGKRCGFVQYANKASAEHALSVLNGTQLGGQSIRLSWGRSPNKQSDQAQWNGGGYYGYPPQPQGGYGYAAQPPTQDPNAYYGGYTGYGNYQQQRQ

SEQ ID NO: 4576 - protein, 364 aa, Arabidopsis thaliana
  peptide (1)..(364): Ceres Seq. ID no. 12379519
  misc_feature (133)..(205): Pfam Name: a.k.a. RRM, RBD, or RNP domain Pfam Description: RNA recognition motif.
  misc_feature (1)..(364): NCBI GI NO: 9758270 NR Description: contains similarity to polyadenylate-binding protein5~gene_id:MBG8
  misc_feature (1)..(364): NCBI GI NO: 18423684 NR Description: RNA binding protein 45
  misc_feature (1)..(364): NCBI GI NO: 7485342 NR Description: hypothetical protein F10M23
  misc_feature (1)..(361): NCBI GI NO: 18416906 NR Description: RNA binding protein 45
  misc_feature (1)..(364): NCBI GI NO: 9663767 NR Description: RNA Binding Protein 45 [Nicotiana plumbaginifolia]
  misc_feature (31)..(361): NCBI GI NO: 34896988 NR Description: putative RNA binding protein [Oryza sativa]
  misc_feature (1)..(364): NCBI GI NO: 15221071 NR Description: RNA binding protein 45
  misc_feature (1)..(364): NCBI GI NO: 21592583 NR Description: putative DNA binding protein
  misc_feature (1)..(361): NCBI GI NO: 40253807 NR Description: putative RNA Binding Protein 45
  misc_feature (1)..(364): NCBI GI NO: 34395214 NR Description: putative RNA Binding Protein
MMQQQQQQQQMQLSAAPLGQHQYGIGSQNPGSASDVKSLWIGDLQQWMDENYIMSVFAQSGEATSAKVIRNKLTGQSEGYGFIEFVSHSVAERVLQTYNGAPMPSTEQTFRLNWAQAGAGEKRFQTEGPDHTIFVGDLAPEVTDYMLSDTFKNVYGSVKGAKVVLDRTTGRSKGYGFVRFADENEQMRAMTEMNGQYCSTRPMRIGPAANKNALPMQPAMYQNTQGANAGDNDPNNTTIFVGGLDANVTDDELKSIFGQFGELLHVKIPPGKRCGFVQYANKASAEHALSVLNGTQLGGQSIRLSWGRSPNKQSDQAQWNGGGYYGYPPQPQGGYGYAAQPPTQDPNAYYGGYTGYGNYQQQRQ

SEQ ID NO: 4577 - DNA, 1900 bp, Arabidopsis thaliana
  misc_feature (1)..(1900): Ceres Seq. ID no. 13491239
ctctttctatcgctctttgattttgtttctcattgttttgcttcaaattacgcattcgaatctgatcttcgttgatctctgtggaagaaacagataagagaaaatcgcatgaatttttttagaaaactaggttttaatccttcgattgcaagctacttcactaatacgagtcttctgatctcaattcttagtttttctcctcaattgccgatttctctctttcttttcgagcagaaatcgttagatcctttatcgctgtgtaatagtagtactaattttaataatcttgagagtaattactccgttcattgttgaatcatggagtccggaggcaaaactaatcgtcagctgcgtaaagctatttgcgtctcaacagacgagaagatgaagaagaagagatcaccttcagtgatagtgattggaggtggtatggctggaatttcagccgctcgcactcttcaggatgcttcctttcaggttgttgtattggagtctcgtgacagaattggtggacgagttcacactgattactcatttggttttccagttgatctcggtgcatcttggttgcatggtgtctgtaaagagaatcctttggctgcagtaattggtagattaggattacctctttatcgtactagcggtgacaattcggttttgtatgatcacgatcttgagagttatgctctgttcgacaaggctggtaaccaagtttctcaagagttggtgacaaaagttggcgaaaattttgagcacattctggaagagatctgtaaagtcagggatgagcaggacgaagacatgtcaatagctcaagccttttctattgtatttaagaggaaccctgaattgaggttggagggacttgcccataatgtgcttcagtggtacttgtgccgcatggaaggatggtttgctgctgatgctgaaaccatctcggcaaagtgttgggatcaggaagaactgttgcccggtggacatggtcttatggttagagggtatcgccctgtaatcaacactctctcgaaaggtcttgatatacgactaagtcacagaattaccaagatttcaaggcgctacagtggtgtgaaggtgactacagagaaaggagacacgtttgttgcggatgctgcagtcattgctcttcctctaggagtcttaaagtcaggaatgataacattcgaaccaaagcttccacagtggaaacaagaagctatcaacgatctcggtgttggaatcgagaacaagatcatattgaattttgacaacgtcttttggccaaacgtagagtttttaggagtcgttgcagaaacttcctacggatgcagttatttcttgaacctgcataaagccacaagccatcctgtccttgtttacatgccggctggtcagctcgctagagacatcgagaaaaagtccgatgaagcagctgcaaattttgccttttcgcaactacagaaaattcttccagatgcctcttcaccgataaattatttggtatcaaggtggggatcagacatcaattcattgggatcatatagctatgacattgtgaacaaacctcacgacctctatgagagactgagagtgccattggataatctattctttgcgggggaagccactagctcaagctacccgggatcagtgcacggtgcttattcaaccggagtgctggcagctgaagactgcaggatgcgtgtgcttgagcgctatggagagctcgaacatgagatggaagaggaagctcctgcttctgtccctcttctgatctcccgtatgtaatttaaacctcaggtgttttatatcacctccatatgggaacattgttagatttgattttatgagatttcactagttggaactcttgtgcctattcaataccactcttttttccttc

SEQ ID NO: 4578 - protein, 488 aa, Arabidopsis thaliana
  peptide (1)..(488): Ceres Seq. ID no. 13491240
  misc_feature (38)..(459): Pfam Name: Pfam Description:  Flavin containing amine oxidoreductase
  misc_feature (1)..(488): NCBI GI NO: 15231622 NR Description: amine oxidase family [Arabidopsis thaliana]
  misc_feature (1)..(488): NCBI GI NO: 21553762 NR Description: putative amine oxidase [Arabidopsis thaliana]
  misc_feature (1)..(488): NCBI GI NO: 15224204 NR Description: amine oxidase family [Arabidopsis thaliana]
  misc_feature (1)..(488): NCBI GI NO: 18650598 NR Description: At2g43020/MFL8.12 [Arabidopsis thaliana]
  misc_feature (24)..(488): NCBI GI NO: 38344167 NR Description: OSJNBa0053K19.6
  misc_feature (21)..(488): NCBI GI NO: 15218830 NR Description: amine oxidase family [Arabidopsis thaliana]
  misc_feature (21)..(488): NCBI GI NO: 13877615 NR Description: putative protein kinase gb|AAD22129
  misc_feature (21)..(393): NCBI GI NO: 25404949 NR Description: protein F1E22.18 [imported] - Arabidopsis thaliana
  misc_feature (373)..(488): NCBI GI NO: 25404949 NR Description: protein F1E22.18 [imported] - Arabidopsis thaliana
  misc_feature (16)..(457): NCBI GI NO: 38505628 NR Description: slr5093 [Synechocystis sp. PCC 6803]
MESGGKTNRQLRKAICVSTDEKMKKKRSPSVIVIGGGMAGISAARTLQDASFQVVVLESRDRIGGRVHTDYSFGFPVDLGASWLHGVCKENPLAAVIGRLGLPLYRTSGDNSVLYDHDLESYALFDKAGNQVSQELVTKVGENFEHILEEICKVRDEQDEDMSIAQAFSIVFKRNPELRLEGLAHNVLQWYLCRMEGWFAADAETISAKCWDQEELLPGGHGLMVRGYRPVINTLSKGLDIRLSHRITKISRRYSGVKVTTEKGDTFVADAAVIALPLGVLKSGMITFEPKLPQWKQEAINDLGVGIENKIILNFDNVFWPNVEFLGVVAETSYGCSYFLNLHKATSHPVLVYMPAGQLARDIEKKSDEAAANFAFSQLQKILPDASSPINYLVSRWGSDINSLGSYSYDIVNKPHDLYERLRVPLDNLFFAGEATSSSYPGSVHGAYSTGVLAAEDCRMRVLERYGELEHEMEEEAPASVPLLISRM

SEQ ID NO: 4579 - protein, 466 aa, Arabidopsis thaliana
  peptide (1)..(466): Ceres Seq. ID no. 13491241
  misc_feature (16)..(437): Pfam Name: Pfam Description:  Flavin containing amine oxidoreductase
  misc_feature (1)..(466): NCBI GI NO: 15231622 NR Description: amine oxidase family [Arabidopsis thaliana]
  misc_feature (1)..(466): NCBI GI NO: 21553762 NR Description: putative amine oxidase [Arabidopsis thaliana]
  misc_feature (1)..(466): NCBI GI NO: 15224204 NR Description: amine oxidase family [Arabidopsis thaliana]
  misc_feature (1)..(466): NCBI GI NO: 18650598 NR Description: At2g43020/MFL8.12 [Arabidopsis thaliana]
  misc_feature (2)..(466): NCBI GI NO: 38344167 NR Description: OSJNBa0053K19.6
  misc_feature (1)..(466): NCBI GI NO: 15218830 NR Description: amine oxidase family [Arabidopsis thaliana]
  misc_feature (1)..(466): NCBI GI NO: 13877615 NR Description: putative protein kinase gb|AAD22129
  misc_feature (1)..(371): NCBI GI NO: 25404949 NR Description: protein F1E22.18 [imported] - Arabidopsis thaliana
  misc_feature (351)..(466): NCBI GI NO: 25404949 NR Description: protein F1E22.18 [imported] - Arabidopsis thaliana
  misc_feature (1)..(435): NCBI GI NO: 38505628 NR Description: slr5093 [Synechocystis sp. PCC 6803]
MKKKRSPSVIVIGGGMAGISAARTLQDASFQVVVLESRDRIGGRVHTDYSFGFPVDLGASWLHGVCKENPLAAVIGRLGLPLYRTSGDNSVLYDHDLESYALFDKAGNQVSQELVTKVGENFEHILEEICKVRDEQDEDMSIAQAFSIVFKRNPELRLEGLAHNVLQWYLCRMEGWFAADAETISAKCWDQEELLPGGHGLMVRGYRPVINTLSKGLDIRLSHRITKISRRYSGVKVTTEKGDTFVADAAVIALPLGVLKSGMITFEPKLPQWKQEAINDLGVGIENKIILNFDNVFWPNVEFLGVVAETSYGCSYFLNLHKATSHPVLVYMPAGQLARDIEKKSDEAAANFAFSQLQKILPDASSPINYLVSRWGSDINSLGSYSYDIVNKPHDLYERLRVPLDNLFFAGEATSSSYPGSVHGAYSTGVLAAEDCRMRVLERYGELEHEMEEEAPASVPLLISRM

SEQ ID NO: 4580 - protein, 451 aa, Arabidopsis thaliana
  peptide (1)..(451): Ceres Seq. ID no. 13491242
  misc_feature (1)..(422): Pfam Name: Pfam Description:  Flavin containing amine oxidoreductase
  misc_feature (1)..(451): NCBI GI NO: 15231622 NR Description: amine oxidase family [Arabidopsis thaliana]
  misc_feature (1)..(451): NCBI GI NO: 21553762 NR Description: putative amine oxidase [Arabidopsis thaliana]
  misc_feature (1)..(451): NCBI GI NO: 15224204 NR Description: amine oxidase family [Arabidopsis thaliana]
  misc_feature (1)..(451): NCBI GI NO: 18650598 NR Description: At2g43020/MFL8.12 [Arabidopsis thaliana]
  misc_feature (1)..(451): NCBI GI NO: 38344167 NR Description: OSJNBa0053K19.6
  misc_feature (1)..(451): NCBI GI NO: 15218830 NR Description: amine oxidase family [Arabidopsis thaliana]
  misc_feature (1)..(451): NCBI GI NO: 13877615 NR Description: putative protein kinase gb|AAD22129
  misc_feature (1)..(356): NCBI GI NO: 25404949 NR Description: protein F1E22.18 [imported] - Arabidopsis thaliana
  misc_feature (336)..(451): NCBI GI NO: 25404949 NR Description: protein F1E22.18 [imported] - Arabidopsis thaliana
  misc_feature (1)..(420): NCBI GI NO: 38505628 NR Description: slr5093 [Synechocystis sp. PCC 6803]
MAGISAARTLQDASFQVVVLESRDRIGGRVHTDYSFGFPVDLGASWLHGVCKENPLAAVIGRLGLPLYRTSGDNSVLYDHDLESYALFDKAGNQVSQELVTKVGENFEHILEEICKVRDEQDEDMSIAQAFSIVFKRNPELRLEGLAHNVLQWYLCRMEGWFAADAETISAKCWDQEELLPGGHGLMVRGYRPVINTLSKGLDIRLSHRITKISRRYSGVKVTTEKGDTFVADAAVIALPLGVLKSGMITFEPKLPQWKQEAINDLGVGIENKIILNFDNVFWPNVEFLGVVAETSYGCSYFLNLHKATSHPVLVYMPAGQLARDIEKKSDEAAANFAFSQLQKILPDASSPINYLVSRWGSDINSLGSYSYDIVNKPHDLYERLRVPLDNLFFAGEATSSSYPGSVHGAYSTGVLAAEDCRMRVLERYGELEHEMEEEAPASVPLLISRM

SEQ ID NO: 4581 - DNA, 1404 bp, Arabidopsis thaliana
  misc_feature (1)..(1404): Ceres Seq. ID no. 13495818
gggatcgtaagaacagaggatttttctcggccaagttttctctggctcaggttaaaattcgatttgtgagatctgttagttagattgtacatgacggtgcgaatttattgaatctgtttaaatctattgaacgtgaaacgcatttgagtattgtgaggctgaggaaatttctgaaagtggttttgggacgatgatgctggtgttgcggagtttgccataatcagatctgtatgtatgtgggtttcttgataaaagttgtatgaggaaggcattggagatttgtgttgaagaattgatgtatgggagtatgaaggaggtaatgttgttggtgtgtgtggttgatgttggcaggtgtttgatgtgaattttttgagggaggggaatgagttcaatgagcagaagcagaagtcgaagtagaagtcgtagtcgggatcggtttcgtagtcggagtccgagagacaggagaatgagatctgaacgagtttcttaccatgatgctccttctagaagggagagggagccacgtcgtgccttcagccaaggaaatctctgcaacaactgcaagcgacctggtcactttgcaagagactgttctaatgtttccgtctgtaacaactgtggtcttccagggcacattgcagcagaatgcactgcggaatcacgttgttggaactgtagagaaccgggccacgtagcctcaaactgttcaaacgaaggaatctgccactcctgtggtaaatctggacatcgagccagagactgctctaattcggattctcgtgcaggagacttaaggctctgcaacaactgcttcaaacagggacatcttgccgctgactgcacaaatgacaaggcgtgcaagaactgcaggacttcaggtcacatagctcgcgattgcaggaacgatccagtttgtaacatctgcagtatctcggggcatgttgctagacactgcccaaagggtgacagcaattactctgacagaggaagcagggttcgagatggtggtatgcaaagaggtggtttgagcagaatgagcagagacagagaaggcgttagtgctatgataatatgtcacaattgtggtggccgaggacacagggcgtacgagtgtccgtctgctcgagtcgctgaccgtggattccgccggtactgaggctcttaaatttaccaattgaagttccattcatcttcacctttacccttttagcttctgcactcttgtttttgttgagctacattgttgttttctaatctcatggtttttgtctattggagtgaatcaaggatggttttagttttggtttgttttcggaaaatttgagacattgcttgtgttgtatgaagtattgaacagattagtgtgatgcagagttctgagttttcagaactcaatattatatt

SEQ ID NO: 4582 - protein, 257 aa, Arabidopsis thaliana
  peptide (1)..(257): Ceres Seq. ID no. 13495819
  misc_feature (229)..(246): Pfam Name: Pfam Description:  Zinc knuckle
  misc_feature (1)..(257): NCBI GI NO: 18410883 NR Description: DNA-binding protein [Arabidopsis thaliana]
  misc_feature (4)..(257): NCBI GI NO: 21537255 NR Description: DNA-binding protein [Arabidopsis thaliana]
  misc_feature (23)..(257): NCBI GI NO: 25404984 NR Description: protein F10A5.22 [imported] - Arabidopsis thaliana
  misc_feature (20)..(252): NCBI GI NO: 37536582 NR Description: putative zinc finger protein
  misc_feature (1)..(172): NCBI GI NO: 25404984 NR Description: protein F10A5.22 [imported] - Arabidopsis thaliana
  misc_feature (57)..(193): NCBI GI NO: 6324074 NR Description: GIG3 suppressor; Gis2p [Saccharomyces cerevisiae]
  misc_feature (56)..(172): NCBI GI NO: 6324074 NR Description: GIG3 suppressor; Gis2p [Saccharomyces cerevisiae]
  misc_feature (75)..(191): NCBI GI NO: 26347241 NR Description: unnamed protein product [Mus musculus]
  misc_feature (45)..(255): NCBI GI NO: 729704 NR Description: DNA-binding protein HEXBP
  misc_feature (71)..(191): NCBI GI NO: 16549164 NR Description: unnamed protein product [Homo sapiens]
MSSMSRSRSRSRSRSRDRFRSRSPRDRRMRSERVSYHDAPSRREREPRRAFSQGNLCNNCKRPGHFARDCSNVSVCNNCGLPGHIAAECTAESRCWNCREPGHVASNCSNEGICHSCGKSGHRARDCSNSDSRAGDLRLCNNCFKQGHLAADCTNDKACKNCRTSGHIARDCRNDPVCNICSISGHVARHCPKGDSNYSDRGSRVRDGGMQRGGLSRMSRDREGVSAMIICHNCGGRGHRAYECPSARVADRGFRRY

SEQ ID NO: 4583 - protein, 254 aa, Arabidopsis thaliana
  peptide (1)..(254): Ceres Seq. ID no. 13495820
  misc_feature (226)..(243): Pfam Name: Pfam Description:  Zinc knuckle
  misc_feature (1)..(254): NCBI GI NO: 18410883 NR Description: DNA-binding protein [Arabidopsis thaliana]
  misc_feature (1)..(254): NCBI GI NO: 21537255 NR Description: DNA-binding protein [Arabidopsis thaliana]
  misc_feature (20)..(254): NCBI GI NO: 25404984 NR Description: protein F10A5.22 [imported] - Arabidopsis thaliana
  misc_feature (17)..(249): NCBI GI NO: 37536582 NR Description: putative zinc finger protein
  misc_feature (1)..(169): NCBI GI NO: 25404984 NR Description: protein F10A5.22 [imported] - Arabidopsis thaliana
  misc_feature (54)..(190): NCBI GI NO: 6324074 NR Description: GIG3 suppressor; Gis2p [Saccharomyces cerevisiae]
  misc_feature (53)..(169): NCBI GI NO: 6324074 NR Description: GIG3 suppressor; Gis2p [Saccharomyces cerevisiae]
  misc_feature (72)..(188): NCBI GI NO: 26347241 NR Description: unnamed protein product [Mus musculus]
  misc_feature (42)..(252): NCBI GI NO: 729704 NR Description: DNA-binding protein HEXBP
  misc_feature (68)..(188): NCBI GI NO: 16549164 NR Description: unnamed protein product [Homo sapiens]
MSRSRSRSRSRSRDRFRSRSPRDRRMRSERVSYHDAPSRREREPRRAFSQGNLCNNCKRPGHFARDCSNVSVCNNCGLPGHIAAECTAESRCWNCREPGHVASNCSNEGICHSCGKSGHRARDCSNSDSRAGDLRLCNNCFKQGHLAADCTNDKACKNCRTSGHIARDCRNDPVCNICSISGHVARHCPKGDSNYSDRGSRVRDGGMQRGGLSRMSRDREGVSAMIICHNCGGRGHRAYECPSARVADRGFRRY

SEQ ID NO: 4584 - protein, 229 aa, Arabidopsis thaliana
  peptide (1)..(229): Ceres Seq. ID no. 13495821
  misc_feature (201)..(218): Pfam Name: Pfam Description:  Zinc knuckle
  misc_feature (1)..(229): NCBI GI NO: 18410883 NR Description: DNA-binding protein [Arabidopsis thaliana]
  misc_feature (1)..(229): NCBI GI NO: 21537255 NR Description: DNA-binding protein [Arabidopsis thaliana]
  misc_feature (1)..(229): NCBI GI NO: 25404984 NR Description: protein F10A5.22 [imported] - Arabidopsis thaliana
  misc_feature (1)..(224): NCBI GI NO: 37536582 NR Description: putative zinc finger protein
  misc_feature (1)..(144): NCBI GI NO: 25404984 NR Description: protein F10A5.22 [imported] - Arabidopsis thaliana
  misc_feature (29)..(165): NCBI GI NO: 6324074 NR Description: GIG3 suppressor; Gis2p [Saccharomyces cerevisiae]
  misc_feature (28)..(144): NCBI GI NO: 6324074 NR Description: GIG3 suppressor; Gis2p [Saccharomyces cerevisiae]
  misc_feature (47)..(163): NCBI GI NO: 26347241 NR Description: unnamed protein product [Mus musculus]
  misc_feature (17)..(227): NCBI GI NO: 729704 NR Description: DNA-binding protein HEXBP
  misc_feature (43)..(163): NCBI GI NO: 16549164 NR Description: unnamed protein product [Homo sapiens]
MRSERVSYHDAPSRREREPRRAFSQGNLCNNCKRPGHFARDCSNVSVCNNCGLPGHIAAECTAESRCWNCREPGHVASNCSNEGICHSCGKSGHRARDCSNSDSRAGDLRLCNNCFKQGHLAADCTNDKACKNCRTSGHIARDCRNDPVCNICSISGHVARHCPKGDSNYSDRGSRVRDGGMQRGGLSRMSRDREGVSAMIICHNCGGRGHRAYECPSARVADRGFRRY

SEQ ID NO: 4585 - DNA, 1218 bp, Arabidopsis thaliana
  misc_feature (1)..(1218): Ceres Seq. ID no. 13491690
ttctttacttgattgcttattcatctgttgattctgtggttagataagggtatatgagtttgttggacatgggtggagatatgatggaagatgattgggaatttgcgtcatcatcaaaccctaaaagaaccctagttcttgtgggccgtactggaaacggaaagagtgcgacaggtaacagtatccttgggaggaaagcttttaggtcaagagctagaactgtaggagtgacaagcacgtgcgagtcacagagagttgttcaagaagatggtgatatcattaatgttgttgatactcctggtttgtttgatttgtctactgcagctgattttattggtaaagagattgtgaggtgtataagtttggcagaagatgggattcatgcgatcttgttggtattctctgtgaggcggcttgctgaagaggagcaaactgtgcttagtttcttgcaagcgctattcggcagtaagatcgctgactatatgatcgttgtttttaccggtggcgatgagttggaagagaatgaggagacattggaggagtatttggctgactattgccctgagtttcttaaagaaattcttgggatatgtgacaatcggttggtgttgtttaataacaagactactgataaggtgaagaaagctgagcaagttcagaagcttctctcacttgttgaatctgttgttaaacataacaatggaaaaccgtattcagatgagttgttccatgagctacaggaagaggctatcaagctaagggaccagaaaaaggaggttgagttacttcagggttactctaataatgagatagatgagttcaagaagcaaatcgatatgtcctatgataggcagcttagccgcatcaccgagatggtggagactaagctgagagacactgctaagagactagagcagcaactaggtgaagagcaagctgcaagacttgaagcggagaagagggcaaacgaagttcagaagcggtcgagcgatgagattaagaagctcagagagaatctggagagggcggaaaaagagacgaaggaacttcagaaaaaactgggaaagtgcatcaatctatgatatgttgagatgttgtagctccagtgaaatctgataagatcattcatgtcaagtttttttatgtagtcttttgttttcttttggttttttaacaatatggttttatcattaatggcagtgtgttataagtttgctt

SEQ ID NO: 4586 - protein, 342 aa, Arabidopsis thaliana
  peptide (1)..(342): Ceres Seq. ID no. 13491691
  misc_feature (25)..(239): Pfam Name: Pfam Description:  AIG1 family
  misc_feature (1)..(342): NCBI GI NO: 18399081 NR Description: expressed protein [Arabidopsis thaliana]
  misc_feature (6)..(342): NCBI GI NO: 24417378 NR Description: unknown [Arabidopsis thaliana]
  misc_feature (6)..(342): NCBI GI NO: 25373414 NR Description: hypothetical protein F12G12
  misc_feature (49)..(342): NCBI GI NO: 12324509 NR Description: AIG1-like protein, 5' partial; 1-1205
  misc_feature (6)..(333): NCBI GI NO: 4097585 NR Description: NTGP4 [Nicotiana tabacum]
  misc_feature (8)..(330): NCBI GI NO: 15234855 NR Description: AIG1-related protein [Arabidopsis thaliana]
  misc_feature (3)..(338): NCBI GI NO: 15234871 NR Description: AIG1-related protein [Arabidopsis thaliana]
  misc_feature (16)..(335): NCBI GI NO: 15217731 NR Description: AIG1 [Arabidopsis thaliana]
  misc_feature (16)..(335): NCBI GI NO: 10092442 NR Description: disease resistance protein AIG1; 916-2572
  misc_feature (11)..(314): NCBI GI NO: 15217719 NR Description: AIG1-related protein [Arabidopsis thaliana]
MSLLDMGGDMMEDDWEFASSSNPKRTLVLVGRTGNGKSATGNSILGRKAFRSRARTVGVTSTCESQRVVQEDGDIINVVDTPGLFDLSTAADFIGKEIVRCISLAEDGIHAILLVFSVRRLAEEEQTVLSFLQALFGSKIADYMIVVFTGGDELEENEETLEEYLADYCPEFLKEILGICDNRLVLFNNKTTDKVKKAEQVQKLLSLVESVVKHNNGKPYSDELFHELQEEAIKLRDQKKEVELLQGYSNNEIDEFKKQIDMSYDRQLSRITEMVETKLRDTAKRLEQQLGEEQAARLEAEKRANEVQKRSSDEIKKLRENLERAEKETKELQKKLGKCINL

SEQ ID NO: 4587 - protein, 337 aa, Arabidopsis thaliana
  peptide (1)..(337): Ceres Seq. ID no. 13491692
  misc_feature (20)..(234): Pfam Name: Pfam Description:  AIG1 family
  misc_feature (1)..(337): NCBI GI NO: 18399081 NR Description: expressed protein [Arabidopsis thaliana]
  misc_feature (1)..(337): NCBI GI NO: 24417378 NR Description: unknown [Arabidopsis thaliana]
  misc_feature (1)..(337): NCBI GI NO: 25373414 NR Description: hypothetical protein F12G12
  misc_feature (44)..(337): NCBI GI NO: 12324509 NR Description: AIG1-like protein, 5' partial; 1-1205
  misc_feature (1)..(328): NCBI GI NO: 4097585 NR Description: NTGP4 [Nicotiana tabacum]
  misc_feature (3)..(325): NCBI GI NO: 15234855 NR Description: AIG1-related protein [Arabidopsis thaliana]
  misc_feature (1)..(333): NCBI GI NO: 15234871 NR Description: AIG1-related protein [Arabidopsis thaliana]
  misc_feature (11)..(330): NCBI GI NO: 15217731 NR Description: AIG1 [Arabidopsis thaliana]
  misc_feature (11)..(330): NCBI GI NO: 10092442 NR Description: disease resistance protein AIG1; 916-2572
  misc_feature (6)..(309): NCBI GI NO: 15217719 NR Description: AIG1-related protein [Arabidopsis thaliana]
MGGDMMEDDWEFASSSNPKRTLVLVGRTGNGKSATGNSILGRKAFRSRARTVGVTSTCESQRVVQEDGDIINVVDTPGLFDLSTAADFIGKEIVRCISLAEDGIHAILLVFSVRRLAEEEQTVLSFLQALFGSKIADYMIVVFTGGDELEENEETLEEYLADYCPEFLKEILGICDNRLVLFNNKTTDKVKKAEQVQKLLSLVESVVKHNNGKPYSDELFHELQEEAIKLRDQKKEVELLQGYSNNEIDEFKKQIDMSYDRQLSRITEMVETKLRDTAKRLEQQLGEEQAARLEAEKRANEVQKRSSDEIKKLRENLERAEKETKELQKKLGKCINL

SEQ ID NO: 4588 - protein, 333 aa, Arabidopsis thaliana
  peptide (1)..(333): Ceres Seq. ID no. 13491693
  misc_feature (16)..(230): Pfam Name: Pfam Description:  AIG1 family
  misc_feature (1)..(333): NCBI GI NO: 18399081 NR Description: expressed protein [Arabidopsis thaliana]
  misc_feature (1)..(333): NCBI GI NO: 24417378 NR Description: unknown [Arabidopsis thaliana]
  misc_feature (1)..(333): NCBI GI NO: 25373414 NR Description: hypothetical protein F12G12
  misc_feature (40)..(333): NCBI GI NO: 12324509 NR Description: AIG1-like protein, 5' partial; 1-1205
  misc_feature (1)..(324): NCBI GI NO: 4097585 NR Description: NTGP4 [Nicotiana tabacum]
  misc_feature (1)..(321): NCBI GI NO: 15234855 NR Description: AIG1-related protein [Arabidopsis thaliana]
  misc_feature (1)..(329): NCBI GI NO: 15234871 NR Description: AIG1-related protein [Arabidopsis thaliana]
  misc_feature (7)..(326): NCBI GI NO: 15217731 NR Description: AIG1 [Arabidopsis thaliana]
  misc_feature (7)..(326): NCBI GI NO: 10092442 NR Description: disease resistance protein AIG1; 916-2572
  misc_feature (2)..(305): NCBI GI NO: 15217719 NR Description: AIG1-related protein [Arabidopsis thaliana]
MMEDDWEFASSSNPKRTLVLVGRTGNGKSATGNSILGRKAFRSRARTVGVTSTCESQRVVQEDGDIINVVDTPGLFDLSTAADFIGKEIVRCISLAEDGIHAILLVFSVRRLAEEEQTVLSFLQALFGSKIADYMIVVFTGGDELEENEETLEEYLADYCPEFLKEILGICDNRLVLFNNKTTDKVKKAEQVQKLLSLVESVVKHNNGKPYSDELFHELQEEAIKLRDQKKEVELLQGYSNNEIDEFKKQIDMSYDRQLSRITEMVETKLRDTAKRLEQQLGEEQAARLEAEKRANEVQKRSSDEIKKLRENLERAEKETKELQKKLGKCINL

SEQ ID NO: 4589 - DNA, 1316 bp, Arabidopsis thaliana
  misc_feature (1)..(1316): Ceres Seq. ID no. 12367001
aacgccacaatcatggctttgttcttatctcctaaaaccatcactcttctcttcttctccctctccctcgcactctactgcagcatcgatcctttccaccactgcgccatttccgatttccccaatttcgtctctcacgaagttatctctccacgtcccgacgaagttccatgggagagagattcacaaaattcacttcagaaatcaaagattctgttttttaaccaaatccaaggtccagagagcgtcgcctttgattctctcggacgtggtccgtacacaggcgttgctgatggtagggttttgttttgggatggagagaaatggattgatttcgcttatacttcgagtaatcgatcggagatttgtgatccgaagccttctgctttgagttacttgaggaatgaacatatatgtggtcgtcctttaggtcttcgtttcgataagagaaccggagatttgtatatagctgatgcttatatgggacttttgaaagttggtcctgaaggtggtttagcaacgccgcttgtaactgaagctgaaggtgtgccgttggggtttactaatgatcttgacattgctgatgatggaactgtttactttacagatagcagcattagttaccagaggaggaacttcttgcagctcgttttctctggagacaatactgggagggttctaaagtatgatccagtagctaagaaagctgttgttttggtctcaaatcttcagtttccgaatggtgtctctatcagcagagacggttctttctttgtattctgcgaaggagatattggaagcctacgaagatactggttgaaaggcgagaaagctggaacgacagatgtgtttgcgtatttaccagggcatcctgataacgtaagaaccaaccaaaagggtgaattttgggtagcgcttcattgcagacgcaactactactcatacttaatggcaagatatcctaagctgaggatgttcatactgagactgccaatcactgcgagaactcactactcgttccagatagggttacggccgcacgggttggtggttaagtatagtcctgaagggaagcttatgcatgttttggaagatagtgaagggaaagttgtgagatcagtaagtgaagtggaagaaaaagatgggaagctttggatgggaagtgtgttgatgaactttgttgctgtctatgacctctgattacttgacctatacgtaaaccacttcactcagtttctagatttagcaaattctcaaaactgttaggtgtgtactgaaaaaatcaaacacttagcacaaacaaactcaatgttatt

SEQ ID NO: 4590 - protein, 399 aa, Arabidopsis thaliana
  peptide (1)..(399): Ceres Seq. ID no. 12367002
  misc_feature (17)..(394): Pfam Name: Pfam Description:  Strictosidine synthase
  misc_feature (5)..(399): NCBI GI NO: 22326950 NR Description: similar to strictosidine synthase-related
  misc_feature (21)..(399): NCBI GI NO: 18390900 NR Description: strictosidine synthase-related
  misc_feature (21)..(268): NCBI GI NO: 25335889 NR Description: protein T27G7.16 [imported] - Arabidopsis thaliana
  misc_feature (268)..(399): NCBI GI NO: 25335889 NR Description: protein T27G7.16 [imported] - Arabidopsis thaliana
  misc_feature (22)..(398): NCBI GI NO: 40538997 NR Description: putative  strictosidine synthase
  misc_feature (53)..(399): NCBI GI NO: 11280567 NR Description: hypothetical protein F24I3
  misc_feature (53)..(399): NCBI GI NO: 30694556 NR Description: strictosidine synthase-related
  misc_feature (16)..(395): NCBI GI NO: 28393615 NR Description: putative strictosidine synthase
  misc_feature (62)..(399): NCBI GI NO: 8489790 NR Description: putative strictosidine synthase
  misc_feature (16)..(395): NCBI GI NO: 34902140 NR Description: putative male fertility protein
NATIMALFLSPKTITLLFFSLSLALYCSIDPFHHCAISDFPNFVSHEVISPRPDEVPWERDSQNSLQKSKILFFNQIQGPESVAFDSLGRGPYTGVADGRVLFWDGEKWIDFAYTSSNRSEICDPKPSALSYLRNEHICGRPLGLRFDKRTGDLYIADAYMGLLKVGPEGGLATPLVTEAEGVPLGFTNDLDIADDGTVYFTDSSISYQRRNFLQLVFSGDNTGRVLKYDPVAKKAVVLVSNLQFPNGVSISRDGSFFVFCEGDIGSLRRYWLKGEKAGTTDVFAYLPGHPDNVRTNQKGEFWVALHCRRNYYSYLMARYPKLRMFILRLPITARTHYSFQIGLRPHGLVVKYSPEGKLMHVLEDSEGKVVRSVSEVEEKDGKLWMGSVLMNFVAVYDL

SEQ ID NO: 4591 - protein, 395 aa, Arabidopsis thaliana
  peptide (1)..(395): Ceres Seq. ID no. 12367003
  misc_feature (13)..(390): Pfam Name: Pfam Description:  Strictosidine synthase
  misc_feature (1)..(395): NCBI GI NO: 22326950 NR Description: similar to strictosidine synthase-related
  misc_feature (17)..(395): NCBI GI NO: 18390900 NR Description: strictosidine synthase-related
  misc_feature (17)..(264): NCBI GI NO: 25335889 NR Description: protein T27G7.16 [imported] - Arabidopsis thaliana
  misc_feature (264)..(395): NCBI GI NO: 25335889 NR Description: protein T27G7.16 [imported] - Arabidopsis thaliana
  misc_feature (18)..(394): NCBI GI NO: 40538997 NR Description: putative  strictosidine synthase
  misc_feature (49)..(395): NCBI GI NO: 11280567 NR Description: hypothetical protein F24I3
  misc_feature (49)..(395): NCBI GI NO: 30694556 NR Description: strictosidine synthase-related
  misc_feature (12)..(391): NCBI GI NO: 28393615 NR Description: putative strictosidine synthase
  misc_feature (58)..(395): NCBI GI NO: 8489790 NR Description: putative strictosidine synthase
  misc_feature (12)..(391): NCBI GI NO: 34902140 NR Description: putative male fertility protein
MALFLSPKTITLLFFSLSLALYCSIDPFHHCAISDFPNFVSHEVISPRPDEVPWERDSQNSLQKSKILFFNQIQGPESVAFDSLGRGPYTGVADGRVLFWDGEKWIDFAYTSSNRSEICDPKPSALSYLRNEHICGRPLGLRFDKRTGDLYIADAYMGLLKVGPEGGLATPLVTEAEGVPLGFTNDLDIADDGTVYFTDSSISYQRRNFLQLVFSGDNTGRVLKYDPVAKKAVVLVSNLQFPNGVSISRDGSFFVFCEGDIGSLRRYWLKGEKAGTTDVFAYLPGHPDNVRTNQKGEFWVALHCRRNYYSYLMARYPKLRMFILRLPITARTHYSFQIGLRPHGLVVKYSPEGKLMHVLEDSEGKVVRSVSEVEEKDGKLWMGSVLMNFVAVYDL

SEQ ID NO: 4592 - protein, 239 aa, Arabidopsis thaliana
  peptide (1)..(239): Ceres Seq. ID no. 12367004
  misc_feature (1)..(234): Pfam Name: Pfam Description:  Strictosidine synthase
  misc_feature (1)..(239): NCBI GI NO: 22326950 NR Description: similar to strictosidine synthase-related
  misc_feature (1)..(239): NCBI GI NO: 18390900 NR Description: strictosidine synthase-related
  misc_feature (1)..(108): NCBI GI NO: 25335889 NR Description: protein T27G7.16 [imported] - Arabidopsis thaliana
  misc_feature (108)..(239): NCBI GI NO: 25335889 NR Description: protein T27G7.16 [imported] - Arabidopsis thaliana
  misc_feature (1)..(238): NCBI GI NO: 40538997 NR Description: putative  strictosidine synthase
  misc_feature (1)..(239): NCBI GI NO: 11280567 NR Description: hypothetical protein F24I3
  misc_feature (1)..(239): NCBI GI NO: 30694556 NR Description: strictosidine synthase-related
  misc_feature (1)..(235): NCBI GI NO: 28393615 NR Description: putative strictosidine synthase
  misc_feature (1)..(239): NCBI GI NO: 8489790 NR Description: putative strictosidine synthase
  misc_feature (1)..(235): NCBI GI NO: 34902140 NR Description: putative male fertility protein
MGLLKVGPEGGLATPLVTEAEGVPLGFTNDLDIADDGTVYFTDSSISYQRRNFLQLVFSGDNTGRVLKYDPVAKKAVVLVSNLQFPNGVSISRDGSFFVFCEGDIGSLRRYWLKGEKAGTTDVFAYLPGHPDNVRTNQKGEFWVALHCRRNYYSYLMARYPKLRMFILRLPITARTHYSFQIGLRPHGLVVKYSPEGKLMHVLEDSEGKVVRSVSEVEEKDGKLWMGSVLMNFVAVYDL

SEQ ID NO: 4593 - DNA, 1402 bp, Arabidopsis thaliana
  misc_feature (1)..(1402): Ceres Seq. ID no. 12422124
attctccttcttctttttttgtgcagttcaaatagtaaaaaaccgaatgacggtatgatgctcgtaatatcgattttcgctggagtagttatcggatttttattaggcatatctttccctacattgtcactaactaagatgaattttccatcaagcattcttccttctgttgctactgtttacatagaaaatgagaaaccagagaaaccatctaagacgagttcacaaaacgagtttaattcaagtgatgcatcacatcatcataagatttgggttccatcgaatcctcgaggtgcagagatgttacctccaagttttgttgcagccgaatcggatttttacttgcgaagattatggggattgcctaaagatgatttaccagtggtgaagcctaaatatctagttgcttttactgtttcttatgaacaaagaaaaaacatcgattcttgtgtcaaaaaattctcagataacttcaccattgttctgtttcattacgatggaaaaacctcggagtatgatgaatttgaatggtctaaacgggcgatacacgtcagtgtacctaagcaaaccaagtggtggtatgctaaaaggtttctgcatcctgatatcatagcaccatatgaatatatattcatttgggatgaagatcttggcgttgaaaacttcgacgcagaagagtacatcaagattgtgaagaagcatggtctagaaatatcgcaacccgctgtggaatcaagaaaatcaatcacatggaagataacaaaaagaatacccggaatcgaagttcacaaagaagtcgaagagaaaccaggccgctgcaatgaccctcacctacctccttgtgcagggtttatagagattatggctccagttttctctagagaggcatggcgctgcgtgtggcatatgattcagaatgacttggttcacggttggggtcttgactttgcgctaagaaaatgcgtcgagcctgcacatgagaagattggtgttgtggattctcaatggatcattcatcaaaagattccttctttaggcagccagggaactgcgcaggaagggaaaaccgcgttccaaggggtaagagagagatgtaaacgggaatggacaatgtttcagaaaagaatgacccgatcagagcagaagtatctgaaagaaattgcatcagcctcttcaaacgctacacgtacttaaaccaaaagaatagaggaactgaataacaaactttagtgttcagatagcattttcagtaataagagaaatagaatgttgatatgataagcacataagtatacacacacaatacacattctttgaaaagaacaatatagctctgttctagaaacagttatactgtagtaacaaaacagttaataaagttcttaataaactcttcatttct

SEQ ID NO: 4594 - protein, 397 aa, Arabidopsis thaliana
  peptide (1)..(397): Ceres Seq. ID no. 12422125
  misc_feature (89)..(267): Pfam Name: DUF707 Pfam Description: Protein of unknown function
  misc_feature (10)..(397): NCBI GI NO: 18404941 NR Description: expressed protein; protein id: At3g26440
  misc_feature (10)..(397): NCBI GI NO: 16612300 NR Description: AT3g26440/F20C19_16 [Arabidopsis thaliana]
  misc_feature (89)..(267): NCBI GI NO: 9294303 NR Description: gb|AAD31054
  misc_feature (284)..(397): NCBI GI NO: 9294303 NR Description: gb|AAD31054
  misc_feature (10)..(52): NCBI GI NO: 9294303 NR Description: gb|AAD31054
  misc_feature (10)..(391): NCBI GI NO: 22329525 NR Description: unknown protein; protein id: At1g13000
  misc_feature (89)..(285): NCBI GI NO: 25402748 NR Description: protein F3F19.3 [imported] - Arabidopsis thaliana
  misc_feature (284)..(391): NCBI GI NO: 25402748 NR Description: protein F3F19.3 [imported] - Arabidopsis thaliana
  misc_feature (10)..(52): NCBI GI NO: 25402748 NR Description: protein F3F19.3 [imported] - Arabidopsis thaliana
  misc_feature (5)..(397): NCBI GI NO: 18408876 NR Description: F12A21
ILLLLFLCSSNSKKPNDGMMLVISIFAGVVIGFLLGISFPTLSLTKMNFPSSILPSVATVYIENEKPEKPSKTSSQNEFNSSDASHHHKIWVPSNPRGAEMLPPSFVAAESDFYLRRLWGLPKDDLPVVKPKYLVAFTVSYEQRKNIDSCVKKFSDNFTIVLFHYDGKTSEYDEFEWSKRAIHVSVPKQTKWWYAKRFLHPDIIAPYEYIFIWDEDLGVENFDAEEYIKIVKKHGLEISQPAVESRKSITWKITKRIPGIEVHKEVEEKPGRCNDPHLPPCAGFIEIMAPVFSREAWRCVWHMIQNDLVHGWGLDFALRKCVEPAHEKIGVVDSQWIIHQKIPSLGSQGTAQEGKTAFQGVRERCKREWTMFQKRMTRSEQKYLKEIASASSNATRT

SEQ ID NO: 4595 - protein, 379 aa, Arabidopsis thaliana
  peptide (1)..(379): Ceres Seq. ID no. 12422126
  misc_feature (71)..(249): Pfam Name: DUF707 Pfam Description: Protein of unknown function
  misc_feature (1)..(379): NCBI GI NO: 18404941 NR Description: expressed protein; protein id: At3g26440
  misc_feature (1)..(379): NCBI GI NO: 16612300 NR Description: AT3g26440/F20C19_16 [Arabidopsis thaliana]
  misc_feature (71)..(249): NCBI GI NO: 9294303 NR Description: gb|AAD31054
  misc_feature (266)..(379): NCBI GI NO: 9294303 NR Description: gb|AAD31054
  misc_feature (1)..(34): NCBI GI NO: 9294303 NR Description: gb|AAD31054
  misc_feature (1)..(373): NCBI GI NO: 22329525 NR Description: unknown protein; protein id: At1g13000
  misc_feature (71)..(267): NCBI GI NO: 25402748 NR Description: protein F3F19.3 [imported] - Arabidopsis thaliana
  misc_feature (266)..(373): NCBI GI NO: 25402748 NR Description: protein F3F19.3 [imported] - Arabidopsis thaliana
  misc_feature (1)..(34): NCBI GI NO: 25402748 NR Description: protein F3F19.3 [imported] - Arabidopsis thaliana
  misc_feature (1)..(379): NCBI GI NO: 18408876 NR Description: F12A21
MMLVISIFAGVVIGFLLGISFPTLSLTKMNFPSSILPSVATVYIENEKPEKPSKTSSQNEFNSSDASHHHKIWVPSNPRGAEMLPPSFVAAESDFYLRRLWGLPKDDLPVVKPKYLVAFTVSYEQRKNIDSCVKKFSDNFTIVLFHYDGKTSEYDEFEWSKRAIHVSVPKQTKWWYAKRFLHPDIIAPYEYIFIWDEDLGVENFDAEEYIKIVKKHGLEISQPAVESRKSITWKITKRIPGIEVHKEVEEKPGRCNDPHLPPCAGFIEIMAPVFSREAWRCVWHMIQNDLVHGWGLDFALRKCVEPAHEKIGVVDSQWIIHQKIPSLGSQGTAQEGKTAFQGVRERCKREWTMFQKRMTRSEQKYLKEIASASSNATRT

SEQ ID NO: 4596 - protein, 378 aa, Arabidopsis thaliana
  peptide (1)..(378): Ceres Seq. ID no. 12422127
  misc_feature (70)..(248): Pfam Name: DUF707 Pfam Description: Protein of unknown function
  misc_feature (1)..(378): NCBI GI NO: 18404941 NR Description: expressed protein; protein id: At3g26440
  misc_feature (1)..(378): NCBI GI NO: 16612300 NR Description: AT3g26440/F20C19_16 [Arabidopsis thaliana]
  misc_feature (70)..(248): NCBI GI NO: 9294303 NR Description: gb|AAD31054
  misc_feature (265)..(378): NCBI GI NO: 9294303 NR Description: gb|AAD31054
  misc_feature (1)..(33): NCBI GI NO: 9294303 NR Description: gb|AAD31054
  misc_feature (1)..(372): NCBI GI NO: 22329525 NR Description: unknown protein; protein id: At1g13000
  misc_feature (70)..(266): NCBI GI NO: 25402748 NR Description: protein F3F19.3 [imported] - Arabidopsis thaliana
  misc_feature (265)..(372): NCBI GI NO: 25402748 NR Description: protein F3F19.3 [imported] - Arabidopsis thaliana
  misc_feature (1)..(33): NCBI GI NO: 25402748 NR Description: protein F3F19.3 [imported] - Arabidopsis thaliana
  misc_feature (1)..(378): NCBI GI NO: 18408876 NR Description: F12A21
MLVISIFAGVVIGFLLGISFPTLSLTKMNFPSSILPSVATVYIENEKPEKPSKTSSQNEFNSSDASHHHKIWVPSNPRGAEMLPPSFVAAESDFYLRRLWGLPKDDLPVVKPKYLVAFTVSYEQRKNIDSCVKKFSDNFTIVLFHYDGKTSEYDEFEWSKRAIHVSVPKQTKWWYAKRFLHPDIIAPYEYIFIWDEDLGVENFDAEEYIKIVKKHGLEISQPAVESRKSITWKITKRIPGIEVHKEVEEKPGRCNDPHLPPCAGFIEIMAPVFSREAWRCVWHMIQNDLVHGWGLDFALRKCVEPAHEKIGVVDSQWIIHQKIPSLGSQGTAQEGKTAFQGVRERCKREWTMFQKRMTRSEQKYLKEIASASSNATRT

SEQ ID NO: 4597 - DNA, 1158 bp, Arabidopsis thaliana
  misc_feature (1)..(1158): Ceres Seq. ID no. 12328522
acctaaacctctgtaccacaattcgacgcaattcatcgttacccaaaaacctctgtttcgattcctagacactctcactagggttttacaactatggcaacgactcgaatggttagggtttcgcaagatggttcgggagattactgctctgttcaagacgcaattgattcggtgcctttaggtaacacttgcagaactgtgattcgtctctcacctgggatttatcggcaacctgtgtatgtacccaagaggaagaatttcattaccttcgccggaatctcaccggagatcacggttttgacttggaacaatacagcttccaagattgagcatcaccaggcgtctagagtcattgggactggtacgtttggttgtggtagtgttattgttgaaggtgaagattttattgcagagaacattacttttgagaactctgctcctgagggatcagggcaagctgtggcgatacgagtcactgcagaccgttgcgccttttataattgtcgatttctcggttggcaggatacattgtatttacatcatgggaaacaatatttgaaagactgttacatcgagggaagtgtggatttcatatttggaaacagtaccgctctcttggaacactgccatatccactgcaaatctcaggggtttataacagcacaaagccgaaaatcgtctcaggaatctactggttatgtattcttaagatgtgtgatcacgggtaatggtcagagcgggtatatgtatctcggaaggccatggggaccatttgggagggtagtccttgcttacacttacatggacgcgtgtatcagaaatgtgggttggcataactggggaaacgcagagaacgagagaagtgcttgcttttatgagtataggtgctttggtccgggtagctgttcgtctgaacgtgttccgtggtcgagagaactgatggatgacgaagctggacactttgtgcatcatagttttgtagatcctgaacaggaccggccttggttgtgtctaagaatgggtgtgaaaacaccatattcggcttagagtactgaaaaaaaatgttgtaactgccatggtgaggcctagaataacaaaggatcatgaagaacctattgtaaacaaccctagtatcaaactttggattatcttttgtcc

SEQ ID NO: 4598 - protein, 317 aa, Arabidopsis thaliana
  peptide (1)..(317): Ceres Seq. ID no. 12328523
  misc_feature (6)..(299): Pfam Name: Pfam Description:  Pectinesterase
  misc_feature (1)..(317): NCBI GI NO: 18406048 NR Description: pectinesterase family; protein id: At3g29090
  misc_feature (11)..(317): NCBI GI NO: 37534214 NR Description: putative pectin methylesterase
  misc_feature (15)..(297): NCBI GI NO: 34909402 NR Description: putative pectin methylesterase
  misc_feature (11)..(307): NCBI GI NO: 15241163 NR Description: pectinesterase family; protein id: At5g19730
  misc_feature (6)..(305): NCBI GI NO: 34913006 NR Description: pectin methylesterase-like protein
  misc_feature (145)..(266): NCBI GI NO: 10047449 NR Description: pectin methylesterase [Prunus armeniaca]
  misc_feature (1)..(305): NCBI GI NO: 15226598 NR Description: pectinesterase family; protein id: At2g21610.1
  misc_feature (1)..(308): NCBI GI NO: 15238111 NR Description: pectinesterase family; protein id: At5g47500
  misc_feature (1)..(297): NCBI GI NO: 38345478 NR Description: OSJNBa0010H02.16
  misc_feature (1)..(308): NCBI GI NO: 9758778 NR Description: pectin methylesterase-like [Arabidopsis thaliana]
MATTRMVRVSQDGSGDYCSVQDAIDSVPLGNTCRTVIRLSPGIYRQPVYVPKRKNFITFAGISPEITVLTWNNTASKIEHHQASRVIGTGTFGCGSVIVEGEDFIAENITFENSAPEGSGQAVAIRVTADRCAFYNCRFLGWQDTLYLHHGKQYLKDCYIEGSVDFIFGNSTALLEHCHIHCKSQGFITAQSRKSSQESTGYVFLRCVITGNGQSGYMYLGRPWGPFGRVVLAYTYMDACIRNVGWHNWGNAENERSACFYEYRCFGPGSCSSERVPWSRELMDDEAGHFVHHSFVDPEQDRPWLCLRMGVKTPYSA

SEQ ID NO: 4599 - protein, 312 aa, Arabidopsis thaliana
  peptide (1)..(312): Ceres Seq. ID no. 12328524
  misc_feature (1)..(294): Pfam Name: Pfam Description:  Pectinesterase
  misc_feature (1)..(312): NCBI GI NO: 18406048 NR Description: pectinesterase family; protein id: At3g29090
  misc_feature (6)..(312): NCBI GI NO: 37534214 NR Description: putative pectin methylesterase
  misc_feature (10)..(292): NCBI GI NO: 34909402 NR Description: putative pectin methylesterase
  misc_feature (6)..(302): NCBI GI NO: 15241163 NR Description: pectinesterase family; protein id: At5g19730
  misc_feature (1)..(300): NCBI GI NO: 34913006 NR Description: pectin methylesterase-like protein
  misc_feature (140)..(261): NCBI GI NO: 10047449 NR Description: pectin methylesterase [Prunus armeniaca]
  misc_feature (1)..(300): NCBI GI NO: 15226598 NR Description: pectinesterase family; protein id: At2g21610.1
  misc_feature (1)..(303): NCBI GI NO: 15238111 NR Description: pectinesterase family; protein id: At5g47500
  misc_feature (1)..(292): NCBI GI NO: 38345478 NR Description: OSJNBa0010H02.16
  misc_feature (1)..(303): NCBI GI NO: 9758778 NR Description: pectin methylesterase-like [Arabidopsis thaliana]
MVRVSQDGSGDYCSVQDAIDSVPLGNTCRTVIRLSPGIYRQPVYVPKRKNFITFAGISPEITVLTWNNTASKIEHHQASRVIGTGTFGCGSVIVEGEDFIAENITFENSAPEGSGQAVAIRVTADRCAFYNCRFLGWQDTLYLHHGKQYLKDCYIEGSVDFIFGNSTALLEHCHIHCKSQGFITAQSRKSSQESTGYVFLRCVITGNGQSGYMYLGRPWGPFGRVVLAYTYMDACIRNVGWHNWGNAENERSACFYEYRCFGPGSCSSERVPWSRELMDDEAGHFVHHSFVDPEQDRPWLCLRMGVKTPYSA

SEQ ID NO: 4600 - DNA, 5072 bp, Arabidopsis thaliana
  misc_feature (1)..(5072): Ceres Seq. ID no. 13504870
aagagaagagagatctctctctcgattgctctcaagaacccaagtgacgtctggtttcagctgatttgtttcttctcattctctatcttcttctctgggaaatatcgattttgatctattaagagctgctacgagctttgggatgtggtgagatgcttgttctatctcgaacaatccgccggttgttgattttaaacaaactctctatcacaaatctttcccgatcatggattttattgagatctcgttgatctttcgagagcatttgccactactggaactatgttcggtcatcatcaacctcctactctttcttgtctttctatttgctgtctccgcgaggcagattctcgtctgcgtgagaagaggcagagataggctctctaaggacgatacggtttcagcttctaatcttagcttggaaagagaggttaaccatgttagtgttgggtttgggtttaatctgtctttgctctgttgcttatatgtgttaggcgtccaagttttggtgttagtatatgatggggttaaggttagaagagaagtcagtgactggtttgttctttgctttccagcttctcagagtttagcttggtttgtccttagcttcttagttcttcatttgaaatacaagtcttcagagaagctacccttcttggtgaggatatggtggttcctggcgttttcgatttgcctctgtactatgtatgtcgatggaagaaggctagccattgaaggttggagcagatgttcttctcatgttgtcgccaatttagctgttacacctgctcttgggtttctctgctttctggcctggagaggcgtttctggtattcaagttaccagaagctcctctgatcttcaagagcctttgcttgttgaagaagaggcagcttgtcttaaagttactccatatagtactgctgggctagttagccttattacgctttcatggttggatccacttctctcggctggttcaaaaagaccgcttgagcttaaggatataccgcttcttgcaccaagagatagagccaaatcaagttacaaggtcttgaagtcgaattggaagagatgcaagtccgagaatccttcaaagcctccttctttagctcgtgcaattatgaaatcattttggaaagaagctgcttgcaatgccgtatttgctgggttgaatactcttgtgtcctatgtcggtccttacttgatcagctactttgttgattatcttggagggaaggagattttccctcatgaaggatacgtactcgctgggatattctttacgtccaagcttatagagacagtcaccacccgccagtggtatatgggtgttgatatcctagggatgcatgttagatcagctcttacagcaatggtataccgaaaaggtctcaaactttcaagtatagccaagcagaaccacacgagcggtgaaattgtaaactacatggcagtcgatgtccagcgcataggagattactcatggtatcttcatgatatttggatgcttccgatgcaaatagttcttgctcttgcaatcctatataaaagcgtgggcatagctgctgtagctacattggttgctacaataatctcgattcttgtcacgattccactcgctaaggtccaggaagactatcaagataagttgatgactgcgaaagatgaaagaatgaggaaaacctcagagtgtcttaggaacatgagagttctgaaattgcaggcatgggaagatcgttatagagtgagattggaagaaatgagggaagaggagtatggttggcttcgcaaagccttatattctcaggcttttgttacttttatcttttggagttcccccatttttgtcgccgcagttacattcgctacttcgatatttctaggcactcaacttaccgctggaggtgttctttctgctctggcgacattcagaattcttcaggagccacttcggaactttcctgatctggtttcaatgatggctcagacaaaggtttctcttgataggatttctgggttcttgcaggaggaagaacttcaagaagatgcaactgttgttattccacggggactttcgaatatagccatagagattaaagatggtgtgttttgttgggaccctttttcttcaaggccgacattatctgggattcagatgaaagtggagaagggtatgcgtgtggctgtctgtggcacagttggctctggaaaatcaagttttatctcttgcatcctaggggaaatcccaaaaatctctggcgaagttagaatatgtggtactactggttatgtgtctcaatcggcttggattcagtctggtaacattgaagaaaacattctatttggcagtccaatggagaaaacaaagtacaagaatgtgatacaagcatgttccctaaagaaagatatagagcttttctcacatggggaccaaactattatcggggagagaggtataaatctcagcggaggtcagaaacagcgtgtacaacttgcaagggcattatatcaagatgctgacatttatttactagacgacccttttagtgctcttgatgcacacactggctctgatttgtttagggattatattctatctgcattggctgagaaaactgtggtttttgtaacgcatcaagttgagtttctccctgcagctgatctaatattggttctgaaggaaggcaggattattcaatcgggtaaatatgatgatctgctgcaagcaggtactgattttaaggccttagtgtctgcccaccatgaagcaatcgaggcaatggacatcccaagtccctcctcagaagactctgatgaaaatcctattcgcgatagtttggtcttgcataatccaaagtctgatgtttttgaaaatgacatcgagactttggcaaaggaagtacaagagggaggatctgcttcagatctaaaggcaatcaaagagaagaagaagaaagctaagcgttcccgcaaaaagcagcttgttcaagaagaggaacgagtaaagggaaaagtcagcatgaaggtgtacttgtcatacatgggtgctgcatataaaggggctctgattcctcttattatactcgcacaagctgctttccaatttcttcagattgctagtaattggtggatggcttgggcaaatcctcaaactgaaggtgacgaatctaaagtggatcctactctgcttctcatcgtttatacggctttagctttcgggagctctgtgttcatatttgttcgagctgctctggttgcaacttttggtcttgcagctgcacagaaactgttcttaaatatgctcagaagtgtgttccgagcgccaatgtcattctttgattccactcctgcaggaagaattttgaatcgggtttctattgatcaaagtgttgtagatcttgacattccttttagactcggtgggtttgcttcaacaacaatacaactctgtggcattgtcgctgtaatgaccaatgttacctggcaagttttccttcttgttgttccggtagctgttgcttgcttttggatgcagaaatattacatggcttcttcaagagaattggttcggatagttagtatccagaagtctccaataattcatctttttggagaatcaattgctggtgctgccacaataagaggatttggccaggaaaaaagatttatcaaaaggaatctttatcttctagattgttttgttcgacctttcttctgcagtatcgctgctatcgaatggctttgtttacgcatggaattactttccacacttgtatttgctttctgtatggttttactcgtcagttttccacatggaaccattgatccaagcatggcaggtcttgctgtgacatatggacttaacttgaatggacgtctatcacgatggatacttagcttttgtaagcttgaaaacaaaataatctcaatcgaaaggatttatcagtacagtcagattgtaggagaggccccagcaattatagaagatttccgcccgccttcctcgtggcctgcaacgggaacaattgagctagttgatgttaaggttcgttatgctgagaatcttccaacagtactccatggggtgagctgtgtgtttccgggtggaaaaaagattgggattgttgggcgaacgggaagcggaaagtcgactttgattcaagctttgtttcgattgattgagccaactgctggaaaaattactattgacaacattgacatttctcaaattggtcttcatgatcttcgtagtcgccttgggattatacctcaagatcctacattatttgaaggaacaatccgagcaaatcttgacccacttgaagaacattcagatgataaaatctgggaggcgcttgataaatcccagcttggagacgttgttagaggaaaagacctaaaacttgactctccagtactggaaaatggagataactggagtgtagggcagagacagcttgtgtcacttggacgagcattactgaaacaagccaaaatacttgttcttgatgaagcaacagcatcggttgacacagcaacagacaatctgatccagaagataatcagaacagagtttgaagactgcacggtctgcaccattgctcaccggataccaactgttatagacagtgacctagttttggttctcagcgacggtagagtagcagagtttgatactcctgcacggctattagaagacaaatcatcgatgttcttgaaattggtaacagaatactcctcaagatctactggaatccctgaattatgatcctccatgttaaaaattcagtttagggggtttcttttctcaagaggatataaaagaactgatatgtgacaaaagcttaaggtctaaagtaagagagagttttccacagggtttaagaaaagaaaaagcatgaaaggatgccaaaatctccgcgcttaaaaaactttgggtttaaatctcttctgtcgaacattgggagaaactttttttgtatggaacagttagtttctttggttttcatgtttatcaataaactgcaaaaacaaacaaagattagagtagaaactactaatcattcgtc

SEQ ID NO: 4601 - protein, 1514 aa, Arabidopsis thaliana
  peptide (1)..(1514): Ceres Seq. ID no. 13504871
  misc_feature (304)..(576): Pfam Name: Pfam Description:  ABC transporter transmembrane region
  misc_feature (67)..(1511): NCBI GI NO: 15227133 NR Description: glutathione-conjugate transporter AtMRP4
  misc_feature (1)..(632): NCBI GI NO: 27368875 NR Description: MRP-like ABC transporter
  misc_feature (919)..(1511): NCBI GI NO: 27368875 NR Description: MRP-like ABC transporter
  misc_feature (640)..(854): NCBI GI NO: 27368875 NR Description: MRP-like ABC transporter
  misc_feature (233)..(931): NCBI GI NO: 19172038 NR Description: ABC transporter ABCC.8 [Dictyostelium discoideum]
  misc_feature (848)..(1507): NCBI GI NO: 19172038 NR Description: ABC transporter ABCC.8 [Dictyostelium discoideum]
  misc_feature (295)..(930): NCBI GI NO: 19569597 NR Description: multidrug resistance-associated protein Mrp2
  misc_feature (908)..(1503): NCBI GI NO: 19569597 NR Description: multidrug resistance-associated protein Mrp2
  misc_feature (205)..(291): NCBI GI NO: 19569597 NR Description: multidrug resistance-associated protein Mrp2
  misc_feature (285)..(1497): NCBI GI NO: 6678848 NR Description: ATP-binding cassette, sub-family C, member 1
MDFIEISLIFREHLPLLELCSVIINLLLFLVFLFAVSARQILVCVRRGRDRLSKDDTVSASNLSLEREVNHVSVGFGFNLSLLCCLYVLGVQVLVLVYDGVKVRREVSDWFVLCFPASQSLAWFVLSFLVLHLKYKSSEKLPFLVRIWWFLAFSICLCTMYVDGRRLAIEGWSRCSSHVVANLAVTPALGFLCFLAWRGVSGIQVTRSSSDLQEPLLVEEEAACLKVTPYSTAGLVSLITLSWLDPLLSAGSKRPLELKDIPLLAPRDRAKSSYKVLKSNWKRCKSENPSKPPSLARAIMKSFWKEAACNAVFAGLNTLVSYVGPYLISYFVDYLGGKEIFPHEGYVLAGIFFTSKLIETVTTRQWYMGVDILGMHVRSALTAMVYRKGLKLSSIAKQNHTSGEIVNYMAVDVQRIGDYSWYLHDIWMLPMQIVLALAILYKSVGIAAVATLVATIISILVTIPLAKVQEDYQDKLMTAKDERMRKTSECLRNMRVLKLQAWEDRYRVRLEEMREEEYGWLRKALYSQAFVTFIFWSSPIFVAAVTFATSIFLGTQLTAGGVLSALATFRILQEPLRNFPDLVSMMAQTKVSLDRISGFLQEEELQEDATVVIPRGLSNIAIEIKDGVFCWDPFSSRPTLSGIQMKVEKGMRVAVCGTVGSGKSSFISCILGEIPKISGEVRICGTTGYVSQSAWIQSGNIEENILFGSPMEKTKYKNVIQACSLKKDIELFSHGDQTIIGERGINLSGGQKQRVQLARALYQDADIYLLDDPFSALDAHTGSDLFRDYILSALAEKTVVFVTHQVEFLPAADLILVLKEGRIIQSGKYDDLLQAGTDFKALVSAHHEAIEAMDIPSPSSEDSDENPIRDSLVLHNPKSDVFENDIETLAKEVQEGGSASDLKAIKEKKKKAKRSRKKQLVQEEERVKGKVSMKVYLSYMGAAYKGALIPLIILAQAAFQFLQIASNWWMAWANPQTEGDESKVDPTLLLIVYTALAFGSSVFIFVRAALVATFGLAAAQKLFLNMLRSVFRAPMSFFDSTPAGRILNRVSIDQSVVDLDIPFRLGGFASTTIQLCGIVAVMTNVTWQVFLLVVPVAVACFWMQKYYMASSRELVRIVSIQKSPIIHLFGESIAGAATIRGFGQEKRFIKRNLYLLDCFVRPFFCSIAAIEWLCLRMELLSTLVFAFCMVLLVSFPHGTIDPSMAGLAVTYGLNLNGRLSRWILSFCKLENKIISIERIYQYSQIVGEAPAIIEDFRPPSSWPATGTIELVDVKVRYAENLPTVLHGVSCVFPGGKKIGIVGRTGSGKSTLIQALFRLIEPTAGKITIDNIDISQIGLHDLRSRLGIIPQDPTLFEGTIRANLDPLEEHSDDKIWEALDKSQLGDVVRGKDLKLDSPVLENGDNWSVGQRQLVSLGRALLKQAKILVLDEATASVDTATDNLIQKIIRTEFEDCTVCTIAHRIPTVIDSDLVLVLSDGRVAEFDTPARLLEDKSSMFLKLVTEYSSRSTGIPEL

SEQ ID NO: 4602 - protein, 1355 aa, Arabidopsis thaliana
  peptide (1)..(1355): Ceres Seq. ID no. 13504872
  misc_feature (145)..(417): Pfam Name: Pfam Description:  ABC transporter transmembrane region
  misc_feature (1)..(1352): NCBI GI NO: 15227133 NR Description: glutathione-conjugate transporter AtMRP4
  misc_feature (1)..(473): NCBI GI NO: 27368875 NR Description: MRP-like ABC transporter
  misc_feature (760)..(1352): NCBI GI NO: 27368875 NR Description: MRP-like ABC transporter
  misc_feature (481)..(695): NCBI GI NO: 27368875 NR Description: MRP-like ABC transporter
  misc_feature (74)..(772): NCBI GI NO: 19172038 NR Description: ABC transporter ABCC.8 [Dictyostelium discoideum]
  misc_feature (689)..(1348): NCBI GI NO: 19172038 NR Description: ABC transporter ABCC.8 [Dictyostelium discoideum]
  misc_feature (136)..(771): NCBI GI NO: 19569597 NR Description: multidrug resistance-associated protein Mrp2
  misc_feature (749)..(1344): NCBI GI NO: 19569597 NR Description: multidrug resistance-associated protein Mrp2
  misc_feature (46)..(132): NCBI GI NO: 19569597 NR Description: multidrug resistance-associated protein Mrp2
  misc_feature (126)..(1338): NCBI GI NO: 6678848 NR Description: ATP-binding cassette, sub-family C, member 1
MYVDGRRLAIEGWSRCSSHVVANLAVTPALGFLCFLAWRGVSGIQVTRSSSDLQEPLLVEEEAACLKVTPYSTAGLVSLITLSWLDPLLSAGSKRPLELKDIPLLAPRDRAKSSYKVLKSNWKRCKSENPSKPPSLARAIMKSFWKEAACNAVFAGLNTLVSYVGPYLISYFVDYLGGKEIFPHEGYVLAGIFFTSKLIETVTTRQWYMGVDILGMHVRSALTAMVYRKGLKLSSIAKQNHTSGEIVNYMAVDVQRIGDYSWYLHDIWMLPMQIVLALAILYKSVGIAAVATLVATIISILVTIPLAKVQEDYQDKLMTAKDERMRKTSECLRNMRVLKLQAWEDRYRVRLEEMREEEYGWLRKALYSQAFVTFIFWSSPIFVAAVTFATSIFLGTQLTAGGVLSALATFRILQEPLRNFPDLVSMMAQTKVSLDRISGFLQEEELQEDATVVIPRGLSNIAIEIKDGVFCWDPFSSRPTLSGIQMKVEKGMRVAVCGTVGSGKSSFISCILGEIPKISGEVRICGTTGYVSQSAWIQSGNIEENILFGSPMEKTKYKNVIQACSLKKDIELFSHGDQTIIGERGINLSGGQKQRVQLARALYQDADIYLLDDPFSALDAHTGSDLFRDYILSALAEKTVVFVTHQVEFLPAADLILVLKEGRIIQSGKYDDLLQAGTDFKALVSAHHEAIEAMDIPSPSSEDSDENPIRDSLVLHNPKSDVFENDIETLAKEVQEGGSASDLKAIKEKKKKAKRSRKKQLVQEEERVKGKVSMKVYLSYMGAAYKGALIPLIILAQAAFQFLQIASNWWMAWANPQTEGDESKVDPTLLLIVYTALAFGSSVFIFVRAALVATFGLAAAQKLFLNMLRSVFRAPMSFFDSTPAGRILNRVSIDQSVVDLDIPFRLGGFASTTIQLCGIVAVMTNVTWQVFLLVVPVAVACFWMQKYYMASSRELVRIVSIQKSPIIHLFGESIAGAATIRGFGQEKRFIKRNLYLLDCFVRPFFCSIAAIEWLCLRMELLSTLVFAFCMVLLVSFPHGTIDPSMAGLAVTYGLNLNGRLSRWILSFCKLENKIISIERIYQYSQIVGEAPAIIEDFRPPSSWPATGTIELVDVKVRYAENLPTVLHGVSCVFPGGKKIGIVGRTGSGKSTLIQALFRLIEPTAGKITIDNIDISQIGLHDLRSRLGIIPQDPTLFEGTIRANLDPLEEHSDDKIWEALDKSQLGDVVRGKDLKLDSPVLENGDNWSVGQRQLVSLGRALLKQAKILVLDEATASVDTATDNLIQKIIRTEFEDCTVCTIAHRIPTVIDSDLVLVLSDGRVAEFDTPARLLEDKSSMFLKLVTEYSSRSTGIPEL

SEQ ID NO: 4603 - protein, 1215 aa, Arabidopsis thaliana
  peptide (1)..(1215): Ceres Seq. ID no. 13504873
  misc_feature (5)..(277): Pfam Name: Pfam Description:  ABC transporter transmembrane region
  misc_feature (1)..(1212): NCBI GI NO: 15227133 NR Description: glutathione-conjugate transporter AtMRP4
  misc_feature (1)..(333): NCBI GI NO: 27368875 NR Description: MRP-like ABC transporter
  misc_feature (620)..(1212): NCBI GI NO: 27368875 NR Description: MRP-like ABC transporter
  misc_feature (341)..(555): NCBI GI NO: 27368875 NR Description: MRP-like ABC transporter
  misc_feature (1)..(632): NCBI GI NO: 19172038 NR Description: ABC transporter ABCC.8 [Dictyostelium discoideum]
  misc_feature (549)..(1208): NCBI GI NO: 19172038 NR Description: ABC transporter ABCC.8 [Dictyostelium discoideum]
  misc_feature (1)..(631): NCBI GI NO: 19569597 NR Description: multidrug resistance-associated protein Mrp2
  misc_feature (609)..(1204): NCBI GI NO: 19569597 NR Description: multidrug resistance-associated protein Mrp2
  misc_feature (1)..(1198): NCBI GI NO: 6678848 NR Description: ATP-binding cassette, sub-family C, member 1
  misc_feature (1)..(1198): NCBI GI NO: 29893528 NR Description: multidrug resistance protein 1A
MKSFWKEAACNAVFAGLNTLVSYVGPYLISYFVDYLGGKEIFPHEGYVLAGIFFTSKLIETVTTRQWYMGVDILGMHVRSALTAMVYRKGLKLSSIAKQNHTSGEIVNYMAVDVQRIGDYSWYLHDIWMLPMQIVLALAILYKSVGIAAVATLVATIISILVTIPLAKVQEDYQDKLMTAKDERMRKTSECLRNMRVLKLQAWEDRYRVRLEEMREEEYGWLRKALYSQAFVTFIFWSSPIFVAAVTFATSIFLGTQLTAGGVLSALATFRILQEPLRNFPDLVSMMAQTKVSLDRISGFLQEEELQEDATVVIPRGLSNIAIEIKDGVFCWDPFSSRPTLSGIQMKVEKGMRVAVCGTVGSGKSSFISCILGEIPKISGEVRICGTTGYVSQSAWIQSGNIEENILFGSPMEKTKYKNVIQACSLKKDIELFSHGDQTIIGERGINLSGGQKQRVQLARALYQDADIYLLDDPFSALDAHTGSDLFRDYILSALAEKTVVFVTHQVEFLPAADLILVLKEGRIIQSGKYDDLLQAGTDFKALVSAHHEAIEAMDIPSPSSEDSDENPIRDSLVLHNPKSDVFENDIETLAKEVQEGGSASDLKAIKEKKKKAKRSRKKQLVQEEERVKGKVSMKVYLSYMGAAYKGALIPLIILAQAAFQFLQIASNWWMAWANPQTEGDESKVDPTLLLIVYTALAFGSSVFIFVRAALVATFGLAAAQKLFLNMLRSVFRAPMSFFDSTPAGRILNRVSIDQSVVDLDIPFRLGGFASTTIQLCGIVAVMTNVTWQVFLLVVPVAVACFWMQKYYMASSRELVRIVSIQKSPIIHLFGESIAGAATIRGFGQEKRFIKRNLYLLDCFVRPFFCSIAAIEWLCLRMELLSTLVFAFCMVLLVSFPHGTIDPSMAGLAVTYGLNLNGRLSRWILSFCKLENKIISIERIYQYSQIVGEAPAIIEDFRPPSSWPATGTIELVDVKVRYAENLPTVLHGVSCVFPGGKKIGIVGRTGSGKSTLIQALFRLIEPTAGKITIDNIDISQIGLHDLRSRLGIIPQDPTLFEGTIRANLDPLEEHSDDKIWEALDKSQLGDVVRGKDLKLDSPVLENGDNWSVGQRQLVSLGRALLKQAKILVLDEATASVDTATDNLIQKIIRTEFEDCTVCTIAHRIPTVIDSDLVLVLSDGRVAEFDTPARLLEDKSSMFLKLVTEYSSRSTGIPEL

SEQ ID NO: 4604 - DNA, 1562 bp, Arabidopsis thaliana
  misc_feature (1)..(1562): Ceres Seq. ID no. 12439764
gtggctaattctccgattaggttttcgattctcttcgtcttcgtctctgaagcgaccaaaaaccctaattctatcaattcgaaatcttcaatttcacatgggtgaacattcaccttctcaaccatcatctcatactcttcctccaaaccaaccggaatcacccaatcacgaaacccctaatccaattccaccggaaaccaacgatgacgactccgcctcatccgccggagtttctggctcaatcgtctcatcaaccaccattgaagcaccacaagtcactgaattaggcaatgtatcgtctccacctaccaagatccctctccgtcctcgaaaaatcagaaaactttcacccgacgacgacgcttccgacggattcaatccggagcataacctttctcagatgacgacgacgaaaccggcaacgaagagtaaattatcacagtcacgcactgtaaccgtgccgagaatccaagcaaggtctctcacttgtgaaggcgagcttgaagcagctcttcaccatctccgaagtgttgatcctctgctcgcgtctttaatcgacattcatccaccaccaacgttcgagacttttcagactccgttcttggcgttgattcgaagcattctttatcagcaattagcagctaaagcaggtaattcaatctacacacgcttcgttgccttatgcggcggtgaaaacggcgtcgtgccagagaatgtattgcctttaacacctcaacagcttcgtcaaattggtgtttccgggcgtaaagcgagttaccttcatgatcttgctaggaaatatcaaaatgggatcttgtcggattctggaatagtgaatatggatgagaaatctttgttcacgatgttaacaatggtgaatgggattgggtcatggtcggtccatatgtttatgataaactctcttcatagacctgatgtgttaccagttaatgatcttggtgtaaggaagggtgtgcagatgcttaatggtatggaggatttgcctcgtccatccaaaatggagcagctttgcgagaaatggcgtccgtatagatcagtagcgtcttggtacttgtggcggctcattgaatctaaaaatacaccacctaatgctgcggctgctacggccggagctgctctttcgtttccacagttggaagacattcagcaacaagaacaagaacagcaacatcaacaacatcagcaacaacagccgcagcttatggaccctcttaataatgtgttcagtatcggggcatggggccaaacgtagctgactttgcaccttaaattatcgtctctcatagcgtgatagggattctggtccggtggtcttcagctactgtctggtgaagaagtctttgttccacagcttggaaataagaataaaaatggccatggaacagaaatcttctttagctaagtgaagagtatgtaagatttaagcttagctaatgaacttgacatcgattttctttttgttggagacttgaactcgtctaaagaaacctctaaagcgtttcctgattcgtatctaaaacagagcaacatatttgatttct

SEQ ID NO: 4605 - protein, 423 aa, Arabidopsis thaliana
  peptide (1)..(423): Ceres Seq. ID no. 12439765
  misc_feature (204)..(349): Pfam Name: Pfam Description:  HhH-GPD superfamily base excision DNA repair
  misc_feature (33)..(423): NCBI GI NO: 18410802 NR Description: 3-methyladenine DNA glycosylase, putative
  misc_feature (33)..(418): NCBI GI NO: 25406423 NR Description: hypothetical protein F22H5.5
  misc_feature (33)..(423): NCBI GI NO: 18394744 NR Description: Expressed protein; protein id: At1g19480
  misc_feature (33)..(423): NCBI GI NO: 21593178 NR Description: unknown [Arabidopsis thaliana]
  misc_feature (33)..(423): NCBI GI NO: 25402893 NR Description: protein F18O14.25
  misc_feature (87)..(418): NCBI GI NO: 5091600 NR Description: This gene is a member of PF| 01332 Alkylbase DNA glycosidasesalkA family
  misc_feature (138)..(367): NCBI GI NO: 15230333 NR Description: putative DNA-3-methyladenine glycosidase
  misc_feature (160)..(361): NCBI GI NO: 23116389 NR Description: hypothetical protein
  misc_feature (167)..(363): NCBI GI NO: 37521587 NR Description: probable DNA-3-methyladenine glycosylase
  misc_feature (167)..(360): NCBI GI NO: 22971879 NR Description: hypothetical protein [Chloroflexus aurantiacus]
WLILRLGFRFSSSSSLKRPKTLILSIRNLQFHMGEHSPSQPSSHTLPPNQPESPNHETPNPIPPETNDDDSASSAGVSGSIVSSTTIEAPQVTELGNVSSPPTKIPLRPRKIRKLSPDDDASDGFNPEHNLSQMTTTKPATKSKLSQSRTVTVPRIQARSLTCEGELEAALHHLRSVDPLLASLIDIHPPPTFETFQTPFLALIRSILYQQLAAKAGNSIYTRFVALCGGENGVVPENVLPLTPQQLRQIGVSGRKASYLHDLARKYQNGILSDSGIVNMDEKSLFTMLTMVNGIGSWSVHMFMINSLHRPDVLPVNDLGVRKGVQMLNGMEDLPRPSKMEQLCEKWRPYRSVASWYLWRLIESKNTPPNAAAATAGAALSFPQLEDIQQQEQEQQHQQHQQQQPQLMDPLNNVFSIGAWGQT

SEQ ID NO: 4606 - protein, 391 aa, Arabidopsis thaliana
  peptide (1)..(391): Ceres Seq. ID no. 12439766
  misc_feature (172)..(317): Pfam Name: Pfam Description:  HhH-GPD superfamily base excision DNA repair
  misc_feature (1)..(391): NCBI GI NO: 18410802 NR Description: 3-methyladenine DNA glycosylase, putative
  misc_feature (1)..(386): NCBI GI NO: 25406423 NR Description: hypothetical protein F22H5.5
  misc_feature (1)..(391): NCBI GI NO: 18394744 NR Description: Expressed protein; protein id: At1g19480
  misc_feature (1)..(391): NCBI GI NO: 21593178 NR Description: unknown [Arabidopsis thaliana]
  misc_feature (1)..(391): NCBI GI NO: 25402893 NR Description: protein F18O14.25
  misc_feature (55)..(386): NCBI GI NO: 5091600 NR Description: This gene is a member of PF| 01332 Alkylbase DNA glycosidasesalkA family
  misc_feature (106)..(335): NCBI GI NO: 15230333 NR Description: putative DNA-3-methyladenine glycosidase
  misc_feature (128)..(329): NCBI GI NO: 23116389 NR Description: hypothetical protein
  misc_feature (135)..(331): NCBI GI NO: 37521587 NR Description: probable DNA-3-methyladenine glycosylase
  misc_feature (135)..(328): NCBI GI NO: 22971879 NR Description: hypothetical protein [Chloroflexus aurantiacus]
MGEHSPSQPSSHTLPPNQPESPNHETPNPIPPETNDDDSASSAGVSGSIVSSTTIEAPQVTELGNVSSPPTKIPLRPRKIRKLSPDDDASDGFNPEHNLSQMTTTKPATKSKLSQSRTVTVPRIQARSLTCEGELEAALHHLRSVDPLLASLIDIHPPPTFETFQTPFLALIRSILYQQLAAKAGNSIYTRFVALCGGENGVVPENVLPLTPQQLRQIGVSGRKASYLHDLARKYQNGILSDSGIVNMDEKSLFTMLTMVNGIGSWSVHMFMINSLHRPDVLPVNDLGVRKGVQMLNGMEDLPRPSKMEQLCEKWRPYRSVASWYLWRLIESKNTPPNAAAATAGAALSFPQLEDIQQQEQEQQHQQHQQQQPQLMDPLNNVFSIGAWGQT

SEQ ID NO: 4607 - protein, 290 aa, Arabidopsis thaliana
  peptide (1)..(290): Ceres Seq. ID no. 12439767
  misc_feature (71)..(216): Pfam Name: Pfam Description:  HhH-GPD superfamily base excision DNA repair
  misc_feature (1)..(290): NCBI GI NO: 18410802 NR Description: 3-methyladenine DNA glycosylase, putative
  misc_feature (1)..(285): NCBI GI NO: 25406423 NR Description: hypothetical protein F22H5.5
  misc_feature (1)..(290): NCBI GI NO: 18394744 NR Description: Expressed protein; protein id: At1g19480
  misc_feature (1)..(290): NCBI GI NO: 21593178 NR Description: unknown [Arabidopsis thaliana]
  misc_feature (1)..(290): NCBI GI NO: 25402893 NR Description: protein F18O14.25
  misc_feature (1)..(285): NCBI GI NO: 5091600 NR Description: This gene is a member of PF| 01332 Alkylbase DNA glycosidasesalkA family
  misc_feature (5)..(234): NCBI GI NO: 15230333 NR Description: putative DNA-3-methyladenine glycosidase
  misc_feature (27)..(228): NCBI GI NO: 23116389 NR Description: hypothetical protein
  misc_feature (34)..(230): NCBI GI NO: 37521587 NR Description: probable DNA-3-methyladenine glycosylase
  misc_feature (34)..(227): NCBI GI NO: 22971879 NR Description: hypothetical protein [Chloroflexus aurantiacus]
MTTTKPATKSKLSQSRTVTVPRIQARSLTCEGELEAALHHLRSVDPLLASLIDIHPPPTFETFQTPFLALIRSILYQQLAAKAGNSIYTRFVALCGGENGVVPENVLPLTPQQLRQIGVSGRKASYLHDLARKYQNGILSDSGIVNMDEKSLFTMLTMVNGIGSWSVHMFMINSLHRPDVLPVNDLGVRKGVQMLNGMEDLPRPSKMEQLCEKWRPYRSVASWYLWRLIESKNTPPNAAAATAGAALSFPQLEDIQQQEQEQQHQQHQQQQPQLMDPLNNVFSIGAWGQT

SEQ ID NO: 4608 - DNA, 742 bp, Arabidopsis thaliana
  misc_feature (1)..(742): Ceres Seq. ID no. 12422434
atcttgtgatcatcccaagacaaaaccagagaaaaagacctttctgtttttttaagaagtctttatatttttttttttgtcggagaatcttataagcatggcttcaggaggatcaaagtcggcagctttcatgcttctgatgctgaatcttggtctctatttcgtcatcaccatcatcgcttcttgggctgttaatcacggcatagagagaactcgcgagtctgcgtcgacactgtcacttccggcgaagatattcccgatatacttcccggtggggaacatggcgaccggttttttcgtaatattcacgttaatcgccggcgtcgtcggaatggccacatcactcaccggaatcatcaacgttcttcaatgggactctccgaatctccactccgccgcggcttcctctctaatctcctggtctctcactctcctcgccatgggattggcctgcaaggagatcaacataggctggaccgaagccaatctaagaactcttgaagttctgactataattgtgagtgctactcagttgttgtgcaccggagctattcatgctggagtcggagaaacagtcgcctccggagaaaggcctcatcttgggagagtttgagtttcatgattcttcttaaaagcggttttacatttgcttcagatcgtgtaatttgtgtgttgtgtcttgtgtgtgtttattcttttgttttgtttgattattatgatcatgtaaaatgattagtttatg

SEQ ID NO: 4609 - protein, 171 aa, Arabidopsis thaliana
  peptide (1)..(171): Ceres Seq. ID no. 12422435
  misc_feature (15)..(156): Pfam Name: Pfam Description:  AWPM-19-like family
  misc_feature (1)..(171): NCBI GI NO: 15239619 NR Description: plasma membrane associated protein -like
  misc_feature (1)..(155): NCBI GI NO: 34911480 NR Description: putative plasma membrane associated protein
  misc_feature (1)..(156): NCBI GI NO: 15218953 NR Description: plasma membrane associated protein, putative
  misc_feature (7)..(131): NCBI GI NO: 34904644 NR Description: putative ABA-induced plasma membrane protein
  misc_feature (47)..(156): NCBI GI NO: 15237455 NR Description: putative protein; protein id: At5g46530.1
  misc_feature (1)..(156): NCBI GI NO: 4097340 NR Description: hydrophobic LEA-like protein [Oryza sativa]
  misc_feature (1)..(156): NCBI GI NO: 7488688 NR Description: maturation protein PM3 - soybean
  misc_feature (60)..(156): NCBI GI NO: 6851373 NR Description: plasma membrane associated protein
  misc_feature (60)..(155): NCBI GI NO: 18390408 NR Description: expressed protein; protein id: At1g04560
  misc_feature (60)..(156): NCBI GI NO: 7489659 NR Description: ABA-induced plasma membrane protein PM 19 - wheat
MASGGSKSAAFMLLMLNLGLYFVITIIASWAVNHGIERTRESASTLSLPAKIFPIYFPVGNMATGFFVIFTLIAGVVGMATSLTGIINVLQWDSPNLHSAAASSLISWSLTLLAMGLACKEINIGWTEANLRTLEVLTIIVSATQLLCTGAIHAGVGETVASGERPHLGRV

SEQ ID NO: 4610 - protein, 160 aa, Arabidopsis thaliana
  peptide (1)..(160): Ceres Seq. ID no. 12422436
  misc_feature (4)..(145): Pfam Name: Pfam Description:  AWPM-19-like family
  misc_feature (1)..(160): NCBI GI NO: 15239619 NR Description: plasma membrane associated protein -like
  misc_feature (1)..(144): NCBI GI NO: 34911480 NR Description: putative plasma membrane associated protein
  misc_feature (1)..(145): NCBI GI NO: 15218953 NR Description: plasma membrane associated protein, putative
  misc_feature (1)..(120): NCBI GI NO: 34904644 NR Description: putative ABA-induced plasma membrane protein
  misc_feature (36)..(145): NCBI GI NO: 15237455 NR Description: putative protein; protein id: At5g46530.1
  misc_feature (1)..(145): NCBI GI NO: 4097340 NR Description: hydrophobic LEA-like protein [Oryza sativa]
  misc_feature (1)..(145): NCBI GI NO: 7488688 NR Description: maturation protein PM3 - soybean
  misc_feature (49)..(145): NCBI GI NO: 6851373 NR Description: plasma membrane associated protein
  misc_feature (49)..(144): NCBI GI NO: 18390408 NR Description: expressed protein; protein id: At1g04560
  misc_feature (49)..(145): NCBI GI NO: 7489659 NR Description: ABA-induced plasma membrane protein PM 19 - wheat
MLLMLNLGLYFVITIIASWAVNHGIERTRESASTLSLPAKIFPIYFPVGNMATGFFVIFTLIAGVVGMATSLTGIINVLQWDSPNLHSAAASSLISWSLTLLAMGLACKEINIGWTEANLRTLEVLTIIVSATQLLCTGAIHAGVGETVASGERPHLGRV

SEQ ID NO: 4611 - protein, 157 aa, Arabidopsis thaliana
  peptide (1)..(157): Ceres Seq. ID no. 12422437
  misc_feature (1)..(142): Pfam Name: Pfam Description:  AWPM-19-like family
  misc_feature (1)..(157): NCBI GI NO: 15239619 NR Description: plasma membrane associated protein -like
  misc_feature (1)..(141): NCBI GI NO: 34911480 NR Description: putative plasma membrane associated protein
  misc_feature (1)..(142): NCBI GI NO: 15218953 NR Description: plasma membrane associated protein, putative
  misc_feature (1)..(117): NCBI GI NO: 34904644 NR Description: putative ABA-induced plasma membrane protein
  misc_feature (33)..(142): NCBI GI NO: 15237455 NR Description: putative protein; protein id: At5g46530.1
  misc_feature (1)..(142): NCBI GI NO: 4097340 NR Description: hydrophobic LEA-like protein [Oryza sativa]
  misc_feature (1)..(142): NCBI GI NO: 7488688 NR Description: maturation protein PM3 - soybean
  misc_feature (46)..(142): NCBI GI NO: 6851373 NR Description: plasma membrane associated protein
  misc_feature (46)..(141): NCBI GI NO: 18390408 NR Description: expressed protein; protein id: At1g04560
  misc_feature (46)..(142): NCBI GI NO: 7489659 NR Description: ABA-induced plasma membrane protein PM 19 - wheat
MLNLGLYFVITIIASWAVNHGIERTRESASTLSLPAKIFPIYFPVGNMATGFFVIFTLIAGVVGMATSLTGIINVLQWDSPNLHSAAASSLISWSLTLLAMGLACKEINIGWTEANLRTLEVLTIIVSATQLLCTGAIHAGVGETVASGERPHLGRV

SEQ ID NO: 4612 - DNA, 1420 bp, Arabidopsis thaliana
  misc_feature (1)..(1420): Ceres Seq. ID no. 13488837
gccaacaatgaaagcgatccagttgctgtgggaagcgataatggaggcgacgaagagagaaagacggagagaagatgacgacggcgaaaaagcttcaccggaatcactcgttcttccaccagagatcattacagaaattcttctccgattaccagccaaatcgatcgggcgattcaggtgcgtatcaaagctcttttgcactttatcgtcagatccagggttcgcgaagattcacctcgatctgatccttcgaaacgaatccgtaagatcgctccaccgtaagctcattgtgtcttcacataatctgtactcgttagatttcaattcgatcggtgacggaattagggatttagcggctgtggaacacaattatcctcttaaagacgatccaagcattttctctgagatgattaggaattacgtgggggaccatctgtacgatgatcgtcgcgtgatgcttaagctgaatgcgaaatcgtatcgaagaaactgggttgagatcgttggatcttccaatggtttagtgtgtatctctcctggtgaaggagctgttttcttgtataatccaactaccggagattccaagagattacctgaaaattttcgtcccaaatctgtagaatacgaaagagataatttccaaacttatggatttggtttcgatggtctcactgatgattacaaattggtgaagcttgttgctaccagtgaagatattctcgatgctagtgtctattccttgaaggctgactcatggagacggatctgcaatttgaattatgagcacaacgatggctcctacacgtccggtgtgcatttcaacggtgcgattcactgggtgttcacagagagtaggcacaaccaaagagtggttgtagcatttgatattcaaaccgaggagtttcgagagatgccagtgcctgatgaagctgaagattgttcccataggtttagcaactttgtggtcggaagtctcaatggacgtctctgtgtggtcaatagttgctacgatgtgcatgatgatatatgggtgatgagtgagtacggtgaagctaaatcctggagcagaattcgaatcaacttgttgtataggtcgatgaaaccgctctgttcgactaagaacgatgaagaggttcttctggagcttgatggagacctggtgttgtacaactttgaaaccaatgcatcgagtaatctaggaatttgtggggttaagctcagtgacgggttcgaggcaaatacatacgtagagagcctcatatcacccaactcttatggtatagagagctgaggaagtctgctttttgctaagatataataaaccaacattcggattagaaatgttttagaaacataatcatgtaatatgtatcatgtaattaacaacgaatggtcaatgggtattttaagtttctttctc

SEQ ID NO: 4613 - protein, 429 aa, Arabidopsis thaliana
  peptide (1)..(429): Ceres Seq. ID no. 13488838
  misc_feature (3)..(429): NCBI GI NO: 30679777 NR Description: F-box protein family [Arabidopsis thaliana]
  misc_feature (14)..(429): NCBI GI NO: 6862928 NR Description: hypothetical protein [Arabidopsis thaliana]
  misc_feature (162)..(423): NCBI GI NO: 15229536 NR Description: F-box protein family [Arabidopsis thaliana]
  misc_feature (29)..(110): NCBI GI NO: 15229536 NR Description: F-box protein family [Arabidopsis thaliana]
  misc_feature (45)..(421): NCBI GI NO: 29420813 NR Description: F-box [Prunus mume]
  misc_feature (128)..(425): NCBI GI NO: 33354147 NR Description: S-locus F-Box protein 6 [Prunus avium]
  misc_feature (41)..(100): NCBI GI NO: 33354147 NR Description: S-locus F-Box protein 6 [Prunus avium]
  misc_feature (164)..(420): NCBI GI NO: 15235636 NR Description: F-box protein-related [Arabidopsis thaliana]
  misc_feature (167)..(424): NCBI GI NO: 29420803 NR Description: F-box [Prunus mume]
  misc_feature (41)..(100): NCBI GI NO: 29420803 NR Description: F-box [Prunus mume]
PTMKAIQLLWEAIMEATKRERRREDDDGEKASPESLVLPPEIITEILLRLPAKSIGRFRCVSKLFCTLSSDPGFAKIHLDLILRNESVRSLHRKLIVSSHNLYSLDFNSIGDGIRDLAAVEHNYPLKDDPSIFSEMIRNYVGDHLYDDRRVMLKLNAKSYRRNWVEIVGSSNGLVCISPGEGAVFLYNPTTGDSKRLPENFRPKSVEYERDNFQTYGFGFDGLTDDYKLVKLVATSEDILDASVYSLKADSWRRICNLNYEHNDGSYTSGVHFNGAIHWVFTESRHNQRVVVAFDIQTEEFREMPVPDEAEDCSHRFSNFVVGSLNGRLCVVNSCYDVHDDIWVMSEYGEAKSWSRIRINLLYRSMKPLCSTKNDEEVLLELDGDLVLYNFETNASSNLGICGVKLSDGFEANTYVESLISPNSYGIES

SEQ ID NO: 4614 - protein, 427 aa, Arabidopsis thaliana
  peptide (1)..(427): Ceres Seq. ID no. 13488839
  misc_feature (1)..(427): NCBI GI NO: 30679777 NR Description: F-box protein family [Arabidopsis thaliana]
  misc_feature (12)..(427): NCBI GI NO: 6862928 NR Description: hypothetical protein [Arabidopsis thaliana]
  misc_feature (160)..(421): NCBI GI NO: 15229536 NR Description: F-box protein family [Arabidopsis thaliana]
  misc_feature (27)..(108): NCBI GI NO: 15229536 NR Description: F-box protein family [Arabidopsis thaliana]
  misc_feature (43)..(419): NCBI GI NO: 29420813 NR Description: F-box [Prunus mume]
  misc_feature (126)..(423): NCBI GI NO: 33354147 NR Description: S-locus F-Box protein 6 [Prunus avium]
  misc_feature (39)..(98): NCBI GI NO: 33354147 NR Description: S-locus F-Box protein 6 [Prunus avium]
  misc_feature (162)..(418): NCBI GI NO: 15235636 NR Description: F-box protein-related [Arabidopsis thaliana]
  misc_feature (165)..(422): NCBI GI NO: 29420803 NR Description: F-box [Prunus mume]
  misc_feature (39)..(98): NCBI GI NO: 29420803 NR Description: F-box [Prunus mume]
MKAIQLLWEAIMEATKRERRREDDDGEKASPESLVLPPEIITEILLRLPAKSIGRFRCVSKLFCTLSSDPGFAKIHLDLILRNESVRSLHRKLIVSSHNLYSLDFNSIGDGIRDLAAVEHNYPLKDDPSIFSEMIRNYVGDHLYDDRRVMLKLNAKSYRRNWVEIVGSSNGLVCISPGEGAVFLYNPTTGDSKRLPENFRPKSVEYERDNFQTYGFGFDGLTDDYKLVKLVATSEDILDASVYSLKADSWRRICNLNYEHNDGSYTSGVHFNGAIHWVFTESRHNQRVVVAFDIQTEEFREMPVPDEAEDCSHRFSNFVVGSLNGRLCVVNSCYDVHDDIWVMSEYGEAKSWSRIRINLLYRSMKPLCSTKNDEEVLLELDGDLVLYNFETNASSNLGICGVKLSDGFEANTYVESLISPNSYGIES

SEQ ID NO: 4615 - protein, 416 aa, Arabidopsis thaliana
  peptide (1)..(416): Ceres Seq. ID no. 13488840
  misc_feature (1)..(416): NCBI GI NO: 30679777 NR Description: F-box protein family [Arabidopsis thaliana]
  misc_feature (1)..(416): NCBI GI NO: 6862928 NR Description: hypothetical protein [Arabidopsis thaliana]
  misc_feature (149)..(410): NCBI GI NO: 15229536 NR Description: F-box protein family [Arabidopsis thaliana]
  misc_feature (16)..(97): NCBI GI NO: 15229536 NR Description: F-box protein family [Arabidopsis thaliana]
  misc_feature (32)..(408): NCBI GI NO: 29420813 NR Description: F-box [Prunus mume]
  misc_feature (115)..(412): NCBI GI NO: 33354147 NR Description: S-locus F-Box protein 6 [Prunus avium]
  misc_feature (28)..(87): NCBI GI NO: 33354147 NR Description: S-locus F-Box protein 6 [Prunus avium]
  misc_feature (151)..(407): NCBI GI NO: 15235636 NR Description: F-box protein-related [Arabidopsis thaliana]
  misc_feature (154)..(411): NCBI GI NO: 29420803 NR Description: F-box [Prunus mume]
  misc_feature (28)..(87): NCBI GI NO: 29420803 NR Description: F-box [Prunus mume]
MEATKRERRREDDDGEKASPESLVLPPEIITEILLRLPAKSIGRFRCVSKLFCTLSSDPGFAKIHLDLILRNESVRSLHRKLIVSSHNLYSLDFNSIGDGIRDLAAVEHNYPLKDDPSIFSEMIRNYVGDHLYDDRRVMLKLNAKSYRRNWVEIVGSSNGLVCISPGEGAVFLYNPTTGDSKRLPENFRPKSVEYERDNFQTYGFGFDGLTDDYKLVKLVATSEDILDASVYSLKADSWRRICNLNYEHNDGSYTSGVHFNGAIHWVFTESRHNQRVVVAFDIQTEEFREMPVPDEAEDCSHRFSNFVVGSLNGRLCVVNSCYDVHDDIWVMSEYGEAKSWSRIRINLLYRSMKPLCSTKNDEEVLLELDGDLVLYNFETNASSNLGICGVKLSDGFEANTYVESLISPNSYGIES

SEQ ID NO: 4616 - DNA, 1257 bp, Arabidopsis thaliana
  misc_feature (1)..(1257): Ceres Seq. ID no. 12395322
agattctttcttctaaacccattcgctctctccgatcaacacaacatttgatctaacggtttaattttctcgagaaaccgaaggaaaacaaacagagcaatggcgtcgatgggacggtgcctgagctgaaattgagagtcgaagaagattccgataatggtgattatctgaaattgagaggaggatcaaatgaagaagatgaaggatcatcggcggaatcatcgagatgtccgataggatcggttacttctgtctggttctgggtgaaattgatctccttggtcgtttgtttgggttcattggcctttgttatcatcaaatgggttggtccctttttgattgaaaaggagctgattccatttataaattgggtgagaaacacattcagcataccggttctcggtcttctactatttgcctcagtggcattgtttccaagcattcttcttccttcttccccttccatgtggatggctggtcttacatttggttatggaaaagggtttcttctgattttatcagctgcttccatcggtgttactcttcctttcttaattggacatctcttcctccacaagatgcaagaatggttgaagaaataccctaaaaaagcagccatacttagagctgctggtgaaggaacctggtttcatcagtttcaagcagtcacactaatccgtgtctctccatttccttacatcatttacaactactgcgctttagcgactggagttcattatggtccttatatcttaggctctcttgttggaatggttcctgagatctttgtctcaatttacacgggtataatgctaaggacactagcagttgcatcagacacgagacacacactttcggttgtggagatagtcgtgaatgttcttggcttctgtgtaactgcgagcgcgactatagtctgcacaatctatgcgaagaagaagctaagtgcgatgcaatcagaggacgtagagacattacaaaatccaatactttattaactcttttcaccatgaccacaacataccatcatctaacacgatcttgaaattgataatatataatgttttttttttttttttgttattcttattcatttgaaaatgaatatttatgtctttttctcttgtatatatgatatgtatcaattgaattttgaaaatttccaatgtatatttattagatcatctaagtctttttctttccttgcatataatccaccttatgtatcatggaacaatgtcttgttgggttttgttc

SEQ ID NO: 4617 - protein, 177 aa, Arabidopsis thaliana
  peptide (1)..(177): Ceres Seq. ID no. 12395323
  misc_feature (1)..(121): Pfam Name: Pfam Description:  DedA family
  misc_feature (1)..(177): NCBI GI NO: 15221330 NR Description: hypothetical protein; protein id: At1g12450.1
  misc_feature (1)..(40): NCBI GI NO: 8778630 NR Description: F5O11.19 [Arabidopsis thaliana]
  misc_feature (107)..(177): NCBI GI NO: 8778630 NR Description: F5O11.19 [Arabidopsis thaliana]
  misc_feature (1)..(172): NCBI GI NO: 30685958 NR Description: expressed protein [Arabidopsis thaliana]
  misc_feature (1)..(166): NCBI GI NO: 15234386 NR Description: putative protein; protein id: At4g12000
  misc_feature (1)..(130): NCBI GI NO: 8778630 NR Description: F5O11.19 [Arabidopsis thaliana]
  misc_feature (1)..(167): NCBI GI NO: 18395356 NR Description: expressed protein; protein id: At2g02370
  misc_feature (1)..(167): NCBI GI NO: 34913316 NR Description: P0519E12.36
  misc_feature (15)..(172): NCBI GI NO: 7486891 NR Description: hypothetical protein T12H17
  misc_feature (39)..(167): NCBI GI NO: 25410981 NR Description: hypothetical protein At2g02370
MWMAGLTFGYGKGFLLILSAASIGVTLPFLIGHLFLHKMQEWLKKYPKKAAILRAAGEGTWFHQFQAVTLIRVSPFPYIIYNYCALATGVHYGPYILGSLVGMVPEIFVSIYTGIMLRTLAVASDTRHTLSVVEIVVNVLGFCVTASATIVCTIYAKKKLSAMQSEDVETLQNPILY

SEQ ID NO: 4618 - protein, 175 aa, Arabidopsis thaliana
  peptide (1)..(175): Ceres Seq. ID no. 12395324
  misc_feature (1)..(119): Pfam Name: Pfam Description:  DedA family
  misc_feature (1)..(175): NCBI GI NO: 15221330 NR Description: hypothetical protein; protein id: At1g12450.1
  misc_feature (1)..(38): NCBI GI NO: 8778630 NR Description: F5O11.19 [Arabidopsis thaliana]
  misc_feature (105)..(175): NCBI GI NO: 8778630 NR Description: F5O11.19 [Arabidopsis thaliana]
  misc_feature (1)..(170): NCBI GI NO: 30685958 NR Description: expressed protein [Arabidopsis thaliana]
  misc_feature (1)..(164): NCBI GI NO: 15234386 NR Description: putative protein; protein id: At4g12000
  misc_feature (1)..(128): NCBI GI NO: 8778630 NR Description: F5O11.19 [Arabidopsis thaliana]
  misc_feature (1)..(165): NCBI GI NO: 18395356 NR Description: expressed protein; protein id: At2g02370
  misc_feature (1)..(165): NCBI GI NO: 34913316 NR Description: P0519E12.36
  misc_feature (13)..(170): NCBI GI NO: 7486891 NR Description: hypothetical protein T12H17
  misc_feature (37)..(165): NCBI GI NO: 25410981 NR Description: hypothetical protein At2g02370
MAGLTFGYGKGFLLILSAASIGVTLPFLIGHLFLHKMQEWLKKYPKKAAILRAAGEGTWFHQFQAVTLIRVSPFPYIIYNYCALATGVHYGPYILGSLVGMVPEIFVSIYTGIMLRTLAVASDTRHTLSVVEIVVNVLGFCVTASATIVCTIYAKKKLSAMQSEDVETLQNPILY

SEQ ID NO: 4619 - protein, 139 aa, Arabidopsis thaliana
  peptide (1)..(139): Ceres Seq. ID no. 12395325
  misc_feature (1)..(83): Pfam Name: Pfam Description:  DedA family
  misc_feature (1)..(139): NCBI GI NO: 15221330 NR Description: hypothetical protein; protein id: At1g12450.1
  misc_feature (69)..(139): NCBI GI NO: 8778630 NR Description: F5O11.19 [Arabidopsis thaliana]
  misc_feature (1)..(134): NCBI GI NO: 30685958 NR Description: expressed protein [Arabidopsis thaliana]
  misc_feature (1)..(128): NCBI GI NO: 15234386 NR Description: putative protein; protein id: At4g12000
  misc_feature (1)..(92): NCBI GI NO: 8778630 NR Description: F5O11.19 [Arabidopsis thaliana]
  misc_feature (1)..(129): NCBI GI NO: 18395356 NR Description: expressed protein; protein id: At2g02370
  misc_feature (1)..(129): NCBI GI NO: 34913316 NR Description: P0519E12.36
  misc_feature (1)..(134): NCBI GI NO: 7486891 NR Description: hypothetical protein T12H17
  misc_feature (1)..(129): NCBI GI NO: 25410981 NR Description: hypothetical protein At2g02370
  misc_feature (1)..(122): NCBI GI NO: 23128177 NR Description: hypothetical protein [Nostoc punctiforme]
MQEWLKKYPKKAAILRAAGEGTWFHQFQAVTLIRVSPFPYIIYNYCALATGVHYGPYILGSLVGMVPEIFVSIYTGIMLRTLAVASDTRHTLSVVEIVVNVLGFCVTASATIVCTIYAKKKLSAMQSEDVETLQNPILY

SEQ ID NO: 4620 - DNA, 1317 bp, Arabidopsis thaliana
  misc_feature (1)..(1317): Ceres Seq. ID no. 13488574
ataacaaaccaaacactactcttttctaaccaagagaaaggttttatatatgcagaatgaagtttgagagagcaaggccattcatagccattgttttcatacaatgtttgtacgctttgatgtctatagtagcaaaattagctttgaacaagggaatgagccctcacgtcttagttgcttaccgaatggcagttgcttccgctctcattacgcctttcgctctcatcctcgagaggaacacaagaccaaagttgaccttcaagattttgttacaaatagccatccttagtttatttgagcctgtggtcgaacaaaacctgtactactcagggatgaaacttaccactgccacattcacatcagctttgtgcaatgctcttcctgctatgacattcataatggcctgcgttttcaagctcgagaaggtgacaatcgaaagacgccacagccaggcaaagctggtgggaaccatggtggctattgggggagcaatgctcatgacattcgtgaaagggaatgtcattgagctgccttggacaagcaactcaaggggtcttaatgggcacacacacgctatgaggattccaaagcaggcggatatagcaagaggatcaattatgcttgtagcaagctgcttcagttggtcatgttacatcattttacaggcaaagattctggctcaatataaagctgagctctcgctaacagctcttatgtgcattatggggatgttggaggctactgttatgggattgatatgggaaaggaaaaacatgtcggtctggaaaatcaacccggacgtgacgcttttagcttcaatctacggaggactagtctcagggttagcatactatgttattggatgggcgtcaaaggagagagggcctgtgtttgtgagcgcgtttaacccgctcagcatggttctcgttgctattctgagcacctttgttttcttggaaaaagtgtacgtaggaagggttattgggtcagttgtcattgtcattgggatatatttggtattatggggtaaaagcaaggacaaaggagggatgcttcaaccaaacgctggatgcgcagagactgtggtaaagattgaccaacagaaggttccgacgcctgataataaccaagtagtatctatcagttaccatttaatgatcccgaaggcagcagctcggtctcaagagtgagtctaagatgccgattctgttccaggatctctatatatcgcaaaaaaaacatttttgatagtattggtttgccagaataagagcaagcaatgcgctacattaagtctcataaaagctaagaacttgg

SEQ ID NO: 4621 - protein, 377 aa, Arabidopsis thaliana
  peptide (1)..(377): Ceres Seq. ID no. 13488575
  misc_feature (17)..(150): Pfam Name: Pfam Description:  Integral membrane protein DUF6
  misc_feature (1)..(377): NCBI GI NO: 15240686 NR Description: nodulin MtN21 family protein
  misc_feature (60)..(377): NCBI GI NO: 28393023 NR Description: unknown protein [Arabidopsis thaliana]
  misc_feature (1)..(329): NCBI GI NO: 15225480 NR Description: nodulin MtN21 family protein
  misc_feature (4)..(363): NCBI GI NO: 15224291 NR Description: nodulin MtN21 family protein
  misc_feature (12)..(363): NCBI GI NO: 21553757 NR Description: nodulin-like protein [Arabidopsis thaliana]
  misc_feature (1)..(328): NCBI GI NO: 15240683 NR Description: nodulin MtN21 family protein
  misc_feature (1)..(328): NCBI GI NO: 34908998 NR Description: nodulin-like protein
  misc_feature (4)..(328): NCBI GI NO: 25408555 NR Description: nodulin-like protein
  misc_feature (1)..(329): NCBI GI NO: 2598575 NR Description: MtN21 [Medicago truncatula]
  misc_feature (7)..(353): NCBI GI NO: 15219123 NR Description: nodulin N21 family protein [Arabidopsis thaliana]
MKFERARPFIAIVFIQCLYALMSIVAKLALNKGMSPHVLVAYRMAVASALITPFALILERNTRPKLTFKILLQIAILSLFEPVVEQNLYYSGMKLTTATFTSALCNALPAMTFIMACVFKLEKVTIERRHSQAKLVGTMVAIGGAMLMTFVKGNVIELPWTSNSRGLNGHTHAMRIPKQADIARGSIMLVASCFSWSCYIILQAKILAQYKAELSLTALMCIMGMLEATVMGLIWERKNMSVWKINPDVTLLASIYGGLVSGLAYYVIGWASKERGPVFVSAFNPLSMVLVAILSTFVFLEKVYVGRVIGSVVIVIGIYLVLWGKSKDKGGMLQPNAGCAETVVKIDQQKVPTPDNNQVVSISYHLMIPKAAARSQE

SEQ ID NO: 4622 - protein, 356 aa, Arabidopsis thaliana
  peptide (1)..(356): Ceres Seq. ID no. 13488576
  misc_feature (1)..(129): Pfam Name: Pfam Description:  Integral membrane protein DUF6
  misc_feature (1)..(356): NCBI GI NO: 15240686 NR Description: nodulin MtN21 family protein
  misc_feature (39)..(356): NCBI GI NO: 28393023 NR Description: unknown protein [Arabidopsis thaliana]
  misc_feature (1)..(308): NCBI GI NO: 15225480 NR Description: nodulin MtN21 family protein
  misc_feature (1)..(342): NCBI GI NO: 15224291 NR Description: nodulin MtN21 family protein
  misc_feature (1)..(342): NCBI GI NO: 21553757 NR Description: nodulin-like protein [Arabidopsis thaliana]
  misc_feature (1)..(307): NCBI GI NO: 15240683 NR Description: nodulin MtN21 family protein
  misc_feature (1)..(307): NCBI GI NO: 34908998 NR Description: nodulin-like protein
  misc_feature (1)..(307): NCBI GI NO: 25408555 NR Description: nodulin-like protein
  misc_feature (1)..(308): NCBI GI NO: 2598575 NR Description: MtN21 [Medicago truncatula]
  misc_feature (1)..(332): NCBI GI NO: 15219123 NR Description: nodulin N21 family protein [Arabidopsis thaliana]
MSIVAKLALNKGMSPHVLVAYRMAVASALITPFALILERNTRPKLTFKILLQIAILSLFEPVVEQNLYYSGMKLTTATFTSALCNALPAMTFIMACVFKLEKVTIERRHSQAKLVGTMVAIGGAMLMTFVKGNVIELPWTSNSRGLNGHTHAMRIPKQADIARGSIMLVASCFSWSCYIILQAKILAQYKAELSLTALMCIMGMLEATVMGLIWERKNMSVWKINPDVTLLASIYGGLVSGLAYYVIGWASKERGPVFVSAFNPLSMVLVAILSTFVFLEKVYVGRVIGSVVIVIGIYLVLWGKSKDKGGMLQPNAGCAETVVKIDQQKVPTPDNNQVVSISYHLMIPKAAARSQE

SEQ ID NO: 4623 - protein, 344 aa, Arabidopsis thaliana
  peptide (1)..(344): Ceres Seq. ID no. 13488577
  misc_feature (1)..(117): Pfam Name: Pfam Description:  Integral membrane protein DUF6
  misc_feature (1)..(344): NCBI GI NO: 15240686 NR Description: nodulin MtN21 family protein
  misc_feature (27)..(344): NCBI GI NO: 28393023 NR Description: unknown protein [Arabidopsis thaliana]
  misc_feature (1)..(296): NCBI GI NO: 15225480 NR Description: nodulin MtN21 family protein
  misc_feature (1)..(330): NCBI GI NO: 15224291 NR Description: nodulin MtN21 family protein
  misc_feature (1)..(330): NCBI GI NO: 21553757 NR Description: nodulin-like protein [Arabidopsis thaliana]
  misc_feature (1)..(295): NCBI GI NO: 15240683 NR Description: nodulin MtN21 family protein
  misc_feature (1)..(295): NCBI GI NO: 34908998 NR Description: nodulin-like protein
  misc_feature (1)..(295): NCBI GI NO: 25408555 NR Description: nodulin-like protein
  misc_feature (1)..(296): NCBI GI NO: 2598575 NR Description: MtN21 [Medicago truncatula]
  misc_feature (1)..(320): NCBI GI NO: 15219123 NR Description: nodulin N21 family protein [Arabidopsis thaliana]
MSPHVLVAYRMAVASALITPFALILERNTRPKLTFKILLQIAILSLFEPVVEQNLYYSGMKLTTATFTSALCNALPAMTFIMACVFKLEKVTIERRHSQAKLVGTMVAIGGAMLMTFVKGNVIELPWTSNSRGLNGHTHAMRIPKQADIARGSIMLVASCFSWSCYIILQAKILAQYKAELSLTALMCIMGMLEATVMGLIWERKNMSVWKINPDVTLLASIYGGLVSGLAYYVIGWASKERGPVFVSAFNPLSMVLVAILSTFVFLEKVYVGRVIGSVVIVIGIYLVLWGKSKDKGGMLQPNAGCAETVVKIDQQKVPTPDNNQVVSISYHLMIPKAAARSQE

SEQ ID NO: 4624 - DNA, 1760 bp, Arabidopsis thaliana
  misc_feature (1)..(1760): Ceres Seq. ID no. 12377425
agataaaaagattcaattttatttgatagcccggcgattaaaaagattcctatcatcatcactcgccggctaatggccacaacgatgacacgtgtctccgtcggcgtcgtcctctttgttctcttagtctcgctggttgccgtctccgccgcgagaagcggtcctgatgatgttatcaaactcccttcgcaggcttctcgcttcttccgtcctgctgaaaacgacgacgattctaactccggtactaggtgggctgttctagtcgccggatctagcggatattggaattacaggcatcaggctgatatatgccatgcctatcaacttctgaggaaaggtggattgaaagaggagaatattgtggtattcatgtatgatgatattgctaacaattacgagaatccaaggcctggaaccattatcaacagccctcatggaaaagatgtctatcaaggagttcccaaggattatactggagatgatgtcaatgttgataatctatttgctgtgatccttggagacaaaactgctgttaaagggggaagtgggaaggttgtggatagtggtcctaatgatcatatcttcatattctacagtgaccatggtggtcctggagttcttgggatgccaacttctccttacctatatgcaaatgatctcaatgatgtcttgaagaagaaacatgctttaggaacatataaaagcttggtgttttatctcgaagcttgcgaatctggaagtatctttgaagggcttcttcctgagggtttgaacatctatgccacaactgcatcaaacgccgaagaaagcagttggggtacctattgccctggagaggaacccagtcctccaccggagtatgaaacttgtttaggtgacttgtacagtgttgcttggatggaagatagtggtatgcacaatttacagactgagactctgcaccagcaatatgaacttgtgaaaaggaggactgcacctgttgggtactcttatggttctcatgtcatgcaatatggcgatgtaggaattagcaaggataatctcgatctttatatgggaacaaaccctgccaatgacaattttacctttgcggatgcgaattcactaaagccaccttcaagagttacaaaccagcgtgatgcagatcttgttcatttttgggaaaagtaccgaaaagcaccagaaggttcagcaagaaaaacagaagctcagaagcaagtacttgaagccatgtctcacagacttcatattgacaatagcgtgatactcgtcggaaaaatcttgtttggcatttcgagaggtcctgaagtgctaaacaaagtacggtctgctgggcaacctctagtcgatgactggaactgccttaaaaatcaggtgagagctttcgagaggcactgtggatcgctgtctcagtacggtatcaagcacatgaggtcttttgcaaacatctgcaatgcagggattcaaatggagcaaatggaggaggcagcttcacaggcttgtaccacactgccaactggtccttggagctcgcttaaccgtggattcagtgcatagaaaccctaaaccgtcttcgcatttgtttataccaccaatccccaaatattcctatttcgatttgttatgattaaatcagtattctctctgtatatctcagtatcatttccgtcgtcagtgtgtaatttcaaattatgtatttgccatgtacagaagcttgtagaactaaagttgaatgtatagaaggtttgtatattatgatg

SEQ ID NO: 4625 - protein, 494 aa, Arabidopsis thaliana
  peptide (1)..(494): Ceres Seq. ID no. 12377426
  misc_feature (12)..(375): Pfam Name: Pfam Description:  Peptidase C13 family
  misc_feature (1)..(494): NCBI GI NO: 15233996 NR Description: gamma-VPE
  misc_feature (5)..(494): NCBI GI NO: 14916737 NR Description: Vacuolar processing enzyme
  misc_feature (5)..(494): NCBI GI NO: 15225226 NR Description: putative vacuolar processing enzyme
  misc_feature (5)..(494): NCBI GI NO: 1351408 NR Description: Vacuolar processing enzyme precursor (VPE)
  misc_feature (13)..(494): NCBI GI NO: 4589396 NR Description: asparaginyl endopeptidase (VmPE-1) [Vigna mungo]
  misc_feature (5)..(494): NCBI GI NO: 27544008 NR Description: vacuolar processing enzyme-1b [Nicotiana tabacum]
  misc_feature (5)..(494): NCBI GI NO: 27544006 NR Description: vacuolar processing enzyme-1a [Nicotiana tabacum]
  misc_feature (9)..(494): NCBI GI NO: 7739789 NR Description: cysteine protease [Ipomoea batatas]
  misc_feature (8)..(494): NCBI GI NO: 27544012 NR Description: vacuolar processing enzyme-3 [Nicotiana tabacum]
  misc_feature (12)..(494): NCBI GI NO: 1351411 NR Description: Vacuolar processing enzyme precursor
MATTMTRVSVGVVLFVLLVSLVAVSAARSGPDDVIKLPSQASRFFRPAENDDDSNSGTRWAVLVAGSSGYWNYRHQADICHAYQLLRKGGLKEENIVVFMYDDIANNYENPRPGTIINSPHGKDVYQGVPKDYTGDDVNVDNLFAVILGDKTAVKGGSGKVVDSGPNDHIFIFYSDHGGPGVLGMPTSPYLYANDLNDVLKKKHALGTYKSLVFYLEACESGSIFEGLLPEGLNIYATTASNAEESSWGTYCPGEEPSPPPEYETCLGDLYSVAWMEDSGMHNLQTETLHQQYELVKRRTAPVGYSYGSHVMQYGDVGISKDNLDLYMGTNPANDNFTFADANSLKPPSRVTNQRDADLVHFWEKYRKAPEGSARKTEAQKQVLEAMSHRLHIDNSVILVGKILFGISRGPEVLNKVRSAGQPLVDDWNCLKNQVRAFERHCGSLSQYGIKHMRSFANICNAGIQMEQMEEAASQACTTLPTGPWSSLNRGFSA

SEQ ID NO: 4626 - protein, 490 aa, Arabidopsis thaliana
  peptide (1)..(490): Ceres Seq. ID no. 12377427
  misc_feature (8)..(371): Pfam Name: Pfam Description:  Peptidase C13 family
  misc_feature (1)..(490): NCBI GI NO: 15233996 NR Description: gamma-VPE
  misc_feature (1)..(490): NCBI GI NO: 14916737 NR Description: Vacuolar processing enzyme
  misc_feature (1)..(490): NCBI GI NO: 15225226 NR Description: putative vacuolar processing enzyme
  misc_feature (1)..(490): NCBI GI NO: 1351408 NR Description: Vacuolar processing enzyme precursor (VPE)
  misc_feature (9)..(490): NCBI GI NO: 4589396 NR Description: asparaginyl endopeptidase (VmPE-1) [Vigna mungo]
  misc_feature (1)..(490): NCBI GI NO: 27544008 NR Description: vacuolar processing enzyme-1b [Nicotiana tabacum]
  misc_feature (1)..(490): NCBI GI NO: 27544006 NR Description: vacuolar processing enzyme-1a [Nicotiana tabacum]
  misc_feature (5)..(490): NCBI GI NO: 7739789 NR Description: cysteine protease [Ipomoea batatas]
  misc_feature (4)..(490): NCBI GI NO: 27544012 NR Description: vacuolar processing enzyme-3 [Nicotiana tabacum]
  misc_feature (8)..(490): NCBI GI NO: 1351411 NR Description: Vacuolar processing enzyme precursor
MTRVSVGVVLFVLLVSLVAVSAARSGPDDVIKLPSQASRFFRPAENDDDSNSGTRWAVLVAGSSGYWNYRHQADICHAYQLLRKGGLKEENIVVFMYDDIANNYENPRPGTIINSPHGKDVYQGVPKDYTGDDVNVDNLFAVILGDKTAVKGGSGKVVDSGPNDHIFIFYSDHGGPGVLGMPTSPYLYANDLNDVLKKKHALGTYKSLVFYLEACESGSIFEGLLPEGLNIYATTASNAEESSWGTYCPGEEPSPPPEYETCLGDLYSVAWMEDSGMHNLQTETLHQQYELVKRRTAPVGYSYGSHVMQYGDVGISKDNLDLYMGTNPANDNFTFADANSLKPPSRVTNQRDADLVHFWEKYRKAPEGSARKTEAQKQVLEAMSHRLHIDNSVILVGKILFGISRGPEVLNKVRSAGQPLVDDWNCLKNQVRAFERHCGSLSQYGIKHMRSFANICNAGIQMEQMEEAASQACTTLPTGPWSSLNRGFSA

SEQ ID NO: 4627 - protein, 395 aa, Arabidopsis thaliana
  peptide (1)..(395): Ceres Seq. ID no. 12377428
  misc_feature (1)..(276): Pfam Name: Pfam Description:  Peptidase C13 family
  misc_feature (1)..(395): NCBI GI NO: 15233996 NR Description: gamma-VPE
  misc_feature (1)..(395): NCBI GI NO: 14916737 NR Description: Vacuolar processing enzyme
  misc_feature (1)..(395): NCBI GI NO: 15225226 NR Description: putative vacuolar processing enzyme
  misc_feature (1)..(395): NCBI GI NO: 1351408 NR Description: Vacuolar processing enzyme precursor (VPE)
  misc_feature (1)..(395): NCBI GI NO: 4589396 NR Description: asparaginyl endopeptidase (VmPE-1) [Vigna mungo]
  misc_feature (1)..(395): NCBI GI NO: 27544008 NR Description: vacuolar processing enzyme-1b [Nicotiana tabacum]
  misc_feature (1)..(395): NCBI GI NO: 27544006 NR Description: vacuolar processing enzyme-1a [Nicotiana tabacum]
  misc_feature (1)..(395): NCBI GI NO: 7739789 NR Description: cysteine protease [Ipomoea batatas]
  misc_feature (1)..(395): NCBI GI NO: 27544012 NR Description: vacuolar processing enzyme-3 [Nicotiana tabacum]
  misc_feature (1)..(395): NCBI GI NO: 1351411 NR Description: Vacuolar processing enzyme precursor
MYDDIANNYENPRPGTIINSPHGKDVYQGVPKDYTGDDVNVDNLFAVILGDKTAVKGGSGKVVDSGPNDHIFIFYSDHGGPGVLGMPTSPYLYANDLNDVLKKKHALGTYKSLVFYLEACESGSIFEGLLPEGLNIYATTASNAEESSWGTYCPGEEPSPPPEYETCLGDLYSVAWMEDSGMHNLQTETLHQQYELVKRRTAPVGYSYGSHVMQYGDVGISKDNLDLYMGTNPANDNFTFADANSLKPPSRVTNQRDADLVHFWEKYRKAPEGSARKTEAQKQVLEAMSHRLHIDNSVILVGKILFGISRGPEVLNKVRSAGQPLVDDWNCLKNQVRAFERHCGSLSQYGIKHMRSFANICNAGIQMEQMEEAASQACTTLPTGPWSSLNRGFSA

SEQ ID NO: 4628 - DNA, 1530 bp, Arabidopsis thaliana
  misc_feature (1)..(1530): Ceres Seq. ID no. 12466572
agcaaaaagtctcctctttcctctctttctctctctgcgtccttctgaggctggaagcgatgaccatgacagcatttctcgcgagacggcttatcggtaacggatcgagccagattctcgggacttcgagttctagctccggtccgttcatttccgtttctagggctttcttctcctcctccactccgatcaaagctactctctttcccggtgatgggatcggtcccgaaatcgctgaatctgtcaagcaggtgtttactgccgctgatgtggttattgattgggacgaacagtttgttggtactgaagtagatcctagaaccaatagtttcttgacatgggataatcttcaatctgtgcttaaaaacaaggttggtttgaaaggaccaatggctactccaattggaaagggtcaccgttccttgaaccttactcttaggaaagagctgaatttgtatgccaatgttaggccttgttacagtcttcctggttacaaaacccgttatgatgatgttgatctcattaccattcgtgagaacactgaaggagagtacagtgggcttgaacaccaggtcgtcaagggtgtagtggaaagtcttaaaattattacccgtaaggcgagtatgagagttgccgagtatgcctttctttatgccaagactcacggaaggaagaaagtttctgcaattcacaaagccaacattatgcagaaaactgatggtcttttcctgcagtgttgtgatgaagttgctgcgaagtatcctgagatatattacgagaaggttgttattgacaattgctgtatgatgcttgtgaaaaacccagcactttttgatgtcttggtgatgccaaatctctatggagatattatcagcgatttgtgtgctggacttgttgggggactaggactgactcctagtatgaatattggggaggatggtattgcccttgctgaagctgttcacggctctgcacctgatattgctggaatgaacctggcgaacccaacagctttgctactgagtggagtgatgatgttgcggcacctgaagctcaacaaacaagcagagcaaatccacagtgccatcatcaacacaatagccgagggaaagtatagaactgctgatctcggaggttcctcaactacaacagatttcacaaaagccatctgtgatcatctctaaacacccgtgaaaaaccataattctttccttacttacttattggatcttcctcttggattttcactccaaaatttttctacatattgatcctcttcctatgaggagaaacaaagccgccataggctttagacattgacttgtgttttccttagatttgaagttcttgcagagctgtattacttcttctgcctttaagatccataacaaaagaaggatacagatattggaagaatccatcaaaaggttcacatttacagtttgtggattttgcctgaattgtttggcgttatgtcttattctctgtgaattttcaacaataataatatcgtcccttttgtccttacct

SEQ ID NO: 4629 - protein, 393 aa, Arabidopsis thaliana
  peptide (1)..(393): Ceres Seq. ID no. 12466573
  misc_feature (64)..(389): Pfam Name: Pfam Description:  Isocitrate/isopropylmalate dehydrogenase
  misc_feature (20)..(393): NCBI GI NO: 21536667 NR Description: putative (NAD+) isocitrate dehydrogenase
  misc_feature (20)..(393): NCBI GI NO: 18414179 NR Description: putative protein; protein id: At5g03290
  misc_feature (22)..(393): NCBI GI NO: 11251553 NR Description: 3-isopropylmalate dehydrogenase-like protein
  misc_feature (65)..(393): NCBI GI NO: 28974492 NR Description: NAD-dependent isocitrate dehydrogenase alpha subunit
  misc_feature (37)..(393): NCBI GI NO: 7431333 NR Description: probable isocitrate dehydrogenase (NAD) (EC 1
  misc_feature (58)..(393): NCBI GI NO: 34903262 NR Description: unnamed protein product
  misc_feature (42)..(370): NCBI GI NO: 266463 NR Description: 3-isopropylmalate dehydrogenase
  misc_feature (42)..(370): NCBI GI NO: 7427677 NR Description: 3-isopropylmalate dehydrogenase (EC 1
  misc_feature (38)..(390): NCBI GI NO: 39595592 NR Description: Hypothetical protein CBG12504
  misc_feature (66)..(390): NCBI GI NO: 39850137 NR Description: Unknown (protein for MGC:76128)
QKVSSFLSFSLCVLLRLEAMTMTAFLARRLIGNGSSQILGTSSSSSGPFISVSRAFFSSSTPIKATLFPGDGIGPEIAESVKQVFTAADVVIDWDEQFVGTEVDPRTNSFLTWDNLQSVLKNKVGLKGPMATPIGKGHRSLNLTLRKELNLYANVRPCYSLPGYKTRYDDVDLITIRENTEGEYSGLEHQVVKGVVESLKIITRKASMRVAEYAFLYAKTHGRKKVSAIHKANIMQKTDGLFLQCCDEVAAKYPEIYYEKVVIDNCCMMLVKNPALFDVLVMPNLYGDIISDLCAGLVGGLGLTPSMNIGEDGIALAEAVHGSAPDIAGMNLANPTALLLSGVMMLRHLKLNKQAEQIHSAIINTIAEGKYRTADLGGSSTTTDFTKAICDHL

SEQ ID NO: 4630 - protein, 374 aa, Arabidopsis thaliana
  peptide (1)..(374): Ceres Seq. ID no. 12466574
  misc_feature (45)..(370): Pfam Name: Pfam Description:  Isocitrate/isopropylmalate dehydrogenase
  misc_feature (1)..(374): NCBI GI NO: 21536667 NR Description: putative (NAD+) isocitrate dehydrogenase
  misc_feature (1)..(374): NCBI GI NO: 18414179 NR Description: putative protein; protein id: At5g03290
  misc_feature (3)..(374): NCBI GI NO: 11251553 NR Description: 3-isopropylmalate dehydrogenase-like protein
  misc_feature (46)..(374): NCBI GI NO: 28974492 NR Description: NAD-dependent isocitrate dehydrogenase alpha subunit
  misc_feature (18)..(374): NCBI GI NO: 7431333 NR Description: probable isocitrate dehydrogenase (NAD) (EC 1
  misc_feature (39)..(374): NCBI GI NO: 34903262 NR Description: unnamed protein product
  misc_feature (23)..(351): NCBI GI NO: 266463 NR Description: 3-isopropylmalate dehydrogenase
  misc_feature (23)..(351): NCBI GI NO: 7427677 NR Description: 3-isopropylmalate dehydrogenase (EC 1
  misc_feature (19)..(371): NCBI GI NO: 39595592 NR Description: Hypothetical protein CBG12504
  misc_feature (47)..(371): NCBI GI NO: 39850137 NR Description: Unknown (protein for MGC:76128)
MTMTAFLARRLIGNGSSQILGTSSSSSGPFISVSRAFFSSSTPIKATLFPGDGIGPEIAESVKQVFTAADVVIDWDEQFVGTEVDPRTNSFLTWDNLQSVLKNKVGLKGPMATPIGKGHRSLNLTLRKELNLYANVRPCYSLPGYKTRYDDVDLITIRENTEGEYSGLEHQVVKGVVESLKIITRKASMRVAEYAFLYAKTHGRKKVSAIHKANIMQKTDGLFLQCCDEVAAKYPEIYYEKVVIDNCCMMLVKNPALFDVLVMPNLYGDIISDLCAGLVGGLGLTPSMNIGEDGIALAEAVHGSAPDIAGMNLANPTALLLSGVMMLRHLKLNKQAEQIHSAIINTIAEGKYRTADLGGSSTTTDFTKAICDHL

SEQ ID NO: 4631 - protein, 372 aa, Arabidopsis thaliana
  peptide (1)..(372): Ceres Seq. ID no. 12466575
  misc_feature (43)..(368): Pfam Name: Pfam Description:  Isocitrate/isopropylmalate dehydrogenase
  misc_feature (1)..(372): NCBI GI NO: 21536667 NR Description: putative (NAD+) isocitrate dehydrogenase
  misc_feature (1)..(372): NCBI GI NO: 18414179 NR Description: putative protein; protein id: At5g03290
  misc_feature (1)..(372): NCBI GI NO: 11251553 NR Description: 3-isopropylmalate dehydrogenase-like protein
  misc_feature (44)..(372): NCBI GI NO: 28974492 NR Description: NAD-dependent isocitrate dehydrogenase alpha subunit
  misc_feature (16)..(372): NCBI GI NO: 7431333 NR Description: probable isocitrate dehydrogenase (NAD) (EC 1
  misc_feature (37)..(372): NCBI GI NO: 34903262 NR Description: unnamed protein product
  misc_feature (21)..(349): NCBI GI NO: 266463 NR Description: 3-isopropylmalate dehydrogenase
  misc_feature (21)..(349): NCBI GI NO: 7427677 NR Description: 3-isopropylmalate dehydrogenase (EC 1
  misc_feature (17)..(369): NCBI GI NO: 39595592 NR Description: Hypothetical protein CBG12504
  misc_feature (45)..(369): NCBI GI NO: 39850137 NR Description: Unknown (protein for MGC:76128)
MTAFLARRLIGNGSSQILGTSSSSSGPFISVSRAFFSSSTPIKATLFPGDGIGPEIAESVKQVFTAADVVIDWDEQFVGTEVDPRTNSFLTWDNLQSVLKNKVGLKGPMATPIGKGHRSLNLTLRKELNLYANVRPCYSLPGYKTRYDDVDLITIRENTEGEYSGLEHQVVKGVVESLKIITRKASMRVAEYAFLYAKTHGRKKVSAIHKANIMQKTDGLFLQCCDEVAAKYPEIYYEKVVIDNCCMMLVKNPALFDVLVMPNLYGDIISDLCAGLVGGLGLTPSMNIGEDGIALAEAVHGSAPDIAGMNLANPTALLLSGVMMLRHLKLNKQAEQIHSAIINTIAEGKYRTADLGGSSTTTDFTKAICDHL

SEQ ID NO: 4632 - DNA, 1119 bp, Arabidopsis thaliana
  misc_feature (1)..(1119): Ceres Seq. ID no. 12328119
aaacttacagagagacaaatacctataataagccattcataatcttcttgcttcttgttcagaataatggggaatcttttctgttgcgtgcttgtgaagcaatcagatgttgcggtcaaggagagatttggcaaattccaaaaagtacttaatccaggtctccaatttgttccatgggtcatcggtgattacgtcgccggtacactgacccttcgtcttcagcaactcgatgttcagtgtgaaaccaaaacaaaggacaatgtgtttgtgacagtggttgcatccatacaatacagagtcttagctgacaaggcaagtgatgctttttacagactcagcaatccaaccacccaaatcaaagcctacgtctttgatgtgatcagagcatgtgttccaaagctgaacttggacgatgtgttcgagcagaagaatgaaattgccaaatctgtggaagaagagctagacaaagccatgactgcttatggttacgaaatccttcaaaccctaattatcgacattgagcctgatcaacaggttaaacgtgccatgaacgaaatcaacgccgcggcgaggatgagagtggcagcgagcgaaaaagcagaggctgagaaaatcattcagatcaaaagagcagagggtgaagcagagtcaaagtacctgtcgggactcggaatagctcggcagagacaagcgatcgtggacggtctgagagacagtgttctagggttcgcaggaaacgtgccagggacgtcagcgaaggatgtgttggacatggtgatgatgactcagtactttgacacaatgagagatatcggagcaacttctaaatcctctgcggtgtttatccctcacggtccaggcgccgtctctgacgtggcagcgcagattcgaaatggattattacaggccaacaatgcctcctaatcactcaagtcaaattgtcttggtcgtctctttatatatttttgtatcttcttattaaaaaggtaaattttacttttaatataatggtgtgcttattgtgatttgtcattatgtttgtacctatctcttttgtgagttgtgtgatagatatactttgtattttttcttaaaagtcaatataaatttctgtttgcg

SEQ ID NO: 4633 - protein, 285 aa, Arabidopsis thaliana
  peptide (1)..(285): Ceres Seq. ID no. 12328120
  misc_feature (1)..(285): NCBI GI NO: 18395770 NR Description: expressed protein; protein id: At3g01290
  misc_feature (1)..(285): NCBI GI NO: 15241939 NR Description: putative protein; protein id: At5g62740
  misc_feature (1)..(282): NCBI GI NO: 37535170 NR Description: putative hypersensitive-induced response protein
  misc_feature (1)..(285): NCBI GI NO: 7716470 NR Description: hypersensitive-induced response protein [Zea mays]
  misc_feature (1)..(285): NCBI GI NO: 23345046 NR Description: hypersensitive-induced reaction protein 3
  misc_feature (1)..(282): NCBI GI NO: 7716468 NR Description: hypersensitive-induced response protein [Zea mays]
  misc_feature (1)..(282): NCBI GI NO: 7716466 NR Description: hypersensitive-induced response protein [Zea mays]
  misc_feature (1)..(281): NCBI GI NO: 14150732 NR Description: hypersensitive-induced response protein
  misc_feature (1)..(280): NCBI GI NO: 23345042 NR Description: hypersensitive-induced reaction protein 1
  misc_feature (1)..(282): NCBI GI NO: 13194676 NR Description: hypersensitivity-induced response-like protein
MGNLFCCVLVKQSDVAVKERFGKFQKVLNPGLQFVPWVIGDYVAGTLTLRLQQLDVQCETKTKDNVFVTVVASIQYRVLADKASDAFYRLSNPTTQIKAYVFDVIRACVPKLNLDDVFEQKNEIAKSVEEELDKAMTAYGYEILQTLIIDIEPDQQVKRAMNEINAAARMRVAASEKAEAEKIIQIKRAEGEAESKYLSGLGIARQRQAIVDGLRDSVLGFAGNVPGTSAKDVLDMVMMTQYFDTMRDIGATSKSSAVFIPHGPGAVSDVAAQIRNGLLQANNAS

SEQ ID NO: 4634 - protein, 150 aa, Arabidopsis thaliana
  peptide (1)..(150): Ceres Seq. ID no. 12328121
  misc_feature (1)..(150): NCBI GI NO: 18395770 NR Description: expressed protein; protein id: At3g01290
  misc_feature (1)..(150): NCBI GI NO: 15241939 NR Description: putative protein; protein id: At5g62740
  misc_feature (1)..(147): NCBI GI NO: 37535170 NR Description: putative hypersensitive-induced response protein
  misc_feature (1)..(150): NCBI GI NO: 7716470 NR Description: hypersensitive-induced response protein [Zea mays]
  misc_feature (1)..(150): NCBI GI NO: 23345046 NR Description: hypersensitive-induced reaction protein 3
  misc_feature (1)..(147): NCBI GI NO: 7716468 NR Description: hypersensitive-induced response protein [Zea mays]
  misc_feature (1)..(147): NCBI GI NO: 7716466 NR Description: hypersensitive-induced response protein [Zea mays]
  misc_feature (1)..(146): NCBI GI NO: 14150732 NR Description: hypersensitive-induced response protein
  misc_feature (1)..(145): NCBI GI NO: 23345042 NR Description: hypersensitive-induced reaction protein 1
  misc_feature (1)..(147): NCBI GI NO: 13194676 NR Description: hypersensitivity-induced response-like protein
MTAYGYEILQTLIIDIEPDQQVKRAMNEINAAARMRVAASEKAEAEKIIQIKRAEGEAESKYLSGLGIARQRQAIVDGLRDSVLGFAGNVPGTSAKDVLDMVMMTQYFDTMRDIGATSKSSAVFIPHGPGAVSDVAAQIRNGLLQANNAS

SEQ ID NO: 4635 - DNA, 1391 bp, Arabidopsis thaliana
  misc_feature (1)..(1391): Ceres Seq. ID no. 12348403
aaaaacagcctggtaagcttcttcgttttcccttctagagaccattgattatcataattgttctacaaactttagctttttcattagtctctcgatctacttgatcgttgtcacttagcaaccctaatttctgggagaatcatccctgcagtattacccatcccgatgagtgttaaggttggatgatagaagacattttttgaccttctcttacaatgactacacgaagaaatggcgtttccaggcatcagcggtttgagagttttcgcggtgaaggaccaaattggatcttaattgctgggggtgctttgttgagtacattgtccattcgttttggctacaaattaaagcagtctattgactccaaacctcctcattccaatgccactggtggattaaaacctaatggaacaaccgacagaggaagatttaagggctgctgcttgcattctaatgcatcaccctgtgaaaggaataatgattgttgctttcactgcactcccggaactgagaatggggaaggaaatcatgctacaaatgagcaaatggcagagtccagtacttctctgcctcttgtgacagttcctgcttcatcatatagcaaagagagtgcagtcgtatggggatcttctcctgaccacctggaagtgccgatgaaagcataccatcaacattcgacctgctcagatactccttgcgtatctgaatccggctcagacatcttcagcaagcgagaagtaatacagaaactgaggcaacagctgaagagacgtgacgacatgatagttgaaatgcaggaacagattctagagctgcaaaactcgctaaacgcccagatgggacactctagccatatccaaacacagctagacgcaacaaacagggacctgtttgaatcagaaagagaagtccagagactgagaaaggcaatcgctgatcactgcgtgggacacacaggtagcaatggttggagtggcgatgtgaacagcgaaaacaactacgagtcaccagaaaatggaataagggatggagaaagaatagagatgttgagaaaagaagtgggtgagcttaaagaagtgatagatgggaaagagtatctacttaggagctataaggagcagaaaacagagcttttgcagaaggtaaaagagttgcagcagagactggactcgcagctcccaaacattttgtaggtgaagaaggttaggcattgtgcattcttaccactctcttttgtttccccgagtaaaaaatatgaatctttgttcaaaaatatctcaatttctccggggaaacttatcaactgactacattgttttgggtgtcaattatgattttatccaaattgtttttttctcttggtgaagtggatattcgaaagttgcaaaccc

SEQ ID NO: 4636 - protein, 325 aa, Arabidopsis thaliana
  peptide (1)..(325): Ceres Seq. ID no. 12348404
  misc_feature (1)..(325): NCBI GI NO: 21536672 NR Description: unknown [Arabidopsis thaliana]
  misc_feature (1)..(325): NCBI GI NO: 18417030 NR Description: expressed protein; protein id: At4g27620
  misc_feature (98)..(325): NCBI GI NO: 7487506 NR Description: hypothetical protein T29A15
  misc_feature (1)..(62): NCBI GI NO: 7487506 NR Description: hypothetical protein T29A15
  misc_feature (1)..(325): NCBI GI NO: 30687652 NR Description: expressed protein [Arabidopsis thaliana]
  misc_feature (98)..(325): NCBI GI NO: 7487505 NR Description: hypothetical protein T29A15
  misc_feature (1)..(62): NCBI GI NO: 7487505 NR Description: hypothetical protein T29A15
MTTRRNGVSRHQRFESFRGEGPNWILIAGGALLSTLSIRFGYKLKQSIDSKPPHSNATGGLKPNGTTDRGRFKGCCLHSNASPCERNNDCCFHCTPGTENGEGNHATNEQMAESSTSLPLVTVPASSYSKESAVVWGSSPDHLEVPMKAYHQHSTCSDTPCVSESGSDIFSKREVIQKLRQQLKRRDDMIVEMQEQILELQNSLNAQMGHSSHIQTQLDATNRDLFESEREVQRLRKAIADHCVGHTGSNGWSGDVNSENNYESPENGIRDGERIEMLRKEVGELKEVIDGKEYLLRSYKEQKTELLQKVKELQQRLDSQLPNIL

SEQ ID NO: 4637 - protein, 215 aa, Arabidopsis thaliana
  peptide (1)..(215): Ceres Seq. ID no. 12348405
  misc_feature (1)..(215): NCBI GI NO: 21536672 NR Description: unknown [Arabidopsis thaliana]
  misc_feature (1)..(215): NCBI GI NO: 18417030 NR Description: expressed protein; protein id: At4g27620
  misc_feature (1)..(215): NCBI GI NO: 7487506 NR Description: hypothetical protein T29A15
  misc_feature (1)..(215): NCBI GI NO: 30687652 NR Description: expressed protein [Arabidopsis thaliana]
  misc_feature (1)..(215): NCBI GI NO: 7487505 NR Description: hypothetical protein T29A15
MAESSTSLPLVTVPASSYSKESAVVWGSSPDHLEVPMKAYHQHSTCSDTPCVSESGSDIFSKREVIQKLRQQLKRRDDMIVEMQEQILELQNSLNAQMGHSSHIQTQLDATNRDLFESEREVQRLRKAIADHCVGHTGSNGWSGDVNSENNYESPENGIRDGERIEMLRKEVGELKEVIDGKEYLLRSYKEQKTELLQKVKELQQRLDSQLPNIL

SEQ ID NO: 4638 - protein, 179 aa, Arabidopsis thaliana
  peptide (1)..(179): Ceres Seq. ID no. 12348406
  misc_feature (1)..(179): NCBI GI NO: 21536672 NR Description: unknown [Arabidopsis thaliana]
  misc_feature (1)..(179): NCBI GI NO: 18417030 NR Description: expressed protein; protein id: At4g27620
  misc_feature (1)..(179): NCBI GI NO: 7487506 NR Description: hypothetical protein T29A15
  misc_feature (1)..(179): NCBI GI NO: 30687652 NR Description: expressed protein [Arabidopsis thaliana]
  misc_feature (1)..(179): NCBI GI NO: 7487505 NR Description: hypothetical protein T29A15
MKAYHQHSTCSDTPCVSESGSDIFSKREVIQKLRQQLKRRDDMIVEMQEQILELQNSLNAQMGHSSHIQTQLDATNRDLFESEREVQRLRKAIADHCVGHTGSNGWSGDVNSENNYESPENGIRDGERIEMLRKEVGELKEVIDGKEYLLRSYKEQKTELLQKVKELQQRLDSQLPNIL

SEQ ID NO: 4639 - DNA, 1128 bp, Arabidopsis thaliana
  misc_feature (1)..(1128): Ceres Seq. ID no. 13580354
atcggtacgacgttctttttggttctttcttgtttctccattcatccataagaaaagataatgtagttctgcttgttcgtccattttctgattttggtatcagtttttgtatttgtgtatagtaaatctgaaggagttttccaaagacaaaccaacatggaagaccgcgtcttgatcaagaacgatgtcactgaattgataggtaacacaccaatggtgtatctaaataaaattgtggatggttgtgtggctcgtattgctgccaagcttgagatgatggagccttgctctagcatcaaagatagaatcgcatatagtatgatcaaagatgctgaagacaaaggattgattactccgggaaagagtacattgattgaggcaacgggtggtaacaccgggattggtttagccagcatcggggcttcaagaggttataaagtgatccttttgatgccttcaacaatgagtttagaaaggagaatcattctaagagcattaggtgcagaggttcatctcactgacattagcataggcattaaaggacagttggagaaagctaaagagatattaagcaaaactcccggtggttacataccacaccagtttattaatcctgaaaatccagagattcattatagaaccacgggtccggagatttggagagattcagcagggaaagtagatatcttagtcgccggtgttggaactggtggaacggttactggaacagggaagtttcttaaagaaaagaacaaagatattaaggtttgtgtggtggaaccttccgaaagtgcggtactcagcggaggaaaaccaggtccacatttgatccaaggaataggctctggtgaaattccagccaatttggacttaagcattgttgatgaaatcattcaagtgactggtgaggaagctattgaaacaaccaagcttcttgctatcaaagaaggattattggttggaatatcctctggagcctcagctgcggctgcgttaaaggttgcaaagcggcctgaaaacgtagggaaactcattgtggttatttttcctagtggaggagaacgttatttatcgactgaattgttcgagtcagtcagatatgaagctgagaatttgccagttgaatga

SEQ ID NO: 4640 - protein, 323 aa, Arabidopsis thaliana
  peptide (1)..(323): Ceres Seq. ID no. 13580355
  misc_feature (11)..(300): Pfam Name: Pfam Description:  Pyridoxal-phosphate dependent enzyme
  misc_feature (1)..(323): NCBI GI NO: 15241112 NR Description: cysteine synthase
  misc_feature (1)..(323): NCBI GI NO: 15241111 NR Description: cysteine synthase
  misc_feature (1)..(323): NCBI GI NO: 21553635 NR Description: cysteine synthase [Arabidopsis thaliana]
  misc_feature (1)..(323): NCBI GI NO: 2245144 NR Description: O-acetylserine(thiol) lyase [Brassica juncea]
  misc_feature (2)..(323): NCBI GI NO: 21593263 NR Description: putative cysteine synthase [Arabidopsis thaliana]
  misc_feature (2)..(323): NCBI GI NO: 12322845 NR Description: putative cysteine synthase; 39489-37437
  misc_feature (2)..(323): NCBI GI NO: 18397061 NR Description: cysteine synthase
  misc_feature (7)..(323): NCBI GI NO: 38350579 NR Description: cysteine synthase [Nicotiana plumbaginifolia]
  misc_feature (7)..(323): NCBI GI NO: 2493895 NR Description: Cysteine synthase
  misc_feature (3)..(323): NCBI GI NO: 12081917 NR Description: cytosolic cysteine synthase [Solanum tuberosum]
MEDRVLIKNDVTELIGNTPMVYLNKIVDGCVARIAAKLEMMEPCSSIKDRIAYSMIKDAEDKGLITPGKSTLIEATGGNTGIGLASIGASRGYKVILLMPSTMSLERRIILRALGAEVHLTDISIGIKGQLEKAKEILSKTPGGYIPHQFINPENPEIHYRTTGPEIWRDSAGKVDILVAGVGTGGTVTGTGKFLKEKNKDIKVCVVEPSESAVLSGGKPGPHLIQGIGSGEIPANLDLSIVDEIIQVTGEEAIETTKLLAIKEGLLVGISSGASAAAALKVAKRPENVGKLIVVIFPSGGERYLSTELFESVRYEAENLPVE

SEQ ID NO: 4641 - protein, 304 aa, Arabidopsis thaliana
  peptide (1)..(304): Ceres Seq. ID no. 13580356
  misc_feature (1)..(281): Pfam Name: Pfam Description:  Pyridoxal-phosphate dependent enzyme
  misc_feature (1)..(304): NCBI GI NO: 15241112 NR Description: cysteine synthase
  misc_feature (1)..(304): NCBI GI NO: 15241111 NR Description: cysteine synthase
  misc_feature (1)..(304): NCBI GI NO: 21553635 NR Description: cysteine synthase [Arabidopsis thaliana]
  misc_feature (1)..(304): NCBI GI NO: 2245144 NR Description: O-acetylserine(thiol) lyase [Brassica juncea]
  misc_feature (1)..(304): NCBI GI NO: 21593263 NR Description: putative cysteine synthase [Arabidopsis thaliana]
  misc_feature (1)..(304): NCBI GI NO: 12322845 NR Description: putative cysteine synthase; 39489-37437
  misc_feature (1)..(304): NCBI GI NO: 18397061 NR Description: cysteine synthase
  misc_feature (1)..(304): NCBI GI NO: 38350579 NR Description: cysteine synthase [Nicotiana plumbaginifolia]
  misc_feature (1)..(304): NCBI GI NO: 2493895 NR Description: Cysteine synthase
  misc_feature (1)..(304): NCBI GI NO: 12081917 NR Description: cytosolic cysteine synthase [Solanum tuberosum]
MVYLNKIVDGCVARIAAKLEMMEPCSSIKDRIAYSMIKDAEDKGLITPGKSTLIEATGGNTGIGLASIGASRGYKVILLMPSTMSLERRIILRALGAEVHLTDISIGIKGQLEKAKEILSKTPGGYIPHQFINPENPEIHYRTTGPEIWRDSAGKVDILVAGVGTGGTVTGTGKFLKEKNKDIKVCVVEPSESAVLSGGKPGPHLIQGIGSGEIPANLDLSIVDEIIQVTGEEAIETTKLLAIKEGLLVGISSGASAAAALKVAKRPENVGKLIVVIFPSGGERYLSTELFESVRYEAENLPVE

SEQ ID NO: 4642 - protein, 284 aa, Arabidopsis thaliana
  peptide (1)..(284): Ceres Seq. ID no. 13580357
  misc_feature (1)..(261): Pfam Name: Pfam Description:  Pyridoxal-phosphate dependent enzyme
  misc_feature (1)..(284): NCBI GI NO: 15241112 NR Description: cysteine synthase
  misc_feature (1)..(284): NCBI GI NO: 15241111 NR Description: cysteine synthase
  misc_feature (1)..(284): NCBI GI NO: 21553635 NR Description: cysteine synthase [Arabidopsis thaliana]
  misc_feature (1)..(284): NCBI GI NO: 2245144 NR Description: O-acetylserine(thiol) lyase [Brassica juncea]
  misc_feature (1)..(284): NCBI GI NO: 21593263 NR Description: putative cysteine synthase [Arabidopsis thaliana]
  misc_feature (1)..(284): NCBI GI NO: 12322845 NR Description: putative cysteine synthase; 39489-37437
  misc_feature (1)..(284): NCBI GI NO: 18397061 NR Description: cysteine synthase
  misc_feature (1)..(284): NCBI GI NO: 38350579 NR Description: cysteine synthase [Nicotiana plumbaginifolia]
  misc_feature (1)..(284): NCBI GI NO: 2493895 NR Description: Cysteine synthase
  misc_feature (1)..(284): NCBI GI NO: 12081917 NR Description: cytosolic cysteine synthase [Solanum tuberosum]
MMEPCSSIKDRIAYSMIKDAEDKGLITPGKSTLIEATGGNTGIGLASIGASRGYKVILLMPSTMSLERRIILRALGAEVHLTDISIGIKGQLEKAKEILSKTPGGYIPHQFINPENPEIHYRTTGPEIWRDSAGKVDILVAGVGTGGTVTGTGKFLKEKNKDIKVCVVEPSESAVLSGGKPGPHLIQGIGSGEIPANLDLSIVDEIIQVTGEEAIETTKLLAIKEGLLVGISSGASAAAALKVAKRPENVGKLIVVIFPSGGERYLSTELFESVRYEAENLPVE

SEQ ID NO: 4643 - DNA, 1071 bp, Arabidopsis thaliana
  misc_feature (1)..(1071): Ceres Seq. ID no. 12394412
attgtgttagtggtaatcaaatccggtgaaaatggagcggagccgagtgaccagagaagcaccgaccggaaccaggatcctgcttgcttcactctctgcgatggttgcagagtcagttacgtttccgattgatctcacaaagactagaatgcagctccatggttcgggatccgcttctggtgcgcatcggattggcgctttcggagtcgtatcggagattgcgagaaaggaaggagtgattggtctctacaaaggtctatctccggcgattatcagacacctgttctacacgcctatcagaatcattggatacgagaatttgaaaggactcatcgtcagatctgaaactaacaatagcgagtctcttcctctcgccacaaaggctctcgtcggaggattttctggtgttatagctcaggtagtggctagtccagctgatttggtcaaagtgagaatgcaagcagatggtagattggtgagccaaggcctgaaaccgaggtactcgggaccaatcgaggcttttaccaaaatcctacaatcagaaggagtaaaagggttatggaaaggtgttcttccaaacatccagagagcatttctagtgaatatgggagaactagcttgctatgatcacgccaaacactttgtcatcgataagaagattgctgaggataacatttttgcgcacactcttgcttctataatgtccggtcttgcttcgacaagtttgagttgtccagctgatgtggtgaagacgaggatgatgaaccagggtgaaaatgctgtgtacagaaattcttacgactgtttggtgaagacggttaagtttgaaggaataagagctttgtggaaaggtttcttcccgacatgggcaaggcttggaccgtggcagttcgtgttttgggtctcctatgagaagtttagactgctggcaggaatctcttccttctagacctgagaaactggaaaagcaaatttgagatttgtgttctttagttcttacttgttagttgttacacattttgtaagaaccttgagaagtagcatcagtttctgattaacgcgagaagagtt

SEQ ID NO: 4644 - protein, 305 aa, Arabidopsis thaliana
  peptide (1)..(305): Ceres Seq. ID no. 12394413
  misc_feature (1)..(305): NCBI GI NO: 15223098 NR Description: mitochondrial carrier protein family
  misc_feature (12)..(305): NCBI GI NO: 38344836 NR Description: OSJNBa0064H22.17
  misc_feature (6)..(305): NCBI GI NO: 16758260 NR Description: uncoupling protein UCP-4 [Rattus norvegicus]
  misc_feature (6)..(305): NCBI GI NO: 21312006 NR Description: RIKEN cDNA 3632410G24 [Mus musculus]
  misc_feature (1)..(129): NCBI GI NO: 26450423 NR Description: putative mitochondrial uncoupling protein
  misc_feature (17)..(305): NCBI GI NO: 18860079 NR Description: CG6492-PA [Drosophila melanogaster]
  misc_feature (14)..(305): NCBI GI NO: 17562272 NR Description: Uncoupling protein [Caenorhabditis elegans]
  misc_feature (18)..(305): NCBI GI NO: 7505416 NR Description: hypothetical protein K07B1
  misc_feature (14)..(305): NCBI GI NO: 39594577 NR Description: Hypothetical protein CBG19253
  misc_feature (1)..(299): NCBI GI NO: 38969885 NR Description: Unknown (protein for IMAGE:5308614)
MERSRVTREAPTGTRILLASLSAMVAESVTFPIDLTKTRMQLHGSGSASGAHRIGAFGVVSEIARKEGVIGLYKGLSPAIIRHLFYTPIRIIGYENLKGLIVRSETNNSESLPLATKALVGGFSGVIAQVVASPADLVKVRMQADGRLVSQGLKPRYSGPIEAFTKILQSEGVKGLWKGVLPNIQRAFLVNMGELACYDHAKHFVIDKKIAEDNIFAHTLASIMSGLASTSLSCPADVVKTRMMNQGENAVYRNSYDCLVKTVKFEGIRALWKGFFPTWARLGPWQFVFWVSYEKFRLLAGISSF

SEQ ID NO: 4645 - protein, 282 aa, Arabidopsis thaliana
  peptide (1)..(282): Ceres Seq. ID no. 12394414
  misc_feature (1)..(282): NCBI GI NO: 15223098 NR Description: mitochondrial carrier protein family
  misc_feature (1)..(282): NCBI GI NO: 38344836 NR Description: OSJNBa0064H22.17
  misc_feature (1)..(282): NCBI GI NO: 16758260 NR Description: uncoupling protein UCP-4 [Rattus norvegicus]
  misc_feature (1)..(282): NCBI GI NO: 21312006 NR Description: RIKEN cDNA 3632410G24 [Mus musculus]
  misc_feature (1)..(106): NCBI GI NO: 26450423 NR Description: putative mitochondrial uncoupling protein
  misc_feature (1)..(282): NCBI GI NO: 18860079 NR Description: CG6492-PA [Drosophila melanogaster]
  misc_feature (1)..(282): NCBI GI NO: 17562272 NR Description: Uncoupling protein [Caenorhabditis elegans]
  misc_feature (1)..(282): NCBI GI NO: 7505416 NR Description: hypothetical protein K07B1
  misc_feature (1)..(282): NCBI GI NO: 39594577 NR Description: Hypothetical protein CBG19253
  misc_feature (1)..(276): NCBI GI NO: 38969885 NR Description: Unknown (protein for IMAGE:5308614)
MVAESVTFPIDLTKTRMQLHGSGSASGAHRIGAFGVVSEIARKEGVIGLYKGLSPAIIRHLFYTPIRIIGYENLKGLIVRSETNNSESLPLATKALVGGFSGVIAQVVASPADLVKVRMQADGRLVSQGLKPRYSGPIEAFTKILQSEGVKGLWKGVLPNIQRAFLVNMGELACYDHAKHFVIDKKIAEDNIFAHTLASIMSGLASTSLSCPADVVKTRMMNQGENAVYRNSYDCLVKTVKFEGIRALWKGFFPTWARLGPWQFVFWVSYEKFRLLAGISSF

SEQ ID NO: 4646 - protein, 266 aa, Arabidopsis thaliana
  peptide (1)..(266): Ceres Seq. ID no. 12394415
  misc_feature (1)..(266): NCBI GI NO: 15223098 NR Description: mitochondrial carrier protein family
  misc_feature (1)..(266): NCBI GI NO: 38344836 NR Description: OSJNBa0064H22.17
  misc_feature (1)..(266): NCBI GI NO: 16758260 NR Description: uncoupling protein UCP-4 [Rattus norvegicus]
  misc_feature (1)..(266): NCBI GI NO: 21312006 NR Description: RIKEN cDNA 3632410G24 [Mus musculus]
  misc_feature (1)..(90): NCBI GI NO: 26450423 NR Description: putative mitochondrial uncoupling protein
  misc_feature (1)..(266): NCBI GI NO: 18860079 NR Description: CG6492-PA [Drosophila melanogaster]
  misc_feature (1)..(266): NCBI GI NO: 17562272 NR Description: Uncoupling protein [Caenorhabditis elegans]
  misc_feature (1)..(266): NCBI GI NO: 7505416 NR Description: hypothetical protein K07B1
  misc_feature (1)..(266): NCBI GI NO: 39594577 NR Description: Hypothetical protein CBG19253
  misc_feature (1)..(260): NCBI GI NO: 38969885 NR Description: Unknown (protein for IMAGE:5308614)
MQLHGSGSASGAHRIGAFGVVSEIARKEGVIGLYKGLSPAIIRHLFYTPIRIIGYENLKGLIVRSETNNSESLPLATKALVGGFSGVIAQVVASPADLVKVRMQADGRLVSQGLKPRYSGPIEAFTKILQSEGVKGLWKGVLPNIQRAFLVNMGELACYDHAKHFVIDKKIAEDNIFAHTLASIMSGLASTSLSCPADVVKTRMMNQGENAVYRNSYDCLVKTVKFEGIRALWKGFFPTWARLGPWQFVFWVSYEKFRLLAGISSF

SEQ ID NO: 4647 - DNA, 1178 bp, Arabidopsis thaliana
  misc_feature (1)..(1178): Ceres Seq. ID no. 13575024
gcttagtcttcttcgctctatcccaacactcgatcaaataatcccagtgagcttcttccattccaagttgataaggaatttgaagaagcctttgtttaatggaaagcaaaggaagaatccatccatctcatcatcatatgaggcgtcctcttccaggtcccggtggctgtatagcgcatccggagactttcggtaatcacggtgctataccaccttctgctgctcaaggtgtgtatccttccttcaacatgttacctccacctgaagttatggagcaaaagtttgtggcacaacacggggaattacagagacttgctatagagaatcagagacttggtggaactcatggtagtttaagacaagagttagcagcagcacagcatgaaatacagatgttgcacgcgcaaattgggtcgatgaagtccgagagagagcaacggatgatgggtcttgctgagaaagttgctaaaatggagactgagcttcagaaatctgaggctgttaagttggagatgcaacaagcacgtgctgaggcacggagtcttgttgtggctagggaggagcttatgtctaaagtgcatcagttgactcaggaacttcaaaaatctcgttctgatgtgcagcaaatacctgctctgatgtctgaacttgagaatctaagacaggagtaccagcagtgcagggcaacatatgactatgagaagaagttttataatgaccatctcgagtcacttcaggcaatggagaagaactacatgactatggctagggaagttgaaaaacttcaagcacagttgatgaacaatgcaaattcagatagaagagcaggtggcccttatggtaacaacataaatgctgaaattgacgcttctggacatcagagtggaaacggttattatgaagatgcttttggtcctcagggatatattcctcaaccagtagctggtaacgcaactggaccaaattcagttgttggcgcagctcaatacccttatcaaggagtaactcagccaggatacttccctcaaagacccggttacaactttccaagaggccctcctggttcatatgacccaacaacaaggttaccaacaggaccttacggcgctccattcccacctggaccatctaacaatactccttacgccggtacacacggaaaccctagtcgcagatga

SEQ ID NO: 4648 - protein, 359 aa, Arabidopsis thaliana
  peptide (1)..(359): Ceres Seq. ID no. 13575025
  misc_feature (1)..(359): NCBI GI NO: 30697468 NR Description: expressed protein [Arabidopsis thaliana]
  misc_feature (14)..(359): NCBI GI NO: 25404669 NR Description: hypothetical protein F5A8.8
  misc_feature (52)..(326): NCBI GI NO: 9294396 NR Description: gb|AAD10662
  misc_feature (52)..(321): NCBI GI NO: 18400511 NR Description: expressed protein [Arabidopsis thaliana]
  misc_feature (1)..(192): NCBI GI NO: 5441873 NR Description: hypothetical protein
  misc_feature (35)..(356): NCBI GI NO: 38605778 NR Description: OSJNBa0044K18.21
  misc_feature (38)..(358): NCBI GI NO: 28876008 NR Description: hypothetical protein
  misc_feature (29)..(252): NCBI GI NO: 18405242 NR Description: myosin -related [Arabidopsis thaliana]
  misc_feature (29)..(252): NCBI GI NO: 25405799 NR Description: myosin-like protein, 97843-94399
  misc_feature (9)..(290): NCBI GI NO: 33146484 NR Description: myosin-like protein
MESKGRIHPSHHHMRRPLPGPGGCIAHPETFGNHGAIPPSAAQGVYPSFNMLPPPEVMEQKFVAQHGELQRLAIENQRLGGTHGSLRQELAAAQHEIQMLHAQIGSMKSEREQRMMGLAEKVAKMETELQKSEAVKLEMQQARAEARSLVVAREELMSKVHQLTQELQKSRSDVQQIPALMSELENLRQEYQQCRATYDYEKKFYNDHLESLQAMEKNYMTMAREVEKLQAQLMNNANSDRRAGGPYGNNINAEIDASGHQSGNGYYEDAFGPQGYIPQPVAGNATGPNSVVGAAQYPYQGVTQPGYFPQRPGYNFPRGPPGSYDPTTRLPTGPYGAPFPPGPSNNTPYAGTHGNPSRR

SEQ ID NO: 4649 - protein, 346 aa, Arabidopsis thaliana
  peptide (1)..(346): Ceres Seq. ID no. 13575026
  misc_feature (1)..(346): NCBI GI NO: 30697468 NR Description: expressed protein [Arabidopsis thaliana]
  misc_feature (1)..(346): NCBI GI NO: 25404669 NR Description: hypothetical protein F5A8.8
  misc_feature (39)..(313): NCBI GI NO: 9294396 NR Description: gb|AAD10662
  misc_feature (39)..(308): NCBI GI NO: 18400511 NR Description: expressed protein [Arabidopsis thaliana]
  misc_feature (1)..(179): NCBI GI NO: 5441873 NR Description: hypothetical protein
  misc_feature (22)..(343): NCBI GI NO: 38605778 NR Description: OSJNBa0044K18.21
  misc_feature (25)..(345): NCBI GI NO: 28876008 NR Description: hypothetical protein
  misc_feature (16)..(239): NCBI GI NO: 18405242 NR Description: myosin -related [Arabidopsis thaliana]
  misc_feature (16)..(239): NCBI GI NO: 25405799 NR Description: myosin-like protein, 97843-94399
  misc_feature (1)..(277): NCBI GI NO: 33146484 NR Description: myosin-like protein
MRRPLPGPGGCIAHPETFGNHGAIPPSAAQGVYPSFNMLPPPEVMEQKFVAQHGELQRLAIENQRLGGTHGSLRQELAAAQHEIQMLHAQIGSMKSEREQRMMGLAEKVAKMETELQKSEAVKLEMQQARAEARSLVVAREELMSKVHQLTQELQKSRSDVQQIPALMSELENLRQEYQQCRATYDYEKKFYNDHLESLQAMEKNYMTMAREVEKLQAQLMNNANSDRRAGGPYGNNINAEIDASGHQSGNGYYEDAFGPQGYIPQPVAGNATGPNSVVGAAQYPYQGVTQPGYFPQRPGYNFPRGPPGSYDPTTRLPTGPYGAPFPPGPSNNTPYAGTHGNPSRR

SEQ ID NO: 4650 - protein, 309 aa, Arabidopsis thaliana
  peptide (1)..(309): Ceres Seq. ID no. 13575027
  misc_feature (1)..(309): NCBI GI NO: 30697468 NR Description: expressed protein [Arabidopsis thaliana]
  misc_feature (1)..(309): NCBI GI NO: 25404669 NR Description: hypothetical protein F5A8.8
  misc_feature (2)..(276): NCBI GI NO: 9294396 NR Description: gb|AAD10662
  misc_feature (2)..(271): NCBI GI NO: 18400511 NR Description: expressed protein [Arabidopsis thaliana]
  misc_feature (1)..(142): NCBI GI NO: 5441873 NR Description: hypothetical protein
  misc_feature (1)..(306): NCBI GI NO: 38605778 NR Description: OSJNBa0044K18.21
  misc_feature (1)..(308): NCBI GI NO: 28876008 NR Description: hypothetical protein
  misc_feature (1)..(202): NCBI GI NO: 18405242 NR Description: myosin -related [Arabidopsis thaliana]
  misc_feature (1)..(202): NCBI GI NO: 25405799 NR Description: myosin-like protein, 97843-94399
  misc_feature (1)..(240): NCBI GI NO: 33146484 NR Description: myosin-like protein
MLPPPEVMEQKFVAQHGELQRLAIENQRLGGTHGSLRQELAAAQHEIQMLHAQIGSMKSEREQRMMGLAEKVAKMETELQKSEAVKLEMQQARAEARSLVVAREELMSKVHQLTQELQKSRSDVQQIPALMSELENLRQEYQQCRATYDYEKKFYNDHLESLQAMEKNYMTMAREVEKLQAQLMNNANSDRRAGGPYGNNINAEIDASGHQSGNGYYEDAFGPQGYIPQPVAGNATGPNSVVGAAQYPYQGVTQPGYFPQRPGYNFPRGPPGSYDPTTRLPTGPYGAPFPPGPSNNTPYAGTHGNPSRR

SEQ ID NO: 4651 - DNA, 1709 bp, Arabidopsis thaliana
  misc_feature (1)..(1709): Ceres Seq. ID no. 13497388
atcacaaattacatactaaaaaaaaatagacgcggtcaaaattctctctcaattctatcaatataaagacaatctctttctcattagggtttttaattttcatcatcatcatcactctctctgctcccaaattcagaaaaaaaggaacgatttttatttccggtgaatgagaattttctctcgaatttgatcgatcacatatttcatctgtgtgttttcattttgaggatgccagcaacggaatatcaaagatcattcgggaggtcttttctgaatttacggcgagacacggcggtgaactcggttgagtcaacgacggttacccccgagttgactcagatggaagcagagcttgtttcgtttcagagaaaagttgctgagaggtttatcgatctcaatgcgtctagttgtgaagatctactgtctctcgaatgggttgggaagcttcttgattcgtttctatcttgtcaagaagagtttcgttccatagtcatcaatcatcgttcgatgattactaaaccaccgatggatcgattggtttcagattacttcgagagaagtgttaaagctcttgatgtttgtaacgcgattcgtgatggtgttgaacagatccgtcaatggcagaaacttatcgagattgtaatttgtgctttcaacaacaatggaggaggaagtagtggcaagagacctcttggagaaggtcagtttcgtcgtgcgaggaagactttgattgagttagctattggtatgcttgatgagaaggattcatcttctagctcagtgtcgtctcagcatcgtaaccggtcttttggaaggaacaaggagcagcttcatcaccgaacaatcgggcatttcaggtcgctttcttggagtgtttcgagatcatggtctgcttctaagcaactacaagctattggaaacaacttagctacgcctcgagctagtgacattactgcaactaatggtcttattgttccggtttatacaatgactacggtattgttgtttgtgatgtgggcacttgtagctgcgattccttgtcaagacagaggtttgcaagtacatttcaatgttcctaggaattaccaatggggaggttcgttgatgtcgttgcacgataggatcattgaggaatcgaagaagagagagaggaagaatacatgtgggttgttgaaagagattcatcagtttgagaagacttcaagattgatgaatgagttggttgattctgttcagtttcctttgtctgaagagaaagagatggaagtgagagagagagttgaggaattggggaagcttcaagaggctttgaagaatggtttggatccgtttgagaggaaagtgagggaagtgtttcatcggattgtaagaagcagaacagaaggtcttgatactgttggaaagcatcatggttctgaatgatgtttatcgaaaattcaatggaacatcatcatctgtttaatattctggagagttgaagtatgtttatcaaattgtgggtttgtttgtctggtgaacgtgaagatcatggagacaaattgctagagaacgagagaacattttggttaaaggttgttaatataaaagacaggagatacaaaccactccatttttccaatctttgttgtttatgtataattttctcatcaaagattgttaattatgaataaggttccattttatacggatcggaacttgcattacaattt

SEQ ID NO: 4652 - protein, 397 aa, Arabidopsis thaliana
  peptide (1)..(397): Ceres Seq. ID no. 13497389
  misc_feature (1)..(390): Pfam Name: DUF793 Pfam Description: Protein of unknown function
  misc_feature (1)..(397): NCBI GI NO: 18410617 NR Description: expressed protein [Arabidopsis thaliana]
  misc_feature (1)..(397): NCBI GI NO: 21536674 NR Description: unknown [Arabidopsis thaliana]
  misc_feature (1)..(390): NCBI GI NO: 18394649 NR Description: expressed protein [Arabidopsis thaliana]
  misc_feature (1)..(390): NCBI GI NO: 21593634 NR Description: unknown [Arabidopsis thaliana]
  misc_feature (1)..(397): NCBI GI NO: 15218428 NR Description: hypothetical protein [Arabidopsis thaliana]
  misc_feature (1)..(396): NCBI GI NO: 38345505 NR Description: OSJNBa0039K24.3
  misc_feature (55)..(396): NCBI GI NO: 5777630 NR Description: CAA303718.1 protein [Oryza sativa]
  misc_feature (2)..(390): NCBI GI NO: 15222577 NR Description: hypothetical protein [Arabidopsis thaliana]
  misc_feature (3)..(385): NCBI GI NO: 15236522 NR Description: expressed protein [Arabidopsis thaliana]
  misc_feature (2)..(372): NCBI GI NO: 15237130 NR Description: expressed protein [Arabidopsis thaliana]
MPATEYQRSFGRSFLNLRRDTAVNSVESTTVTPELTQMEAELVSFQRKVAERFIDLNASSCEDLLSLEWVGKLLDSFLSCQEEFRSIVINHRSMITKPPMDRLVSDYFERSVKALDVCNAIRDGVEQIRQWQKLIEIVICAFNNNGGGSSGKRPLGEGQFRRARKTLIELAIGMLDEKDSSSSSVSSQHRNRSFGRNKEQLHHRTIGHFRSLSWSVSRSWSASKQLQAIGNNLATPRASDITATNGLIVPVYTMTTVLLFVMWALVAAIPCQDRGLQVHFNVPRNYQWGGSLMSLHDRIIEESKKRERKNTCGLLKEIHQFEKTSRLMNELVDSVQFPLSEEKEMEVRERVEELGKLQEALKNGLDPFERKVREVFHRIVRSRTEGLDTVGKHHGSE

SEQ ID NO: 4653 - protein, 360 aa, Arabidopsis thaliana
  peptide (1)..(360): Ceres Seq. ID no. 13497390
  misc_feature (1)..(353): Pfam Name: DUF793 Pfam Description: Protein of unknown function
  misc_feature (1)..(360): NCBI GI NO: 18410617 NR Description: expressed protein [Arabidopsis thaliana]
  misc_feature (1)..(360): NCBI GI NO: 21536674 NR Description: unknown [Arabidopsis thaliana]
  misc_feature (1)..(353): NCBI GI NO: 18394649 NR Description: expressed protein [Arabidopsis thaliana]
  misc_feature (1)..(353): NCBI GI NO: 21593634 NR Description: unknown [Arabidopsis thaliana]
  misc_feature (1)..(360): NCBI GI NO: 15218428 NR Description: hypothetical protein [Arabidopsis thaliana]
  misc_feature (1)..(359): NCBI GI NO: 38345505 NR Description: OSJNBa0039K24.3
  misc_feature (18)..(359): NCBI GI NO: 5777630 NR Description: CAA303718.1 protein [Oryza sativa]
  misc_feature (1)..(353): NCBI GI NO: 15222577 NR Description: hypothetical protein [Arabidopsis thaliana]
  misc_feature (1)..(348): NCBI GI NO: 15236522 NR Description: expressed protein [Arabidopsis thaliana]
  misc_feature (1)..(335): NCBI GI NO: 15237130 NR Description: expressed protein [Arabidopsis thaliana]
MEAELVSFQRKVAERFIDLNASSCEDLLSLEWVGKLLDSFLSCQEEFRSIVINHRSMITKPPMDRLVSDYFERSVKALDVCNAIRDGVEQIRQWQKLIEIVICAFNNNGGGSSGKRPLGEGQFRRARKTLIELAIGMLDEKDSSSSSVSSQHRNRSFGRNKEQLHHRTIGHFRSLSWSVSRSWSASKQLQAIGNNLATPRASDITATNGLIVPVYTMTTVLLFVMWALVAAIPCQDRGLQVHFNVPRNYQWGGSLMSLHDRIIEESKKRERKNTCGLLKEIHQFEKTSRLMNELVDSVQFPLSEEKEMEVRERVEELGKLQEALKNGLDPFERKVREVFHRIVRSRTEGLDTVGKHHGSE

SEQ ID NO: 4654 - protein, 304 aa, Arabidopsis thaliana
  peptide (1)..(304): Ceres Seq. ID no. 13497391
  misc_feature (1)..(297): Pfam Name: DUF793 Pfam Description: Protein of unknown function
  misc_feature (1)..(304): NCBI GI NO: 18410617 NR Description: expressed protein [Arabidopsis thaliana]
  misc_feature (1)..(304): NCBI GI NO: 21536674 NR Description: unknown [Arabidopsis thaliana]
  misc_feature (1)..(297): NCBI GI NO: 18394649 NR Description: expressed protein [Arabidopsis thaliana]
  misc_feature (1)..(297): NCBI GI NO: 21593634 NR Description: unknown [Arabidopsis thaliana]
  misc_feature (1)..(304): NCBI GI NO: 15218428 NR Description: hypothetical protein [Arabidopsis thaliana]
  misc_feature (1)..(303): NCBI GI NO: 38345505 NR Description: OSJNBa0039K24.3
  misc_feature (1)..(303): NCBI GI NO: 5777630 NR Description: CAA303718.1 protein [Oryza sativa]
  misc_feature (1)..(297): NCBI GI NO: 15222577 NR Description: hypothetical protein [Arabidopsis thaliana]
  misc_feature (1)..(292): NCBI GI NO: 15236522 NR Description: expressed protein [Arabidopsis thaliana]
  misc_feature (1)..(279): NCBI GI NO: 15237130 NR Description: expressed protein [Arabidopsis thaliana]
MITKPPMDRLVSDYFERSVKALDVCNAIRDGVEQIRQWQKLIEIVICAFNNNGGGSSGKRPLGEGQFRRARKTLIELAIGMLDEKDSSSSSVSSQHRNRSFGRNKEQLHHRTIGHFRSLSWSVSRSWSASKQLQAIGNNLATPRASDITATNGLIVPVYTMTTVLLFVMWALVAAIPCQDRGLQVHFNVPRNYQWGGSLMSLHDRIIEESKKRERKNTCGLLKEIHQFEKTSRLMNELVDSVQFPLSEEKEMEVRERVEELGKLQEALKNGLDPFERKVREVFHRIVRSRTEGLDTVGKHHGSE

SEQ ID NO: 4655 - DNA, 787 bp, Arabidopsis thaliana
  misc_feature (1)..(787): Ceres Seq. ID no. 13580358
gggtttgtggatactctgaagcgcagcagcagccgtaagaaagaaaccgaggaagaacgatctcagtgagaggacgatcacttcgccgtcgcagtcatgggtcgaatgcatagtagaggtaagggtatctcggcatctgctttgccgtacaagcgttcatctccgagctggctcaagacaacccctcaagatgttgatgagtccatctgcaagtttgcgaagaagggtttgaccccatcgcagattggtgtcattcttcgtgactctcacggaattccacaggtgaaaagtgttactggaagcaagattctcagaattttgaaagctcatggtcttgcacctgagatccctgaggatctgtatcacttgatcaagaaagctgttgctatccgcaagcatcttgagaggaacaggaaagataaggattccaaattcaggctgattcttgtagagagcagaatccatcgtcttgctcgttactacaagaagaccaagaagctcccacccgtctggaagtacgagtctacaactgcaagcactcttgtggcttgagaagaatagagttgatcatgtccttcaagaaggaccatttcattgtctgcattgcaactcaaagctcttcttcttttgaacctatgtatctgttttcgctagttttgatgggttacaacttgctatgagattttgattttagggaacgaatttgtttatgcgaatctttccattatcgttacagcttatctttcaattaacgttaattatcgttctcagagaatttttacagact

SEQ ID NO: 4656 - protein, 151 aa, Arabidopsis thaliana
  peptide (1)..(151): Ceres Seq. ID no. 13580359
  misc_feature (1)..(151): NCBI GI NO: 18411716 NR Description: 40S ribosomal protein S13 (RPS13A)
  misc_feature (1)..(151): NCBI GI NO: 14190367 NR Description: AT3g60770/T4C21_180 [Arabidopsis thaliana]
  misc_feature (1)..(151): NCBI GI NO: 18411224 NR Description: 40S ribosomal protein S13 (RPS13B)
  misc_feature (1)..(151): NCBI GI NO: 11276609 NR Description: ribosomal protein S13-like - Arabidopsis thaliana
  misc_feature (1)..(151): NCBI GI NO: 8131699 NR Description: cytoplasmic ribosomal protein S13 [Panax ginseng]
  misc_feature (1)..(151): NCBI GI NO: 7440402 NR Description: ribosomal protein S13
  misc_feature (1)..(151): NCBI GI NO: 1173198 NR Description: 40S RIBOSOMAL PROTEIN S13
  misc_feature (1)..(151): NCBI GI NO: 464705 NR Description: 40S RIBOSOMAL PROTEIN S13
  misc_feature (1)..(151): NCBI GI NO: 3688434 NR Description: 40S ribosomal protein S13 [Lumbricus rubellus]
  misc_feature (1)..(151): NCBI GI NO: 17136832 NR Description: Ribosomal protein S13 CG13389-PA
MGRMHSRGKGISASALPYKRSSPSWLKTTPQDVDESICKFAKKGLTPSQIGVILRDSHGIPQVKSVTGSKILRILKAHGLAPEIPEDLYHLIKKAVAIRKHLERNRKDKDSKFRLILVESRIHRLARYYKKTKKLPPVWKYESTTASTLVA

SEQ ID NO: 4657 - protein, 148 aa, Arabidopsis thaliana
  peptide (1)..(148): Ceres Seq. ID no. 13580360
  misc_feature (1)..(148): NCBI GI NO: 18411716 NR Description: 40S ribosomal protein S13 (RPS13A)
  misc_feature (1)..(148): NCBI GI NO: 14190367 NR Description: AT3g60770/T4C21_180 [Arabidopsis thaliana]
  misc_feature (1)..(148): NCBI GI NO: 18411224 NR Description: 40S ribosomal protein S13 (RPS13B)
  misc_feature (1)..(148): NCBI GI NO: 11276609 NR Description: ribosomal protein S13-like - Arabidopsis thaliana
  misc_feature (1)..(148): NCBI GI NO: 8131699 NR Description: cytoplasmic ribosomal protein S13 [Panax ginseng]
  misc_feature (1)..(148): NCBI GI NO: 7440402 NR Description: ribosomal protein S13
  misc_feature (1)..(148): NCBI GI NO: 1173198 NR Description: 40S RIBOSOMAL PROTEIN S13
  misc_feature (1)..(148): NCBI GI NO: 464705 NR Description: 40S RIBOSOMAL PROTEIN S13
  misc_feature (1)..(148): NCBI GI NO: 3688434 NR Description: 40S ribosomal protein S13 [Lumbricus rubellus]
  misc_feature (1)..(148): NCBI GI NO: 17136832 NR Description: Ribosomal protein S13 CG13389-PA
MHSRGKGISASALPYKRSSPSWLKTTPQDVDESICKFAKKGLTPSQIGVILRDSHGIPQVKSVTGSKILRILKAHGLAPEIPEDLYHLIKKAVAIRKHLERNRKDKDSKFRLILVESRIHRLARYYKKTKKLPPVWKYESTTASTLVA

SEQ ID NO: 4658 - DNA, 1025 bp, Arabidopsis thaliana
  misc_feature (1)..(1025): Ceres Seq. ID no. 13497575
cacttggaaagaatccttcactcactttccctttaagaagcaagtctcctccacttgtacgataccaacatcatcagcatcacaaaaagtatcattatcatcttcatcgaattagatggcaccggtgaagaggagggtgttcaagacaaataatgaaatggcagtggagctggccaaatacacggctgatctttcctccaaattttgcaaagaaagaggagttttcaccgttgttctctccggcggcgacctcatagcctggctctggaaattgttagaagctccttatattgattcaattgagtggtctaagtggcacatcttttgggtcgacgagagggtttgtgcttgggatcatgcggatagcaactataaactcgcttacgatggttttctctccaaggttccagttccagctgaaaacatctacgctatcgataacggactcggggcagaaggcaacgccgagctagcagctgaaaggtacgaggagtgcctcaaacaaaaagtgaaccaaaacataatccgaacgtacaaatcttctggttttccacagttcgatcttcagcttctaggtatgggaccggacggtcacatggcgtctctattccctggacatgctcagatcaatgagaaggtgaaatgggtcacatctataaccgattcacctaagccaccgtcaaaaaggatcacattgactttaccggttatcaattgtgcttcctataatgttatggccgtatgtgataaagagcaggctgattcggttgcggctgctcttaatcataccaaagacttaccagctggtagactaaccgcggatgttgaagtggtttggttccttgaccaagctgctgcgtctaaactccctcatggctggtgctccatcctttgatttaaacgtttatgtttttgtctcactaagtcgtatggtttggtgttttgtaaaccgtgtattgcttaattacttgttatgttgtgtagcaacaccatattgtgatattgatcttggtgactttggtttt

SEQ ID NO: 4659 - protein, 259 aa, Arabidopsis thaliana
  peptide (1)..(259): Ceres Seq. ID no. 13497576
  misc_feature (19)..(254): Pfam Name: Pfam Description:  Glucosamine-6-phosphate isomerases/ 6-phosphogluconolactonase
  misc_feature (1)..(259): NCBI GI NO: 15229127 NR Description: 6-phosphogluconolactonase - like protein
  misc_feature (1)..(259): NCBI GI NO: 21536675 NR Description: 6-phosphogluconolactonase-like protein
  misc_feature (5)..(254): NCBI GI NO: 15238523 NR Description: 6-phosphogluconolactonase-related protein
  misc_feature (1)..(251): NCBI GI NO: 21537412 NR Description: 6-phosphogluconolactonase-like protein
  misc_feature (1)..(251): NCBI GI NO: 15238526 NR Description: 6-phosphogluconolactonase-related protein
  misc_feature (5)..(251): NCBI GI NO: 14009294 NR Description: putative 6-phosphogluconolactonase
  misc_feature (1)..(251): NCBI GI NO: 21554291 NR Description: 6-phosphogluconolactonase-like protein
  misc_feature (1)..(251): NCBI GI NO: 18420789 NR Description: 6-phosphogluconolactonase-related protein
  misc_feature (5)..(251): NCBI GI NO: 10177901 NR Description: 6-phosphogluconolactonase-like protein
  misc_feature (8)..(251): NCBI GI NO: 28140256 NR Description: putative 6-phosphogluconolactonase
MAPVKRRVFKTNNEMAVELAKYTADLSSKFCKERGVFTVVLSGGDLIAWLWKLLEAPYIDSIEWSKWHIFWVDERVCAWDHADSNYKLAYDGFLSKVPVPAENIYAIDNGLGAEGNAELAAERYEECLKQKVNQNIIRTYKSSGFPQFDLQLLGMGPDGHMASLFPGHAQINEKVKWVTSITDSPKPPSKRITLTLPVINCASYNVMAVCDKEQADSVAAALNHTKDLPAGRLTADVEVVWFLDQAAASKLPHGWCSIL

SEQ ID NO: 4660 - protein, 245 aa, Arabidopsis thaliana
  peptide (1)..(245): Ceres Seq. ID no. 13497577
  misc_feature (5)..(240): Pfam Name: Pfam Description:  Glucosamine-6-phosphate isomerases/ 6-phosphogluconolactonase
  misc_feature (1)..(245): NCBI GI NO: 15229127 NR Description: 6-phosphogluconolactonase - like protein
  misc_feature (1)..(245): NCBI GI NO: 21536675 NR Description: 6-phosphogluconolactonase-like protein
  misc_feature (1)..(240): NCBI GI NO: 15238523 NR Description: 6-phosphogluconolactonase-related protein
  misc_feature (1)..(237): NCBI GI NO: 21537412 NR Description: 6-phosphogluconolactonase-like protein
  misc_feature (1)..(237): NCBI GI NO: 15238526 NR Description: 6-phosphogluconolactonase-related protein
  misc_feature (1)..(237): NCBI GI NO: 14009294 NR Description: putative 6-phosphogluconolactonase
  misc_feature (1)..(237): NCBI GI NO: 21554291 NR Description: 6-phosphogluconolactonase-like protein
  misc_feature (1)..(237): NCBI GI NO: 18420789 NR Description: 6-phosphogluconolactonase-related protein
  misc_feature (1)..(237): NCBI GI NO: 10177901 NR Description: 6-phosphogluconolactonase-like protein
  misc_feature (1)..(237): NCBI GI NO: 28140256 NR Description: putative 6-phosphogluconolactonase
MAVELAKYTADLSSKFCKERGVFTVVLSGGDLIAWLWKLLEAPYIDSIEWSKWHIFWVDERVCAWDHADSNYKLAYDGFLSKVPVPAENIYAIDNGLGAEGNAELAAERYEECLKQKVNQNIIRTYKSSGFPQFDLQLLGMGPDGHMASLFPGHAQINEKVKWVTSITDSPKPPSKRITLTLPVINCASYNVMAVCDKEQADSVAAALNHTKDLPAGRLTADVEVVWFLDQAAASKLPHGWCSIL

SEQ ID NO: 4661 - DNA, 1648 bp, Arabidopsis thaliana
  misc_feature (1)..(1648): Ceres Seq. ID no. 12395358
aaagaaacaaaaggatttatttataaaaaaaaaaaagagatgaagacagctcaagggatgcaatagagccaagaggaggagaaagatgggatctgctccaaacttgtaccagtcgcatcaaagcaagttttggtgaagaagaagagacgaggtcttcctcttactgtggtggtgacattttctctaaaaagaaagtctccgatatgtcgcagagatggagtagaaagaagagtagacttccattagcgggtctcctctttattctcgttgtcacctttatgattctcttcaacgagcgtagcattcagcagattcatcaccacgccgcgagtcacactcaaaatctccgagaaccttccacgttcgatttcgtcaagcctaatgttcctcggattaactacttgggagctcatgaggttttgggtagattcagcaaatgcaactcgacgaaagagtacagtgggaagaaaatcggatgcgttgacccgtttgaagaccacccgggtcaagtaacaaaggaggagcagaaatgtgatgtcttttctgggaaatgggtctttgataattcatcatcataccctttacacaaggaatctcagtgtccttacatgtccgaccagttggcttgtcagaagcatggtaggaaggatttggagtatcagcattggagatggcaacctcatgcctgcaacttgaagagatggaatgtgatagaaatgtgggagaagctgagaggaaagagattgatgtttgttggagactcgttaaacagaagccaatggatttcaatggtttgtctcttacggtctgtcattccacgtgacaagcagtctatgtctcctaacgctcacctcaccattttcagggctgaggactacaatgccacagtggagtttctctgggcaccgttgctcgtggagtcgaattctgatgaccctgttaatcacagattgagcgagcggattatccgacccgattctgttcttaaacatgcatcaaagtggcaacatgctgatattctaatcttcaacacctacttatggtggagacaagactctgtcaagctccgatggagcagtgaagaaaaagggtcatgcgaggaggtgaagagcgccgagggaatggagatggcaatggatagttggggtgattgggttgctaacaatgtcgatccaaacaaaaagcgagttttcttcgttacaatgtctcctacacatcaatggagccgagaatggaacccgggaagcgaaggaaactgctacggggagaagaaaccaatagaggaagagagttattggggaagtgggtcggacattccgacaatgaggatggtgaagagagttttggagagattgggaccaaaggtctcagttataaacatcactcagttgtctgagtatcgaaaagatggtcatccatcggtgtaccggaaattctgggaacctctaaatgaagaccggttgaaaaacccggcatcgtattctgactgtactcattggtgtgtacctggagttcctgatgtctggaatcaattgcttttccattttttgtgaaaatgaaatgaatataaccttaccttgatggccgaatatcacccataaattatataacggggtgatttcagctagctataaggatccaaatttgt

SEQ ID NO: 4662 - protein, 449 aa, Arabidopsis thaliana
  peptide (1)..(449): Ceres Seq. ID no. 12395359
  misc_feature (280)..(449): Pfam Name: Pfam Description:  Arabidopsis proteins of unknown function
  misc_feature (1)..(449): NCBI GI NO: 21536676 NR Description: unknown [Arabidopsis thaliana]
  misc_feature (1)..(449): NCBI GI NO: 18413698 NR Description: putative protein; protein id: At5g01620
  misc_feature (1)..(449): NCBI GI NO: 11291876 NR Description: hypothetical protein F7A7
  misc_feature (108)..(449): NCBI GI NO: 7487161 NR Description: hypothetical protein At2g38320
  misc_feature (108)..(449): NCBI GI NO: 18404712 NR Description: expressed protein; protein id: At2g38320
  misc_feature (110)..(446): NCBI GI NO: 28876013 NR Description: unknown protein
  misc_feature (103)..(446): NCBI GI NO: 28393743 NR Description: unknown protein [Arabidopsis thaliana]
  misc_feature (103)..(446): NCBI GI NO: 15226647 NR Description: hypothetical protein; protein id: At2g40320.1
  misc_feature (103)..(446): NCBI GI NO: 15228429 NR Description: unknown protein; protein id: At3g11030.1
  misc_feature (103)..(449): NCBI GI NO: 15219382 NR Description: hypothetical protein; protein id: At1g73140.1
MSQRWSRKKSRLPLAGLLFILVVTFMILFNERSIQQIHHHAASHTQNLREPSTFDFVKPNVPRINYLGAHEVLGRFSKCNSTKEYSGKKIGCVDPFEDHPGQVTKEEQKCDVFSGKWVFDNSSSYPLHKESQCPYMSDQLACQKHGRKDLEYQHWRWQPHACNLKRWNVIEMWEKLRGKRLMFVGDSLNRSQWISMVCLLRSVIPRDKQSMSPNAHLTIFRAEDYNATVEFLWAPLLVESNSDDPVNHRLSERIIRPDSVLKHASKWQHADILIFNTYLWWRQDSVKLRWSSEEKGSCEEVKSAEGMEMAMDSWGDWVANNVDPNKKRVFFVTMSPTHQWSREWNPGSEGNCYGEKKPIEEESYWGSGSDIPTMRMVKRVLERLGPKVSVINITQLSEYRKDGHPSVYRKFWEPLNEDRLKNPASYSDCTHWCVPGVPDVWNQLLFHFL

SEQ ID NO: 4663 - protein, 424 aa, Arabidopsis thaliana
  peptide (1)..(424): Ceres Seq. ID no. 12395360
  misc_feature (255)..(424): Pfam Name: Pfam Description:  Arabidopsis proteins of unknown function
  misc_feature (1)..(424): NCBI GI NO: 21536676 NR Description: unknown [Arabidopsis thaliana]
  misc_feature (1)..(424): NCBI GI NO: 18413698 NR Description: putative protein; protein id: At5g01620
  misc_feature (1)..(424): NCBI GI NO: 11291876 NR Description: hypothetical protein F7A7
  misc_feature (83)..(424): NCBI GI NO: 7487161 NR Description: hypothetical protein At2g38320
  misc_feature (83)..(424): NCBI GI NO: 18404712 NR Description: expressed protein; protein id: At2g38320
  misc_feature (85)..(421): NCBI GI NO: 28876013 NR Description: unknown protein
  misc_feature (78)..(421): NCBI GI NO: 28393743 NR Description: unknown protein [Arabidopsis thaliana]
  misc_feature (78)..(421): NCBI GI NO: 15226647 NR Description: hypothetical protein; protein id: At2g40320.1
  misc_feature (78)..(421): NCBI GI NO: 15228429 NR Description: unknown protein; protein id: At3g11030.1
  misc_feature (78)..(424): NCBI GI NO: 15219382 NR Description: hypothetical protein; protein id: At1g73140.1
MILFNERSIQQIHHHAASHTQNLREPSTFDFVKPNVPRINYLGAHEVLGRFSKCNSTKEYSGKKIGCVDPFEDHPGQVTKEEQKCDVFSGKWVFDNSSSYPLHKESQCPYMSDQLACQKHGRKDLEYQHWRWQPHACNLKRWNVIEMWEKLRGKRLMFVGDSLNRSQWISMVCLLRSVIPRDKQSMSPNAHLTIFRAEDYNATVEFLWAPLLVESNSDDPVNHRLSERIIRPDSVLKHASKWQHADILIFNTYLWWRQDSVKLRWSSEEKGSCEEVKSAEGMEMAMDSWGDWVANNVDPNKKRVFFVTMSPTHQWSREWNPGSEGNCYGEKKPIEEESYWGSGSDIPTMRMVKRVLERLGPKVSVINITQLSEYRKDGHPSVYRKFWEPLNEDRLKNPASYSDCTHWCVPGVPDVWNQLLFHFL

SEQ ID NO: 4664 - protein, 314 aa, Arabidopsis thaliana
  peptide (1)..(314): Ceres Seq. ID no. 12395361
  misc_feature (145)..(314): Pfam Name: Pfam Description:  Arabidopsis proteins of unknown function
  misc_feature (1)..(314): NCBI GI NO: 21536676 NR Description: unknown [Arabidopsis thaliana]
  misc_feature (1)..(314): NCBI GI NO: 18413698 NR Description: putative protein; protein id: At5g01620
  misc_feature (1)..(314): NCBI GI NO: 11291876 NR Description: hypothetical protein F7A7
  misc_feature (1)..(314): NCBI GI NO: 7487161 NR Description: hypothetical protein At2g38320
  misc_feature (1)..(314): NCBI GI NO: 18404712 NR Description: expressed protein; protein id: At2g38320
  misc_feature (1)..(311): NCBI GI NO: 28876013 NR Description: unknown protein
  misc_feature (1)..(311): NCBI GI NO: 28393743 NR Description: unknown protein [Arabidopsis thaliana]
  misc_feature (1)..(311): NCBI GI NO: 15226647 NR Description: hypothetical protein; protein id: At2g40320.1
  misc_feature (1)..(311): NCBI GI NO: 15228429 NR Description: unknown protein; protein id: At3g11030.1
  misc_feature (1)..(314): NCBI GI NO: 15219382 NR Description: hypothetical protein; protein id: At1g73140.1
MSDQLACQKHGRKDLEYQHWRWQPHACNLKRWNVIEMWEKLRGKRLMFVGDSLNRSQWISMVCLLRSVIPRDKQSMSPNAHLTIFRAEDYNATVEFLWAPLLVESNSDDPVNHRLSERIIRPDSVLKHASKWQHADILIFNTYLWWRQDSVKLRWSSEEKGSCEEVKSAEGMEMAMDSWGDWVANNVDPNKKRVFFVTMSPTHQWSREWNPGSEGNCYGEKKPIEEESYWGSGSDIPTMRMVKRVLERLGPKVSVINITQLSEYRKDGHPSVYRKFWEPLNEDRLKNPASYSDCTHWCVPGVPDVWNQLLFHFL

SEQ ID NO: 4665 - DNA, 1117 bp, Arabidopsis thaliana
  misc_feature (1)..(1117): Ceres Seq. ID no. 12325040
actggatttgatgatgttgtagatgatgcaatggcgatattcgtagctttaaattcacctaaagttgatgtcattggcctcactactatctttggaaacgtgtataccactctcgccactcgaaacgccttgcatttgttggaggttgcgggtaggaccgatattccggtggctgaaggaacacataaaaccttcttgaacgatacgaagcttcgaatagctgactttgttcatggaaaagatgggcttagcaaccaaaacttccctccacctaaaggaaaaccaattgaaaagtctggacctgagtttttagttgaacaagcaaagctttaccctggtgaaatcacggttgttgctttgggaccactaacaaatctcgcgttggctgttcagcttgatccagagttttcgaaaaatgtcggacaaattgttcttcttggtggagcatttgcagtaaacggaaatgtaaatccagcttcggaagctaatatttttggcgatcccgaagctgcagatattgtgttcacatgtggggccgatataattgctgtgggaatcaatgtgacccatcaagttattatgacagctgatgacaaggacaaactagcatcatcgaaggggaaattagctcaatatctctgtaaaatccttgatgtgtactatgattatcatctcacggcttacgaaatcaaaggtgtgtaccttcatgatcctgcgacgatccttgcggctttccttccttctctattcacttatacagaaggagttgctagagtgcagacaagtggtatcactaggggactcactttactgtacaacaatcttaagaggtttgaggaagcgaacgagtggtcagacaaaccaacggtaaaagtggcagtgacggttgatgctcctgcagtcgtgaagctcataatggataggcttatggagtcttaaaccatcttgggtcgttaattagttatctctttctctttgatgtttcactattgcgagccatttctcttgttaaaaataaggctcctcttgctgcattatttatttattgtttaatctttattaaaacgaatattattatgttaccaattaccaataataaagttaagatttttcctcc

SEQ ID NO: 4666 - protein, 312 aa, Arabidopsis thaliana
  peptide (1)..(312): Ceres Seq. ID no. 12325041
  misc_feature (1)..(195): NCBI GI NO: 25321071 NR Description: hypothetical protein
  misc_feature (196)..(312): NCBI GI NO: 25321071 NR Description: hypothetical protein
  misc_feature (4)..(312): NCBI GI NO: 18390550 NR Description: expressed protein; protein id: At1g05620
  misc_feature (4)..(309): NCBI GI NO: 30089728 NR Description: putative inosine-uridine preferring nucleoside hydrolase
  misc_feature (4)..(311): NCBI GI NO: 18404099 NR Description: expressed protein; protein id: At2g36310
  misc_feature (11)..(234): NCBI GI NO: 25321061 NR Description: hypothetical protein At2g36310
  misc_feature (230)..(278): NCBI GI NO: 25321061 NR Description: hypothetical protein At2g36310
  misc_feature (4)..(305): NCBI GI NO: 15888904 NR Description: AGR_C_2923p [Agrobacterium tumefaciens]
  misc_feature (4)..(305): NCBI GI NO: 17935486 NR Description: inosine-uridine preferring nucleoside hydrolase
  misc_feature (4)..(304): NCBI GI NO: 22984963 NR Description: hypothetical protein [Burkholderia fungorum]
TGFDDVVDDAMAIFVALNSPKVDVIGLTTIFGNVYTTLATRNALHLLEVAGRTDIPVAEGTHKTFLNDTKLRIADFVHGKDGLSNQNFPPPKGKPIEKSGPEFLVEQAKLYPGEITVVALGPLTNLALAVQLDPEFSKNVGQIVLLGGAFAVNGNVNPASEANIFGDPEAADIVFTCGADIIAVGINVTHQVIMTADDKDKLASSKGKLAQYLCKILDVYYDYHLTAYEIKGVYLHDPATILAAFLPSLFTYTEGVARVQTSGITRGLTLLYNNLKRFEEANEWSDKPTVKVAVTVDAPAVVKLIMDRLMES

SEQ ID NO: 4667 - protein, 302 aa, Arabidopsis thaliana
  peptide (1)..(302): Ceres Seq. ID no. 12325042
  misc_feature (1)..(185): NCBI GI NO: 25321071 NR Description: hypothetical protein
  misc_feature (186)..(302): NCBI GI NO: 25321071 NR Description: hypothetical protein
  misc_feature (1)..(302): NCBI GI NO: 18390550 NR Description: expressed protein; protein id: At1g05620
  misc_feature (1)..(299): NCBI GI NO: 30089728 NR Description: putative inosine-uridine preferring nucleoside hydrolase
  misc_feature (1)..(301): NCBI GI NO: 18404099 NR Description: expressed protein; protein id: At2g36310
  misc_feature (1)..(224): NCBI GI NO: 25321061 NR Description: hypothetical protein At2g36310
  misc_feature (220)..(268): NCBI GI NO: 25321061 NR Description: hypothetical protein At2g36310
  misc_feature (1)..(295): NCBI GI NO: 15888904 NR Description: AGR_C_2923p [Agrobacterium tumefaciens]
  misc_feature (1)..(295): NCBI GI NO: 17935486 NR Description: inosine-uridine preferring nucleoside hydrolase
  misc_feature (1)..(294): NCBI GI NO: 22984963 NR Description: hypothetical protein [Burkholderia fungorum]
MAIFVALNSPKVDVIGLTTIFGNVYTTLATRNALHLLEVAGRTDIPVAEGTHKTFLNDTKLRIADFVHGKDGLSNQNFPPPKGKPIEKSGPEFLVEQAKLYPGEITVVALGPLTNLALAVQLDPEFSKNVGQIVLLGGAFAVNGNVNPASEANIFGDPEAADIVFTCGADIIAVGINVTHQVIMTADDKDKLASSKGKLAQYLCKILDVYYDYHLTAYEIKGVYLHDPATILAAFLPSLFTYTEGVARVQTSGITRGLTLLYNNLKRFEEANEWSDKPTVKVAVTVDAPAVVKLIMDRLMES

SEQ ID NO: 4668 - DNA, 1707 bp, Arabidopsis thaliana
  misc_feature (1)..(1707): Ceres Seq. ID no. 13488719
caaattccatcatcgtcgccgcaacaatatcttttgctttctctctcattcttcaccagtaacaagcccatctctcgattcttcactctcaaggaaggagacgttttgaaaatcagaaatggtgaagatatgctgcataggagctggttatgtgggtggtccaaccatggcggtgatggctcttaagtgtcctgagattgaagtagtcgttgtggatatctctgaaccaaggatcaatgcttggaacagtgataggcttcctatttacgagccgggattggaagatgtggtgaaacaatgcagagggaaaaacctcttctttagcacagacgtggagaaacatgtatttgagagtgatattgtatttgtctcagttaacactccaaccaaaacacaaggtcttggtgctggcaaagctgctgatcttacttactgggagagtgctgctcggatgatcgctgatgtctccaaatctagcaaaatcgttgttgagaaatccacggttcctgtgaggacagcagaggctattgaaaagatactgacacataacagcaaaggcatagagtttcagattctctctaaccctgaatttcttgctgagggtactgcaattaaggatctttataacccagaccgtgtgttgattggtggtagggatactgcagcagggcaaaaggctattaaagctttaagagatgtttatgctcattgggttccagtggaacaaatcatttgcacgaacctgtggtccgctgagctctctaagcttgcagcaaatgcattcttagctcagaggatatcatctgtcaatgccatgtcagctctatgtgaggcaactggcgctgatgttacacaagttgcgcatgccgtgggtacagatactagaattggtccaaagttcttgaatgctagtgttggttttggtggatcatgtttccaaaaggacatcctaaatcttatctatatttgtgaatgcaacggcttgcccgaagcagctaattactggaaacaagtcgtaaaggtgaacgactatcagaaaatacggtttgcaaaccgggttgtttcttcaatgtttaacacagtctcgggcaagaaaatcgcgatcctcggttttgccttcaagaaggacacaggtgacacgagagagactccagcgattgatgtttgtaacagattagttgcagacaaggccaagctgagcatatacgacccacaagttcttgaagaacagatcagaagagatctttccatggctaggtttgactgggaccaccctgttcctcttcagcagattaaagctgaaggtatctcagagcaagtgaatgtcgtctcagatgcttacgaggcaactaaagatgcgcacggcctatgtgtcttaaccgaatgggatgagtttaaatccttggacttcaagaaaatctttgacaatatgcagaaaccagcttttgtgttcgatggtaggaatgttgttgatgcagtgaagctgcgtgagatcggtttcatcgtctactccattggtaaaccgcttgattcatggctcaaggatatgcctgctgtggcatgaaggtgccaacttcaaccaaactatatgtcttttctaaaatatagtatcttaagattccttataaattctgttgtaaccaagctgaaacaatgatatgtatttgctgaatctgccttagctggaatagtatatgaatttctttc

SEQ ID NO: 4669 - protein, 481 aa, Arabidopsis thaliana
  peptide (1)..(481): Ceres Seq. ID no. 13488720
  misc_feature (2)..(200): Pfam Name: Pfam Description:  UDP-glucose/GDP-mannose dehydrogenase family
  misc_feature (1)..(481): NCBI GI NO: 15222735 NR Description: UDP-glucose dehydrogenase -related
  misc_feature (1)..(481): NCBI GI NO: 21536677 NR Description: UDP-glucose dehydrogenase, putative
  misc_feature (1)..(481): NCBI GI NO: 6136119 NR Description: UDP-GLUCOSE 6-DEHYDROGENASE
  misc_feature (1)..(481): NCBI GI NO: 21618158 NR Description: UDP-glucose dehydrogenase, putative
  misc_feature (1)..(481): NCBI GI NO: 15228687 NR Description: UDP-glucose dehydrogenase -related
  misc_feature (1)..(481): NCBI GI NO: 13236672 NR Description: putative UDP-glucose dehydrogenase [Oryza sativa]
  misc_feature (1)..(481): NCBI GI NO: 15983404 NR Description: AT3g29360/MUO10_6 [Arabidopsis thaliana]
  misc_feature (1)..(481): NCBI GI NO: 40317278 NR Description: UDP-glucose dehydrogenase [Cinnamomum osmophloeum]
  misc_feature (1)..(481): NCBI GI NO: 6164591 NR Description: UDP-glucose dehydrogenase
  misc_feature (1)..(481): NCBI GI NO: 39939262 NR Description: UDP-glucose dehydrogenase [Populus tomentosa]
MVKICCIGAGYVGGPTMAVMALKCPEIEVVVVDISEPRINAWNSDRLPIYEPGLEDVVKQCRGKNLFFSTDVEKHVFESDIVFVSVNTPTKTQGLGAGKAADLTYWESAARMIADVSKSSKIVVEKSTVPVRTAEAIEKILTHNSKGIEFQILSNPEFLAEGTAIKDLYNPDRVLIGGRDTAAGQKAIKALRDVYAHWVPVEQIICTNLWSAELSKLAANAFLAQRISSVNAMSALCEATGADVTQVAHAVGTDTRIGPKFLNASVGFGGSCFQKDILNLIYICECNGLPEAANYWKQVVKVNDYQKIRFANRVVSSMFNTVSGKKIAILGFAFKKDTGDTRETPAIDVCNRLVADKAKLSIYDPQVLEEQIRRDLSMARFDWDHPVPLQQIKAEGISEQVNVVSDAYEATKDAHGLCVLTEWDEFKSLDFKKIFDNMQKPAFVFDGRNVVDAVKLREIGFIVYSIGKPLDSWLKDMPAVA

SEQ ID NO: 4670 - protein, 465 aa, Arabidopsis thaliana
  peptide (1)..(465): Ceres Seq. ID no. 13488721
  misc_feature (1)..(184): Pfam Name: Pfam Description:  UDP-glucose/GDP-mannose dehydrogenase family
  misc_feature (1)..(465): NCBI GI NO: 15222735 NR Description: UDP-glucose dehydrogenase -related
  misc_feature (1)..(465): NCBI GI NO: 21536677 NR Description: UDP-glucose dehydrogenase, putative
  misc_feature (1)..(465): NCBI GI NO: 6136119 NR Description: UDP-GLUCOSE 6-DEHYDROGENASE
  misc_feature (1)..(465): NCBI GI NO: 21618158 NR Description: UDP-glucose dehydrogenase, putative
  misc_feature (1)..(465): NCBI GI NO: 15228687 NR Description: UDP-glucose dehydrogenase -related
  misc_feature (1)..(465): NCBI GI NO: 13236672 NR Description: putative UDP-glucose dehydrogenase [Oryza sativa]
  misc_feature (1)..(465): NCBI GI NO: 15983404 NR Description: AT3g29360/MUO10_6 [Arabidopsis thaliana]
  misc_feature (1)..(465): NCBI GI NO: 40317278 NR Description: UDP-glucose dehydrogenase [Cinnamomum osmophloeum]
  misc_feature (1)..(465): NCBI GI NO: 6164591 NR Description: UDP-glucose dehydrogenase
  misc_feature (1)..(465): NCBI GI NO: 39939262 NR Description: UDP-glucose dehydrogenase [Populus tomentosa]
MAVMALKCPEIEVVVVDISEPRINAWNSDRLPIYEPGLEDVVKQCRGKNLFFSTDVEKHVFESDIVFVSVNTPTKTQGLGAGKAADLTYWESAARMIADVSKSSKIVVEKSTVPVRTAEAIEKILTHNSKGIEFQILSNPEFLAEGTAIKDLYNPDRVLIGGRDTAAGQKAIKALRDVYAHWVPVEQIICTNLWSAELSKLAANAFLAQRISSVNAMSALCEATGADVTQVAHAVGTDTRIGPKFLNASVGFGGSCFQKDILNLIYICECNGLPEAANYWKQVVKVNDYQKIRFANRVVSSMFNTVSGKKIAILGFAFKKDTGDTRETPAIDVCNRLVADKAKLSIYDPQVLEEQIRRDLSMARFDWDHPVPLQQIKAEGISEQVNVVSDAYEATKDAHGLCVLTEWDEFKSLDFKKIFDNMQKPAFVFDGRNVVDAVKLREIGFIVYSIGKPLDSWLKDMPAVA

SEQ ID NO: 4671 - protein, 462 aa, Arabidopsis thaliana
  peptide (1)..(462): Ceres Seq. ID no. 13488722
  misc_feature (1)..(181): Pfam Name: Pfam Description:  UDP-glucose/GDP-mannose dehydrogenase family
  misc_feature (1)..(462): NCBI GI NO: 15222735 NR Description: UDP-glucose dehydrogenase -related
  misc_feature (1)..(462): NCBI GI NO: 21536677 NR Description: UDP-glucose dehydrogenase, putative
  misc_feature (1)..(462): NCBI GI NO: 6136119 NR Description: UDP-GLUCOSE 6-DEHYDROGENASE
  misc_feature (1)..(462): NCBI GI NO: 21618158 NR Description: UDP-glucose dehydrogenase, putative
  misc_feature (1)..(462): NCBI GI NO: 15228687 NR Description: UDP-glucose dehydrogenase -related
  misc_feature (1)..(462): NCBI GI NO: 13236672 NR Description: putative UDP-glucose dehydrogenase [Oryza sativa]
  misc_feature (1)..(462): NCBI GI NO: 15983404 NR Description: AT3g29360/MUO10_6 [Arabidopsis thaliana]
  misc_feature (1)..(462): NCBI GI NO: 40317278 NR Description: UDP-glucose dehydrogenase [Cinnamomum osmophloeum]
  misc_feature (1)..(462): NCBI GI NO: 6164591 NR Description: UDP-glucose dehydrogenase
  misc_feature (1)..(462): NCBI GI NO: 39939262 NR Description: UDP-glucose dehydrogenase [Populus tomentosa]
MALKCPEIEVVVVDISEPRINAWNSDRLPIYEPGLEDVVKQCRGKNLFFSTDVEKHVFESDIVFVSVNTPTKTQGLGAGKAADLTYWESAARMIADVSKSSKIVVEKSTVPVRTAEAIEKILTHNSKGIEFQILSNPEFLAEGTAIKDLYNPDRVLIGGRDTAAGQKAIKALRDVYAHWVPVEQIICTNLWSAELSKLAANAFLAQRISSVNAMSALCEATGADVTQVAHAVGTDTRIGPKFLNASVGFGGSCFQKDILNLIYICECNGLPEAANYWKQVVKVNDYQKIRFANRVVSSMFNTVSGKKIAILGFAFKKDTGDTRETPAIDVCNRLVADKAKLSIYDPQVLEEQIRRDLSMARFDWDHPVPLQQIKAEGISEQVNVVSDAYEATKDAHGLCVLTEWDEFKSLDFKKIFDNMQKPAFVFDGRNVVDAVKLREIGFIVYSIGKPLDSWLKDMPAVA

SEQ ID NO: 4672 - DNA, 1628 bp, Arabidopsis thaliana
  misc_feature (1)..(1628): Ceres Seq. ID no. 12705166
atctgtgctcagctactcccaaaagctctctcatctctctcgtccgtctcctctttctccatagtttaaagcttcgtcgttccgtcaccagaatttcaactactttgagttgattctcgttggatttctcacgatgggagacagcgggaagcttgaggcaacgatagatcggcttctgaatgaagagaagcagatgagactcgccgaaaacgtagccggtacaaggaaagccgccactgagattcttcagctttgtttcgatgctaaggattggaaacttctgaatgagcagattctcaatctctctaagaaacgtggtcagctcaaacaggctgtgcaatccatggtgcagcaagcaatgcagtatatcgatcagacaccagacattgaaactcggatagagcttatcaagacgctgaacaatgtatctgctggaaagatatatgttgaaatcgagagggcacgtctcaccaagaaacttgctaagattaaggaagaacagggtcagatagctgaagctgcagatcttatgcaagaagttgctgtggagacatttggtgctatggcaaaaactgagaaaattgcatttatccttgaacaagttcgcttgtgcttggatcgtcaagattttgttcgtgcacaaatcttatctaggaagatcaatcctagagtttttgacgcagatacaaaaaaagataagaagaaacctaaggaaggtgataacatggtagaagaggctcctgctgatataccaacccttttggagcttaagcgaatttactacgagcttatgattcggtactattctcataacaatgagtacattgaaatctgccgtagctacaaggcgatatatgatatcccttcagtaaaagaaactccggagcagtggattccggtcctgaggaagatctgctggttcttggtcttggcacctcatgacccaatgcaatcaagcttgctcaatgcaactctggaagacaagaatttatcagaaatccctgatttcaagatgcttctaaaacaggtagtgacaatggaggttattcaatggacatctctgtggaacaaatacaaggatgagttcgagaaagagaaaagcatgattggaggttctttgggtgacaaagctggtgaagatctgaaactgagaatcatcgaacataatatcctcgttgtctcaaagtactacgcaaggataaccttaaagagacttgccgagcttttatgcctgagcatggaggaggcggagaagcatctatcggagatggtagtgtcaaaagcactgattgcaaaaatagacagaccatctggaattgtgtgcttccagatcgcaaaggacagcaacgagattctaaactcgtgggcagggaatttggagaagcttctagatcttgtggaaaagagttgccaccaaattcacaaggaaaccatggttcacaaagccgctctcagaccttgaaaacatgcggtcttcttcatgaaaacttttcaggatcttcttcgttgagttattagcatctttatgtggtaaaaactcgaatcagtgtttccttttaaaaattgtactatggatctgtacactaacgaagtgttttgccacttattggttatttcaagtgttggtg

SEQ ID NO: 4673 - protein, 442 aa, Arabidopsis thaliana
  peptide (1)..(442): Ceres Seq. ID no. 12705167
  misc_feature (290)..(400): Pfam Name: Pfam Description:  PCI domain
  misc_feature (1)..(442): NCBI GI NO: 15242545 NR Description: 26S proteasome regulatory subunit
  misc_feature (1)..(441): NCBI GI NO: 10177207 NR Description: proteasome regulatory subunit-like
  misc_feature (1)..(441): NCBI GI NO: 30698065 NR Description: 26S proteasome regulatory subunit (RPN5), putative
  misc_feature (2)..(441): NCBI GI NO: 27573351 NR Description: putative proteasome regulatory non-ATPase subunit
  misc_feature (175)..(441): NCBI GI NO: 17298157 NR Description: 26S proteasome regulatory particle non-ATPase subunit5
  misc_feature (1)..(436): NCBI GI NO: 4506221 NR Description: proteasome 26S non-ATPase subunit 12 isoform 1
  misc_feature (1)..(436): NCBI GI NO: 27503944 NR Description: Similar to proteasome
  misc_feature (1)..(436): NCBI GI NO: 13385384 NR Description: proteasome 26S non-ATPase subunit 12
  misc_feature (1)..(436): NCBI GI NO: 27924244 NR Description: Similar to proteasome
  misc_feature (7)..(442): NCBI GI NO: 32422811 NR Description: hypothetical protein [Neurospora crassa]
MGDSGKLEATIDRLLNEEKQMRLAENVAGTRKAATEILQLCFDAKDWKLLNEQILNLSKKRGQLKQAVQSMVQQAMQYIDQTPDIETRIELIKTLNNVSAGKIYVEIERARLTKKLAKIKEEQGQIAEAADLMQEVAVETFGAMAKTEKIAFILEQVRLCLDRQDFVRAQILSRKINPRVFDADTKKDKKKPKEGDNMVEEAPADIPTLLELKRIYYELMIRYYSHNNEYIEICRSYKAIYDIPSVKETPEQWIPVLRKICWFLVLAPHDPMQSSLLNATLEDKNLSEIPDFKMLLKQVVTMEVIQWTSLWNKYKDEFEKEKSMIGGSLGDKAGEDLKLRIIEHNILVVSKYYARITLKRLAELLCLSMEEAEKHLSEMVVSKALIAKIDRPSGIVCFQIAKDSNEILNSWAGNLEKLLDLVEKSCHQIHKETMVHKAALRP

SEQ ID NO: 4674 - protein, 422 aa, Arabidopsis thaliana
  peptide (1)..(422): Ceres Seq. ID no. 12705168
  misc_feature (270)..(380): Pfam Name: Pfam Description:  PCI domain
  misc_feature (1)..(422): NCBI GI NO: 15242545 NR Description: 26S proteasome regulatory subunit
  misc_feature (1)..(421): NCBI GI NO: 10177207 NR Description: proteasome regulatory subunit-like
  misc_feature (1)..(421): NCBI GI NO: 30698065 NR Description: 26S proteasome regulatory subunit (RPN5), putative
  misc_feature (1)..(421): NCBI GI NO: 27573351 NR Description: putative proteasome regulatory non-ATPase subunit
  misc_feature (155)..(421): NCBI GI NO: 17298157 NR Description: 26S proteasome regulatory particle non-ATPase subunit5
  misc_feature (1)..(416): NCBI GI NO: 4506221 NR Description: proteasome 26S non-ATPase subunit 12 isoform 1
  misc_feature (1)..(416): NCBI GI NO: 27503944 NR Description: Similar to proteasome
  misc_feature (1)..(416): NCBI GI NO: 13385384 NR Description: proteasome 26S non-ATPase subunit 12
  misc_feature (1)..(416): NCBI GI NO: 27924244 NR Description: Similar to proteasome
  misc_feature (1)..(422): NCBI GI NO: 32422811 NR Description: hypothetical protein [Neurospora crassa]
MRLAENVAGTRKAATEILQLCFDAKDWKLLNEQILNLSKKRGQLKQAVQSMVQQAMQYIDQTPDIETRIELIKTLNNVSAGKIYVEIERARLTKKLAKIKEEQGQIAEAADLMQEVAVETFGAMAKTEKIAFILEQVRLCLDRQDFVRAQILSRKINPRVFDADTKKDKKKPKEGDNMVEEAPADIPTLLELKRIYYELMIRYYSHNNEYIEICRSYKAIYDIPSVKETPEQWIPVLRKICWFLVLAPHDPMQSSLLNATLEDKNLSEIPDFKMLLKQVVTMEVIQWTSLWNKYKDEFEKEKSMIGGSLGDKAGEDLKLRIIEHNILVVSKYYARITLKRLAELLCLSMEEAEKHLSEMVVSKALIAKIDRPSGIVCFQIAKDSNEILNSWAGNLEKLLDLVEKSCHQIHKETMVHKAALRP

SEQ ID NO: 4675 - protein, 372 aa, Arabidopsis thaliana
  peptide (1)..(372): Ceres Seq. ID no. 12705169
  misc_feature (220)..(330): Pfam Name: Pfam Description:  PCI domain
  misc_feature (1)..(372): NCBI GI NO: 15242545 NR Description: 26S proteasome regulatory subunit
  misc_feature (1)..(371): NCBI GI NO: 10177207 NR Description: proteasome regulatory subunit-like
  misc_feature (1)..(371): NCBI GI NO: 30698065 NR Description: 26S proteasome regulatory subunit (RPN5), putative
  misc_feature (1)..(371): NCBI GI NO: 27573351 NR Description: putative proteasome regulatory non-ATPase subunit
  misc_feature (105)..(371): NCBI GI NO: 17298157 NR Description: 26S proteasome regulatory particle non-ATPase subunit5
  misc_feature (1)..(366): NCBI GI NO: 4506221 NR Description: proteasome 26S non-ATPase subunit 12 isoform 1
  misc_feature (1)..(366): NCBI GI NO: 27503944 NR Description: Similar to proteasome
  misc_feature (1)..(366): NCBI GI NO: 13385384 NR Description: proteasome 26S non-ATPase subunit 12
  misc_feature (1)..(366): NCBI GI NO: 27924244 NR Description: Similar to proteasome
  misc_feature (1)..(372): NCBI GI NO: 32422811 NR Description: hypothetical protein [Neurospora crassa]
MVQQAMQYIDQTPDIETRIELIKTLNNVSAGKIYVEIERARLTKKLAKIKEEQGQIAEAADLMQEVAVETFGAMAKTEKIAFILEQVRLCLDRQDFVRAQILSRKINPRVFDADTKKDKKKPKEGDNMVEEAPADIPTLLELKRIYYELMIRYYSHNNEYIEICRSYKAIYDIPSVKETPEQWIPVLRKICWFLVLAPHDPMQSSLLNATLEDKNLSEIPDFKMLLKQVVTMEVIQWTSLWNKYKDEFEKEKSMIGGSLGDKAGEDLKLRIIEHNILVVSKYYARITLKRLAELLCLSMEEAEKHLSEMVVSKALIAKIDRPSGIVCFQIAKDSNEILNSWAGNLEKLLDLVEKSCHQIHKETMVHKAALRP

SEQ ID NO: 4676 - DNA, 1160 bp, Arabidopsis thaliana
  misc_feature (1)..(1160): Ceres Seq. ID no. 12328218
aaaaaaatcaaaaacagaaagaagcagagagacgatggcgagcaaagacgaattttcccgagatctcactgcgattcgctgcgccagagctacgatgcttctctattcacttgcatcatctcgcacaatcgattccgccggcgtgaagcaggagaaaggagaaacgcgaagagagatagaggatctgaggagaaagcttaccatggtgaagataaagatgaatcggattaagctttgcggattgatggaactgcttcttctcgtctttttgaacattcttagctccacttgagagactaaagcttgaatatacagttcgtggtgaacagaggaacttgttggtggttgctaagtcaattgcaactacacagggcttgactggattctggaaaggtaatttgctcaatgttcttcgaactgctcctttcaaagccgtcaatttttgtgcctatgatacctatagaaagcaattgcttaaaatcgctgggaatcaagaagcaaccaactttgaaagattcgttgctggtgccgctgctgggattactgctactgtgctctgcttgccactcgacactatacgaaccaaactagtggctcggggtggagaagccttggggggaatcggaggagcttttcggtatatgatccaaacagaagggttgttctccctctacaagggtctagtgccgtccatagcaagcatggctctgtccggtgcagttttctatggcgtttacgacatccttaagtcatcgtttctgcatacaccagaaggccggaaaagactgatagacatgaagcagcagggacaagaactcaatgctctagacaggctcgagttaggacccatcagaactctcatgtacggtgctatagcaggtgcttgtactgaagtagccacttatcctttcgaagtagtgagacgacagcttcagatgcagatgggtaaaaacaagctcaatgctttagctatgggattcaatatcattgaaagaggagggatcccagctttatacgctggacttttacctagcttgctccaggtattgccttcggcttcaataagttactttgtctacgagtgtatgaagatagtacttaaagtagaataacaagattatgatattggaagagtactagagcttaaagaatcatccatt

SEQ ID NO: 4677 - protein, 156 aa, Arabidopsis thaliana
  peptide (1)..(156): Ceres Seq. ID no. 12328219
  misc_feature (1)..(156): NCBI GI NO: 25406546 NR Description: hypothetical protein T11I11.12
  misc_feature (1)..(156): NCBI GI NO: 15238315 NR Description: mitochondrial carrier protein family
  misc_feature (1)..(155): NCBI GI NO: 34860155 NR Description: similar to calcium-binding transporter
  misc_feature (1)..(156): NCBI GI NO: 231654 NR Description: Brittle-1 protein, chloroplast precursor
  misc_feature (1)..(154): NCBI GI NO: 15228163 NR Description: mitochondrial carrier protein family
  misc_feature (1)..(40): NCBI GI NO: 33598954 NR Description: calcium-binding transporter [Homo sapiens]
  misc_feature (94)..(155): NCBI GI NO: 33598954 NR Description: calcium-binding transporter [Homo sapiens]
  misc_feature (1)..(154): NCBI GI NO: 21554682 NR Description: Ca-dependent solute carrier-like protein
  misc_feature (1)..(156): NCBI GI NO: 15241360 NR Description: calcium-binding transporter-like protein
  misc_feature (1)..(156): NCBI GI NO: 4138581 NR Description: mitochondrial energy transfer protein
MIQTEGLFSLYKGLVPSIASMALSGAVFYGVYDILKSSFLHTPEGRKRLIDMKQQGQELNALDRLELGPIRTLMYGAIAGACTEVATYPFEVVRRQLQMQMGKNKLNALAMGFNIIERGGIPALYAGLLPSLLQVLPSASISYFVYECMKIVLKVE

SEQ ID NO: 4678 - protein, 136 aa, Arabidopsis thaliana
  peptide (1)..(136): Ceres Seq. ID no. 12328220
  misc_feature (1)..(136): NCBI GI NO: 25406546 NR Description: hypothetical protein T11I11.12
  misc_feature (1)..(136): NCBI GI NO: 15238315 NR Description: mitochondrial carrier protein family
  misc_feature (1)..(135): NCBI GI NO: 34860155 NR Description: similar to calcium-binding transporter
  misc_feature (1)..(136): NCBI GI NO: 231654 NR Description: Brittle-1 protein, chloroplast precursor
  misc_feature (1)..(134): NCBI GI NO: 15228163 NR Description: mitochondrial carrier protein family
  misc_feature (1)..(20): NCBI GI NO: 33598954 NR Description: calcium-binding transporter [Homo sapiens]
  misc_feature (74)..(135): NCBI GI NO: 33598954 NR Description: calcium-binding transporter [Homo sapiens]
  misc_feature (1)..(134): NCBI GI NO: 21554682 NR Description: Ca-dependent solute carrier-like protein
  misc_feature (1)..(136): NCBI GI NO: 15241360 NR Description: calcium-binding transporter-like protein
  misc_feature (1)..(136): NCBI GI NO: 4138581 NR Description: mitochondrial energy transfer protein
MALSGAVFYGVYDILKSSFLHTPEGRKRLIDMKQQGQELNALDRLELGPIRTLMYGAIAGACTEVATYPFEVVRRQLQMQMGKNKLNALAMGFNIIERGGIPALYAGLLPSLLQVLPSASISYFVYECMKIVLKVE

SEQ ID NO: 4679 - protein, 105 aa, Arabidopsis thaliana
  peptide (1)..(105): Ceres Seq. ID no. 12328221
  misc_feature (1)..(105): NCBI GI NO: 25406546 NR Description: hypothetical protein T11I11.12
  misc_feature (1)..(105): NCBI GI NO: 15238315 NR Description: mitochondrial carrier protein family
  misc_feature (1)..(104): NCBI GI NO: 34860155 NR Description: similar to calcium-binding transporter
  misc_feature (1)..(105): NCBI GI NO: 231654 NR Description: Brittle-1 protein, chloroplast precursor
  misc_feature (1)..(103): NCBI GI NO: 15228163 NR Description: mitochondrial carrier protein family
  misc_feature (43)..(104): NCBI GI NO: 33598954 NR Description: calcium-binding transporter [Homo sapiens]
  misc_feature (1)..(103): NCBI GI NO: 21554682 NR Description: Ca-dependent solute carrier-like protein
  misc_feature (1)..(105): NCBI GI NO: 15241360 NR Description: calcium-binding transporter-like protein
  misc_feature (1)..(105): NCBI GI NO: 4138581 NR Description: mitochondrial energy transfer protein
  misc_feature (18)..(102): NCBI GI NO: 34903084 NR Description: unnamed protein product
MKQQGQELNALDRLELGPIRTLMYGAIAGACTEVATYPFEVVRRQLQMQMGKNKLNALAMGFNIIERGGIPALYAGLLPSLLQVLPSASISYFVYECMKIVLKVE

SEQ ID NO: 4680 - DNA, 1132 bp, Arabidopsis thaliana; identical to SEQ ID NO: 4157
  misc_feature (1)..(1132): Ceres Seq. ID no. 13503082

SEQ ID NO: 4681 - protein, 276 aa, Arabidopsis thaliana; identical to SEQ ID NO: 4158
  peptide (1)..(276): Ceres Seq. ID no. 13503083
  misc_feature (193)..(274): Pfam Name: Pfam Description:  Protease inhibitor/seed storage/LTP family
  misc_feature (49)..(276): NCBI GI NO: 18396941 NR Description: protease inhibitor/seed storage/lipid transfer
  misc_feature (6)..(204): NCBI GI NO: 24417264 NR Description: unknown [Arabidopsis thaliana]
  misc_feature (6)..(248): NCBI GI NO: 18396941 NR Description: protease inhibitor/seed storage/lipid transfer
  misc_feature (45)..(274): NCBI GI NO: 7446482 NR Description: probable cell wall-plasma membrane linker protein PRPprecursor - rape
  misc_feature (44)..(274): NCBI GI NO: 7446483 NR Description: probable cell wall protein - garden pea
  misc_feature (43)..(274): NCBI GI NO: 1076501 NR Description: cell wall protein - alfalfa
  misc_feature (89)..(276): NCBI GI NO: 17154773 NR Description: extensin-like protein [Cucumis sativus]
  misc_feature (26)..(274): NCBI GI NO: 7446486 NR Description: hypothetical protein - carrot
  misc_feature (38)..(274): NCBI GI NO: 19521 NR Description: proline rich protein [Lycopersicon esculentum]
  misc_feature (38)..(274): NCBI GI NO: 1709767 NR Description: 36.4 KD PROLINE-RICH PROTEIN

SEQ ID NO: 4682 - protein, 271 aa, Arabidopsis thaliana; identical to SEQ ID NO: 4159
  peptide (1)..(271): Ceres Seq. ID no. 13503084
  misc_feature (188)..(269): Pfam Name: Pfam Description:  Protease inhibitor/seed storage/LTP family
  misc_feature (44)..(271): NCBI GI NO: 18396941 NR Description: protease inhibitor/seed storage/lipid transfer
  misc_feature (1)..(199): NCBI GI NO: 24417264 NR Description: unknown [Arabidopsis thaliana]
  misc_feature (1)..(243): NCBI GI NO: 18396941 NR Description: protease inhibitor/seed storage/lipid transfer
  misc_feature (40)..(269): NCBI GI NO: 7446482 NR Description: probable cell wall-plasma membrane linker protein PRPprecursor - rape
  misc_feature (39)..(269): NCBI GI NO: 7446483 NR Description: probable cell wall protein - garden pea
  misc_feature (38)..(269): NCBI GI NO: 1076501 NR Description: cell wall protein - alfalfa
  misc_feature (84)..(271): NCBI GI NO: 17154773 NR Description: extensin-like protein [Cucumis sativus]
  misc_feature (21)..(269): NCBI GI NO: 7446486 NR Description: hypothetical protein - carrot
  misc_feature (33)..(269): NCBI GI NO: 19521 NR Description: proline rich protein [Lycopersicon esculentum]
  misc_feature (33)..(269): NCBI GI NO: 1709767 NR Description: 36.4 KD PROLINE-RICH PROTEIN

SEQ ID NO: 4683 - DNA, 885 bp, Arabidopsis thaliana
  misc_feature (1)..(885): Ceres Seq. ID no. 12325727
atccaatagttgaaaaacagaaaaagcctctccaatgactttttctcgtagcagctcgattacgttcttcatcgttgctttattcaccgtcttaattaatccggcgatctcttctcgcgccgcgtccttcatcaagctgcctcgctcttccatcgcttcatactgcgagagttggagattagccgctgagaccaacaatgttggaccctggaaggtgattccgtcccaatgcgaaaactatattaaaaactacatcaacggaggccagttcgacaaagactacgatgtagtcgctagttacgccattgactacgctaaaacggtcaaggttggcggagacggcaaggacgcgtgggtctttgacatcgatgagacgcttctctccaatattgagtactacaaggctaatggttacgggtctgaaccgtacgatagtattaaatacaatgaggtggtggaaaaaggaaaagacccaggttatgatgcgagcttgaggctctacaaagctctcaagaaacttggtttcactatcattttactaactggccgagacgaaggtcatagaagtgtcaccgagaaaaatcttcgggatgccggttatttcggttggaaccgactcctcttgaggggtcaaaatgatcaagggaaaacagcaacacaatacaaatcagagcagcgatcacaagttgtaaaagaaggctacacaatccatggtaatactggagatcaatggagtgacttgctaggttttgccgtggcttctcgttctttcaaagtcccaaatcccatgtactatgttgcttgatcaccatctgccattgatatattgcatgataatttatcatttatgtatgaataaggatttatgaatgtatcccataattc

SEQ ID NO: 4684 - protein, 256 aa, Arabidopsis thaliana
  peptide (1)..(256): Ceres Seq. ID no. 12325728
  misc_feature (28)..(256): Pfam Name: Acid phosphatase Pfam Description: HAD superfamily, subfamily IIIB
  misc_feature (1)..(256): NCBI GI NO: 15233526 NR Description: acid phosphatase-like protein
  misc_feature (1)..(255): NCBI GI NO: 15233504 NR Description: acid phosphatase-like protein
  misc_feature (14)..(255): NCBI GI NO: 130718 NR Description: Acid phosphatase precursor 1
  misc_feature (14)..(255): NCBI GI NO: 445113 NR Description: acid phosphatase 1
  misc_feature (1)..(255): NCBI GI NO: 15234949 NR Description: acid phosphatase - like protein
  misc_feature (9)..(255): NCBI GI NO: 15241412 NR Description: acid phosphatase; protein id: At5g51260.1
  misc_feature (33)..(256): NCBI GI NO: 19911583 NR Description: syringolide-induced protein B15-3-5 [Glycine max]
  misc_feature (16)..(255): NCBI GI NO: 15224907 NR Description: putative acid phosphatase; protein id: At2g38600.1
  misc_feature (44)..(256): NCBI GI NO: 7442053 NR Description: acid phosphatase (EC 3.1.3.-) - soybean
  misc_feature (12)..(256): NCBI GI NO: 16506634 NR Description: putative defense associated acid phosphatase
MTFSRSSSITFFIVALFTVLINPAISSRAASFIKLPRSSIASYCESWRLAAETNNVGPWKVIPSQCENYIKNYINGGQFDKDYDVVASYAIDYAKTVKVGGDGKDAWVFDIDETLLSNIEYYKANGYGSEPYDSIKYNEVVEKGKDPGYDASLRLYKALKKLGFTIILLTGRDEGHRSVTEKNLRDAGYFGWNRLLLRGQNDQGKTATQYKSEQRSQVVKEGYTIHGNTGDQWSDLLGFAVASRSFKVPNPMYYVA

SEQ ID NO: 4685 - DNA, 1803 bp, Arabidopsis thaliana
  misc_feature (1)..(1803): Ceres Seq. ID no. 13497348
atactcagagacgtgtagcttcactaattccacatactcagagagaaatggcaaccgaaaccgtattagccacggcggtgagcaatgggaaaagcaaaggatgttgcaagtccggtccaggttacgcgacgcctctcgccgccatggccggtccacgggaaaagctcatctatgtcactgccctttactccggaacgggcgagacaaaccggactacttggcaacggtggatgtggatccaagctcacccacattttcaagcgtcattcacagactaaaaatgccatatataggagatgagcttcaccacactggttggaactcttgcagctcttgccatggtgatgcttctgctgatagacgttaccttgtcttaccaggcttaatttctggtcgcatctatgcaatcgacacaaagaccgacccaaaggctccgtctttgtacaaggttgtagagcctaaggagattgctgaaaagacaggattagcatttccacatacatctcattgcctagcttcaggggatatgttggtgtcatgccttggggacaaagaaggaaacgccaaagggaacgggtttcttttgctagactctgacttcaatgtcaaaagcaggtgggacaaaccaggacatggtcctttgtttggttatgatttttggtaccaacctcggttcaagaccatgatcagcacttcttggggtgcacctaaagccttctccaaaggtttcaatctccagcatgttgcggatggcttgtatggaagtcatttgcatatttatcaatggcctgaaggtgaaatgaaacagataattgaccttggaaataccggtctcttacctcttgagatcagattcttgcatgatccttctaaagatacagggtatgttgggagtgctttgtctagtaatatgataaggtttttcaagaacagtgatgacacgtggagccatgaggttgttatatcggttaaaccgttgaaagtagaaaactggatacttccagaaatgccggggcttatcaccgacttcttgatctccctcgatgaccggttcttctactttgtgaactggcttcatggagacattcgtcagtacaacatcgaggaccctaaaaacccggtcttaactggacaaatatgggttggaggcttactacaaaagggtagtccttataaggctgttggagaagatggcaacacttaccaattcgatgttcctcagatcaaggggaagtctctaagagcaggacctcagatgatccaactaagcctagatgggaaaagattgtatgcaacaaactcgctgtttagcgcatgggaccgtcagttttacccggaaatcatggagaaaggctcacacataattcaaatcgatgttgatacagacaaaggtggtctcactctaaaccctgacttctttgtggactttggtgatgaaccagacggtcctgcactagctcacgagatgagatatcccggcggagactgcacttccgatatctggatctgattttggctccctaagagagagtaagctggatttgtggctagattcgtgatcaagacaattaaagttgttcttactcctttgtggcttattccgtgataataaaactttctaattatgttatgttgtgtctctatctttcgagtaaccgaattgaaccgatcaaaaccgggtcgaattatggatcatcaactcaaaaacacgtcagatacagtgtacgtggacacatggaccagatttgttatcttcttcttgttattttgttaatggacaagatctggttaattgtttatgtt

SEQ ID NO: 4686 - protein, 502 aa, Arabidopsis thaliana
  peptide (1)..(502): Ceres Seq. ID no. 15223008
  misc_feature (66)..(502): Pfam Name: SBP56 Pfam Description: 56kDa selenium binding protein
  misc_feature (66)..(502): NCBI GI NO: 15236386 NR Description: selenium-binding protein like
  misc_feature (66)..(502): NCBI GI NO: 13605825 NR Description: AT4g14040/dl3061c [Arabidopsis thaliana]
  misc_feature (66)..(502): NCBI GI NO: 22530900 NR Description: selenium-binding protein-like protein
  misc_feature (66)..(502): NCBI GI NO: 25348077 NR Description: selenium-binding protein like
  misc_feature (66)..(502): NCBI GI NO: 15236385 NR Description: selenium-binding protein like
  misc_feature (66)..(502): NCBI GI NO: 15485232 NR Description: selenium binding protein [Arabidopsis thaliana]
  misc_feature (66)..(409): NCBI GI NO: 7488184 NR Description: probable selenium-binding protein - Arabidopsis thaliana
  misc_feature (66)..(502): NCBI GI NO: 15485720 NR Description: selenium binding protein [Medicago sativa]
  misc_feature (66)..(502): NCBI GI NO: 15485716 NR Description: selenium binding protein [Lotus japonicus]
  misc_feature (94)..(502): NCBI GI NO: 20340239 NR Description: putative selenium-binding protein
YSETCSFTNSTYSERNGNRNRISHGGEQWEKQRMLQVRSRLRDASRRHGRSTGKAHLCHCPLLRNGRDKPDYLATVDVDPSSPTFSSVIHRLKMPYIGDELHHTGWNSCSSCHGDASADRRYLVLPGLISGRIYAIDTKTDPKAPSLYKVVEPKEIAEKTGLAFPHTSHCLASGDMLVSCLGDKEGNAKGNGFLLLDSDFNVKSRWDKPGHGPLFGYDFWYQPRFKTMISTSWGAPKAFSKGFNLQHVADGLYGSHLHIYQWPEGEMKQIIDLGNTGLLPLEIRFLHDPSKDTGYVGSALSSNMIRFFKNSDDTWSHEVVISVKPLKVENWILPEMPGLITDFLISLDDRFFYFVNWLHGDIRQYNIEDPKNPVLTGQIWVGGLLQKGSPYKAVGEDGNTYQFDVPQIKGKSLRAGPQMIQLSLDGKRLYATNSLFSAWDRQFYPEIMEKGSHIIQIDVDTDKGGLTLNPDFFVDFGDEPDGPALAHEMRYPGGDCTSDIWI

SEQ ID NO: 4687 - protein, 469 aa, Arabidopsis thaliana
  peptide (1)..(469): Ceres Seq. ID no. 15223009
  misc_feature (33)..(469): Pfam Name: SBP56 Pfam Description: 56kDa selenium binding protein
  misc_feature (33)..(469): NCBI GI NO: 15236386 NR Description: selenium-binding protein like
  misc_feature (33)..(469): NCBI GI NO: 13605825 NR Description: AT4g14040/dl3061c [Arabidopsis thaliana]
  misc_feature (33)..(469): NCBI GI NO: 22530900 NR Description: selenium-binding protein-like protein
  misc_feature (33)..(469): NCBI GI NO: 25348077 NR Description: selenium-binding protein like
  misc_feature (33)..(469): NCBI GI NO: 15236385 NR Description: selenium-binding protein like
  misc_feature (33)..(469): NCBI GI NO: 15485232 NR Description: selenium binding protein [Arabidopsis thaliana]
  misc_feature (33)..(376): NCBI GI NO: 7488184 NR Description: probable selenium-binding protein - Arabidopsis thaliana
  misc_feature (33)..(469): NCBI GI NO: 15485720 NR Description: selenium binding protein [Medicago sativa]
  misc_feature (33)..(469): NCBI GI NO: 15485716 NR Description: selenium binding protein [Lotus japonicus]
  misc_feature (61)..(469): NCBI GI NO: 20340239 NR Description: putative selenium-binding protein
MLQVRSRLRDASRRHGRSTGKAHLCHCPLLRNGRDKPDYLATVDVDPSSPTFSSVIHRLKMPYIGDELHHTGWNSCSSCHGDASADRRYLVLPGLISGRIYAIDTKTDPKAPSLYKVVEPKEIAEKTGLAFPHTSHCLASGDMLVSCLGDKEGNAKGNGFLLLDSDFNVKSRWDKPGHGPLFGYDFWYQPRFKTMISTSWGAPKAFSKGFNLQHVADGLYGSHLHIYQWPEGEMKQIIDLGNTGLLPLEIRFLHDPSKDTGYVGSALSSNMIRFFKNSDDTWSHEVVISVKPLKVENWILPEMPGLITDFLISLDDRFFYFVNWLHGDIRQYNIEDPKNPVLTGQIWVGGLLQKGSPYKAVGEDGNTYQFDVPQIKGKSLRAGPQMIQLSLDGKRLYATNSLFSAWDRQFYPEIMEKGSHIIQIDVDTDKGGLTLNPDFFVDFGDEPDGPALAHEMRYPGGDCTSDIWI

SEQ ID NO: 4688 - protein, 409 aa, Arabidopsis thaliana
  peptide (1)..(409): Ceres Seq. ID no. 15223010
  misc_feature (1)..(409): Pfam Name: SBP56 Pfam Description: 56kDa selenium binding protein
  misc_feature (1)..(409): NCBI GI NO: 15236386 NR Description: selenium-binding protein like
  misc_feature (1)..(409): NCBI GI NO: 13605825 NR Description: AT4g14040/dl3061c [Arabidopsis thaliana]
  misc_feature (1)..(409): NCBI GI NO: 22530900 NR Description: selenium-binding protein-like protein
  misc_feature (1)..(409): NCBI GI NO: 25348077 NR Description: selenium-binding protein like
  misc_feature (1)..(409): NCBI GI NO: 15236385 NR Description: selenium-binding protein like
  misc_feature (1)..(409): NCBI GI NO: 15485232 NR Description: selenium binding protein [Arabidopsis thaliana]
  misc_feature (1)..(316): NCBI GI NO: 7488184 NR Description: probable selenium-binding protein - Arabidopsis thaliana
  misc_feature (1)..(409): NCBI GI NO: 15485720 NR Description: selenium binding protein [Medicago sativa]
  misc_feature (1)..(409): NCBI GI NO: 15485716 NR Description: selenium binding protein [Lotus japonicus]
  misc_feature (1)..(409): NCBI GI NO: 20340239 NR Description: putative selenium-binding protein
MPYIGDELHHTGWNSCSSCHGDASADRRYLVLPGLISGRIYAIDTKTDPKAPSLYKVVEPKEIAEKTGLAFPHTSHCLASGDMLVSCLGDKEGNAKGNGFLLLDSDFNVKSRWDKPGHGPLFGYDFWYQPRFKTMISTSWGAPKAFSKGFNLQHVADGLYGSHLHIYQWPEGEMKQIIDLGNTGLLPLEIRFLHDPSKDTGYVGSALSSNMIRFFKNSDDTWSHEVVISVKPLKVENWILPEMPGLITDFLISLDDRFFYFVNWLHGDIRQYNIEDPKNPVLTGQIWVGGLLQKGSPYKAVGEDGNTYQFDVPQIKGKSLRAGPQMIQLSLDGKRLYATNSLFSAWDRQFYPEIMEKGSHIIQIDVDTDKGGLTLNPDFFVDFGDEPDGPALAHEMRYPGGDCTSDIWI

SEQ ID NO: 4689 - DNA, 1209 bp, Arabidopsis thaliana
  misc_feature (1)..(1209): Ceres Seq. ID no. 12338936
ttcctctctctttccccaaattgaaaacaaaatctgagattcgcgaaggaagaagaagagttgtcttgagagattgatagagatggacaacaatggagttaaacccgctgtttccgccatggaagcctttgagaagcttgagaaagtaggtgaagggacttatgggaaagtttacagagcaagagagaaagctactgggatgatcgttgctttgaagaagacgcgtctccatgaggatgaagaaggtgttcctcccactactcttcgcgagatctctatcttgcgtatgctcgctcgtgatcctcacatcgttaggttgatggatgttaagcaaggaataaacaaagaaggaaaaactgtactttaccttgttttcgagtatgttgatactgatctcaagaaattcatcagaagctttcgtcaagctggacagaacattccacaaaatactgtcaagtgcttgatgtaccagttatgcaaaggcatggctttttgccatggtcatggagtgttgcacagggatcttaagcctcacaatctcttgatggaccggaagacaatgacgctcaaaatagcagatcttggattagccagagccttcactctcccaatgaaaaagtatacacatgagattctaactctatggtatagagctccggaagttcttcttggagcaacccattactctactggagtggatatgtggtctgttggctgtatttttgctgaactagtgaccaagcaagcaatctttgcgggagactctgagctccaacagctcctccgtatattcaggttgttgggaacaccaaacgaagaagtgtggcctggagtaagcaaactcaaggactggcatgaatacccgcaatggaaaccgttgagtctctccacagctgtgccaaacctcgacgaggctggacttgatctcttatctaaaatgctggagtacgagccagcaaaacgaatctcagcaaagaaagctatggagcatccttacttcgatgatttgcctgacaagtcctctctctgaggctctctttataaactctcaataggatattttgttctatctctgtctttgcttgtctcaagcatttatctgctatcttaggatgattgaagtttcaatattcccttttgattgggtctctattcccaattgtataaccttccaacattttttcaatgaaagaatatatcagtttctct

SEQ ID NO: 4690 - protein, 315 aa, Arabidopsis thaliana
  peptide (1)..(315): Ceres Seq. ID no. 12338938
  misc_feature (16)..(306): Pfam Name: Pfam Description:  Protein kinase domain
  misc_feature (1)..(315): NCBI GI NO: 15218072 NR Description: Cyclin-dependent kinase B2
  misc_feature (13)..(315): NCBI GI NO: 21536682 NR Description: putative cell division control protein cdc2 kinase
  misc_feature (9)..(315): NCBI GI NO: 15223081 NR Description: Cyclin-dependent kinase B2
  misc_feature (9)..(315): NCBI GI NO: 14488071 NR Description: At1g76540/F14G6_14 [Arabidopsis thaliana]
  misc_feature (13)..(315): NCBI GI NO: 21537217 NR Description: putative cell division control protein cdc2
  misc_feature (1)..(315): NCBI GI NO: 7434327 NR Description: probable cdc2-like protein kinase cdc2MsF - alfalfa
  misc_feature (10)..(315): NCBI GI NO: 32187089 NR Description: cyclin-dependent kinase
  misc_feature (1)..(315): NCBI GI NO: 11125685 NR Description: B2-type cyclin dependent kinase
  misc_feature (7)..(315): NCBI GI NO: 5921447 NR Description: CELL DIVISION CONTROL PROTEIN 2 HOMOLOG D
  misc_feature (13)..(309): NCBI GI NO: 7489567 NR Description: protein kinase cdc2 homolog - rice
MDNNGVKPAVSAMEAFEKLEKVGEGTYGKVYRAREKATGMIVALKKTRLHEDEEGVPPTTLREISILRMLARDPHIVRLMDVKQGINKEGKTVLYLVFEYVDTDLKKFIRSFRQAGQNIPQNTVKCLMYQLCKGMAFCHGHGVLHRDLKPHNLLMDRKTMTLKIADLGLARAFTLPMKKYTHEILTLWYRAPEVLLGATHYSTGVDMWSVGCIFAELVTKQAIFAGDSELQQLLRIFRLLGTPNEEVWPGVSKLKDWHEYPQWKPLSLSTAVPNLDEAGLDLLSKMLEYEPAKRISAKKAMEHPYFDDLPDKSSL

SEQ ID NO: 4691 - protein, 303 aa, Arabidopsis thaliana
  peptide (1)..(303): Ceres Seq. ID no. 12338939
  misc_feature (4)..(294): Pfam Name: Pfam Description:  Protein kinase domain
  misc_feature (1)..(303): NCBI GI NO: 15218072 NR Description: Cyclin-dependent kinase B2
  misc_feature (1)..(303): NCBI GI NO: 21536682 NR Description: putative cell division control protein cdc2 kinase
  misc_feature (1)..(303): NCBI GI NO: 15223081 NR Description: Cyclin-dependent kinase B2
  misc_feature (1)..(303): NCBI GI NO: 14488071 NR Description: At1g76540/F14G6_14 [Arabidopsis thaliana]
  misc_feature (1)..(303): NCBI GI NO: 21537217 NR Description: putative cell division control protein cdc2
  misc_feature (1)..(303): NCBI GI NO: 7434327 NR Description: probable cdc2-like protein kinase cdc2MsF - alfalfa
  misc_feature (1)..(303): NCBI GI NO: 32187089 NR Description: cyclin-dependent kinase
  misc_feature (1)..(303): NCBI GI NO: 11125685 NR Description: B2-type cyclin dependent kinase
  misc_feature (1)..(303): NCBI GI NO: 5921447 NR Description: CELL DIVISION CONTROL PROTEIN 2 HOMOLOG D
  misc_feature (1)..(297): NCBI GI NO: 7489567 NR Description: protein kinase cdc2 homolog - rice
MEAFEKLEKVGEGTYGKVYRAREKATGMIVALKKTRLHEDEEGVPPTTLREISILRMLARDPHIVRLMDVKQGINKEGKTVLYLVFEYVDTDLKKFIRSFRQAGQNIPQNTVKCLMYQLCKGMAFCHGHGVLHRDLKPHNLLMDRKTMTLKIADLGLARAFTLPMKKYTHEILTLWYRAPEVLLGATHYSTGVDMWSVGCIFAELVTKQAIFAGDSELQQLLRIFRLLGTPNEEVWPGVSKLKDWHEYPQWKPLSLSTAVPNLDEAGLDLLSKMLEYEPAKRISAKKAMEHPYFDDLPDKSSL

SEQ ID NO: 4692 - protein, 276 aa, Arabidopsis thaliana
  peptide (1)..(276): Ceres Seq. ID no. 12338940
  misc_feature (1)..(267): Pfam Name: Pfam Description:  Protein kinase domain
  misc_feature (1)..(276): NCBI GI NO: 15218072 NR Description: Cyclin-dependent kinase B2
  misc_feature (1)..(276): NCBI GI NO: 21536682 NR Description: putative cell division control protein cdc2 kinase
  misc_feature (1)..(276): NCBI GI NO: 15223081 NR Description: Cyclin-dependent kinase B2
  misc_feature (1)..(276): NCBI GI NO: 14488071 NR Description: At1g76540/F14G6_14 [Arabidopsis thaliana]
  misc_feature (1)..(276): NCBI GI NO: 21537217 NR Description: putative cell division control protein cdc2
  misc_feature (1)..(276): NCBI GI NO: 7434327 NR Description: probable cdc2-like protein kinase cdc2MsF - alfalfa
  misc_feature (1)..(276): NCBI GI NO: 32187089 NR Description: cyclin-dependent kinase
  misc_feature (1)..(276): NCBI GI NO: 11125685 NR Description: B2-type cyclin dependent kinase
  misc_feature (1)..(276): NCBI GI NO: 5921447 NR Description: CELL DIVISION CONTROL PROTEIN 2 HOMOLOG D
  misc_feature (1)..(270): NCBI GI NO: 7489567 NR Description: protein kinase cdc2 homolog - rice
MIVALKKTRLHEDEEGVPPTTLREISILRMLARDPHIVRLMDVKQGINKEGKTVLYLVFEYVDTDLKKFIRSFRQAGQNIPQNTVKCLMYQLCKGMAFCHGHGVLHRDLKPHNLLMDRKTMTLKIADLGLARAFTLPMKKYTHEILTLWYRAPEVLLGATHYSTGVDMWSVGCIFAELVTKQAIFAGDSELQQLLRIFRLLGTPNEEVWPGVSKLKDWHEYPQWKPLSLSTAVPNLDEAGLDLLSKMLEYEPAKRISAKKAMEHPYFDDLPDKSSL

SEQ ID NO: 4693 - DNA, 1132 bp, Arabidopsis thaliana
  misc_feature (1)..(1132): Ceres Seq. ID no. 12338387
atcatcatctctttcttcttccaaaagtcataatcatgtcaaagtctctagctggattggcggttttggccgctctttttattgctgttgatgcgtttaagccttctggtttaactaatggccacgctacattctatggaggaagtgacgcttctggaacaatgggtaatttcacactttagtttcttttatgttctgactctaaatctctaattttcttgtttttgcaggtggagcttgtgggtacggagatctttactcggcggggtacgggacaatgacggcagcgttaagcacggctctgttcaacgacggagcttcttgcggagaatgctataggataacgtgtgatcacgcggcggactcacggtggtgcttgaaaggagcttctgtggttattacagccactaacttttgcccaccaaactttgctttgcctaacaacaacggtggttggtgcaatccgccgcttaaacatttcgacatggcacaacccgcttgggaaaagatcggaatttacagaggaggaatcgttcccgtcgttttccaaagagtgagctgttacaagaaaggaggagttagattcagaataaacgggagagactacttcgagctagtgaacattcaaaatgtaggaggagcaggttctattaaatctgtatccatcaaaggatcaaagactggttggttagccatgtctcgtaattggggagctaattggcaatcgaatgcttatctagatggtcaagctctctctttctctattaccactactgatggtgctactagagtcttcctcaatgttgttccttcttcttggtcttttggacagatttattcttccaacgttcagttttaagtttttttttttgttttgtatgaaatatcattggcagtggtcgcgctttgagtctgtttcttttctccctgagcgacccgccctctttgttttttttatcttatggtatgatgggtctgttaatacaaaagacccgatatgatttgagggtatatgattatatgaagtgtattgtatttgaatgtttcagactcgaaaaagattctgtagcaaaaggagttttaacacatttgtacttggttttgtttatatgaagtttgttttagttttttc

SEQ ID NO: 4694 - protein, 193 aa, Arabidopsis thaliana
  peptide (1)..(193): Ceres Seq. ID no. 12338388
  misc_feature (101)..(178): Pfam Name: Pfam Description:  Pollen allergen
  misc_feature (1)..(193): NCBI GI NO: 21536750 NR Description: Alpha-expansin 11 precursor
  misc_feature (1)..(193): NCBI GI NO: 15223799 NR Description: expansin, putative; protein id: At1g20190
  misc_feature (1)..(193): NCBI GI NO: 27464177 NR Description: expansin [Glycine max]
  misc_feature (1)..(193): NCBI GI NO: 7484747 NR Description: expansin S2 precursor - cucumber
  misc_feature (1)..(193): NCBI GI NO: 20149056 NR Description: putative expansin [Capsicum annuum]
  misc_feature (1)..(193): NCBI GI NO: 30519752 NR Description: expansin11 [Lycopersicon esculentum]
  misc_feature (1)..(193): NCBI GI NO: 4027891 NR Description: alpha-expansin precursor [Nicotiana tabacum]
  misc_feature (1)..(193): NCBI GI NO: 11191999 NR Description: expansin [Lycopersicon esculentum]
  misc_feature (1)..(193): NCBI GI NO: 14193755 NR Description: alpha-expansin 3 [Zea mays]
  misc_feature (1)..(193): NCBI GI NO: 4027895 NR Description: alpha-expansin precursor [Nicotiana tabacum]
MTAALSTALFNDGASCGECYRITCDHAADSRWCLKGASVVITATNFCPPNFALPNNNGGWCNPPLKHFDMAQPAWEKIGIYRGGIVPVVFQRVSCYKKGGVRFRINGRDYFELVNIQNVGGAGSIKSVSIKGSKTGWLAMSRNWGANWQSNAYLDGQALSFSITTTDGATRVFLNVVPSSWSFGQIYSSNVQF

SEQ ID NO: 4695 - protein, 124 aa, Arabidopsis thaliana
  peptide (1)..(124): Ceres Seq. ID no. 12338390
  misc_feature (32)..(109): Pfam Name: Pfam Description:  Pollen allergen
  misc_feature (1)..(124): NCBI GI NO: 21536750 NR Description: Alpha-expansin 11 precursor
  misc_feature (1)..(124): NCBI GI NO: 15223799 NR Description: expansin, putative; protein id: At1g20190
  misc_feature (1)..(124): NCBI GI NO: 27464177 NR Description: expansin [Glycine max]
  misc_feature (1)..(124): NCBI GI NO: 7484747 NR Description: expansin S2 precursor - cucumber
  misc_feature (1)..(124): NCBI GI NO: 20149056 NR Description: putative expansin [Capsicum annuum]
  misc_feature (1)..(124): NCBI GI NO: 30519752 NR Description: expansin11 [Lycopersicon esculentum]
  misc_feature (1)..(124): NCBI GI NO: 4027891 NR Description: alpha-expansin precursor [Nicotiana tabacum]
  misc_feature (1)..(124): NCBI GI NO: 11191999 NR Description: expansin [Lycopersicon esculentum]
  misc_feature (1)..(124): NCBI GI NO: 14193755 NR Description: alpha-expansin 3 [Zea mays]
  misc_feature (1)..(124): NCBI GI NO: 4027895 NR Description: alpha-expansin precursor [Nicotiana tabacum]
MAQPAWEKIGIYRGGIVPVVFQRVSCYKKGGVRFRINGRDYFELVNIQNVGGAGSIKSVSIKGSKTGWLAMSRNWGANWQSNAYLDGQALSFSITTTDGATRVFLNVVPSSWSFGQIYSSNVQF

SEQ ID NO: 4696 - DNA, 1631 bp, Arabidopsis thaliana
  misc_feature (1)..(1631): Ceres Seq. ID no. 12338356
aacgacaacacgacgaagatgaatccttctcacggtggcgacgacaagcaacgaccggcgatgtatccccaagttgatcaatccatacctgataatccttttgcttctacaaatccttacgtcgcttcttcaccttatctatatccttctctatcctctcataatctcggacctaatctcttcccagaccacggagatgcatccaacgaccaatcaccatctgctcctcctcaggcgacggaggaggttctcatccgtgttcccggcgctattctcaaccttatcgacaaatcctacagcgttgaactcgcgtgcggtgatttcaccatcgttcgaattatccaggggcaaaacattgtagcggttctagccaatgttggaaatgagattcaatggccgttgacgaagaacgaggttgcagctaaggttgatggatctcactatttcttttcgattcatccgccaaaggagaaaggtcaaggatctgggtctgattcagatgatgaacaagggcaaaagagtaaatcgaaatcggatgatgagattcttaattacggattgaccattgcttcgaaagggcaagagaatgtattacttgtgcttgatcaggttttacgagactacagttgtttcacagagcagagaatgtctgaaaaagccaaggagactggagaagaggtgctgggaaattcagtggtggcggacacttcgccggaggagcttaagggtgagagaaaggatgttgtggaaggtcaatgtgcggcgtattggacaacacttgcaccgaatgtcgaggattatactcacagtactgctaaaatgatagcttccgggtcaggtaagctgatcagagggatactgtggtgtggggatgtaactgtggagagactcaagaagggaaacgaggttatgaagaataggcttagtcgtgctgagaaggagaaagatgttagccctgagacactgaggagaatcaagagggttaagagagtgacacaaatgacagagaaagttgccactggtgttctttctggtgttgtcaaagtctcgggattcatcactggttcaatggcaaactcaaaagctggaaagaagctttttggtctcttgcctggagagattgttctcgcatccctcgatggatttagcaagatctgtgatgctgttgaagttgctgggaaaaacgtaatgtcgacttcatcaactgtcacaacagaattagtcaatcacaggtacggcacaaaagcagcagaggctactaacgaagggctagacgcagcgggacatgcatttggaacggcatgggttgctttcaagattcgaaaggcatttaaccccaaaaatgtcataaagccttcatcattggccaagtctgtttcggaactaaaggctaagaaaggctccaagtaaacactaaacagccttcaactgttctgtgttcatctaaacttgcatttagtttttcattttggaaaagtatatgaagattgattgatgtaactctatatttagttttctgtgtatattgtgattctatgtaaactatataaacagtttcttccaatcttctcccatttatgggtttgatttgtaacttcttaatgcatcgagaagcagtattagtactctct

SEQ ID NO: 4697 - protein, 469 aa, Arabidopsis thaliana
  peptide (1)..(469): Ceres Seq. ID no. 12338357
  misc_feature (7)..(469): NCBI GI NO: 15230434 NR Description: putative protein; protein id: At3g51250
  misc_feature (15)..(458): NCBI GI NO: 15227905 NR Description: putative senescence-associated protein 12
  misc_feature (15)..(458): NCBI GI NO: 21593641 NR Description: putative senescence-associated protein 12
  misc_feature (32)..(469): NCBI GI NO: 15320412 NR Description: ERD7 protein [Arabidopsis thaliana]
  misc_feature (19)..(469): NCBI GI NO: 18419759 NR Description: putative protein; protein id: At4g35985.1
  misc_feature (19)..(463): NCBI GI NO: 7486396 NR Description: hypothetical protein F4B14
  misc_feature (231)..(464): NCBI GI NO: 18855022 NR Description: putative senescence-associated protein
  misc_feature (32)..(163): NCBI GI NO: 18855022 NR Description: putative senescence-associated protein
  misc_feature (254)..(458): NCBI GI NO: 3551958 NR Description: senescence-associated protein 12
  misc_feature (179)..(460): NCBI GI NO: 26450712 NR Description: unknown protein [Arabidopsis thaliana]
NDNTTKMNPSHGGDDKQRPAMYPQVDQSIPDNPFASTNPYVASSPYLYPSLSSHNLGPNLFPDHGDASNDQSPSAPPQATEEVLIRVPGAILNLIDKSYSVELACGDFTIVRIIQGQNIVAVLANVGNEIQWPLTKNEVAAKVDGSHYFFSIHPPKEKGQGSGSDSDDEQGQKSKSKSDDEILNYGLTIASKGQENVLLVLDQVLRDYSCFTEQRMSEKAKETGEEVLGNSVVADTSPEELKGERKDVVEGQCAAYWTTLAPNVEDYTHSTAKMIASGSGKLIRGILWCGDVTVERLKKGNEVMKNRLSRAEKEKDVSPETLRRIKRVKRVTQMTEKVATGVLSGVVKVSGFITGSMANSKAGKKLFGLLPGEIVLASLDGFSKICDAVEVAGKNVMSTSSTVTTELVNHRYGTKAAEATNEGLDAAGHAFGTAWVAFKIRKAFNPKNVIKPSSLAKSVSELKAKKGSK

SEQ ID NO: 4698 - protein, 463 aa, Arabidopsis thaliana
  peptide (1)..(463): Ceres Seq. ID no. 12338358
  misc_feature (1)..(463): NCBI GI NO: 15230434 NR Description: putative protein; protein id: At3g51250
  misc_feature (9)..(452): NCBI GI NO: 15227905 NR Description: putative senescence-associated protein 12
  misc_feature (9)..(452): NCBI GI NO: 21593641 NR Description: putative senescence-associated protein 12
  misc_feature (26)..(463): NCBI GI NO: 15320412 NR Description: ERD7 protein [Arabidopsis thaliana]
  misc_feature (13)..(463): NCBI GI NO: 18419759 NR Description: putative protein; protein id: At4g35985.1
  misc_feature (13)..(457): NCBI GI NO: 7486396 NR Description: hypothetical protein F4B14
  misc_feature (225)..(458): NCBI GI NO: 18855022 NR Description: putative senescence-associated protein
  misc_feature (26)..(157): NCBI GI NO: 18855022 NR Description: putative senescence-associated protein
  misc_feature (248)..(452): NCBI GI NO: 3551958 NR Description: senescence-associated protein 12
  misc_feature (173)..(454): NCBI GI NO: 26450712 NR Description: unknown protein [Arabidopsis thaliana]
MNPSHGGDDKQRPAMYPQVDQSIPDNPFASTNPYVASSPYLYPSLSSHNLGPNLFPDHGDASNDQSPSAPPQATEEVLIRVPGAILNLIDKSYSVELACGDFTIVRIIQGQNIVAVLANVGNEIQWPLTKNEVAAKVDGSHYFFSIHPPKEKGQGSGSDSDDEQGQKSKSKSDDEILNYGLTIASKGQENVLLVLDQVLRDYSCFTEQRMSEKAKETGEEVLGNSVVADTSPEELKGERKDVVEGQCAAYWTTLAPNVEDYTHSTAKMIASGSGKLIRGILWCGDVTVERLKKGNEVMKNRLSRAEKEKDVSPETLRRIKRVKRVTQMTEKVATGVLSGVVKVSGFITGSMANSKAGKKLFGLLPGEIVLASLDGFSKICDAVEVAGKNVMSTSSTVTTELVNHRYGTKAAEATNEGLDAAGHAFGTAWVAFKIRKAFNPKNVIKPSSLAKSVSELKAKKGSK

SEQ ID NO: 4699 - protein, 449 aa, Arabidopsis thaliana
  peptide (1)..(449): Ceres Seq. ID no. 12338359
  misc_feature (1)..(449): NCBI GI NO: 15230434 NR Description: putative protein; protein id: At3g51250
  misc_feature (1)..(438): NCBI GI NO: 15227905 NR Description: putative senescence-associated protein 12
  misc_feature (1)..(438): NCBI GI NO: 21593641 NR Description: putative senescence-associated protein 12
  misc_feature (12)..(449): NCBI GI NO: 15320412 NR Description: ERD7 protein [Arabidopsis thaliana]
  misc_feature (1)..(449): NCBI GI NO: 18419759 NR Description: putative protein; protein id: At4g35985.1
  misc_feature (1)..(443): NCBI GI NO: 7486396 NR Description: hypothetical protein F4B14
  misc_feature (211)..(444): NCBI GI NO: 18855022 NR Description: putative senescence-associated protein
  misc_feature (12)..(143): NCBI GI NO: 18855022 NR Description: putative senescence-associated protein
  misc_feature (234)..(438): NCBI GI NO: 3551958 NR Description: senescence-associated protein 12
  misc_feature (159)..(440): NCBI GI NO: 26450712 NR Description: unknown protein [Arabidopsis thaliana]
MYPQVDQSIPDNPFASTNPYVASSPYLYPSLSSHNLGPNLFPDHGDASNDQSPSAPPQATEEVLIRVPGAILNLIDKSYSVELACGDFTIVRIIQGQNIVAVLANVGNEIQWPLTKNEVAAKVDGSHYFFSIHPPKEKGQGSGSDSDDEQGQKSKSKSDDEILNYGLTIASKGQENVLLVLDQVLRDYSCFTEQRMSEKAKETGEEVLGNSVVADTSPEELKGERKDVVEGQCAAYWTTLAPNVEDYTHSTAKMIASGSGKLIRGILWCGDVTVERLKKGNEVMKNRLSRAEKEKDVSPETLRRIKRVKRVTQMTEKVATGVLSGVVKVSGFITGSMANSKAGKKLFGLLPGEIVLASLDGFSKICDAVEVAGKNVMSTSSTVTTELVNHRYGTKAAEATNEGLDAAGHAFGTAWVAFKIRKAFNPKNVIKPSSLAKSVSELKAKKGSK

SEQ ID NO: 4700 - DNA, 1110 bp, Arabidopsis thaliana
  misc_feature (1)..(1110): Ceres Seq. ID no. 12579637
  misc_feature (1103)..(1103): n is a, c, t, g, unknown, or other
aaggtatgactcaatcttcacttagttgttgaatttagttctgatctttattagattgtagttctggcttttgtagatatgctatagttactggagggaatagaggaattggatttgagatatgcagacaattagcaaacaaagggattagggttattttgacatctagagatgagaaacaagggcttgaagctgttgagacattgaagaaagagcttgagatttctgatcaaagcattgtctttcatcagcttgatgtctctgatccttctagtgtcacttctcttgctaagtttgtgaaaacccatttcggaaaactcgatatcttgatcaataatgctggggttggtggtgtaatcactgatgttgatgctcttagagctgggacagggaaagaaggtttcaagtgggaggaaactatcactgagacttatgagttagctgaagaatgcataaagattaactattatggaccaaagagaatgtgtgaggcttttattcatcttctgcagttatctaattctccaagaatcgttaatgtatcatccttcatgggtcaagtaaagaatttactaaacgaatgggcaaaagggatcctgagtgacgcagagaatctaacggaggtaagaattgaccaagtgatcaaccaacttctcaatgatctgaaagaagatacggctaagacaaaagattgggctaaagtcatgtcggcttacgttgtttcgaaagccggtttgaatgcttacacgaggatcttagcgaagaaacatcccgagattcgcgttaactcggtttgtcctggatttgtgaagactgatatgaattttaaaactggaattttatctgtggaagaaggagcatcaagtcctgtgaggttagctttgcttccacatcaagaatctccttctggttgtttctttgatcgcaaacaagtttcagagttctgaaatctttgtgtggagatagataagccaaagttttattcatgtaatgagaattattgtttgaaagctaaacagaaagtatcgactattcaataaacagaaacattattaagccttaaaaaaaaaaaaaaaaaaaaaaaaaaaaaaaaaaaaaaaatngttccgc

SEQ ID NO: 4701 - protein, 154 aa, Arabidopsis thaliana
  peptide (1)..(154): Ceres Seq. ID no. 12579638
  misc_feature (1)..(154): NCBI GI NO: 15224100 NR Description: putative carbonyl reductase; protein id: At2g24190
  misc_feature (1)..(154): NCBI GI NO: 15233062 NR Description: putative protein; protein id: At3g61220
  misc_feature (1)..(154): NCBI GI NO: 25518668 NR Description: hypothetical protein T1N6
  misc_feature (1)..(154): NCBI GI NO: 18378884 NR Description: carbonyl reductase, putative
  misc_feature (1)..(148): NCBI GI NO: 34559416 NR Description: (-)-isopiperitenone reductase [Mentha x piperita]
  misc_feature (1)..(153): NCBI GI NO: 33146492 NR Description: carbonyl reductase -like protein
  misc_feature (1)..(154): NCBI GI NO: 38346767 NR Description: OSJNBa0081C01.18
  misc_feature (1)..(152): NCBI GI NO: 38346769 NR Description: OSJNBa0081C01.20
  misc_feature (1)..(154): NCBI GI NO: 38346772 NR Description: OSJNBa0081C01.23
  misc_feature (1)..(154): NCBI GI NO: 38346774 NR Description: OSJNBa0081C01.25
MCEAFIHLLQLSNSPRIVNVSSFMGQVKNLLNEWAKGILSDAENLTEVRIDQVINQLLNDLKEDTAKTKDWAKVMSAYVVSKAGLNAYTRILAKKHPEIRVNSVCPGFVKTDMNFKTGILSVEEGASSPVRLALLPHQESPSGCFFDRKQVSEF

SEQ ID NO: 4702 - protein, 131 aa, Arabidopsis thaliana
  peptide (1)..(131): Ceres Seq. ID no. 12579639
  misc_feature (1)..(131): NCBI GI NO: 15224100 NR Description: putative carbonyl reductase; protein id: At2g24190
  misc_feature (1)..(131): NCBI GI NO: 15233062 NR Description: putative protein; protein id: At3g61220
  misc_feature (1)..(131): NCBI GI NO: 25518668 NR Description: hypothetical protein T1N6
  misc_feature (1)..(131): NCBI GI NO: 18378884 NR Description: carbonyl reductase, putative
  misc_feature (1)..(125): NCBI GI NO: 34559416 NR Description: (-)-isopiperitenone reductase [Mentha x piperita]
  misc_feature (1)..(130): NCBI GI NO: 33146492 NR Description: carbonyl reductase -like protein
  misc_feature (1)..(131): NCBI GI NO: 38346767 NR Description: OSJNBa0081C01.18
  misc_feature (1)..(129): NCBI GI NO: 38346769 NR Description: OSJNBa0081C01.20
  misc_feature (1)..(131): NCBI GI NO: 38346772 NR Description: OSJNBa0081C01.23
  misc_feature (1)..(131): NCBI GI NO: 38346774 NR Description: OSJNBa0081C01.25
MGQVKNLLNEWAKGILSDAENLTEVRIDQVINQLLNDLKEDTAKTKDWAKVMSAYVVSKAGLNAYTRILAKKHPEIRVNSVCPGFVKTDMNFKTGILSVEEGASSPVRLALLPHQESPSGCFFDRKQVSEF

SEQ ID NO: 4703 - protein, 80 aa, Arabidopsis thaliana
  peptide (1)..(80): Ceres Seq. ID no. 12579640
  misc_feature (1)..(80): NCBI GI NO: 15224100 NR Description: putative carbonyl reductase; protein id: At2g24190
  misc_feature (1)..(80): NCBI GI NO: 15233062 NR Description: putative protein; protein id: At3g61220
  misc_feature (1)..(80): NCBI GI NO: 25518668 NR Description: hypothetical protein T1N6
  misc_feature (1)..(80): NCBI GI NO: 18378884 NR Description: carbonyl reductase, putative
  misc_feature (1)..(74): NCBI GI NO: 34559416 NR Description: (-)-isopiperitenone reductase [Mentha x piperita]
  misc_feature (1)..(79): NCBI GI NO: 33146492 NR Description: carbonyl reductase -like protein
  misc_feature (1)..(80): NCBI GI NO: 38346767 NR Description: OSJNBa0081C01.18
  misc_feature (1)..(78): NCBI GI NO: 38346769 NR Description: OSJNBa0081C01.20
  misc_feature (1)..(80): NCBI GI NO: 38346772 NR Description: OSJNBa0081C01.23
  misc_feature (1)..(80): NCBI GI NO: 38346774 NR Description: OSJNBa0081C01.25
MSAYVVSKAGLNAYTRILAKKHPEIRVNSVCPGFVKTDMNFKTGILSVEEGASSPVRLALLPHQESPSGCFFDRKQVSEF

SEQ ID NO: 4704 - DNA, 1610 bp, Arabidopsis thaliana
  misc_feature (1)..(1610): Ceres Seq. ID no. 13580607
agatatatccacaaggagagacacagattcttgtattgatactcacttcagtggagctaagacaagtagaaaaaaaatggcgccaccgcattttctactggtaacgtttccggcgcaaggtcacgtgaacccatctctccgttttgctcgtcggctcatcaaaagaaccggcgcacgtgtcactttcgtcacttgtgtctccgtcttccacaactccatgatcgcaaaccacaacaaagtcgaaaatctctctttccttactttctccgacggtttcgacgatggaggcatttccacctacgaagaccgtcagaaaaggtcggtgaatctcaaggttaacggcgataaggcactatcggatttcatcgaagctactaagaatggtgactctcccgtgacttgcttgatctacacgattcttctcaattgggctccaaaagtagcacgtagatttcaacttccctccgctcttctctggatccaaccggctttggttttcaacatctattacactcatttcatgggaaacaagtccgttttcgagttacctaatctgtcttctctggaaatcagagatcttccatctttcctcacaccttccaacacaaacaaaggcgcatacgatgcggtttcaagaaatgatggagtttctcataaaagaaaccaaaccgaaaattctcatcaacactttcgattcgctggaaccagaggccttaacggctttcccgaatatcgatatggtggcggttggtcctttacttcccacggagattttctcaggaagcaccaacaaatcagttaaagatcaaagtagtagttatacactttggctagactcgaaaacagagtcctctgttatttacgtttcctttggaacaatggttgagttgtccaagaaacagatagaggaactagcgagagcactcatagaagggaaacgaccgtttttgtgggttataactgataaatccaacagagaaacgaaaacagaaggagaagaagagacagagattgagaagatagctggattcagacacgagcttgaagaggttgggatgattgtgtcgtggtgttcgcagatagaggttttaagtcaccgagccgtaggttgttttgtgactcattgtgggtggagctcgacgctggagagtttggttcttggcgttccggttgtggcgtttccgatgtggtcggatcaaccgacgaacgcgaagctactggaagaaagttggaagactggtgtgagggtaagagagaacaaggatggtttggtggagagaggagagatcaggaggtgtttggaagccgtgatggaggagaagtcggtggagttgagggaaaacgcaaagaaatggaagcgtttagcgatggaagcgggtagagaaggaggatcttcggataagaacatggaggcttttgtggaggatatttgtggagaatctcttattcaaaacttgtgtgaagcagaggaggtaaaagtaaagtaaataaaggacaaaagagttggtgtctagaagtggcggagtgttatttgctaatactgtcactttgtaatatcaaattcaattaaaacataaaatttactccatctagataaatatgttttttcg

SEQ ID NO: 4705 - protein, 287 aa, Arabidopsis thaliana
  peptide (1)..(287): Ceres Seq. ID no. 13580608
  misc_feature (1)..(273): Pfam Name: Pfam Description:  UDP-glucoronosyl and UDP-glucosyl transferase
  misc_feature (1)..(287): NCBI GI NO: 18390540 NR Description: UDP-glucose transferase(UGT1)
  misc_feature (1)..(269): NCBI GI NO: 15220556 NR Description: glycosyltransferase family [Arabidopsis thaliana]
  misc_feature (3)..(268): NCBI GI NO: 18414478 NR Description: UDP-glucose: indole-3-acetate beta-D-glucosyltransferase
  misc_feature (3)..(268): NCBI GI NO: 2149127 NR Description: UDP-glucose: indole-3-acetate beta-D-glucosyltransferase
  misc_feature (3)..(269): NCBI GI NO: 20146093 NR Description: glucosyltransferase NTGT2 [Nicotiana tabacum]
  misc_feature (3)..(273): NCBI GI NO: 14192682 NR Description: cold-induced glucosyl transferase
  misc_feature (3)..(269): NCBI GI NO: 6683052 NR Description: anthocyanin 5-O-glucosyltransferase
  misc_feature (3)..(268): NCBI GI NO: 7433892 NR Description: hypothetical protein - Arabidopsis thaliana
  misc_feature (3)..(268): NCBI GI NO: 16604440 NR Description: AT4g15550/dl3815c [Arabidopsis thaliana]
  misc_feature (1)..(269): NCBI GI NO: 4115559 NR Description: UDP-glucose:anthocysnin 5-O-glucosyltransferase
MRFQEMMEFLIKETKPKILINTFDSLEPEALTAFPNIDMVAVGPLLPTEIFSGSTNKSVKDQSSSYTLWLDSKTESSVIYVSFGTMVELSKKQIEELARALIEGKRPFLWVITDKSNRETKTEGEEETEIEKIAGFRHELEEVGMIVSWCSQIEVLSHRAVGCFVTHCGWSSTLESLVLGVPVVAFPMWSDQPTNAKLLEESWKTGVRVRENKDGLVERGEIRRCLEAVMEEKSVELRENAKKWKRLAMEAGREGGSSDKNMEAFVEDICGESLIQNLCEAEEVKVK

SEQ ID NO: 4706 - protein, 282 aa, Arabidopsis thaliana
  peptide (1)..(282): Ceres Seq. ID no. 13580609
  misc_feature (1)..(268): Pfam Name: Pfam Description:  UDP-glucoronosyl and UDP-glucosyl transferase
  misc_feature (1)..(282): NCBI GI NO: 18390540 NR Description: UDP-glucose transferase(UGT1)
  misc_feature (1)..(264): NCBI GI NO: 15220556 NR Description: glycosyltransferase family [Arabidopsis thaliana]
  misc_feature (1)..(263): NCBI GI NO: 18414478 NR Description: UDP-glucose: indole-3-acetate beta-D-glucosyltransferase
  misc_feature (1)..(263): NCBI GI NO: 2149127 NR Description: UDP-glucose: indole-3-acetate beta-D-glucosyltransferase
  misc_feature (1)..(264): NCBI GI NO: 20146093 NR Description: glucosyltransferase NTGT2 [Nicotiana tabacum]
  misc_feature (1)..(268): NCBI GI NO: 14192682 NR Description: cold-induced glucosyl transferase
  misc_feature (1)..(264): NCBI GI NO: 6683052 NR Description: anthocyanin 5-O-glucosyltransferase
  misc_feature (1)..(263): NCBI GI NO: 7433892 NR Description: hypothetical protein - Arabidopsis thaliana
  misc_feature (1)..(263): NCBI GI NO: 16604440 NR Description: AT4g15550/dl3815c [Arabidopsis thaliana]
  misc_feature (1)..(264): NCBI GI NO: 4115559 NR Description: UDP-glucose:anthocysnin 5-O-glucosyltransferase
MMEFLIKETKPKILINTFDSLEPEALTAFPNIDMVAVGPLLPTEIFSGSTNKSVKDQSSSYTLWLDSKTESSVIYVSFGTMVELSKKQIEELARALIEGKRPFLWVITDKSNRETKTEGEEETEIEKIAGFRHELEEVGMIVSWCSQIEVLSHRAVGCFVTHCGWSSTLESLVLGVPVVAFPMWSDQPTNAKLLEESWKTGVRVRENKDGLVERGEIRRCLEAVMEEKSVELRENAKKWKRLAMEAGREGGSSDKNMEAFVEDICGESLIQNLCEAEEVKVK

SEQ ID NO: 4707 - protein, 281 aa, Arabidopsis thaliana
  peptide (1)..(281): Ceres Seq. ID no. 13580610
  misc_feature (1)..(267): Pfam Name: Pfam Description:  UDP-glucoronosyl and UDP-glucosyl transferase
  misc_feature (1)..(281): NCBI GI NO: 18390540 NR Description: UDP-glucose transferase(UGT1)
  misc_feature (1)..(263): NCBI GI NO: 15220556 NR Description: glycosyltransferase family [Arabidopsis thaliana]
  misc_feature (1)..(262): NCBI GI NO: 18414478 NR Description: UDP-glucose: indole-3-acetate beta-D-glucosyltransferase
  misc_feature (1)..(262): NCBI GI NO: 2149127 NR Description: UDP-glucose: indole-3-acetate beta-D-glucosyltransferase
  misc_feature (1)..(263): NCBI GI NO: 20146093 NR Description: glucosyltransferase NTGT2 [Nicotiana tabacum]
  misc_feature (1)..(267): NCBI GI NO: 14192682 NR Description: cold-induced glucosyl transferase
  misc_feature (1)..(263): NCBI GI NO: 6683052 NR Description: anthocyanin 5-O-glucosyltransferase
  misc_feature (1)..(262): NCBI GI NO: 7433892 NR Description: hypothetical protein - Arabidopsis thaliana
  misc_feature (1)..(262): NCBI GI NO: 16604440 NR Description: AT4g15550/dl3815c [Arabidopsis thaliana]
  misc_feature (1)..(263): NCBI GI NO: 4115559 NR Description: UDP-glucose:anthocysnin 5-O-glucosyltransferase
MEFLIKETKPKILINTFDSLEPEALTAFPNIDMVAVGPLLPTEIFSGSTNKSVKDQSSSYTLWLDSKTESSVIYVSFGTMVELSKKQIEELARALIEGKRPFLWVITDKSNRETKTEGEEETEIEKIAGFRHELEEVGMIVSWCSQIEVLSHRAVGCFVTHCGWSSTLESLVLGVPVVAFPMWSDQPTNAKLLEESWKTGVRVRENKDGLVERGEIRRCLEAVMEEKSVELRENAKKWKRLAMEAGREGGSSDKNMEAFVEDICGESLIQNLCEAEEVKVK

SEQ ID NO: 4708 - DNA, 1282 bp, Arabidopsis thaliana; identical to SEQ ID NO: 4547
  misc_feature (1)..(1282): Ceres Seq. ID no. 12488272

SEQ ID NO: 4709 - protein, 106 aa, Arabidopsis thaliana; identical to SEQ ID NO: 4548
  peptide (1)..(106): Ceres Seq. ID no. 12488273
  misc_feature (1)..(104): Pfam Name: REF Pfam Description: Rubber elongation factor protein
  misc_feature (1)..(104): NCBI GI NO: 15230002 NR Description: stress related protein, putative
  misc_feature (1)..(94): NCBI GI NO: 15214303 NR Description: Stress-related protein
  misc_feature (1)..(94): NCBI GI NO: 22831130 NR Description: putative stress-related protein
  misc_feature (1)..(94): NCBI GI NO: 29367349 NR Description: stress-related protein-like protein
  misc_feature (1)..(94): NCBI GI NO: 37622210 NR Description: small rubber particle protein [Hevea brasiliensis]
  misc_feature (1)..(92): NCBI GI NO: 15214353 NR Description: Hypothetical protein from PAC P0001A07
  misc_feature (1)..(96): NCBI GI NO: 14423933 NR Description: Small rubber particle protein
  misc_feature (6)..(94): NCBI GI NO: 15227131 NR Description: unknown protein; protein id: At2g47780.1
  misc_feature (1)..(106): NCBI GI NO: 33332330 NR Description: rubber synthesis protein [Parthenium argentatum]
  misc_feature (32)..(104): NCBI GI NO: 15214302 NR Description: Stress-related protein (PvSRP)

SEQ ID NO: 4710 - protein, 92 aa, Arabidopsis thaliana; identical to SEQ ID NO: 4549
  peptide (1)..(92): Ceres Seq. ID no. 12488274
  misc_feature (13)..(90): Pfam Name: REF Pfam Description: Rubber elongation factor protein
  misc_feature (1)..(90): NCBI GI NO: 15230002 NR Description: stress related protein, putative
  misc_feature (1)..(91): NCBI GI NO: 15214303 NR Description: Stress-related protein
  misc_feature (1)..(90): NCBI GI NO: 22831130 NR Description: putative stress-related protein
  misc_feature (1)..(90): NCBI GI NO: 29367349 NR Description: stress-related protein-like protein
  misc_feature (18)..(90): NCBI GI NO: 15214353 NR Description: Hypothetical protein from PAC P0001A07
  misc_feature (14)..(90): NCBI GI NO: 14423933 NR Description: Small rubber particle protein
  misc_feature (8)..(90): NCBI GI NO: 15227131 NR Description: unknown protein; protein id: At2g47780.1
  misc_feature (8)..(90): NCBI GI NO: 33332330 NR Description: rubber synthesis protein [Parthenium argentatum]
  misc_feature (37)..(90): NCBI GI NO: 15214302 NR Description: Stress-related protein (PvSRP)
  misc_feature (17)..(90): NCBI GI NO: 38122474 NR Description: rubber elongation factor [Hevea brasiliensis]

SEQ ID NO: 4711 - protein, 89 aa, Arabidopsis thaliana; identical to SEQ ID NO: 4550
  peptide (1)..(89): Ceres Seq. ID no. 12488275
  misc_feature (29)..(89): NCBI GI NO: 15230002 NR Description: stress related protein, putative
  misc_feature (17)..(78): NCBI GI NO: 15214303 NR Description: Stress-related protein
  misc_feature (17)..(82): NCBI GI NO: 22831130 NR Description: putative stress-related protein
  misc_feature (17)..(82): NCBI GI NO: 29367349 NR Description: stress-related protein-like protein
  misc_feature (29)..(83): NCBI GI NO: 37622210 NR Description: small rubber particle protein [Hevea brasiliensis]
  misc_feature (30)..(88): NCBI GI NO: 15214353 NR Description: Hypothetical protein from PAC P0001A07
  misc_feature (29)..(76): NCBI GI NO: 14423933 NR Description: Small rubber particle protein
  misc_feature (29)..(81): NCBI GI NO: 15227131 NR Description: unknown protein; protein id: At2g47780.1
  misc_feature (17)..(80): NCBI GI NO: 33332330 NR Description: rubber synthesis protein [Parthenium argentatum]
  misc_feature (29)..(74): NCBI GI NO: 15214302 NR Description: Stress-related protein (PvSRP)

SEQ ID NO: 4712 - DNA, 2407 bp, Arabidopsis thaliana
  misc_feature (1)..(2407): Ceres Seq. ID no. 13491702
cttctgtctcatctggttttcgagagagatagagaaagtgagacaaggttaaggaggaagaagatgactgagaatcgggtggttttggctctgcttatactctgcattgttgggtttgagccaagtttcatccatggagctacggattcatcagatacttcggcgttaaacatcatgttcagctccatgaattctccaggacagctctcacaatggacagcatcaggaggtgatccttgtggccaaaactggaaaggcataacttgctctggctctcgagttacacaaataaagttaccaagtcttggactttctggatcacttggattcatgcttgataaattgacttctgttactgagtttgatatgagcaacaataaccttggaggcgatttgccttatcagcttcctccaaacttggagcgattgaatcttgctaataaccagttcactggatctgctcaatattccatttctatgatggctcctcttaagtacctcaaccttgctcacaaccagttgaagcagctagctattgacttcacaaaactcacctctctctctatattggacctctcttccaatgcttttatagggtctctcccaaacacttgtagctctcttacgagtgcaaaatcaatttatcttcagaacaatcagttctcaggcaccattgatattctagccacccttcctctcgaaaatctgaatattgcaaacaatcggttcacaggctggatccctgattctttgaaaggcattaacttgcaaaaagatggcaatttattaaattccgggcctgcacctccaccacctcctggtacaccaccgatcagtaaatcatcacctactccgaaatccgggaaccgtggaaaccgttccaatggtgattccagcaatagcaaagactccagcaaatcagggcttggagctggtggagtagcaggaatagtcatttctttgatagttgtaacagcagtcatagctttcttcttgatcaagagaaaaagatcaaagcggtcatcatccacggacattgaaaagactgataataacattaaccaacccattatactagcgtccaatgactttcatcaagagaataagtctgtacagaatccaccattggttgagacaaagaaactggatacgtcattgtcgatgaatctacgtcctccaccatctgagcgacataagtcgtttgatgacgatgattcaacaatgagaaaacctattgttgcaaagaaagctgctgttgttgttccttcaaatgtgaacacatatacggtttcagatcttcaagtagctaccaacagtttcagcgtagataatcttctcggtgaaggaacatttggaagagtatacagagctcagtttgaagatggaaaggtacttgctgtgaagaaaatcgactcatctgcgcttcccacggatactgctgatgattttaccgaaattgtatcgaaaatagcgcatttggatcacgaaaatgtcacaaagcttgatggttactgttctgaacacgggcaacacttggtggtctatgagttccatagaaacggctcattgcatgactttttacatcttgcagaagaggaaagcaaaccgttgatatggaatccccgtgtcaagatcgctcttggcactgcacgtgcattggagtacttgcatgaagtttgctcaccatctatagtccacaagaacattaaatcagcaaatattttacttgactcagagctgaatccacacctctcagactcaggtctcgctagcttccttcccactgcaaacgagctactaaaccaaaacgatgaaggatacagcgcaccagaaacttcaatgtcaggccaatactctttgaagagcgatgtttacagttttggagtagtgatgctcgagcttttaaccggaagaaaaccattcgacagcacaaggtcaagatcggaacaatcattggtaagatgggcaacacctcagcttcacgacattgatgctttgggcaaaatggttgatccagctctcaaagggctatacccggttaaatccctctcccgatttgcagatgttatcgccctttgcgtccagccggagccagagtttagaccacccatgtctgaagtggtgcaagcattggttgtattggtgcagagagctaacatgagcaagagaactgttggagtcggctccggtagctccggcgtcaatgattacatgtaaattctttacctgatgagaaccaacaaaaaaaaacataaaaatttgccctttttctcttgtctgctcggaatctggatgggacgacaacaagtgacaaccgaggacagacaaaacaaaacaaaatcctttttttctttcggtttcataaaactgatgatgagagaataacaacaacaacaacccttcacgc

SEQ ID NO: 4713 - protein, 738 aa, Arabidopsis thaliana
  peptide (1)..(738): Ceres Seq. ID no. 13491703
  misc_feature (22)..(738): NCBI GI NO: 15220928 NR Description: leucine-rich repeat transmembrane protein kinase 1
  misc_feature (29)..(736): NCBI GI NO: 29367551 NR Description: putative leucine-rich repeat transmembrane protein kinase
  misc_feature (35)..(736): NCBI GI NO: 15217283 NR Description: Putative leucine-rich repeat transmembrane protein kinase 1
  misc_feature (49)..(723): NCBI GI NO: 7489783 NR Description: leucine-rich repeat transmembrane protein kinase 1
  misc_feature (26)..(736): NCBI GI NO: 7489784 NR Description: leucine-rich repeat transmembrane protein kinase 2
  misc_feature (42)..(722): NCBI GI NO: 34906746 NR Description: similar to leucine-rich repeat transmembrane protein kinase1
  misc_feature (124)..(720): NCBI GI NO: 30017524 NR Description: putative leucine-rich repeat transmembrane protein kinase
  misc_feature (63)..(715): NCBI GI NO: 18399852 NR Description: leucine-rich repeat transmembrane protein kinase
  misc_feature (425)..(717): NCBI GI NO: 18399502 NR Description: LRR receptor protein kinase -related
  misc_feature (19)..(283): NCBI GI NO: 18399502 NR Description: LRR receptor protein kinase -related
LLSHLVFERDRESETRLRRKKMTENRVVLALLILCIVGFEPSFIHGATDSSDTSALNIMFSSMNSPGQLSQWTASGGDPCGQNWKGITCSGSRVTQIKLPSLGLSGSLGFMLDKLTSVTEFDMSNNNLGGDLPYQLPPNLERLNLANNQFTGSAQYSISMMAPLKYLNLAHNQLKQLAIDFTKLTSLSILDLSSNAFIGSLPNTCSSLTSAKSIYLQNNQFSGTIDILATLPLENLNIANNRFTGWIPDSLKGINLQKDGNLLNSGPAPPPPPGTPPISKSSPTPKSGNRGNRSNGDSSNSKDSSKSGLGAGGVAGIVISLIVVTAVIAFFLIKRKRSKRSSSTDIEKTDNNINQPIILASNDFHQENKSVQNPPLVETKKLDTSLSMNLRPPPSERHKSFDDDDSTMRKPIVAKKAAVVVPSNVNTYTVSDLQVATNSFSVDNLLGEGTFGRVYRAQFEDGKVLAVKKIDSSALPTDTADDFTEIVSKIAHLDHENVTKLDGYCSEHGQHLVVYEFHRNGSLHDFLHLAEEESKPLIWNPRVKIALGTARALEYLHEVCSPSIVHKNIKSANILLDSELNPHLSDSGLASFLPTANELLNQNDEGYSAPETSMSGQYSLKSDVYSFGVVMLELLTGRKPFDSTRSRSEQSLVRWATPQLHDIDALGKMVDPALKGLYPVKSLSRFADVIALCVQPEPEFRPPMSEVVQALVVLVQRANMSKRTVGVGSGSSGVNDYM

SEQ ID NO: 4714 - protein, 717 aa, Arabidopsis thaliana
  peptide (1)..(717): Ceres Seq. ID no. 13491704
  misc_feature (1)..(717): NCBI GI NO: 15220928 NR Description: leucine-rich repeat transmembrane protein kinase 1
  misc_feature (8)..(715): NCBI GI NO: 29367551 NR Description: putative leucine-rich repeat transmembrane protein kinase
  misc_feature (14)..(715): NCBI GI NO: 15217283 NR Description: Putative leucine-rich repeat transmembrane protein kinase 1
  misc_feature (28)..(702): NCBI GI NO: 7489783 NR Description: leucine-rich repeat transmembrane protein kinase 1
  misc_feature (5)..(715): NCBI GI NO: 7489784 NR Description: leucine-rich repeat transmembrane protein kinase 2
  misc_feature (21)..(701): NCBI GI NO: 34906746 NR Description: similar to leucine-rich repeat transmembrane protein kinase1
  misc_feature (103)..(699): NCBI GI NO: 30017524 NR Description: putative leucine-rich repeat transmembrane protein kinase
  misc_feature (42)..(694): NCBI GI NO: 18399852 NR Description: leucine-rich repeat transmembrane protein kinase
  misc_feature (404)..(696): NCBI GI NO: 18399502 NR Description: LRR receptor protein kinase -related
  misc_feature (1)..(262): NCBI GI NO: 18399502 NR Description: LRR receptor protein kinase -related
MTENRVVLALLILCIVGFEPSFIHGATDSSDTSALNIMFSSMNSPGQLSQWTASGGDPCGQNWKGITCSGSRVTQIKLPSLGLSGSLGFMLDKLTSVTEFDMSNNNLGGDLPYQLPPNLERLNLANNQFTGSAQYSISMMAPLKYLNLAHNQLKQLAIDFTKLTSLSILDLSSNAFIGSLPNTCSSLTSAKSIYLQNNQFSGTIDILATLPLENLNIANNRFTGWIPDSLKGINLQKDGNLLNSGPAPPPPPGTPPISKSSPTPKSGNRGNRSNGDSSNSKDSSKSGLGAGGVAGIVISLIVVTAVIAFFLIKRKRSKRSSSTDIEKTDNNINQPIILASNDFHQENKSVQNPPLVETKKLDTSLSMNLRPPPSERHKSFDDDDSTMRKPIVAKKAAVVVPSNVNTYTVSDLQVATNSFSVDNLLGEGTFGRVYRAQFEDGKVLAVKKIDSSALPTDTADDFTEIVSKIAHLDHENVTKLDGYCSEHGQHLVVYEFHRNGSLHDFLHLAEEESKPLIWNPRVKIALGTARALEYLHEVCSPSIVHKNIKSANILLDSELNPHLSDSGLASFLPTANELLNQNDEGYSAPETSMSGQYSLKSDVYSFGVVMLELLTGRKPFDSTRSRSEQSLVRWATPQLHDIDALGKMVDPALKGLYPVKSLSRFADVIALCVQPEPEFRPPMSEVVQALVVLVQRANMSKRTVGVGSGSSGVNDYM

SEQ ID NO: 4715 - protein, 680 aa, Arabidopsis thaliana
  peptide (1)..(680): Ceres Seq. ID no. 13491705
  misc_feature (1)..(680): NCBI GI NO: 15220928 NR Description: leucine-rich repeat transmembrane protein kinase 1
  misc_feature (1)..(678): NCBI GI NO: 29367551 NR Description: putative leucine-rich repeat transmembrane protein kinase
  misc_feature (1)..(678): NCBI GI NO: 15217283 NR Description: Putative leucine-rich repeat transmembrane protein kinase 1
  misc_feature (1)..(665): NCBI GI NO: 7489783 NR Description: leucine-rich repeat transmembrane protein kinase 1
  misc_feature (1)..(678): NCBI GI NO: 7489784 NR Description: leucine-rich repeat transmembrane protein kinase 2
  misc_feature (1)..(664): NCBI GI NO: 34906746 NR Description: similar to leucine-rich repeat transmembrane protein kinase1
  misc_feature (66)..(662): NCBI GI NO: 30017524 NR Description: putative leucine-rich repeat transmembrane protein kinase
  misc_feature (5)..(657): NCBI GI NO: 18399852 NR Description: leucine-rich repeat transmembrane protein kinase
  misc_feature (367)..(659): NCBI GI NO: 18399502 NR Description: LRR receptor protein kinase -related
  misc_feature (1)..(225): NCBI GI NO: 18399502 NR Description: LRR receptor protein kinase -related
MFSSMNSPGQLSQWTASGGDPCGQNWKGITCSGSRVTQIKLPSLGLSGSLGFMLDKLTSVTEFDMSNNNLGGDLPYQLPPNLERLNLANNQFTGSAQYSISMMAPLKYLNLAHNQLKQLAIDFTKLTSLSILDLSSNAFIGSLPNTCSSLTSAKSIYLQNNQFSGTIDILATLPLENLNIANNRFTGWIPDSLKGINLQKDGNLLNSGPAPPPPPGTPPISKSSPTPKSGNRGNRSNGDSSNSKDSSKSGLGAGGVAGIVISLIVVTAVIAFFLIKRKRSKRSSSTDIEKTDNNINQPIILASNDFHQENKSVQNPPLVETKKLDTSLSMNLRPPPSERHKSFDDDDSTMRKPIVAKKAAVVVPSNVNTYTVSDLQVATNSFSVDNLLGEGTFGRVYRAQFEDGKVLAVKKIDSSALPTDTADDFTEIVSKIAHLDHENVTKLDGYCSEHGQHLVVYEFHRNGSLHDFLHLAEEESKPLIWNPRVKIALGTARALEYLHEVCSPSIVHKNIKSANILLDSELNPHLSDSGLASFLPTANELLNQNDEGYSAPETSMSGQYSLKSDVYSFGVVMLELLTGRKPFDSTRSRSEQSLVRWATPQLHDIDALGKMVDPALKGLYPVKSLSRFADVIALCVQPEPEFRPPMSEVVQALVVLVQRANMSKRTVGVGSGSSGVNDYM

SEQ ID NO: 4716 - DNA, 2101 bp, Arabidopsis thaliana
  misc_feature (1)..(2101): Ceres Seq. ID no. 12326823
attttctctcaattcctcgcagctgaagctatttggcatatacttgtcttcgcttttcgtagctctttcgcgcataataataactgaggttgttgtttaatcaagaagagtgtgcaaaaattggaaggccagggaatgcagaaacatgtatttgaaagctgaactcaattgctctacaccaccctctcagatcctttgtccctttgggcccttgttctccctcatcccttatgtggacacccattttctaaacccctgcttccacaacttccagccttcctctcacaatgctagaaaaaacgccacttggaagcatgatctttgcgaagacggttgatccgacactaacagcctcctcctgagttcctcctctaccctttatgttgtctgcgttttagtatattctagggtggtctttttatttagtggtattagtagtgctctaagctaaccagttagtcaatggagaagaaaggatctgtgttgatgctccgttatgaggttgggaagtttctcggtcaaggtacctttgctaaggtataccatgctaggcatttgaaaactggtgatagtgtagcgattaaggtcatcgacaaagaaagaatcctcaaagttggcatgaccgagcagattaagcgagagatctctgccatgagactcttgaggcatcccaacatcgttgagctccatgaagtcatggccaccaaatctaaaatctacttcgtcatggaacatgttaagggtggtgagctcttcaacaaagtgtcaactgggaagctgagagaagacgttgcgagaaagtactttcagcagcttgtacgcgctgttgacttctgtcacagccgtggagtatgccacagggacctgaagccggagaatctcttgttggatgagcatgggaatcttaagatctctgattttggtctcagcgctctttctgactctagaaggcaagacgggttgctgcatactacatgcgggacccctacatattgtgcaccggaggtgataagcaggaacgggtatgatgggtttaaagcggatgtgtggtcctgtggagtgatattgttcgtcttgctcgctggatatcttcctttccgtgattccaatctgatggagctgtataagaagataggcaaagctgaagtcaagttccccaactggcttgctccgggggcaaagagattgctcaagaggatcttggatcctaaccccaacacaagggtatcaactgagaaaataatgaagagctcttggttccgtaaaggcctacaagaggaggtgaaagaatcagttgaggaagagacagaagtggacgcagaggcagagggaaacgcaagtgcagagaaggaaaagaagcggtgtatcaacctgaacgcgtttgagatcatatctctgtccacggggtttgatctctcgggactgttcgagaagggagaggagaaggaggagatgaggtttacatcaaacagagaggcatctgagataacagagaagctggtggagattgggaaggaccttaagatgaaagtgaggaagaaggaacacgaatggagggtgaaaatgtcggctgaggctacagtggtggaagcggaagtgtttgagattgcgccgagctatcacatggtggtgctaaagaagagcggtggagatactgctgagtataagagagtcatgaaggagagtataagaccggctttgatcgactttgtattagcttggcactgaaacatattctatcctttttatgtgtcttcttcttttagaatgtttttcttgttttgttttgccaatgtgtttagtttatgtattttctcttgagtctcatcttaagacgtgtttcgtatttttctaggtgtcagtgtaacaatagtaatatgtgaggaccaattatatagtttgagacaaaataagtagatttctttatcagataaaataaaataaattgagccttaatgaaataagccaatagaccgacaacggttttaggaagcattatactactattttgtagttatttcgtattattgtagtcttttggatgatcctttttgtgtattaacaaagtcaaaacaaatttataatttaccttacggtacag

SEQ ID NO: 4717 - protein, 421 aa, Arabidopsis thaliana
  peptide (1)..(421): Ceres Seq. ID no. 12326824
  misc_feature (12)..(266): Pfam Name: Pfam Description:  Protein kinase domain
  misc_feature (1)..(421): NCBI GI NO: 1777312 NR Description: novel serine/threonine protein kinase
  misc_feature (1)..(421): NCBI GI NO: 15241066 NR Description: serine/threonine protein kinase ATPK10
  misc_feature (2)..(420): NCBI GI NO: 33146431 NR Description: putative Serine/threonine Kinase
  misc_feature (1)..(420): NCBI GI NO: 23428550 NR Description: Serine/threonine Kinase [Persea americana]
  misc_feature (1)..(420): NCBI GI NO: 8777339 NR Description: serine/threonine protein kinase
  misc_feature (1)..(420): NCBI GI NO: 9280636 NR Description: CBL-interacting protein kinase 2
  misc_feature (1)..(420): NCBI GI NO: 15240687 NR Description: serine threonine protein kinase-like protein
  misc_feature (1)..(290): NCBI GI NO: 18424099 NR Description: serine/threonine protein kinase
  misc_feature (303)..(420): NCBI GI NO: 18424099 NR Description: serine/threonine protein kinase
  misc_feature (1)..(421): NCBI GI NO: 34903780 NR Description: unnamed protein product
MEKKGSVLMLRYEVGKFLGQGTFAKVYHARHLKTGDSVAIKVIDKERILKVGMTEQIKREISAMRLLRHPNIVELHEVMATKSKIYFVMEHVKGGELFNKVSTGKLREDVARKYFQQLVRAVDFCHSRGVCHRDLKPENLLLDEHGNLKISDFGLSALSDSRRQDGLLHTTCGTPTYCAPEVISRNGYDGFKADVWSCGVILFVLLAGYLPFRDSNLMELYKKIGKAEVKFPNWLAPGAKRLLKRILDPNPNTRVSTEKIMKSSWFRKGLQEEVKESVEEETEVDAEAEGNASAEKEKKRCINLNAFEIISLSTGFDLSGLFEKGEEKEEMRFTSNREASEITEKLVEIGKDLKMKVRKKEHEWRVKMSAEATVVEAEVFEIAPSYHMVVLKKSGGDTAEYKRVMKESIRPALIDFVLAWH

SEQ ID NO: 4718 - protein, 413 aa, Arabidopsis thaliana
  peptide (1)..(413): Ceres Seq. ID no. 12326825
  misc_feature (4)..(258): Pfam Name: Pfam Description:  Protein kinase domain
  misc_feature (1)..(413): NCBI GI NO: 1777312 NR Description: novel serine/threonine protein kinase
  misc_feature (1)..(413): NCBI GI NO: 15241066 NR Description: serine/threonine protein kinase ATPK10
  misc_feature (1)..(412): NCBI GI NO: 33146431 NR Description: putative Serine/threonine Kinase
  misc_feature (1)..(412): NCBI GI NO: 23428550 NR Description: Serine/threonine Kinase [Persea americana]
  misc_feature (1)..(412): NCBI GI NO: 8777339 NR Description: serine/threonine protein kinase
  misc_feature (1)..(412): NCBI GI NO: 9280636 NR Description: CBL-interacting protein kinase 2
  misc_feature (1)..(412): NCBI GI NO: 15240687 NR Description: serine threonine protein kinase-like protein
  misc_feature (1)..(282): NCBI GI NO: 18424099 NR Description: serine/threonine protein kinase
  misc_feature (295)..(412): NCBI GI NO: 18424099 NR Description: serine/threonine protein kinase
  misc_feature (1)..(413): NCBI GI NO: 34903780 NR Description: unnamed protein product
MLRYEVGKFLGQGTFAKVYHARHLKTGDSVAIKVIDKERILKVGMTEQIKREISAMRLLRHPNIVELHEVMATKSKIYFVMEHVKGGELFNKVSTGKLREDVARKYFQQLVRAVDFCHSRGVCHRDLKPENLLLDEHGNLKISDFGLSALSDSRRQDGLLHTTCGTPTYCAPEVISRNGYDGFKADVWSCGVILFVLLAGYLPFRDSNLMELYKKIGKAEVKFPNWLAPGAKRLLKRILDPNPNTRVSTEKIMKSSWFRKGLQEEVKESVEEETEVDAEAEGNASAEKEKKRCINLNAFEIISLSTGFDLSGLFEKGEEKEEMRFTSNREASEITEKLVEIGKDLKMKVRKKEHEWRVKMSAEATVVEAEVFEIAPSYHMVVLKKSGGDTAEYKRVMKESIRPALIDFVLAWH

SEQ ID NO: 4719 - protein, 369 aa, Arabidopsis thaliana
  peptide (1)..(369): Ceres Seq. ID no. 12326826
  misc_feature (1)..(214): Pfam Name: Pfam Description:  Protein kinase domain
  misc_feature (1)..(369): NCBI GI NO: 1777312 NR Description: novel serine/threonine protein kinase
  misc_feature (1)..(369): NCBI GI NO: 15241066 NR Description: serine/threonine protein kinase ATPK10
  misc_feature (1)..(368): NCBI GI NO: 33146431 NR Description: putative Serine/threonine Kinase
  misc_feature (1)..(368): NCBI GI NO: 23428550 NR Description: Serine/threonine Kinase [Persea americana]
  misc_feature (1)..(368): NCBI GI NO: 8777339 NR Description: serine/threonine protein kinase
  misc_feature (1)..(368): NCBI GI NO: 9280636 NR Description: CBL-interacting protein kinase 2
  misc_feature (1)..(368): NCBI GI NO: 15240687 NR Description: serine threonine protein kinase-like protein
  misc_feature (1)..(238): NCBI GI NO: 18424099 NR Description: serine/threonine protein kinase
  misc_feature (251)..(368): NCBI GI NO: 18424099 NR Description: serine/threonine protein kinase
  misc_feature (1)..(369): NCBI GI NO: 34903780 NR Description: unnamed protein product
MTEQIKREISAMRLLRHPNIVELHEVMATKSKIYFVMEHVKGGELFNKVSTGKLREDVARKYFQQLVRAVDFCHSRGVCHRDLKPENLLLDEHGNLKISDFGLSALSDSRRQDGLLHTTCGTPTYCAPEVISRNGYDGFKADVWSCGVILFVLLAGYLPFRDSNLMELYKKIGKAEVKFPNWLAPGAKRLLKRILDPNPNTRVSTEKIMKSSWFRKGLQEEVKESVEEETEVDAEAEGNASAEKEKKRCINLNAFEIISLSTGFDLSGLFEKGEEKEEMRFTSNREASEITEKLVEIGKDLKMKVRKKEHEWRVKMSAEATVVEAEVFEIAPSYHMVVLKKSGGDTAEYKRVMKESIRPALIDFVLAWH

SEQ ID NO: 4720 - DNA, 1336 bp, Arabidopsis thaliana
  misc_feature (1)..(1336): Ceres Seq. ID no. 13488801
ctcagctaaagagagaaagagaagcaccatttttctttctcgtcgtgtcatcgttttctcagattcctgaataatcattcccttccgattccaaaatccccaaacctcatccactcctccatctcccggattcggattcccagaatcatgcccatggagaacgacaatggcccacacgttggcaacgtcgtcgtcaccgctgagcaagcgaccaagattaacgagactgatggacggttgccggagaatcggcagaccggtgttgtctctgacaccggaagtggtagcgagagaggagagcaaggggttggagagtcggcagttgctgtggcggtgccggtggaggagagcggatcgatttcggtgggagagctacctgctccccgatcttcctctgctagagttccgtttactaatctaagccaaattgatgcggatcttgctcttgctcgcacactccaagaacaggagcgggcgtatatgatgttgaccatgaatagtgaaatcagtgactatgggagctgggaaactggaagctatgtatacgatgaggatgagtttgatgaccccgagaatgaggatgaggatgatgatgaagatgaatatgaaacagatgatgatcctcaggaagatgggcttgatgtcaatgtgcacgccaatgaagatgatcaagaagatgacggtaactctgacattgaagaagttgcttatacagatgatgaggcctatgctagagctcttcaagaagctgaagaaagggatatggctgctagattgtctgccttatctgggttagcaaaccgggtggttgaagatctagaggatgagagtcatacttctcaggatgcctgggatgagatggatcctgatgagctttcatatgaggagttgcttgcacttggcgacattgtgggaaccgaaagtagaggattgtctgctgatacaattgcatctttgccttcaaaaagatataaagaaggagacaatcagaacggaaccaatgagtcatgtgttatatgtcgtttagactatgaggatgacgaagacctgatactgctcccatgcaaacattcttaccactcggagtgcataaacaactggttgaagataaacaaggtttgccccgtatgcagtgcagaagtttcaacttcgacctctggacaaagctgatgaggcaaaggaagaaagattcagaaagaatcataagctaagaacttcaaaaccttagctgcctgtttgtacacttcttataaacaaaataacatcatcagatttccttggatcctttaaaaaatctcaaagattggaacattctcaagcgtttttagtttttgcc

SEQ ID NO: 4721 - protein, 340 aa, Arabidopsis thaliana
  peptide (1)..(340): Ceres Seq. ID no. 13488802
  misc_feature (288)..(328): Pfam Name: RING finger Pfam Description: Zinc finger, C3HC4 type
  misc_feature (1)..(340): NCBI GI NO: 18402411 NR Description: zinc finger
  misc_feature (1)..(340): NCBI GI NO: 21536693 NR Description: unknown [Arabidopsis thaliana]
  misc_feature (117)..(340): NCBI GI NO: 10334499 NR Description: hypothetical protein [Cicer arietinum]
  misc_feature (225)..(332): NCBI GI NO: 22331928 NR Description: zinc finger
  misc_feature (172)..(335): NCBI GI NO: 15232746 NR Description: zinc-finger protein-related protein
  misc_feature (191)..(332): NCBI GI NO: 38567912 NR Description: OSJNBa0088I22.8
  misc_feature (160)..(332): NCBI GI NO: 34898016 NR Description: ESTs C26000
  misc_feature (230)..(328): NCBI GI NO: 11358785 NR Description: RING-H2 finger protein RHG1a
  misc_feature (238)..(331): NCBI GI NO: 18400621 NR Description: zinc finger
  misc_feature (238)..(331): NCBI GI NO: 8777490 NR Description: RING-finger protein (C-terminal)-like
MPMENDNGPHVGNVVVTAEQATKINETDGRLPENRQTGVVSDTGSGSERGEQGVGESAVAVAVPVEESGSISVGELPAPRSSSARVPFTNLSQIDADLALARTLQEQERAYMMLTMNSEISDYGSWETGSYVYDEDEFDDPENEDEDDDEDEYETDDDPQEDGLDVNVHANEDDQEDDGNSDIEEVAYTDDEAYARALQEAEERDMAARLSALSGLANRVVEDLEDESHTSQDAWDEMDPDELSYEELLALGDIVGTESRGLSADTIASLPSKRYKEGDNQNGTNESCVICRLDYEDDEDLILLPCKHSYHSECINNWLKINKVCPVCSAEVSTSTSGQS

SEQ ID NO: 4722 - protein, 338 aa, Arabidopsis thaliana
  peptide (1)..(338): Ceres Seq. ID no. 13488803
  misc_feature (286)..(326): Pfam Name: RING finger Pfam Description: Zinc finger, C3HC4 type
  misc_feature (1)..(338): NCBI GI NO: 18402411 NR Description: zinc finger
  misc_feature (1)..(338): NCBI GI NO: 21536693 NR Description: unknown [Arabidopsis thaliana]
  misc_feature (115)..(338): NCBI GI NO: 10334499 NR Description: hypothetical protein [Cicer arietinum]
  misc_feature (223)..(330): NCBI GI NO: 22331928 NR Description: zinc finger
  misc_feature (170)..(333): NCBI GI NO: 15232746 NR Description: zinc-finger protein-related protein
  misc_feature (189)..(330): NCBI GI NO: 38567912 NR Description: OSJNBa0088I22.8
  misc_feature (158)..(330): NCBI GI NO: 34898016 NR Description: ESTs C26000
  misc_feature (228)..(326): NCBI GI NO: 11358785 NR Description: RING-H2 finger protein RHG1a
  misc_feature (236)..(329): NCBI GI NO: 18400621 NR Description: zinc finger
  misc_feature (236)..(329): NCBI GI NO: 8777490 NR Description: RING-finger protein (C-terminal)-like
MENDNGPHVGNVVVTAEQATKINETDGRLPENRQTGVVSDTGSGSERGEQGVGESAVAVAVPVEESGSISVGELPAPRSSSARVPFTNLSQIDADLALARTLQEQERAYMMLTMNSEISDYGSWETGSYVYDEDEFDDPENEDEDDDEDEYETDDDPQEDGLDVNVHANEDDQEDDGNSDIEEVAYTDDEAYARALQEAEERDMAARLSALSGLANRVVEDLEDESHTSQDAWDEMDPDELSYEELLALGDIVGTESRGLSADTIASLPSKRYKEGDNQNGTNESCVICRLDYEDDEDLILLPCKHSYHSECINNWLKINKVCPVCSAEVSTSTSGQS

SEQ ID NO: 4723 - protein, 229 aa, Arabidopsis thaliana
  peptide (1)..(229): Ceres Seq. ID no. 13488804
  misc_feature (177)..(217): Pfam Name: RING finger Pfam Description: Zinc finger, C3HC4 type
  misc_feature (1)..(229): NCBI GI NO: 18402411 NR Description: zinc finger
  misc_feature (1)..(229): NCBI GI NO: 21536693 NR Description: unknown [Arabidopsis thaliana]
  misc_feature (6)..(229): NCBI GI NO: 10334499 NR Description: hypothetical protein [Cicer arietinum]
  misc_feature (114)..(221): NCBI GI NO: 22331928 NR Description: zinc finger
  misc_feature (61)..(224): NCBI GI NO: 15232746 NR Description: zinc-finger protein-related protein
  misc_feature (80)..(221): NCBI GI NO: 38567912 NR Description: OSJNBa0088I22.8
  misc_feature (49)..(221): NCBI GI NO: 34898016 NR Description: ESTs C26000
  misc_feature (119)..(217): NCBI GI NO: 11358785 NR Description: RING-H2 finger protein RHG1a
  misc_feature (127)..(220): NCBI GI NO: 18400621 NR Description: zinc finger
  misc_feature (127)..(220): NCBI GI NO: 8777490 NR Description: RING-finger protein (C-terminal)-like
MMLTMNSEISDYGSWETGSYVYDEDEFDDPENEDEDDDEDEYETDDDPQEDGLDVNVHANEDDQEDDGNSDIEEVAYTDDEAYARALQEAEERDMAARLSALSGLANRVVEDLEDESHTSQDAWDEMDPDELSYEELLALGDIVGTESRGLSADTIASLPSKRYKEGDNQNGTNESCVICRLDYEDDEDLILLPCKHSYHSECINNWLKINKVCPVCSAEVSTSTSGQS

SEQ ID NO: 4724 - DNA, 1613 bp, Arabidopsis thaliana
  misc_feature (1)..(1613): Ceres Seq. ID no. 13489349
aaagaaagaatcgtaacagacggatcacaaacagtcacagatccgagccctgttttgagtttacgagaagaatattaaaattctcatctttaaccattttatccgatcatgaatgtgagagacgagggaaaaactacggcggagaaacacggcggaggagaggagaataaatcaccggagaacaaatggcgatttaattctcctctagctcaagtgagcttaatgggattcgtttgtttctgttgtccaggaatgttcaacgctctctccggcatgggaggcggtggtcaagtagatccaaccgctgctaacaacgctaacaccgccgtttacaccgctttcaccgttttcggccttttaggcggcgggttttacaacgtcctcggtccacggctcacgttagccgctggatgttcgacttacgtactctacgccggatctttcctctactacaaccatcaccaccaccaagccttcgcgatagtcgccggagctttactcggttgcggcgcgggacttctctgggccggagaaggagctgtgatgacgtcataccctccgccgcatcggaaaggcacttacatagcgttgttctggagtatcttcaatctcggcggcgttatcggtggattaatcccgtttatcctcaactaccaacgtagctccgccgcatcggtcaacgactcgacgtacatagcgttcatgtgtttcatgttcgccggcgttcttctctctttcggtatcctcccggcgacctccgtgatccgtaacgacggatctagatgctctgccgtgaaatactcccgtccgtcaactgaagcagccgccgtgctacggctattcctcgatcggaaaatgctcctcatcgtccccgcggcttgggctagcaatttcttctacagctatcaattcaacaatgtgaatggactcctctttaacttaagaaccagaggattcaacaatgtcttctactggggagctcaaatggctggatccatcgccattggttacgtgatggacttcagcttcaaaagccggcgagctagaggattcaccggaatatcactagtcgcggtaatcggaaccattatatgggcgggcgggttagcgaatcagcacggttactcgttggacaaactaccggaaaagaaacttgattttaaagattccgggatagagtttgcgggaccattcgtgttatatatgagctatggattgttagatgcaatgtatcagagtatggtttattggttgataggagcattggctgatgattcgcagactttgagtagatatagtggattctacaaaggagtgcagagtgcaggagctgcagtggcttggcaagtggatactcgtaaggttccgttaatgtcacagcttattgttaattggtcacttactactgtaagttatcctttacttgttcttcttgtgtatttttatgttaaaaatgataatgatgatgatagtaatgataaggtttagaagatagtagtttattagaacattgagtaagttaactgttttttaatacgatgacgttctgttatgaatgtaacagttacatagagaaacaaagatttgaggctctgaaatgcctttattctttt

SEQ ID NO: 4725 - protein, 459 aa, Arabidopsis thaliana
  peptide (1)..(459): Ceres Seq. ID no. 13489350
  misc_feature (59)..(180): Pfam Name: DUF895 Pfam Description: Eukaryotic protein of unknown function
  misc_feature (1)..(459): NCBI GI NO: 18394560 NR Description: expressed protein [Arabidopsis thaliana]
  misc_feature (1)..(459): NCBI GI NO: 21536696 NR Description: unknown [Arabidopsis thaliana]
  misc_feature (18)..(266): NCBI GI NO: 38346872 NR Description: OSJNBb0004G23.4
  misc_feature (330)..(456): NCBI GI NO: 38346872 NR Description: OSJNBb0004G23.4
  misc_feature (29)..(452): NCBI GI NO: 40745401 NR Description: hypothetical protein AN1427.2
  misc_feature (27)..(454): NCBI GI NO: 38110995 NR Description: hypothetical protein MG06605.4
  misc_feature (27)..(431): NCBI GI NO: 32419955 NR Description: hypothetical protein [Neurospora crassa]
  misc_feature (29)..(431): NCBI GI NO: 19115917 NR Description: hypothetical protein [Schizosaccharomyces pombe]
  misc_feature (5)..(431): NCBI GI NO: 40740559 NR Description: hypothetical protein AN8127.2
  misc_feature (42)..(427): NCBI GI NO: 19114809 NR Description: hypothetical protein [Schizosaccharomyces pombe]
MNVRDEGKTTAEKHGGGEENKSPENKWRFNSPLAQVSLMGFVCFCCPGMFNALSGMGGGGQVDPTAANNANTAVYTAFTVFGLLGGGFYNVLGPRLTLAAGCSTYVLYAGSFLYYNHHHHQAFAIVAGALLGCGAGLLWAGEGAVMTSYPPPHRKGTYIALFWSIFNLGGVIGGLIPFILNYQRSSAASVNDSTYIAFMCFMFAGVLLSFGILPATSVIRNDGSRCSAVKYSRPSTEAAAVLRLFLDRKMLLIVPAAWASNFFYSYQFNNVNGLLFNLRTRGFNNVFYWGAQMAGSIAIGYVMDFSFKSRRARGFTGISLVAVIGTIIWAGGLANQHGYSLDKLPEKKLDFKDSGIEFAGPFVLYMSYGLLDAMYQSMVYWLIGALADDSQTLSRYSGFYKGVQSAGAAVAWQVDTRKVPLMSQLIVNWSLTTVSYPLLVLLVYFYVKNDNDDDSNDKV

SEQ ID NO: 4726 - protein, 421 aa, Arabidopsis thaliana
  peptide (1)..(421): Ceres Seq. ID no. 13489351
  misc_feature (21)..(142): Pfam Name: DUF895 Pfam Description: Eukaryotic protein of unknown function
  misc_feature (1)..(421): NCBI GI NO: 18394560 NR Description: expressed protein [Arabidopsis thaliana]
  misc_feature (1)..(421): NCBI GI NO: 21536696 NR Description: unknown [Arabidopsis thaliana]
  misc_feature (1)..(228): NCBI GI NO: 38346872 NR Description: OSJNBb0004G23.4
  misc_feature (292)..(418): NCBI GI NO: 38346872 NR Description: OSJNBb0004G23.4
  misc_feature (1)..(414): NCBI GI NO: 40745401 NR Description: hypothetical protein AN1427.2
  misc_feature (1)..(416): NCBI GI NO: 38110995 NR Description: hypothetical protein MG06605.4
  misc_feature (1)..(393): NCBI GI NO: 32419955 NR Description: hypothetical protein [Neurospora crassa]
  misc_feature (1)..(393): NCBI GI NO: 19115917 NR Description: hypothetical protein [Schizosaccharomyces pombe]
  misc_feature (1)..(393): NCBI GI NO: 40740559 NR Description: hypothetical protein AN8127.2
  misc_feature (4)..(389): NCBI GI NO: 19114809 NR Description: hypothetical protein [Schizosaccharomyces pombe]
MGFVCFCCPGMFNALSGMGGGGQVDPTAANNANTAVYTAFTVFGLLGGGFYNVLGPRLTLAAGCSTYVLYAGSFLYYNHHHHQAFAIVAGALLGCGAGLLWAGEGAVMTSYPPPHRKGTYIALFWSIFNLGGVIGGLIPFILNYQRSSAASVNDSTYIAFMCFMFAGVLLSFGILPATSVIRNDGSRCSAVKYSRPSTEAAAVLRLFLDRKMLLIVPAAWASNFFYSYQFNNVNGLLFNLRTRGFNNVFYWGAQMAGSIAIGYVMDFSFKSRRARGFTGISLVAVIGTIIWAGGLANQHGYSLDKLPEKKLDFKDSGIEFAGPFVLYMSYGLLDAMYQSMVYWLIGALADDSQTLSRYSGFYKGVQSAGAAVAWQVDTRKVPLMSQLIVNWSLTTVSYPLLVLLVYFYVKNDNDDDSNDKV

SEQ ID NO: 4727 - protein, 411 aa, Arabidopsis thaliana
  peptide (1)..(411): Ceres Seq. ID no. 13489352
  misc_feature (11)..(132): Pfam Name: DUF895 Pfam Description: Eukaryotic protein of unknown function
  misc_feature (1)..(411): NCBI GI NO: 18394560 NR Description: expressed protein [Arabidopsis thaliana]
  misc_feature (1)..(411): NCBI GI NO: 21536696 NR Description: unknown [Arabidopsis thaliana]
  misc_feature (1)..(218): NCBI GI NO: 38346872 NR Description: OSJNBb0004G23.4
  misc_feature (282)..(408): NCBI GI NO: 38346872 NR Description: OSJNBb0004G23.4
  misc_feature (1)..(404): NCBI GI NO: 40745401 NR Description: hypothetical protein AN1427.2
  misc_feature (1)..(406): NCBI GI NO: 38110995 NR Description: hypothetical protein MG06605.4
  misc_feature (1)..(383): NCBI GI NO: 32419955 NR Description: hypothetical protein [Neurospora crassa]
  misc_feature (1)..(383): NCBI GI NO: 19115917 NR Description: hypothetical protein [Schizosaccharomyces pombe]
  misc_feature (1)..(383): NCBI GI NO: 40740559 NR Description: hypothetical protein AN8127.2
  misc_feature (1)..(379): NCBI GI NO: 19114809 NR Description: hypothetical protein [Schizosaccharomyces pombe]
MFNALSGMGGGGQVDPTAANNANTAVYTAFTVFGLLGGGFYNVLGPRLTLAAGCSTYVLYAGSFLYYNHHHHQAFAIVAGALLGCGAGLLWAGEGAVMTSYPPPHRKGTYIALFWSIFNLGGVIGGLIPFILNYQRSSAASVNDSTYIAFMCFMFAGVLLSFGILPATSVIRNDGSRCSAVKYSRPSTEAAAVLRLFLDRKMLLIVPAAWASNFFYSYQFNNVNGLLFNLRTRGFNNVFYWGAQMAGSIAIGYVMDFSFKSRRARGFTGISLVAVIGTIIWAGGLANQHGYSLDKLPEKKLDFKDSGIEFAGPFVLYMSYGLLDAMYQSMVYWLIGALADDSQTLSRYSGFYKGVQSAGAAVAWQVDTRKVPLMSQLIVNWSLTTVSYPLLVLLVYFYVKNDNDDDSNDKV

SEQ ID NO: 4728 - DNA, 2222 bp, Arabidopsis thaliana
  misc_feature (1)..(2222): Ceres Seq. ID no. 12371005
aaaaagaaaaatcgttactttaaagccaaaaagaagaatacacaaacttcattcactctctcccattctcggatctctctcagtgcacagtggttgtcactcttctcctttggtcgaaactctttcttggaaagagcattttgttatcaagactctgaagagctcttttgggaggatagtaaggttggatgatgagagggagatctgatggaggcctaaagaagcggcttattgcttcggtctgtgtcgtggctctattcgtctgtttcttgtttatgtactatggttcctctagccaaggtgcatcagcattggaatatggaagatctttgagaaaactcggatcgtcttatttgagtggagatgatgataatggtgataccaaacaggatgattctgtggctaatgcagaagacagtcttgttgtcgccaaaagttttcctgtttgtgatgaccggcactcggaaatcatcccttgcttagataggaatttcatctaccaaatgaggttgaagcttgatctctctttaatggaacattatgaacggcattgtcctcctcccgaaagacggtttaattgtttgattcctccaccatctggatacaaggttcctattaagtggcctaagagtagagatgaagtgtggaaagcaaacatacctcacactcaccttgcaaaagagaagtctgatcagaactggatggttgagaaaggcgagaaaatttcttttcccggtggaggcactcatttccattgcggtgctgataaatacattgcatcgatcgcaaatatgcttaacttttcgaacgatgtattgaatgacgaagggagattaagaacggttcttgatgtcggatgcggagttgcgagttttggagcttaccttctcgcgtctgatataatgacaatgtcactagcccctaatgatgttcatcagaaccaaatccagtttgcgttagaaagaggaatccctgcttatcttggtgttttaggtaccaaaaggcttccttacccgagcagatcattcgagtttgctcattgttctcgatgtaggattgattggcttcaaagagacggacttcttcttcttgagctcgatcgggtactaagaccgggaggttatttcgcgtattcgtctcctgaagcttacgcacaagatgaagagaatttgaaaatctggaaggagatgagtgctcttgttgaaagaatgtgttggagaattgccgttaaaagaaaccaaactgtggtttggcagaaaccgttgagtaatgactgttacttggagagagagcccgggacacagcctcctctctgtcgctcagatgctgatcctgatgcggttgcgggtgtttcaatggaagcttgcatcactccttactccaagcatgaccataaaaccaagggaagtgggttagctccttggccagctaggttgacttcttctcctccccgtcttgcggatttcggttattcaaccgacatgtttgagaaggacacggaactttggaaacaacaagtggacagttactggaatctgatgtcatcgaaagtcaaatcaaacactgtgaggaacataatggacatgaaagctcacatgggttctttcgcagctgctcttaaagacaaagatgtgtgggtgatgaacgttgtctctcccgacggtcccaacactctaaaactgatctacgaccgtggtttaatcggaacaaatcataactggtgtgaggctttctctacatatcctcgaacatacgatctgttgcacgcgtggtctatattttcagacattaaaagcaaaggatgcagtgcagaggatctactaatcgagatggatcggattcttagacctacgggattcgttatcatcagagataagcagagtgttgttgagtcaatcaagaagtatttgcaggctttgcattgggagactgtggcatcagagaaggtaaatacaagttcagaactcgaccaagacagtgaagatggtgagaacaatgtcgttttcattgtccagaagaaactttggctcaccagtgaaagccttagggacagcgagtaaaaaacatatcaaaagcaaagagagagaaattgttttatcccacaaagtttttatatagttttattttgatttttgtagttgatttgtacgacataaagcattattatataaaatactaaaattattcattgtttcttactttcttgaaatattctttaattt

SEQ ID NO: 4729 - protein, 623 aa, Arabidopsis thaliana
  peptide (1)..(623): Ceres Seq. ID no. 12371006
  misc_feature (93)..(399): Pfam Name: Pfam Description:  Putative methyltransferase
  misc_feature (59)..(399): NCBI GI NO: 25406781 NR Description: hypothetical protein
  misc_feature (401)..(623): NCBI GI NO: 25406781 NR Description: hypothetical protein
  misc_feature (2)..(623): NCBI GI NO: 18414198 NR Description: ankyrin like protein; protein id: At4g14360
  misc_feature (2)..(623): NCBI GI NO: 22331280 NR Description: expressed protein; protein id: At3g23300.1
  misc_feature (21)..(623): NCBI GI NO: 7488052 NR Description: probable ankyrin - Arabidopsis thaliana
  misc_feature (14)..(613): NCBI GI NO: 22326809 NR Description: putative protein; protein id: At5g14430
  misc_feature (86)..(613): NCBI GI NO: 11357548 NR Description: hypothetical protein F18O22
  misc_feature (2)..(141): NCBI GI NO: 25406781 NR Description: hypothetical protein
  misc_feature (82)..(581): NCBI GI NO: 18405149 NR Description: expressed protein; protein id: At2g39750
  misc_feature (58)..(585): NCBI GI NO: 15239326 NR Description: ankyrin-like protein; protein id: At5g06050.1
MMRGRSDGGLKKRLIASVCVVALFVCFLFMYYGSSSQGASALEYGRSLRKLGSSYLSGDDDNGDTKQDDSVANAEDSLVVAKSFPVCDDRHSEIIPCLDRNFIYQMRLKLDLSLMEHYERHCPPPERRFNCLIPPPSGYKVPIKWPKSRDEVWKANIPHTHLAKEKSDQNWMVEKGEKISFPGGGTHFHCGADKYIASIANMLNFSNDVLNDEGRLRTVLDVGCGVASFGAYLLASDIMTMSLAPNDVHQNQIQFALERGIPAYLGVLGTKRLPYPSRSFEFAHCSRCRIDWLQRDGLLLLELDRVLRPGGYFAYSSPEAYAQDEENLKIWKEMSALVERMCWRIAVKRNQTVVWQKPLSNDCYLEREPGTQPPLCRSDADPDAVAGVSMEACITPYSKHDHKTKGSGLAPWPARLTSSPPRLADFGYSTDMFEKDTELWKQQVDSYWNLMSSKVKSNTVRNIMDMKAHMGSFAAALKDKDVWVMNVVSPDGPNTLKLIYDRGLIGTNHNWCEAFSTYPRTYDLLHAWSIFSDIKSKGCSAEDLLIEMDRILRPTGFVIIRDKQSVVESIKKYLQALHWETVASEKVNTSSELDQDSEDGENNVVFIVQKKLWLTSESLRDSE

SEQ ID NO: 4730 - protein, 622 aa, Arabidopsis thaliana
  peptide (1)..(622): Ceres Seq. ID no. 12371007
  misc_feature (92)..(398): Pfam Name: Pfam Description:  Putative methyltransferase
  misc_feature (58)..(398): NCBI GI NO: 25406781 NR Description: hypothetical protein
  misc_feature (400)..(622): NCBI GI NO: 25406781 NR Description: hypothetical protein
  misc_feature (1)..(622): NCBI GI NO: 18414198 NR Description: ankyrin like protein; protein id: At4g14360
  misc_feature (1)..(622): NCBI GI NO: 22331280 NR Description: expressed protein; protein id: At3g23300.1
  misc_feature (20)..(622): NCBI GI NO: 7488052 NR Description: probable ankyrin - Arabidopsis thaliana
  misc_feature (13)..(612): NCBI GI NO: 22326809 NR Description: putative protein; protein id: At5g14430
  misc_feature (85)..(612): NCBI GI NO: 11357548 NR Description: hypothetical protein F18O22
  misc_feature (1)..(140): NCBI GI NO: 25406781 NR Description: hypothetical protein
  misc_feature (81)..(580): NCBI GI NO: 18405149 NR Description: expressed protein; protein id: At2g39750
  misc_feature (57)..(584): NCBI GI NO: 15239326 NR Description: ankyrin-like protein; protein id: At5g06050.1
MRGRSDGGLKKRLIASVCVVALFVCFLFMYYGSSSQGASALEYGRSLRKLGSSYLSGDDDNGDTKQDDSVANAEDSLVVAKSFPVCDDRHSEIIPCLDRNFIYQMRLKLDLSLMEHYERHCPPPERRFNCLIPPPSGYKVPIKWPKSRDEVWKANIPHTHLAKEKSDQNWMVEKGEKISFPGGGTHFHCGADKYIASIANMLNFSNDVLNDEGRLRTVLDVGCGVASFGAYLLASDIMTMSLAPNDVHQNQIQFALERGIPAYLGVLGTKRLPYPSRSFEFAHCSRCRIDWLQRDGLLLLELDRVLRPGGYFAYSSPEAYAQDEENLKIWKEMSALVERMCWRIAVKRNQTVVWQKPLSNDCYLEREPGTQPPLCRSDADPDAVAGVSMEACITPYSKHDHKTKGSGLAPWPARLTSSPPRLADFGYSTDMFEKDTELWKQQVDSYWNLMSSKVKSNTVRNIMDMKAHMGSFAAALKDKDVWVMNVVSPDGPNTLKLIYDRGLIGTNHNWCEAFSTYPRTYDLLHAWSIFSDIKSKGCSAEDLLIEMDRILRPTGFVIIRDKQSVVESIKKYLQALHWETVASEKVNTSSELDQDSEDGENNVVFIVQKKLWLTSESLRDSE

SEQ ID NO: 4731 - protein, 594 aa, Arabidopsis thaliana
  peptide (1)..(594): Ceres Seq. ID no. 12371008
  misc_feature (64)..(370): Pfam Name: Pfam Description:  Putative methyltransferase
  misc_feature (30)..(370): NCBI GI NO: 25406781 NR Description: hypothetical protein
  misc_feature (372)..(594): NCBI GI NO: 25406781 NR Description: hypothetical protein
  misc_feature (1)..(594): NCBI GI NO: 18414198 NR Description: ankyrin like protein; protein id: At4g14360
  misc_feature (1)..(594): NCBI GI NO: 22331280 NR Description: expressed protein; protein id: At3g23300.1
  misc_feature (1)..(594): NCBI GI NO: 7488052 NR Description: probable ankyrin - Arabidopsis thaliana
  misc_feature (1)..(584): NCBI GI NO: 22326809 NR Description: putative protein; protein id: At5g14430
  misc_feature (57)..(584): NCBI GI NO: 11357548 NR Description: hypothetical protein F18O22
  misc_feature (1)..(112): NCBI GI NO: 25406781 NR Description: hypothetical protein
  misc_feature (53)..(552): NCBI GI NO: 18405149 NR Description: expressed protein; protein id: At2g39750
  misc_feature (29)..(556): NCBI GI NO: 15239326 NR Description: ankyrin-like protein; protein id: At5g06050.1
MYYGSSSQGASALEYGRSLRKLGSSYLSGDDDNGDTKQDDSVANAEDSLVVAKSFPVCDDRHSEIIPCLDRNFIYQMRLKLDLSLMEHYERHCPPPERRFNCLIPPPSGYKVPIKWPKSRDEVWKANIPHTHLAKEKSDQNWMVEKGEKISFPGGGTHFHCGADKYIASIANMLNFSNDVLNDEGRLRTVLDVGCGVASFGAYLLASDIMTMSLAPNDVHQNQIQFALERGIPAYLGVLGTKRLPYPSRSFEFAHCSRCRIDWLQRDGLLLLELDRVLRPGGYFAYSSPEAYAQDEENLKIWKEMSALVERMCWRIAVKRNQTVVWQKPLSNDCYLEREPGTQPPLCRSDADPDAVAGVSMEACITPYSKHDHKTKGSGLAPWPARLTSSPPRLADFGYSTDMFEKDTELWKQQVDSYWNLMSSKVKSNTVRNIMDMKAHMGSFAAALKDKDVWVMNVVSPDGPNTLKLIYDRGLIGTNHNWCEAFSTYPRTYDLLHAWSIFSDIKSKGCSAEDLLIEMDRILRPTGFVIIRDKQSVVESIKKYLQALHWETVASEKVNTSSELDQDSEDGENNVVFIVQKKLWLTSESLRDSE

SEQ ID NO: 4732 - DNA, 1239 bp, Arabidopsis thaliana
  misc_feature (1)..(1239): Ceres Seq. ID no. 12422128
tgagtaatagtgagcaaaatgcaagagctagtgtgaacaagaatggattaagagacttgaggaacaaatctggttctgatgttcttccatctaattcaactccgacaagaaaaagtaacatctttagaaagaaaacctctgatggtgagagcagctcttcgagtagagggaataagacggaaggatcagtggttgggggaaagaatattagttcccctcaggggaatggcatcaccatgtctgaacctaggaggaacagaaacttaccaagtgttagggacaacagtgttgtttcaagtagtactaggagatcaactggttattatggtagaacaggacgtgctggagcggttgcaacactacaagcacctcggcctccaacaagagctgatctcaatccttctagatcggcagaagcttcgcgtagtcctttaaatagttacagtaggccaatcagtagtaatggcaggttacgtagcctgatgatgcctggtagcccctcagaagccggcctttctcgctctttgatgaaccgtgatacttacagacggtataacatgaatggagttgcagaggtattgttggccctggaaaggattgagcaagacgaagagcttacatacgagcaattggctgttttagagaccaatctgttcttaaatggtatgagcagcttccacgatcagcatagagatatgaggcttgacattgacaacatgtcgtatgaggaactgttagcattagaggagaaaatgggtacagtgagcactgctctaagcgaagaagcgcttctgaaaagcctcaagtcaagtatttaccgtccaaacgatgaatccgacgacatttgcctgaacaaagatgatgatgtcaagtgcagcatttgccaggaagagtatgttgatggagatgaagtagggactttgccttgccaacataaataccacgtgagctgcgcgcaacaatggctacggatgaagaattggtgtcctatatgtaaaacctctgcagaatctcagccacatccattttcatgatgatgggattgcagagacatttaccaaagtgtttgtgtctacttccactaccttgctctctattatttgtacataaaaggttttcttttttacttacacacaattgggaacaaatagaaaataagatcaggtggacaaattattgttttcaccttgtattggttcgtaatttcaacaatatttggtttaattccatatatagttt

SEQ ID NO: 4733 - protein, 343 aa, Arabidopsis thaliana
  peptide (1)..(343): Ceres Seq. ID no. 12422129
  misc_feature (291)..(331): Pfam Name: RING finger Pfam Description: Zinc finger, C3HC4 type
  misc_feature (1)..(343): NCBI GI NO: 30689641 NR Description: RING finger-related protein [Arabidopsis thaliana]
  misc_feature (2)..(338): NCBI GI NO: 10129643 NR Description: Pspzf zinc finger protein-like
  misc_feature (2)..(338): NCBI GI NO: 20466428 NR Description: Pspzf zinc finger protein-like
  misc_feature (2)..(338): NCBI GI NO: 22326712 NR Description: Pspzf zinc finger protein - like
  misc_feature (25)..(337): NCBI GI NO: 7486381 NR Description: hypothetical protein F3L17
  misc_feature (25)..(337): NCBI GI NO: 18417809 NR Description: putative protein; protein id: At4g31450
  misc_feature (133)..(337): NCBI GI NO: 15235211 NR Description: putative protein; protein id: At4g34040.1
  misc_feature (133)..(339): NCBI GI NO: 15226553 NR Description: putative RING zinc finger protein
  misc_feature (6)..(334): NCBI GI NO: 15239131 NR Description: putative protein; protein id: At5g42940
  misc_feature (48)..(335): NCBI GI NO: 38345496 NR Description: OSJNBa0010D21.9
SNSEQNARASVNKNGLRDLRNKSGSDVLPSNSTPTRKSNIFRKKTSDGESSSSSRGNKTEGSVVGGKNISSPQGNGITMSEPRRNRNLPSVRDNSVVSSSTRRSTGYYGRTGRAGAVATLQAPRPPTRADLNPSRSAEASRSPLNSYSRPISSNGRLRSLMMPGSPSEAGLSRSLMNRDTYRRYNMNGVAEVLLALERIEQDEELTYEQLAVLETNLFLNGMSSFHDQHRDMRLDIDNMSYEELLALEEKMGTVSTALSEEALLKSLKSSIYRPNDESDDICLNKDDDVKCSICQEEYVDGDEVGTLPCQHKYHVSCAQQWLRMKNWCPICKTSAESQPHPFS

SEQ ID NO: 4734 - protein, 265 aa, Arabidopsis thaliana
  peptide (1)..(265): Ceres Seq. ID no. 12422130
  misc_feature (213)..(253): Pfam Name: RING finger Pfam Description: Zinc finger, C3HC4 type
  misc_feature (1)..(265): NCBI GI NO: 30689641 NR Description: RING finger-related protein [Arabidopsis thaliana]
  misc_feature (1)..(260): NCBI GI NO: 10129643 NR Description: Pspzf zinc finger protein-like
  misc_feature (1)..(260): NCBI GI NO: 22326712 NR Description: Pspzf zinc finger protein - like
  misc_feature (1)..(260): NCBI GI NO: 20466428 NR Description: Pspzf zinc finger protein-like
  misc_feature (1)..(259): NCBI GI NO: 7486381 NR Description: hypothetical protein F3L17
  misc_feature (1)..(259): NCBI GI NO: 18417809 NR Description: putative protein; protein id: At4g31450
  misc_feature (55)..(259): NCBI GI NO: 15235211 NR Description: putative protein; protein id: At4g34040.1
  misc_feature (55)..(261): NCBI GI NO: 15226553 NR Description: putative RING zinc finger protein
  misc_feature (1)..(256): NCBI GI NO: 15239131 NR Description: putative protein; protein id: At5g42940
  misc_feature (1)..(257): NCBI GI NO: 38345496 NR Description: OSJNBa0010D21.9
MSEPRRNRNLPSVRDNSVVSSSTRRSTGYYGRTGRAGAVATLQAPRPPTRADLNPSRSAEASRSPLNSYSRPISSNGRLRSLMMPGSPSEAGLSRSLMNRDTYRRYNMNGVAEVLLALERIEQDEELTYEQLAVLETNLFLNGMSSFHDQHRDMRLDIDNMSYEELLALEEKMGTVSTALSEEALLKSLKSSIYRPNDESDDICLNKDDDVKCSICQEEYVDGDEVGTLPCQHKYHVSCAQQWLRMKNWCPICKTSAESQPHPFS

SEQ ID NO: 4735 - protein, 183 aa, Arabidopsis thaliana
  peptide (1)..(183): Ceres Seq. ID no. 12422131
  misc_feature (131)..(171): Pfam Name: RING finger Pfam Description: Zinc finger, C3HC4 type
  misc_feature (1)..(183): NCBI GI NO: 30689641 NR Description: RING finger-related protein [Arabidopsis thaliana]
  misc_feature (1)..(178): NCBI GI NO: 10129643 NR Description: Pspzf zinc finger protein-like
  misc_feature (1)..(178): NCBI GI NO: 20466428 NR Description: Pspzf zinc finger protein-like
  misc_feature (1)..(178): NCBI GI NO: 22326712 NR Description: Pspzf zinc finger protein - like
  misc_feature (1)..(177): NCBI GI NO: 7486381 NR Description: hypothetical protein F3L17
  misc_feature (1)..(177): NCBI GI NO: 18417809 NR Description: putative protein; protein id: At4g31450
  misc_feature (1)..(177): NCBI GI NO: 15235211 NR Description: putative protein; protein id: At4g34040.1
  misc_feature (1)..(179): NCBI GI NO: 15226553 NR Description: putative RING zinc finger protein
  misc_feature (1)..(174): NCBI GI NO: 15239131 NR Description: putative protein; protein id: At5g42940
  misc_feature (1)..(175): NCBI GI NO: 38345496 NR Description: OSJNBa0010D21.9
MMPGSPSEAGLSRSLMNRDTYRRYNMNGVAEVLLALERIEQDEELTYEQLAVLETNLFLNGMSSFHDQHRDMRLDIDNMSYEELLALEEKMGTVSTALSEEALLKSLKSSIYRPNDESDDICLNKDDDVKCSICQEEYVDGDEVGTLPCQHKYHVSCAQQWLRMKNWCPICKTSAESQPHPFS

SEQ ID NO: 4736 - DNA, 1484 bp, Arabidopsis thaliana
  misc_feature (1)..(1484): Ceres Seq. ID no. 12328944
attttttcatcacttatcagcgatttgacgagaagagccttttggtttctgcgaatcatccaaaatccgccatggaagcaactacaagaatcttgagtacttcttctgctctcaatcgtcttcttcttctcagtaagctcaatctaaaatcagatccccgtaatatcaattccacaaatcagctactacacaatgccgttacccgaaaatcctctatctccgccgctcgtatacggtgctcttcgctccctgcgaatgcgaatctcttcagatcactcttcttcctaacgtcaacgtttcgtctcgagaacaccgccgttcacgctaatccattccgatccgaacctaacgacggcgtcgccgtctggaacagagctccacggatcgtgaacggaggtggaaacgcggcgatattcggcgggaacgaggggaaagagacgacggtggttctccttggttggctaggagcgaaagctaaacatctaaggagatacgttgagtggtacaactccaggggaattaacgccgttactttcactgttgacgttagggatttgctccggttagatcttggtcggcggcttgaacgaaggatagctgaatttgggaatgaattggttaattgggtatcggagaaagaagatgatggtagagagaaatgcttggtgtttcacagcttcagtaacactggttggcttgtatatggtgccttgctagagagcttcattggtagacaagatttagtagaaaggattgagggttgtatcattgactcgggaggagcagatcctcttgatactaagatttgggcagcggggtttaccgcagctatactgaagaagcgtagctccaccataaccacagaaccaaacagtcccataaaagaagaggatgcttcaacaccacaaaagaaggaacctttaggaatcgaaaacataatgctatcatctctggagaaactcttccccatcttcttaaaccacccagacgtcaatacgaggctaacaaaaatcattcaaaaactatatgagaaccatcctccatgtcctcagctctatctttacagctccggggacaaagttgttccatctcattccgttgagctccgcatccgagaacaacagaagattggaagaaagatacattctttcaatttcaagtcctctcctcacgtggatcattaccggaactttcctgacttgtattcctcacagcttcaaaacttcttgcaagaatgcttcacaccaacaaaacaacaagctctgtgactttggaacatctttttttgcagaatatttgtagccttggtttgtttgtttgttttctcctcaaaagttgtttattattgatgatagaacaagataatccgaaggagacagaaactccaaactgtgtcgacgagctactgagcagagatagtttctgaaactcttagattgttgttgctagtttggcttcatatgtgaaacttgaccgatgctcgg

SEQ ID NO: 4737 - protein, 421 aa, Arabidopsis thaliana
  peptide (1)..(421): Ceres Seq. ID no. 12328945
  misc_feature (144)..(412): Pfam Name: DUF829 Pfam Description: Eukaryotic protein of unknown function
  misc_feature (24)..(421): NCBI GI NO: 21536700 NR Description: unknown [Arabidopsis thaliana]
  misc_feature (24)..(421): NCBI GI NO: 18398681 NR Description: Expressed protein; protein id: At2g18245
  misc_feature (2)..(268): NCBI GI NO: 25411844 NR Description: probable integral membrane protein
  misc_feature (126)..(409): NCBI GI NO: 18402437 NR Description: expressed protein; protein id: At3g19970
  misc_feature (139)..(285): NCBI GI NO: 13375774 NR Description: hypothetical protein FLJ22353 [Homo sapiens]
  misc_feature (312)..(412): NCBI GI NO: 13375774 NR Description: hypothetical protein FLJ22353 [Homo sapiens]
  misc_feature (139)..(285): NCBI GI NO: 40555886 NR Description: Hypothetical protein FLJ22353 [Homo sapiens]
  misc_feature (335)..(412): NCBI GI NO: 40555886 NR Description: Hypothetical protein FLJ22353 [Homo sapiens]
  misc_feature (97)..(258): NCBI GI NO: 19528521 NR Description: RE54285p [Drosophila melanogaster]
  misc_feature (349)..(421): NCBI GI NO: 19528521 NR Description: RE54285p [Drosophila melanogaster]
FFITYQRFDEKSLLVSANHPKSAMEATTRILSTSSALNRLLLLSKLNLKSDPRNINSTNQLLHNAVTRKSSISAARIRCSSLPANANLFRSLFFLTSTFRLENTAVHANPFRSEPNDGVAVWNRAPRIVNGGGNAAIFGGNEGKETTVVLLGWLGAKAKHLRRYVEWYNSRGINAVTFTVDVRDLLRLDLGRRLERRIAEFGNELVNWVSEKEDDGREKCLVFHSFSNTGWLVYGALLESFIGRQDLVERIEGCIIDSGGADPLDTKIWAAGFTAAILKKRSSTITTEPNSPIKEEDASTPQKKEPLGIENIMLSSLEKLFPIFLNHPDVNTRLTKIIQKLYENHPPCPQLYLYSSGDKVVPSHSVELRIREQQKIGRKIHSFNFKSSPHVDHYRNFPDLYSSQLQNFLQECFTPTKQQAL

SEQ ID NO: 4738 - protein, 398 aa, Arabidopsis thaliana
  peptide (1)..(398): Ceres Seq. ID no. 12328946
  misc_feature (121)..(389): Pfam Name: DUF829 Pfam Description: Eukaryotic protein of unknown function
  misc_feature (1)..(398): NCBI GI NO: 21536700 NR Description: unknown [Arabidopsis thaliana]
  misc_feature (1)..(398): NCBI GI NO: 18398681 NR Description: Expressed protein; protein id: At2g18245
  misc_feature (1)..(245): NCBI GI NO: 25411844 NR Description: probable integral membrane protein
  misc_feature (103)..(386): NCBI GI NO: 18402437 NR Description: expressed protein; protein id: At3g19970
  misc_feature (116)..(262): NCBI GI NO: 13375774 NR Description: hypothetical protein FLJ22353 [Homo sapiens]
  misc_feature (289)..(389): NCBI GI NO: 13375774 NR Description: hypothetical protein FLJ22353 [Homo sapiens]
  misc_feature (116)..(262): NCBI GI NO: 40555886 NR Description: Hypothetical protein FLJ22353 [Homo sapiens]
  misc_feature (312)..(389): NCBI GI NO: 40555886 NR Description: Hypothetical protein FLJ22353 [Homo sapiens]
  misc_feature (74)..(235): NCBI GI NO: 19528521 NR Description: RE54285p [Drosophila melanogaster]
  misc_feature (326)..(398): NCBI GI NO: 19528521 NR Description: RE54285p [Drosophila melanogaster]
MEATTRILSTSSALNRLLLLSKLNLKSDPRNINSTNQLLHNAVTRKSSISAARIRCSSLPANANLFRSLFFLTSTFRLENTAVHANPFRSEPNDGVAVWNRAPRIVNGGGNAAIFGGNEGKETTVVLLGWLGAKAKHLRRYVEWYNSRGINAVTFTVDVRDLLRLDLGRRLERRIAEFGNELVNWVSEKEDDGREKCLVFHSFSNTGWLVYGALLESFIGRQDLVERIEGCIIDSGGADPLDTKIWAAGFTAAILKKRSSTITTEPNSPIKEEDASTPQKKEPLGIENIMLSSLEKLFPIFLNHPDVNTRLTKIIQKLYENHPPCPQLYLYSSGDKVVPSHSVELRIREQQKIGRKIHSFNFKSSPHVDHYRNFPDLYSSQLQNFLQECFTPTKQQAL

SEQ ID NO: 4739 - DNA, 1411 bp, Arabidopsis thaliana
  misc_feature (1)..(1411): Ceres Seq. ID no. 12336219
aaaaaatatttatgttgggtcaggcttaaaccagagagagactgtgtgtggtcgagccatttgaccaaaagcaaaaacttaaaactggtttcagatctgaagtaaaagggttttgcttcggattctccggcgtcgtttaaatgatctctgacccatcttccttggcttaataattctggtccctccttttatctctttttactgttgatttatctgaatatgccacgctctttcttccacatgtttattctctcttcctttcttcaacacaagcgtctggactaaggaaagccaacaacaaaatctggtttcaagacggttggcaggagtttgtcaaccgtttctccattcggattggtttcagatacaaagttacagtctacattttcaatttatcctccacactctgagatcaaccaccattctagtagtgaagctcttatgcaaatggattccgcacagaatcagttcaacaaacgtgctcgattgtttgaagatcctgaactcaaagatgctaaggtcatttatccatcgaaccctgaatctactgaaccagtgaataaaggttatggcggttctacagccatccaaagctttttcaaagaatctaaagctgaagaaacgcccaaggtacttaagaagagaggaaggaagaagaagaatcctaatcccgaggaagtaaactcttcaactcccggtggagatgactcagagaaccgctcaaagttctacgagagtgcttctgctagaaagagaactgtaactgcagaggaaagagagagagccgtcaatgcagccaaaacattcgaaccaacaaatccttactttagagttgttctgcgaccatcatatctatacagaggttgcatcatgtacttgccatctgggtttgctgagaaatacctaagtgggatatctggtttcatcaagctccagctcggtgagaaacaatggccagtgaggtgcctctacaaagcagggagagctaagtttagccaaggatggtatgagttcacactcgagaacaatataggcgaaggagatgtatgtgtgtttgagctactcagaactcgggatttcgttctcgaagtcaccgcctttcgtgtcaatgagtatgtgtgaccaaaaaagatttccctttcatcagcgatcttgcaggtagctttccaaagttaaaattttatgtaggggtctcttaaccattctctctcttgcattggttgtctctgttctagtagtgttttgagtgaaatttcaggttcctatgtttggatgtggataagtatttgacgattataataacctctgagtgggaaactctttgtttgagtggtagctaggttcaaaagtagagttgtatatacttttatcttcatcaggataattatgtttatttgaattgttgattatt

SEQ ID NO: 4740 - protein, 226 aa, Arabidopsis thaliana
  peptide (1)..(226): Ceres Seq. ID no. 12336220
  misc_feature (128)..(225): Pfam Name: Pfam Description:  B3 DNA binding domain
  misc_feature (1)..(226): NCBI GI NO: 18402653 NR Description: expressed protein; protein id: At1g49480
  misc_feature (1)..(226): NCBI GI NO: 14596161 NR Description: Unknown protein [Arabidopsis thaliana]
  misc_feature (1)..(226): NCBI GI NO: 30685150 NR Description: transcriptional factor B3 family
  misc_feature (1)..(226): NCBI GI NO: 40806799 NR Description: reduced vernalization response 1 [Brassica rapa]
  misc_feature (1)..(226): NCBI GI NO: 33943517 NR Description: reduced vernalization response 1 [Brassica rapa]
  misc_feature (3)..(226): NCBI GI NO: 9280316 NR Description: gb|AAD43153
  misc_feature (97)..(224): NCBI GI NO: 34910734 NR Description: P0022F10.13
MQMDSAQNQFNKRARLFEDPELKDAKVIYPSNPESTEPVNKGYGGSTAIQSFFKESKAEETPKVLKKRGRKKKNPNPEEVNSSTPGGDDSENRSKFYESASARKRTVTAEERERAVNAAKTFEPTNPYFRVVLRPSYLYRGCIMYLPSGFAEKYLSGISGFIKLQLGEKQWPVRCLYKAGRAKFSQGWYEFTLENNIGEGDVCVFELLRTRDFVLEVTAFRVNEYV

SEQ ID NO: 4741 - protein, 224 aa, Arabidopsis thaliana
  peptide (1)..(224): Ceres Seq. ID no. 12336221
  misc_feature (126)..(223): Pfam Name: Pfam Description:  B3 DNA binding domain
  misc_feature (1)..(224): NCBI GI NO: 18402653 NR Description: expressed protein; protein id: At1g49480
  misc_feature (1)..(224): NCBI GI NO: 14596161 NR Description: Unknown protein [Arabidopsis thaliana]
  misc_feature (1)..(224): NCBI GI NO: 30685150 NR Description: transcriptional factor B3 family
  misc_feature (1)..(224): NCBI GI NO: 40806799 NR Description: reduced vernalization response 1 [Brassica rapa]
  misc_feature (1)..(224): NCBI GI NO: 33943517 NR Description: reduced vernalization response 1 [Brassica rapa]
  misc_feature (1)..(224): NCBI GI NO: 9280316 NR Description: gb|AAD43153
  misc_feature (95)..(222): NCBI GI NO: 34910734 NR Description: P0022F10.13
MDSAQNQFNKRARLFEDPELKDAKVIYPSNPESTEPVNKGYGGSTAIQSFFKESKAEETPKVLKKRGRKKKNPNPEEVNSSTPGGDDSENRSKFYESASARKRTVTAEERERAVNAAKTFEPTNPYFRVVLRPSYLYRGCIMYLPSGFAEKYLSGISGFIKLQLGEKQWPVRCLYKAGRAKFSQGWYEFTLENNIGEGDVCVFELLRTRDFVLEVTAFRVNEYV

SEQ ID NO: 4742 - DNA, 680 bp, Arabidopsis thaliana
  misc_feature (1)..(680): Ceres Seq. ID no. 12326513
aggaagggtttatagattaggtttttaagtcgcacctctctctctcactgccgcatcttttcttagggttcttgtttcgctatctcttaaacacaaacagctctgtccgaataatctctcttcaagtacctctttttcctgattctgtatatcgccatgaattactgatttccctctctataaacccatcaaagtaaaccaatttctcctgtgacttgtacctaactcgatcttaccagactggtgatggcgtctttgaaccctttcgatcttctaggagatgatgctgaggatccaagccagctcgctgtggctttgtctcagaaagtcgagaaagctgctgctgctgttcagcctcctaaggccgctaagttcccaaccaagccggctcctccttctcaagcagtgagggagtcgaggaatgctcctcaaggaggtcgtggtgggactggtggaggaggaaaccaaaggtatgcaaaagaagctgcagctccggcgattggagacacagctcagttcccttcgttgggctagtaaagacccctggtccttcagcctcgctatctctgtctttcgtttctctttggttgaattttgttagttttataattttttgttacactttctgaaggtcttttctgcgaaactattacgttttttaagttatgaaaaaaattatt

SEQ ID NO: 4743 - protein, 95 aa, Arabidopsis thaliana
  peptide (1)..(95): Ceres Seq. ID no. 12326514
  misc_feature (1)..(75): NCBI GI NO: 15238039 NR Description: putative protein; protein id: At5g47210
  misc_feature (1)..(75): NCBI GI NO: 21553991 NR Description: nuclear RNA binding protein A-like protein
  misc_feature (1)..(84): NCBI GI NO: 15236552 NR Description: nuclear RNA binding protein A-like protein
  misc_feature (1)..(84): NCBI GI NO: 21593013 NR Description: nuclear RNA binding protein A-like protein
  misc_feature (1)..(70): NCBI GI NO: 15235894 NR Description: nuclear antigen homolog; protein id: At4g16830
  misc_feature (1)..(75): NCBI GI NO: 21537052 NR Description: nuclear antigen homolog [Arabidopsis thaliana]
  misc_feature (1)..(78): NCBI GI NO: 39725278 NR Description: salt tolerance protein 2 [Beta vulgaris]
  misc_feature (1)..(93): NCBI GI NO: 7488863 NR Description: probable transcription factor - fava bean
  misc_feature (1)..(78): NCBI GI NO: 6492266 NR Description: nuclear RNA binding protein A [Spinacia oleracea]
  misc_feature (1)..(75): NCBI GI NO: 39725276 NR Description: salt tolerance protein 1 [Beta vulgaris]
MASLNPFDLLGDDAEDPSQLAVALSQKVEKAAAAVQPPKAAKFPTKPAPPSQAVRESRNAPQGGRGGTGGGGNQRYAKEAAAPAIGDTAQFPSLG

SEQ ID NO: 4744 - protein, 59 aa, Arabidopsis thaliana
  peptide (1)..(59): Ceres Seq. ID no. 12326515
MLLKEVVVGLVEEETKGMQKKLQLRRLETQLSSLRWASKDPWSFSLAISVFRFSLVEFC

SEQ ID NO: 4745 - DNA, 1293 bp, Arabidopsis thaliana
  misc_feature (1)..(1293): Ceres Seq. ID no. 13488711
ggaaccaattggttctgatttcagatttcgaatttttttaatttgaatccaaatggagaaagcagagaacgagaataagccatcggctgtatctgacgtcggagcatgggctatgaacgtaacgagctccgttgggatcatcatggctaataaacaactaatgtcatcatctggattaggcttcagcttcgcgacaactctcacgggatttcactttgctcttactgctctcgttggtatggtgtcgaatgcgactggtttatcagcatctaagcatgttcctctttgggagcttctttggttctcactcgttgctaatatctcaatcgctgctatgaattttagtcttatgttgaactctgttggcttctaccagatatcgaaattgagcatgattccagttgtttgtgtgatggaatgggttctacatagtaagcattactcgagagaagtgaaggcatctgtcatggttgttgttgtaggagttgggatttgtactgttactgatgtcaaagttaatgccaaaggtttcatttgtgcttgcactgccgttttctccacttctctccagcagatctcaataggttcactgcagaagaaatactcgatcggatcattcgagttgctgagtaagacagctccaatccaagccatttcactcctcatctttggtccatttgttgactatttcttgagtggcagattcatttcgacttacaagatgacttatagcgcaatgttatgcattcttctctcctgcgcattggcggttttctgcaacataagccaatatctctgcatcggaagattctctgctacctcattccaagttcttggccacatgaaaacagtctgtgtcttaacattaggatggcttatctttgattcggagatgacattcaagaacatagcagggatggtcttagccgtggtgggaatggtgatatacagttgggcagtcgagttagagaaacagagaaagtcgaaagtgataccgcatggtaaacacagtatgacagaagatgagattaaacttctcaaagaaggtatagaacatatggatttgaaagacatggagcttggaaataataaagcataaatatagctctattcaagagaaacgttttttggttatatttttggttactcatttcccccatcatgtactcttttcttttgccctttttttcgttctttgtctcaaagaacctttttagcctcttattgatgagctctcctctgcagagcacattcttttttctatagaaatatatgattcctctacttctttgc

SEQ ID NO: 4746 - protein, 348 aa, Arabidopsis thaliana
  peptide (1)..(348): Ceres Seq. ID no. 13488712
  misc_feature (1)..(348): NCBI GI NO: 21536703 NR Description: unknown [Arabidopsis thaliana]
  misc_feature (1)..(348): NCBI GI NO: 18394949 NR Description: transporter-related [Arabidopsis thaliana]
  misc_feature (1)..(347): NCBI GI NO: 18411172 NR Description: transporter-related [Arabidopsis thaliana]
  misc_feature (37)..(348): NCBI GI NO: 26450366 NR Description: unknown protein [Arabidopsis thaliana]
  misc_feature (4)..(347): NCBI GI NO: 15238957 NR Description: transporter-related [Arabidopsis thaliana]
  misc_feature (43)..(348): NCBI GI NO: 33146838 NR Description: transporter-related-like
  misc_feature (5)..(48): NCBI GI NO: 33146838 NR Description: transporter-related-like
  misc_feature (12)..(318): NCBI GI NO: 30313364 NR Description: putative transmembrane protein [Oryza sativa]
  misc_feature (1)..(337): NCBI GI NO: 15234794 NR Description: transporter-related [Arabidopsis thaliana]
  misc_feature (1)..(315): NCBI GI NO: 18399097 NR Description: transporter-related [Arabidopsis thaliana]
MEKAENENKPSAVSDVGAWAMNVTSSVGIIMANKQLMSSSGLGFSFATTLTGFHFALTALVGMVSNATGLSASKHVPLWELLWFSLVANISIAAMNFSLMLNSVGFYQISKLSMIPVVCVMEWVLHSKHYSREVKASVMVVVVGVGICTVTDVKVNAKGFICACTAVFSTSLQQISIGSLQKKYSIGSFELLSKTAPIQAISLLIFGPFVDYFLSGRFISTYKMTYSAMLCILLSCALAVFCNISQYLCIGRFSATSFQVLGHMKTVCVLTLGWLIFDSEMTFKNIAGMVLAVVGMVIYSWAVELEKQRKSKVIPHGKHSMTEDEIKLLKEGIEHMDLKDMELGNNKA

SEQ ID NO: 4747 - protein, 328 aa, Arabidopsis thaliana
  peptide (1)..(328): Ceres Seq. ID no. 13488713
  misc_feature (1)..(328): NCBI GI NO: 21536703 NR Description: unknown [Arabidopsis thaliana]
  misc_feature (1)..(328): NCBI GI NO: 18394949 NR Description: transporter-related [Arabidopsis thaliana]
  misc_feature (1)..(327): NCBI GI NO: 18411172 NR Description: transporter-related [Arabidopsis thaliana]
  misc_feature (17)..(328): NCBI GI NO: 26450366 NR Description: unknown protein [Arabidopsis thaliana]
  misc_feature (1)..(327): NCBI GI NO: 15238957 NR Description: transporter-related [Arabidopsis thaliana]
  misc_feature (23)..(328): NCBI GI NO: 33146838 NR Description: transporter-related-like
  misc_feature (1)..(28): NCBI GI NO: 33146838 NR Description: transporter-related-like
  misc_feature (1)..(298): NCBI GI NO: 30313364 NR Description: putative transmembrane protein [Oryza sativa]
  misc_feature (1)..(317): NCBI GI NO: 15234794 NR Description: transporter-related [Arabidopsis thaliana]
  misc_feature (1)..(295): NCBI GI NO: 18399097 NR Description: transporter-related [Arabidopsis thaliana]
MNVTSSVGIIMANKQLMSSSGLGFSFATTLTGFHFALTALVGMVSNATGLSASKHVPLWELLWFSLVANISIAAMNFSLMLNSVGFYQISKLSMIPVVCVMEWVLHSKHYSREVKASVMVVVVGVGICTVTDVKVNAKGFICACTAVFSTSLQQISIGSLQKKYSIGSFELLSKTAPIQAISLLIFGPFVDYFLSGRFISTYKMTYSAMLCILLSCALAVFCNISQYLCIGRFSATSFQVLGHMKTVCVLTLGWLIFDSEMTFKNIAGMVLAVVGMVIYSWAVELEKQRKSKVIPHGKHSMTEDEIKLLKEGIEHMDLKDMELGNNKA

SEQ ID NO: 4748 - protein, 318 aa, Arabidopsis thaliana
  peptide (1)..(318): Ceres Seq. ID no. 13488714
  misc_feature (1)..(318): NCBI GI NO: 21536703 NR Description: unknown [Arabidopsis thaliana]
  misc_feature (1)..(318): NCBI GI NO: 18394949 NR Description: transporter-related [Arabidopsis thaliana]
  misc_feature (1)..(317): NCBI GI NO: 18411172 NR Description: transporter-related [Arabidopsis thaliana]
  misc_feature (7)..(318): NCBI GI NO: 26450366 NR Description: unknown protein [Arabidopsis thaliana]
  misc_feature (1)..(317): NCBI GI NO: 15238957 NR Description: transporter-related [Arabidopsis thaliana]
  misc_feature (13)..(318): NCBI GI NO: 33146838 NR Description: transporter-related-like
  misc_feature (1)..(18): NCBI GI NO: 33146838 NR Description: transporter-related-like
  misc_feature (1)..(288): NCBI GI NO: 30313364 NR Description: putative transmembrane protein [Oryza sativa]
  misc_feature (1)..(307): NCBI GI NO: 15234794 NR Description: transporter-related [Arabidopsis thaliana]
  misc_feature (1)..(285): NCBI GI NO: 18399097 NR Description: transporter-related [Arabidopsis thaliana]
MANKQLMSSSGLGFSFATTLTGFHFALTALVGMVSNATGLSASKHVPLWELLWFSLVANISIAAMNFSLMLNSVGFYQISKLSMIPVVCVMEWVLHSKHYSREVKASVMVVVVGVGICTVTDVKVNAKGFICACTAVFSTSLQQISIGSLQKKYSIGSFELLSKTAPIQAISLLIFGPFVDYFLSGRFISTYKMTYSAMLCILLSCALAVFCNISQYLCIGRFSATSFQVLGHMKTVCVLTLGWLIFDSEMTFKNIAGMVLAVVGMVIYSWAVELEKQRKSKVIPHGKHSMTEDEIKLLKEGIEHMDLKDMELGNNKA

SEQ ID NO: 4749 - DNA, 1413 bp, Arabidopsis thaliana
  misc_feature (1)..(1413): Ceres Seq. ID no. 12371224
aagtgatatgatactctcaagaaacctacccacctaaaaagagagaaaaacaaaacaaaagaatagtaaggcactaaacactaaaactaccacttctcttgtatcgccgacaaagctttgttcagtggcaaagatgatgaatcatttgcttttggctcttttccttgttggaaccatcgccttaccagatagaggaactcaacaattgaccaacgatggcctcaccggcgcgaggcgagagatactctctttcttagaccaaagacttgcagtggtgtacccagtgatccagagattcaagtcactcatcactctcgacccttataacgtgaccaagacatggattggttcagacatctgcagttatagaggcttccactgtgacaatcctcctcacaacaaaaccgcagttactgttgcttccatcgatttcaatggctttcagctctctgctccatccatcgaaggatttatcgatcaattcgctgacctagctctgtttcatgttaactcaaacaattttggaggtacggtgccttccaagatagtcaacctccggtatctctatgaactcgacatcagcaacaatagattcaccggtcagtttccgacagctgttgttggaatgtccggtttgacgtttattgacattcggttcaactctttctctggttcaatcccaccacaaatcctcggtcagaacctcgaagttctcttcatcaatgacaacggcttcactgcgagcctcccggagatacctggtgatggtacaacacacattctcttcttgactttagcaaacaacaagttcaacggtcctctcccaagaagcatcttaagatcaatgtcaactttaaccgaagtactcttcctcaataacgattttacgggttgtatccctcacgagatcgggttcctcaccggagcatcagtgatcgatatcggtggaaacaagctcacgggtcctttgccgctttccctaatgtgtttagagaaagtagagcagctcaactttgctgggaatctattgtttggtgccgtcccggaggcagtatgcatgctgctccgggacaatcttgtcaacttgtcgttgtcggataactatttcacgcacgtagggccttggtgtaggggtttacttgaaaaaggtgttcttgacgttggtaacaattgcattcctttcttcccaggacaaagatcgatgcaagaatgtgcggagttctttgtaaaacctaagaagtactactgtcctcacatgtggttccatagttttttctcttgtagatattctcacatatcttcttcctcttctagtgctttcatgcccatggtggctccctctccttaatgttcatcatcataaacgtgtttgatcacttttattgtaaggaaaaataatcggattatgtttcg

SEQ ID NO: 4750 - protein, 404 aa, Arabidopsis thaliana
  peptide (1)..(404): Ceres Seq. ID no. 12371225
  misc_feature (1)..(404): NCBI GI NO: 30680322 NR Description: extensin-related protein [Arabidopsis thaliana]
  misc_feature (18)..(373): NCBI GI NO: 32488397 NR Description: OSJNBa0043A12.27
  misc_feature (40)..(394): NCBI GI NO: 32490271 NR Description: OSJNBb0116K07.13
  misc_feature (38)..(381): NCBI GI NO: 15230349 NR Description: unknown protein; protein id: At3g19320.1
  misc_feature (38)..(374): NCBI GI NO: 15222811 NR Description: unknown protein; protein id: At1g49750.1
  misc_feature (38)..(404): NCBI GI NO: 15230120 NR Description: disease resistance protein, putative
  misc_feature (38)..(367): NCBI GI NO: 15235668 NR Description: extensin-like protein; protein id: At4g13340.1
  misc_feature (5)..(367): NCBI GI NO: 34906174 NR Description: putative extensin-like protein
  misc_feature (38)..(367): NCBI GI NO: 15233976 NR Description: extensin-like protein; protein id: At4g18670.1
  misc_feature (8)..(367): NCBI GI NO: 15235186 NR Description: extensin-like protein; protein id: At4g33970.1
MMNHLLLALFLVGTIALPDRGTQQLTNDGLTGARREILSFLDQRLAVVYPVIQRFKSLITLDPYNVTKTWIGSDICSYRGFHCDNPPHNKTAVTVASIDFNGFQLSAPSIEGFIDQFADLALFHVNSNNFGGTVPSKIVNLRYLYELDISNNRFTGQFPTAVVGMSGLTFIDIRFNSFSGSIPPQILGQNLEVLFINDNGFTASLPEIPGDGTTHILFLTLANNKFNGPLPRSILRSMSTLTEVLFLNNDFTGCIPHEIGFLTGASVIDIGGNKLTGPLPLSLMCLEKVEQLNFAGNLLFGAVPEAVCMLLRDNLVNLSLSDNYFTHVGPWCRGLLEKGVLDVGNNCIPFFPGQRSMQECAEFFVKPKKYYCPHMWFHSFFSCRYSHISSSSSSAFMPMVAPSP

SEQ ID NO: 4751 - protein, 403 aa, Arabidopsis thaliana
  peptide (1)..(403): Ceres Seq. ID no. 12371226
  misc_feature (1)..(403): NCBI GI NO: 30680322 NR Description: extensin-related protein [Arabidopsis thaliana]
  misc_feature (17)..(372): NCBI GI NO: 32488397 NR Description: OSJNBa0043A12.27
  misc_feature (39)..(393): NCBI GI NO: 32490271 NR Description: OSJNBb0116K07.13
  misc_feature (37)..(380): NCBI GI NO: 15230349 NR Description: unknown protein; protein id: At3g19320.1
  misc_feature (37)..(373): NCBI GI NO: 15222811 NR Description: unknown protein; protein id: At1g49750.1
  misc_feature (37)..(403): NCBI GI NO: 15230120 NR Description: disease resistance protein, putative
  misc_feature (37)..(366): NCBI GI NO: 15235668 NR Description: extensin-like protein; protein id: At4g13340.1
  misc_feature (4)..(366): NCBI GI NO: 34906174 NR Description: putative extensin-like protein
  misc_feature (37)..(366): NCBI GI NO: 15233976 NR Description: extensin-like protein; protein id: At4g18670.1
  misc_feature (7)..(366): NCBI GI NO: 15235186 NR Description: extensin-like protein; protein id: At4g33970.1
MNHLLLALFLVGTIALPDRGTQQLTNDGLTGARREILSFLDQRLAVVYPVIQRFKSLITLDPYNVTKTWIGSDICSYRGFHCDNPPHNKTAVTVASIDFNGFQLSAPSIEGFIDQFADLALFHVNSNNFGGTVPSKIVNLRYLYELDISNNRFTGQFPTAVVGMSGLTFIDIRFNSFSGSIPPQILGQNLEVLFINDNGFTASLPEIPGDGTTHILFLTLANNKFNGPLPRSILRSMSTLTEVLFLNNDFTGCIPHEIGFLTGASVIDIGGNKLTGPLPLSLMCLEKVEQLNFAGNLLFGAVPEAVCMLLRDNLVNLSLSDNYFTHVGPWCRGLLEKGVLDVGNNCIPFFPGQRSMQECAEFFVKPKKYYCPHMWFHSFFSCRYSHISSSSSSAFMPMVAPSP

SEQ ID NO: 4752 - protein, 240 aa, Arabidopsis thaliana
  peptide (1)..(240): Ceres Seq. ID no. 12371227
  misc_feature (1)..(240): NCBI GI NO: 30680322 NR Description: extensin-related protein [Arabidopsis thaliana]
  misc_feature (1)..(209): NCBI GI NO: 32488397 NR Description: OSJNBa0043A12.27
  misc_feature (1)..(230): NCBI GI NO: 32490271 NR Description: OSJNBb0116K07.13
  misc_feature (1)..(217): NCBI GI NO: 15230349 NR Description: unknown protein; protein id: At3g19320.1
  misc_feature (1)..(210): NCBI GI NO: 15222811 NR Description: unknown protein; protein id: At1g49750.1
  misc_feature (1)..(240): NCBI GI NO: 15230120 NR Description: disease resistance protein, putative
  misc_feature (1)..(203): NCBI GI NO: 15235668 NR Description: extensin-like protein; protein id: At4g13340.1
  misc_feature (1)..(203): NCBI GI NO: 34906174 NR Description: putative extensin-like protein
  misc_feature (1)..(203): NCBI GI NO: 15233976 NR Description: extensin-like protein; protein id: At4g18670.1
  misc_feature (1)..(203): NCBI GI NO: 15235186 NR Description: extensin-like protein; protein id: At4g33970.1
MSGLTFIDIRFNSFSGSIPPQILGQNLEVLFINDNGFTASLPEIPGDGTTHILFLTLANNKFNGPLPRSILRSMSTLTEVLFLNNDFTGCIPHEIGFLTGASVIDIGGNKLTGPLPLSLMCLEKVEQLNFAGNLLFGAVPEAVCMLLRDNLVNLSLSDNYFTHVGPWCRGLLEKGVLDVGNNCIPFFPGQRSMQECAEFFVKPKKYYCPHMWFHSFFSCRYSHISSSSSSAFMPMVAPSP

SEQ ID NO: 4753 - DNA, 1304 bp, Arabidopsis thaliana
  misc_feature (1)..(1304): Ceres Seq. ID no. 13612513
atcgggcaaggccttatagagattacacaacacagatagattacacactgagaaacagagaatggtagctgaggccttgcccaaatgccctgaagctccactcgtacttggactccaacccgcagctcttatcgataacgtcgctcctgttgattggtctttactcgatcaaattcccggtgatcgcggtggctccattgccgtgcaaaaggatgagttagagcacatgctaaaagagcttgatgcacatatcagtgtggctccattaaagaagatggctggaggaagtgtgaccaatacagttcgaggcttgagtgttgggttcggtgtagccactgggattattggtgcttatggagacgatgaacaaggccaattgtttgttagcaatatgggttttagtggtgtgagtatctcaaggctcaggaagaagaaaggttccactgctcagtgtgtttgcttggttgatgactctggtaatcgaacaatgcgaccatgtctctcgagtgctgtgaagattcaggcagatgaattaagcaaagaagatttcacaggctctaagtggttggttcttagatatgctgttcttaatttacaagtaattcaagcagccattcgatttgccaagcaagaaggtctttctgtttccttggatttagctagttttgagatggtcaggaattctaaatcagagcttcgacagcttctggagtctggtaacatagatctttgctttgctaacgaggacgaagcagcagagctccttaggggtgagcaagaagcgggtccggaggcagctcttgagttcctaggcagacattgcagatgggctgtggtaactttagggtcgaaagggtgcattgcaaaacatgataaagaggtggtacatatatcagccataggagagacagtagcaactgatgccacaggagccggtgacctattcgcaagcgggtttctgtacggactaataaagggattgtctttggaagaatgttgcaaagtgggatcatgcagtggtggatctgtcatccgtgctctcggtggagaagtaaccccagaaaactggcaatggatgcacaaacagttgcagttgaagggcttacctgttcctgacatccacaactgatgatatcaccatcagattgtagaatttcaaacaatttcgttgaagggccggttctgattcaagcagctcttagcattatgttgttcacagagattctcacagcatttacttcaatacacattgtgttgttttcaatctttttttgtgaaaaataaaaatgcgtttgtcagggttt

SEQ ID NO: 4754 - protein, 355 aa, Arabidopsis thaliana
  peptide (1)..(355): Ceres Seq. ID no. 13612514
  misc_feature (42)..(335): Pfam Name: Pfam Description:  pfkB family carbohydrate kinase
  misc_feature (1)..(355): NCBI GI NO: 15223593 NR Description: ribokinase, putative [Arabidopsis thaliana]
  misc_feature (1)..(355): NCBI GI NO: 39579184 NR Description: putative ribokinase
  misc_feature (13)..(355): NCBI GI NO: 34894090 NR Description: P0005A05.10
  misc_feature (15)..(336): NCBI GI NO: 29348208 NR Description: putative PfkB family carbohydrate kinase
  misc_feature (22)..(328): NCBI GI NO: 15963924 NR Description: PUTATIVE SUGAR KINASE PROTEIN
  misc_feature (66)..(328): NCBI GI NO: 17988062 NR Description: FRUCTOKINASE [Brucella melitensis]
  misc_feature (22)..(334): NCBI GI NO: 23110293 NR Description: hypothetical protein
  misc_feature (22)..(328): NCBI GI NO: 33239956 NR Description: Sugar kinase, ribokinase family
  misc_feature (22)..(334): NCBI GI NO: 23124151 NR Description: hypothetical protein [Nostoc punctiforme]
  misc_feature (22)..(331): NCBI GI NO: 32477470 NR Description: predicted ribokinase family sugar kinase
MVAEALPKCPEAPLVLGLQPAALIDNVAPVDWSLLDQIPGDRGGSIAVQKDELEHMLKELDAHISVAPLKKMAGGSVTNTVRGLSVGFGVATGIIGAYGDDEQGQLFVSNMGFSGVSISRLRKKKGSTAQCVCLVDDSGNRTMRPCLSSAVKIQADELSKEDFTGSKWLVLRYAVLNLQVIQAAIRFAKQEGLSVSLDLASFEMVRNSKSELRQLLESGNIDLCFANEDEAAELLRGEQEAGPEAALEFLGRHCRWAVVTLGSKGCIAKHDKEVVHISAIGETVATDATGAGDLFASGFLYGLIKGLSLEECCKVGSCSGGSVIRALGGEVTPENWQWMHKQLQLKGLPVPDIHN

SEQ ID NO: 4755 - protein, 300 aa, Arabidopsis thaliana
  peptide (1)..(300): Ceres Seq. ID no. 13612515
  misc_feature (1)..(280): Pfam Name: Pfam Description:  pfkB family carbohydrate kinase
  misc_feature (1)..(300): NCBI GI NO: 15223593 NR Description: ribokinase, putative [Arabidopsis thaliana]
  misc_feature (1)..(300): NCBI GI NO: 39579184 NR Description: putative ribokinase
  misc_feature (1)..(300): NCBI GI NO: 34894090 NR Description: P0005A05.10
  misc_feature (1)..(281): NCBI GI NO: 29348208 NR Description: putative PfkB family carbohydrate kinase
  misc_feature (1)..(273): NCBI GI NO: 15963924 NR Description: PUTATIVE SUGAR KINASE PROTEIN
  misc_feature (11)..(273): NCBI GI NO: 17988062 NR Description: FRUCTOKINASE [Brucella melitensis]
  misc_feature (1)..(279): NCBI GI NO: 23110293 NR Description: hypothetical protein
  misc_feature (1)..(273): NCBI GI NO: 33239956 NR Description: Sugar kinase, ribokinase family
  misc_feature (1)..(279): NCBI GI NO: 23124151 NR Description: hypothetical protein [Nostoc punctiforme]
  misc_feature (1)..(276): NCBI GI NO: 32477470 NR Description: predicted ribokinase family sugar kinase
MLKELDAHISVAPLKKMAGGSVTNTVRGLSVGFGVATGIIGAYGDDEQGQLFVSNMGFSGVSISRLRKKKGSTAQCVCLVDDSGNRTMRPCLSSAVKIQADELSKEDFTGSKWLVLRYAVLNLQVIQAAIRFAKQEGLSVSLDLASFEMVRNSKSELRQLLESGNIDLCFANEDEAAELLRGEQEAGPEAALEFLGRHCRWAVVTLGSKGCIAKHDKEVVHISAIGETVATDATGAGDLFASGFLYGLIKGLSLEECCKVGSCSGGSVIRALGGEVTPENWQWMHKQLQLKGLPVPDIHN

SEQ ID NO: 4756 - protein, 284 aa, Arabidopsis thaliana
  peptide (1)..(284): Ceres Seq. ID no. 13612516
  misc_feature (1)..(264): Pfam Name: Pfam Description:  pfkB family carbohydrate kinase
  misc_feature (1)..(284): NCBI GI NO: 15223593 NR Description: ribokinase, putative [Arabidopsis thaliana]
  misc_feature (1)..(284): NCBI GI NO: 39579184 NR Description: putative ribokinase
  misc_feature (1)..(284): NCBI GI NO: 34894090 NR Description: P0005A05.10
  misc_feature (1)..(265): NCBI GI NO: 29348208 NR Description: putative PfkB family carbohydrate kinase
  misc_feature (1)..(257): NCBI GI NO: 15963924 NR Description: PUTATIVE SUGAR KINASE PROTEIN
  misc_feature (1)..(257): NCBI GI NO: 17988062 NR Description: FRUCTOKINASE [Brucella melitensis]
  misc_feature (1)..(263): NCBI GI NO: 23110293 NR Description: hypothetical protein
  misc_feature (1)..(257): NCBI GI NO: 33239956 NR Description: Sugar kinase, ribokinase family
  misc_feature (1)..(263): NCBI GI NO: 23124151 NR Description: hypothetical protein [Nostoc punctiforme]
  misc_feature (1)..(260): NCBI GI NO: 32477470 NR Description: predicted ribokinase family sugar kinase
MAGGSVTNTVRGLSVGFGVATGIIGAYGDDEQGQLFVSNMGFSGVSISRLRKKKGSTAQCVCLVDDSGNRTMRPCLSSAVKIQADELSKEDFTGSKWLVLRYAVLNLQVIQAAIRFAKQEGLSVSLDLASFEMVRNSKSELRQLLESGNIDLCFANEDEAAELLRGEQEAGPEAALEFLGRHCRWAVVTLGSKGCIAKHDKEVVHISAIGETVATDATGAGDLFASGFLYGLIKGLSLEECCKVGSCSGGSVIRALGGEVTPENWQWMHKQLQLKGLPVPDIHN

SEQ ID NO: 4757 - DNA, 1434 bp, Arabidopsis thaliana
  misc_feature (1)..(1434): Ceres Seq. ID no. 12328179
tttctttcttcttcttccgtttcttttgcctctttcttttgtcttcttccttctatttttttgtggctttaaatttattgggttttgttgttcttcttcttctatagccgtttcatcttcacaatagcatcttcttctttttttccctgtcaagatcctgaatcatcggatctagaaggaaactagagtttgtgaaatcagattaaatcttgtgagaaatctctgaaaaagctgcaggtttctatacttctgttagtactctaattcaaccgagaaagtcgaatacatacacacattcataacacttttgaggaagatgttaagtggaaacaatggaaacactgcaccaccggttttcatgaacgagaaccagttgcaataccagacaaacctacgatcgaatcagcttcacttgctcggaaacatgggaggtggatgcactgttgatccagtaaactactttgctaacgataacctcgttccaatgatccgccctaacaaaagaggaagggaagccgaaagcattagtaacaacatccaaagacaacagcagaagcttcaaatgtctttgaactataattataacaacactagtgttcgagaagaagtgcctaaagagaatctagtctcaactggtctgagactatcttatgacgacgatgaacacaattcttcagtgacttctgctagtggtagcattttagctgcttctccaatctttcagtcactcgatgatagtcttcggattgatctccatagacaaaaagatgagtttgaccagttcatcaagatccaggcagctcaaatggcgaaaggtgtgagggatatgaaacagagacacatcgcgtcttttctcacaacattagagaaaggagtgagcaagaagcttcaagagaaagatcacgagatcaatgatatgaacaagaagaataaagagcttgtggagcggataaagcaagtggcaatggaagctcagaattggcactacagagcaaagtacaatgagtctgtggttaatgtcttaaaggcaaatctccaacaagcaatgtcacacaacaacagtgtgatagctgctgcagatcaaggcaaagaaggttttggagacagcgaaatagatgatgcagcttcatcatacattgatccaaacaacaacaacaacatggggattcatcagaggatgagatgcaaaatgtgcaacgtcaaggaagtatcggtgttgatagtgccatgtcggcacttgagtttgtgtaaagaatgtgatgtattcactaagatttgtcctgtatgcaagtctttgaaaagttcttgcgtccaagtcttcttttcttgatttgtgaccaaatggaacagaaggaaaaagagaatccattatataagtctttcatactcttttttaaaaaatattttgttatataaatttatttgtatcggtgt

SEQ ID NO: 4758 - protein, 337 aa, Arabidopsis thaliana
  peptide (1)..(337): Ceres Seq. ID no. 12328180
  misc_feature (290)..(324): Pfam Name: RING finger Pfam Description: Zinc finger, C3HC4 type
  misc_feature (1)..(337): NCBI GI NO: 21536706 NR Description: S-ribonuclease binding protein SBP1, putative
  misc_feature (1)..(337): NCBI GI NO: 15220181 NR Description: S-ribonuclease binding protein SBP1, putative
  misc_feature (156)..(337): NCBI GI NO: 6573749 NR Description: F20B24.9 [Arabidopsis thaliana]
  misc_feature (1)..(160): NCBI GI NO: 6573749 NR Description: F20B24.9 [Arabidopsis thaliana]
  misc_feature (1)..(336): NCBI GI NO: 15219772 NR Description: unknown protein; protein id: At1g60610.1
  misc_feature (13)..(336): NCBI GI NO: 25404279 NR Description: hypothetical protein F8A5.13
  misc_feature (75)..(335): NCBI GI NO: 15220096 NR Description: S-ribonuclease binding protein SBP1, putative
  misc_feature (75)..(335): NCBI GI NO: 6760451 NR Description: S-ribonuclease binding protein SBP1
  misc_feature (77)..(335): NCBI GI NO: 34902144 NR Description: unknown protein
  misc_feature (18)..(335): NCBI GI NO: 40807658 NR Description: S-RNase-binding protein [Solanum chacoense]
MLSGNNGNTAPPVFMNENQLQYQTNLRSNQLHLLGNMGGGCTVDPVNYFANDNLVPMIRPNKRGREAESISNNIQRQQQKLQMSLNYNYNNTSVREEVPKENLVSTGLRLSYDDDEHNSSVTSASGSILAASPIFQSLDDSLRIDLHRQKDEFDQFIKIQAAQMAKGVRDMKQRHIASFLTTLEKGVSKKLQEKDHEINDMNKKNKELVERIKQVAMEAQNWHYRAKYNESVVNVLKANLQQAMSHNNSVIAAADQGKEGFGDSEIDDAASSYIDPNNNNNMGIHQRMRCKMCNVKEVSVLIVPCRHLSLCKECDVFTKICPVCKSLKSSCVQVFFS

SEQ ID NO: 4759 - protein, 323 aa, Arabidopsis thaliana
  peptide (1)..(323): Ceres Seq. ID no. 12328181
  misc_feature (276)..(310): Pfam Name: RING finger Pfam Description: Zinc finger, C3HC4 type
  misc_feature (1)..(323): NCBI GI NO: 21536706 NR Description: S-ribonuclease binding protein SBP1, putative
  misc_feature (1)..(323): NCBI GI NO: 15220181 NR Description: S-ribonuclease binding protein SBP1, putative
  misc_feature (142)..(323): NCBI GI NO: 6573749 NR Description: F20B24.9 [Arabidopsis thaliana]
  misc_feature (1)..(146): NCBI GI NO: 6573749 NR Description: F20B24.9 [Arabidopsis thaliana]
  misc_feature (1)..(322): NCBI GI NO: 15219772 NR Description: unknown protein; protein id: At1g60610.1
  misc_feature (1)..(322): NCBI GI NO: 25404279 NR Description: hypothetical protein F8A5.13
  misc_feature (61)..(321): NCBI GI NO: 15220096 NR Description: S-ribonuclease binding protein SBP1, putative
  misc_feature (61)..(321): NCBI GI NO: 6760451 NR Description: S-ribonuclease binding protein SBP1
  misc_feature (63)..(321): NCBI GI NO: 34902144 NR Description: unknown protein
  misc_feature (4)..(321): NCBI GI NO: 40807658 NR Description: S-RNase-binding protein [Solanum chacoense]
MNENQLQYQTNLRSNQLHLLGNMGGGCTVDPVNYFANDNLVPMIRPNKRGREAESISNNIQRQQQKLQMSLNYNYNNTSVREEVPKENLVSTGLRLSYDDDEHNSSVTSASGSILAASPIFQSLDDSLRIDLHRQKDEFDQFIKIQAAQMAKGVRDMKQRHIASFLTTLEKGVSKKLQEKDHEINDMNKKNKELVERIKQVAMEAQNWHYRAKYNESVVNVLKANLQQAMSHNNSVIAAADQGKEGFGDSEIDDAASSYIDPNNNNNMGIHQRMRCKMCNVKEVSVLIVPCRHLSLCKECDVFTKICPVCKSLKSSCVQVFFS

SEQ ID NO: 4760 - protein, 301 aa, Arabidopsis thaliana
  peptide (1)..(301): Ceres Seq. ID no. 12328182
  misc_feature (254)..(288): Pfam Name: RING finger Pfam Description: Zinc finger, C3HC4 type
  misc_feature (1)..(301): NCBI GI NO: 21536706 NR Description: S-ribonuclease binding protein SBP1, putative
  misc_feature (1)..(301): NCBI GI NO: 15220181 NR Description: S-ribonuclease binding protein SBP1, putative
  misc_feature (120)..(301): NCBI GI NO: 6573749 NR Description: F20B24.9 [Arabidopsis thaliana]
  misc_feature (1)..(124): NCBI GI NO: 6573749 NR Description: F20B24.9 [Arabidopsis thaliana]
  misc_feature (1)..(300): NCBI GI NO: 15219772 NR Description: unknown protein; protein id: At1g60610.1
  misc_feature (1)..(300): NCBI GI NO: 25404279 NR Description: hypothetical protein F8A5.13
  misc_feature (39)..(299): NCBI GI NO: 15220096 NR Description: S-ribonuclease binding protein SBP1, putative
  misc_feature (39)..(299): NCBI GI NO: 6760451 NR Description: S-ribonuclease binding protein SBP1
  misc_feature (41)..(299): NCBI GI NO: 34902144 NR Description: unknown protein
  misc_feature (1)..(299): NCBI GI NO: 40807658 NR Description: S-RNase-binding protein [Solanum chacoense]
MGGGCTVDPVNYFANDNLVPMIRPNKRGREAESISNNIQRQQQKLQMSLNYNYNNTSVREEVPKENLVSTGLRLSYDDDEHNSSVTSASGSILAASPIFQSLDDSLRIDLHRQKDEFDQFIKIQAAQMAKGVRDMKQRHIASFLTTLEKGVSKKLQEKDHEINDMNKKNKELVERIKQVAMEAQNWHYRAKYNESVVNVLKANLQQAMSHNNSVIAAADQGKEGFGDSEIDDAASSYIDPNNNNNMGIHQRMRCKMCNVKEVSVLIVPCRHLSLCKECDVFTKICPVCKSLKSSCVQVFFS

SEQ ID NO: 4761 - DNA, 444 bp, Arabidopsis thaliana
  misc_feature (1)..(444): Ceres Seq. ID no. 12580204
actctctctatctctctttctctctatctctctctatctctctcatttcttcctgcgtcaatggcgactcaaggtcaggttatcacttgcaaagctgcggtggcttacgagccgaacaagcctctggtcatcgaagatgtgcaagtggctccacctcaagctggtgaggttcggatcaagatcctctacactgctctttgtcacaccgacgcttacacttggagcggcaaggatcctgaaggtctctttccttgtattctaggtcatgaggctgctgggattgttgagagtgttggtgaaggagtaactgaagttcaagctggagatcatgttatcccttgttatcaagctgagtgtcgtgaatgcaagttttgcaaatctgggaagactaacctttgtggcaaggtgagatctgctactggtgttactccttcaccgtctccc

SEQ ID NO: 4762 - protein, 148 aa, Arabidopsis thaliana
  peptide (1)..(148): Ceres Seq. ID no. 12580205
  misc_feature (21)..(142): NCBI GI NO: 2129562 NR Description: alcohol dehydrogenase (EC 1
  misc_feature (21)..(142): NCBI GI NO: 15240054 NR Description: alcohol dehydrogenase (EC 1
  misc_feature (21)..(142): NCBI GI NO: 1498024 NR Description: glutathione-dependent formaldehyde dehydrogenase
  misc_feature (23)..(142): NCBI GI NO: 6225010 NR Description: ALCOHOL DEHYDROGENASE CLASS III
  misc_feature (22)..(142): NCBI GI NO: 3023271 NR Description: ALCOHOL DEHYDROGENASE CLASS III
  misc_feature (22)..(142): NCBI GI NO: 3121727 NR Description: ALCOHOL DEHYDROGENASE CLASS III
  misc_feature (21)..(141): NCBI GI NO: 37783433 NR Description: GSNO reductase
  misc_feature (22)..(141): NCBI GI NO: 40742628 NR Description: hypothetical protein AN7632.2
  misc_feature (22)..(144): NCBI GI NO: 17737895 NR Description: Formaldehyde dehydrogenase CG6598-PA
  misc_feature (21)..(141): NCBI GI NO: 16565909 NR Description: formaldehyde dehydrogenase [Pichia angusta]
TLSISLSLYLSLSLSFLPASMATQGQVITCKAAVAYEPNKPLVIEDVQVAPPQAGEVRIKILYTALCHTDAYTWSGKDPEGLFPCILGHEAAGIVESVGEGVTEVQAGDHVIPCYQAECRECKFCKSGKTNLCGKVRSATGVTPSPSP

SEQ ID NO: 4763 - protein, 128 aa, Arabidopsis thaliana
  peptide (1)..(128): Ceres Seq. ID no. 12580206
  misc_feature (1)..(122): NCBI GI NO: 2129562 NR Description: alcohol dehydrogenase (EC 1
  misc_feature (1)..(122): NCBI GI NO: 15240054 NR Description: alcohol dehydrogenase (EC 1
  misc_feature (1)..(122): NCBI GI NO: 1498024 NR Description: glutathione-dependent formaldehyde dehydrogenase
  misc_feature (3)..(122): NCBI GI NO: 6225010 NR Description: ALCOHOL DEHYDROGENASE CLASS III
  misc_feature (2)..(122): NCBI GI NO: 3023271 NR Description: ALCOHOL DEHYDROGENASE CLASS III
  misc_feature (2)..(122): NCBI GI NO: 3121727 NR Description: ALCOHOL DEHYDROGENASE CLASS III
  misc_feature (1)..(121): NCBI GI NO: 37783433 NR Description: GSNO reductase
  misc_feature (2)..(121): NCBI GI NO: 40742628 NR Description: hypothetical protein AN7632.2
  misc_feature (2)..(124): NCBI GI NO: 17737895 NR Description: Formaldehyde dehydrogenase CG6598-PA
  misc_feature (1)..(121): NCBI GI NO: 16565909 NR Description: formaldehyde dehydrogenase [Pichia angusta]
MATQGQVITCKAAVAYEPNKPLVIEDVQVAPPQAGEVRIKILYTALCHTDAYTWSGKDPEGLFPCILGHEAAGIVESVGEGVTEVQAGDHVIPCYQAECRECKFCKSGKTNLCGKVRSATGVTPSPSP

SEQ ID NO: 4764 - protein, 86 aa, Arabidopsis thaliana
  peptide (1)..(86): Ceres Seq. ID no. 12580207
LSLSLFLSISLYLSHFFLRQWRLKVRLSLAKLRWLTSRTSLWSSKMCKWLHLKLVRFGSRSSTLLFVTPTLTLGAARILKVSFLVF

SEQ ID NO: 4765 - DNA, 1271 bp, Arabidopsis thaliana
  misc_feature (1)..(1271): Ceres Seq. ID no. 12327725
agaaccgtttgccctctctctctctatcttccttatctctctccgccactctccttctctttctccgaactcttcgatggccggtctactcaaaacgccgtctttacatctcacaccaactcttcttcatgctccttctgtaccctttaagcccttttgcgtatctttcgccggaggaagaaacgttagcgtctcactctctcgccgagcttctctccggtctgtctctagcggctatcctctccgcttactaaacctcgtaccctttgcttcgggagaagctgagacgacggagacggaggtggaatcgaacgaacccgaagttcaggagacggatggtgctgttgatgtcgagaatgaaaatgccagtgctgaggagggtgaagctgaggaagaagaagcagctgttatcacagcgttgctgaaatcctataaagaagctttagcagacaacaacgaggggaagattgctgagatagaagcatctttaaagtccatagaagatgaaaaatttctgcttgcggataaagtagcgtctttatccaatgagttatcggtggagagggatcggcttataagaatcagtgcagatttcgacaacttcaggaagaggactgagagggaaaggctaaaccttgtttcaaatgctcaaggagaggttgtagagaatcttttggctgttttggataatttcgagagagctaaatcccaaattaaggtggagactgagggagaagagaaagtcactaatagctatcagagcatatacaaacagtttgtagaaattctgggatcacttggtgttatccatgtggagacagtcggcaagcagtttgatccaatgctacatgaggcaataatgagagaagactctgcggaatacgaagagggtatagtactagaagaatacaggaaaggtttcttgctaggtgaaaggcttttacgtccttcaatggtgaaagtatcagctggacctggaccagaaaagccccttgaagctgaaggagaagaagccacagcacaaggaagcgcagaagaagaatcatcttcatcttgaaattgaagatgatcaagactcagcagttttgtgtgcgtgtgtgtgagagagatacagagataaaagagggagaggtctgttttaccattattgttgttattgttattgatacgttatatcatttctacagagtctagaagtaatatagatcgacatttttaatgaattcttaagtattcaatccgaaagggaatgccataattgatttttttcc

SEQ ID NO: 4766 - protein, 351 aa, Arabidopsis thaliana
  peptide (1)..(351): Ceres Seq. ID no. 12327726
  misc_feature (161)..(323): Pfam Name: Pfam Description:  GrpE
  misc_feature (26)..(351): NCBI GI NO: 30686476 NR Description: chloroplast GrpE protein [Arabidopsis thaliana]
  misc_feature (26)..(351): NCBI GI NO: 18418410 NR Description: chloroplast GrpE protein; protein id: At5g17710
  misc_feature (128)..(339): NCBI GI NO: 18400095 NR Description: putative heat shock protein; protein id: At1g36390
  misc_feature (128)..(339): NCBI GI NO: 21593629 NR Description: putative heat shock protein [Arabidopsis thaliana]
  misc_feature (122)..(338): NCBI GI NO: 32488078 NR Description: OSJNBa0084A10.6
  misc_feature (120)..(327): NCBI GI NO: 15384277 NR Description: co-chaperone CGE1 precursor isoform a
  misc_feature (118)..(327): NCBI GI NO: 15384279 NR Description: co-chaperone CGE1 precursor isoform b
  misc_feature (91)..(332): NCBI GI NO: 23041352 NR Description: hypothetical protein
  misc_feature (90)..(325): NCBI GI NO: 22298857 NR Description: heat shock protein
  misc_feature (119)..(343): NCBI GI NO: 17229937 NR Description: heat shock protein [Nostoc sp. PCC 7120]
EPFALSLSIFLISLRHSPSLSPNSSMAGLLKTPSLHLTPTLLHAPSVPFKPFCVSFAGGRNVSVSLSRRASLRSVSSGYPLRLLNLVPFASGEAETTETEVESNEPEVQETDGAVDVENENASAEEGEAEEEEAAVITALLKSYKEALADNNEGKIAEIEASLKSIEDEKFLLADKVASLSNELSVERDRLIRISADFDNFRKRTERERLNLVSNAQGEVVENLLAVLDNFERAKSQIKVETEGEEKVTNSYQSIYKQFVEILGSLGVIHVETVGKQFDPMLHEAIMREDSAEYEEGIVLEEYRKGFLLGERLLRPSMVKVSAGPGPEKPLEAEGEEATAQGSAEEESSSS

SEQ ID NO: 4767 - protein, 326 aa, Arabidopsis thaliana
  peptide (1)..(326): Ceres Seq. ID no. 12327727
  misc_feature (136)..(298): Pfam Name: Pfam Description:  GrpE
  misc_feature (1)..(326): NCBI GI NO: 30686476 NR Description: chloroplast GrpE protein [Arabidopsis thaliana]
  misc_feature (1)..(326): NCBI GI NO: 18418410 NR Description: chloroplast GrpE protein; protein id: At5g17710
  misc_feature (103)..(314): NCBI GI NO: 18400095 NR Description: putative heat shock protein; protein id: At1g36390
  misc_feature (103)..(314): NCBI GI NO: 21593629 NR Description: putative heat shock protein [Arabidopsis thaliana]
  misc_feature (97)..(313): NCBI GI NO: 32488078 NR Description: OSJNBa0084A10.6
  misc_feature (95)..(302): NCBI GI NO: 15384277 NR Description: co-chaperone CGE1 precursor isoform a
  misc_feature (93)..(302): NCBI GI NO: 15384279 NR Description: co-chaperone CGE1 precursor isoform b
  misc_feature (66)..(307): NCBI GI NO: 23041352 NR Description: hypothetical protein
  misc_feature (65)..(300): NCBI GI NO: 22298857 NR Description: heat shock protein
  misc_feature (94)..(318): NCBI GI NO: 17229937 NR Description: heat shock protein [Nostoc sp. PCC 7120]
MAGLLKTPSLHLTPTLLHAPSVPFKPFCVSFAGGRNVSVSLSRRASLRSVSSGYPLRLLNLVPFASGEAETTETEVESNEPEVQETDGAVDVENENASAEEGEAEEEEAAVITALLKSYKEALADNNEGKIAEIEASLKSIEDEKFLLADKVASLSNELSVERDRLIRISADFDNFRKRTERERLNLVSNAQGEVVENLLAVLDNFERAKSQIKVETEGEEKVTNSYQSIYKQFVEILGSLGVIHVETVGKQFDPMLHEAIMREDSAEYEEGIVLEEYRKGFLLGERLLRPSMVKVSAGPGPEKPLEAEGEEATAQGSAEEESSSS

SEQ ID NO: 4768 - DNA, 1529 bp, Arabidopsis thaliana
  misc_feature (1)..(1529): Ceres Seq. ID no. 13488876
aaaataggcctctccaccaaatctctctctctttctctctgtcacactctttatcactctctgctctcacagatcggagaatctcctctgagagctctaatctctcagctttcttcaccggcgtctccggatctaataatcctgtaaggcctctactgcagaaaaaagattgaatttttacaatttggggtgactcaattttgttgactagagtgtttggagatatttctaactaaatgggaacaatgcaccgcagtggtgctcctcgaagaacgaatgaaaatgcaaaggttattattactactattttggggatagtgtttgggacttttattggtatcacattaccttcactttcgtttaagattaacttaccctcgcgccttatatcatctcttgatgtagccatatctggtgacaaatcccctgaagatttcggttcaagaaagtttcctgagatatatgttccaactaacccgcgtggtgcagaactactacctccaggaatcgttgtggcgaaaactgatttttacttgcgtagattatggggagaacctaatgaagatttgaagaagaagccaaaatatcttgtgacatttacagttggatttgagcagaggaaccatattaatggagttgttaagaagttttctgaagatttccaaattttgctcttccattatgatggccggacaactgaatgggaccaatttgagtggtcgaagagcgcgattcatattagtacaagaaagcaaacaaaatggtggtacgcgaagaggtttttgcatcctgatgttgtgtcagcttatgagtacatatttatatgggatgaagatcttggagtggagcatttcaatgcggataagtacattgagttagttaagaagcatggtttagagatttctcaaccaggcttagagcctaacaatggactcacatgggaaatgacaaagaggagaggtgaccgggaagtccataaagatacaaaagagaaaccaggatggtgtaaagacccacatttacctccatgtgccgcgtttgttgaaataatggcgcctgtattttctcgagaagcatggcgatgtgtgtggcatatgattcagaatgatctggttcatggatggggtctcgactttgcgcttagaagatgcgttgaacctgctcatgagaagattggtgttgtggattcgcaatggataatacataaagtgataccttcacttggaagtcaaggaaagacagagaatgggaaagctccatgacaaggagtgagagatagatgcaaaatggaatggacaatgtttcagaaccgattggctgatgctgataaagagtatcttgggaagatggtgaaagattagatttgtttttcttttttctttctatataattaatatattaaaaaaacttttacttttgtatatcaaatattttacactaaattaggttttcataggacatgtgtgaagccctttttattgatattgtgtaagatttatacattttgattgagctttattatgttgttt

SEQ ID NO: 4769 - protein, 341 aa, Arabidopsis thaliana
  peptide (1)..(341): Ceres Seq. ID no. 13488877
  misc_feature (74)..(248): Pfam Name: DUF707 Pfam Description: Protein of unknown function
  misc_feature (1)..(341): NCBI GI NO: 30683843 NR Description: expressed protein [Arabidopsis thaliana]
  misc_feature (1)..(248): NCBI GI NO: 20197601 NR Description: unknown protein [Arabidopsis thaliana]
  misc_feature (268)..(341): NCBI GI NO: 20197601 NR Description: unknown protein [Arabidopsis thaliana]
  misc_feature (1)..(341): NCBI GI NO: 20466346 NR Description: unknown protein [Arabidopsis thaliana]
  misc_feature (1)..(341): NCBI GI NO: 18390845 NR Description: storage protein -related [Arabidopsis thaliana]
  misc_feature (74)..(341): NCBI GI NO: 25407018 NR Description: protein T6D22.12 [imported] - Arabidopsis thaliana
  misc_feature (7)..(43): NCBI GI NO: 25407018 NR Description: protein T6D22.12 [imported] - Arabidopsis thaliana
  misc_feature (74)..(341): NCBI GI NO: 18408876 NR Description: F12A21.2 [Arabidopsis thaliana]
  misc_feature (1)..(62): NCBI GI NO: 18408876 NR Description: F12A21.2 [Arabidopsis thaliana]
  misc_feature (74)..(341): NCBI GI NO: 14719314 NR Description: putative protein [Oryza sativa]
MGTMHRSGAPRRTNENAKVIITTILGIVFGTFIGITLPSLSFKINLPSRLISSLDVAISGDKSPEDFGSRKFPEIYVPTNPRGAELLPPGIVVAKTDFYLRRLWGEPNEDLKKKPKYLVTFTVGFEQRNHINGVVKKFSEDFQILLFHYDGRTTEWDQFEWSKSAIHISTRKQTKWWYAKRFLHPDVVSAYEYIFIWDEDLGVEHFNADKYIELVKKHGLEISQPGLEPNNGLTWEMTKRRGDREVHKDTKEKPGWCKDPHLPPCAAFVEIMAPVFSREAWRCVWHMIQNDLVHGWGLDFALRRCVEPAHEKIGVVDSQWIIHKVIPSLGSQGKTENGKAP

SEQ ID NO: 4770 - protein, 338 aa, Arabidopsis thaliana
  peptide (1)..(338): Ceres Seq. ID no. 13488878
  misc_feature (71)..(245): Pfam Name: DUF707 Pfam Description: Protein of unknown function
  misc_feature (1)..(338): NCBI GI NO: 30683843 NR Description: expressed protein [Arabidopsis thaliana]
  misc_feature (1)..(245): NCBI GI NO: 20197601 NR Description: unknown protein [Arabidopsis thaliana]
  misc_feature (265)..(338): NCBI GI NO: 20197601 NR Description: unknown protein [Arabidopsis thaliana]
  misc_feature (1)..(338): NCBI GI NO: 20466346 NR Description: unknown protein [Arabidopsis thaliana]
  misc_feature (1)..(338): NCBI GI NO: 18390845 NR Description: storage protein -related [Arabidopsis thaliana]
  misc_feature (71)..(338): NCBI GI NO: 25407018 NR Description: protein T6D22.12 [imported] - Arabidopsis thaliana
  misc_feature (4)..(40): NCBI GI NO: 25407018 NR Description: protein T6D22.12 [imported] - Arabidopsis thaliana
  misc_feature (71)..(338): NCBI GI NO: 18408876 NR Description: F12A21.2 [Arabidopsis thaliana]
  misc_feature (1)..(59): NCBI GI NO: 18408876 NR Description: F12A21.2 [Arabidopsis thaliana]
  misc_feature (71)..(338): NCBI GI NO: 14719314 NR Description: putative protein [Oryza sativa]
MHRSGAPRRTNENAKVIITTILGIVFGTFIGITLPSLSFKINLPSRLISSLDVAISGDKSPEDFGSRKFPEIYVPTNPRGAELLPPGIVVAKTDFYLRRLWGEPNEDLKKKPKYLVTFTVGFEQRNHINGVVKKFSEDFQILLFHYDGRTTEWDQFEWSKSAIHISTRKQTKWWYAKRFLHPDVVSAYEYIFIWDEDLGVEHFNADKYIELVKKHGLEISQPGLEPNNGLTWEMTKRRGDREVHKDTKEKPGWCKDPHLPPCAAFVEIMAPVFSREAWRCVWHMIQNDLVHGWGLDFALRRCVEPAHEKIGVVDSQWIIHKVIPSLGSQGKTENGKAP

SEQ ID NO: 4771 - DNA, 1196 bp, Arabidopsis thaliana
  misc_feature (1)..(1196): Ceres Seq. ID no. 12331367
atgttttaattttgtttccatcatcttccaaccttgagtttcggtcactataaaaagccaccactctctctgcttctctgcaacacataacccactcacagaaaaacctagaaagctctagagagaaagagagagagagatggaaggtaaagaagaagatgttagagtcggagctaacaagtttccggagaggcaaccgatcggaacttcggctcagagtgacaaggactacaaagagccaccacctgcgccgttgttcgagcccggcgagctagcttcatggtccttctggagagctgggattgctgagtttatagctacgtttttgttcctgtacatcactgttttgactgttatgggtgtgaagaggtcaccgaacatgtgtgcttccgtcggaatccaaggtatcgcttgggctttcggtggtatgatcttcgctctcgtctactgcaccgctggtatctccggtggacacatcaacccagcggttacgttcggtttgttcttagctaggaagctttcgctcacacgagctgtgtactacatagtgatgcagtgcttaggagctatctgtggagctggtgtggtcaaggggttccagccaaagcaataccaggctttgggaggtggagccaacaccatagctcatggctacaccaaaggaagtggtcttggagctgagattattggaacctttgtccttgtttacaccgtcttctctgccactgatgccaagagaaacgctcgtgactctcatgttcctattctagcaccgctccctatcggattcgctgtgttcttggttcacttagcaaccatccccattactggaactggaatcaacccagcaagaagtcttggagctgcaatcatcttcaacaaggacaacgcttgggatgaccactgggtcttttgggttggaccattcattggtgctgcacttgctgctctctaccacgttatagtcatcagagccatcccattcaagtccagaagctaaagctgattgagttctatttaaaatctggcttttgttcttagtttgctttcttttgtgaatctactacctgtgtgtaacgtgtgtatctgttgtcctcttctttgcctaatggagacttatgtaaaacaaagacatgccccagaaacatctgttatctttcttctccattttatcagaggatttctataattggccc

SEQ ID NO: 4772 - protein, 286 aa, Arabidopsis thaliana
  peptide (1)..(286): Ceres Seq. ID no. 12331368
  misc_feature (44)..(273): Pfam Name: Pfam Description:  Major intrinsic protein
  misc_feature (1)..(286): NCBI GI NO: 15225913 NR Description: aquaporin
  misc_feature (1)..(286): NCBI GI NO: 10799093 NR Description: aquaporin PIP1b1 [Brassica oleracea]
  misc_feature (1)..(286): NCBI GI NO: 10799095 NR Description: aquaporin PIP1b2 [Brassica oleracea]
  misc_feature (1)..(286): NCBI GI NO: 4467357 NR Description: PIP1b protein [Arabidopsis thaliana]
  misc_feature (1)..(286): NCBI GI NO: 1199804 NR Description: transmembrane channel protein [Brassica oleracea]
  misc_feature (1)..(286): NCBI GI NO: 7209556 NR Description: plasma membrane aquaporin 1b [Raphanus sativus]
  misc_feature (1)..(286): NCBI GI NO: 1199503 NR Description: transmembrane channel protein [Brassica oleracea]
  misc_feature (1)..(286): NCBI GI NO: 2199574 NR Description: aquaporin [Brassica rapa]
  misc_feature (1)..(286): NCBI GI NO: 21536709 NR Description: aquaporin (plasma membrane intrinsic protein 1B)
  misc_feature (1)..(286): NCBI GI NO: 15233109 NR Description: plasma membrane intrinsic protein 1a
MEGKEEDVRVGANKFPERQPIGTSAQSDKDYKEPPPAPLFEPGELASWSFWRAGIAEFIATFLFLYITVLTVMGVKRSPNMCASVGIQGIAWAFGGMIFALVYCTAGISGGHINPAVTFGLFLARKLSLTRAVYYIVMQCLGAICGAGVVKGFQPKQYQALGGGANTIAHGYTKGSGLGAEIIGTFVLVYTVFSATDAKRNARDSHVPILAPLPIGFAVFLVHLATIPITGTGINPARSLGAAIIFNKDNAWDDHWVFWVGPFIGAALAALYHVIVIRAIPFKSRS

SEQ ID NO: 4773 - protein, 214 aa, Arabidopsis thaliana
  peptide (1)..(214): Ceres Seq. ID no. 12331369
  misc_feature (1)..(201): Pfam Name: Pfam Description:  Major intrinsic protein
  misc_feature (1)..(214): NCBI GI NO: 15225913 NR Description: aquaporin
  misc_feature (1)..(214): NCBI GI NO: 10799093 NR Description: aquaporin PIP1b1 [Brassica oleracea]
  misc_feature (1)..(214): NCBI GI NO: 10799095 NR Description: aquaporin PIP1b2 [Brassica oleracea]
  misc_feature (1)..(214): NCBI GI NO: 4467357 NR Description: PIP1b protein [Arabidopsis thaliana]
  misc_feature (1)..(214): NCBI GI NO: 1199804 NR Description: transmembrane channel protein [Brassica oleracea]
  misc_feature (1)..(214): NCBI GI NO: 7209556 NR Description: plasma membrane aquaporin 1b [Raphanus sativus]
  misc_feature (1)..(214): NCBI GI NO: 1199503 NR Description: transmembrane channel protein [Brassica oleracea]
  misc_feature (1)..(214): NCBI GI NO: 2199574 NR Description: aquaporin [Brassica rapa]
  misc_feature (1)..(214): NCBI GI NO: 21536709 NR Description: aquaporin (plasma membrane intrinsic protein 1B)
  misc_feature (1)..(214): NCBI GI NO: 15233109 NR Description: plasma membrane intrinsic protein 1a
MGVKRSPNMCASVGIQGIAWAFGGMIFALVYCTAGISGGHINPAVTFGLFLARKLSLTRAVYYIVMQCLGAICGAGVVKGFQPKQYQALGGGANTIAHGYTKGSGLGAEIIGTFVLVYTVFSATDAKRNARDSHVPILAPLPIGFAVFLVHLATIPITGTGINPARSLGAAIIFNKDNAWDDHWVFWVGPFIGAALAALYHVIVIRAIPFKSRS

SEQ ID NO: 4774 - protein, 206 aa, Arabidopsis thaliana
  peptide (1)..(206): Ceres Seq. ID no. 12331370
  misc_feature (1)..(193): Pfam Name: Pfam Description:  Major intrinsic protein
  misc_feature (1)..(206): NCBI GI NO: 15225913 NR Description: aquaporin
  misc_feature (1)..(206): NCBI GI NO: 10799093 NR Description: aquaporin PIP1b1 [Brassica oleracea]
  misc_feature (1)..(206): NCBI GI NO: 10799095 NR Description: aquaporin PIP1b2 [Brassica oleracea]
  misc_feature (1)..(206): NCBI GI NO: 4467357 NR Description: PIP1b protein [Arabidopsis thaliana]
  misc_feature (1)..(206): NCBI GI NO: 1199804 NR Description: transmembrane channel protein [Brassica oleracea]
  misc_feature (1)..(206): NCBI GI NO: 7209556 NR Description: plasma membrane aquaporin 1b [Raphanus sativus]
  misc_feature (1)..(206): NCBI GI NO: 1199503 NR Description: transmembrane channel protein [Brassica oleracea]
  misc_feature (1)..(206): NCBI GI NO: 2199574 NR Description: aquaporin [Brassica rapa]
  misc_feature (1)..(206): NCBI GI NO: 21536709 NR Description: aquaporin (plasma membrane intrinsic protein 1B)
  misc_feature (1)..(206): NCBI GI NO: 15233109 NR Description: plasma membrane intrinsic protein 1a
MCASVGIQGIAWAFGGMIFALVYCTAGISGGHINPAVTFGLFLARKLSLTRAVYYIVMQCLGAICGAGVVKGFQPKQYQALGGGANTIAHGYTKGSGLGAEIIGTFVLVYTVFSATDAKRNARDSHVPILAPLPIGFAVFLVHLATIPITGTGINPARSLGAAIIFNKDNAWDDHWVFWVGPFIGAALAALYHVIVIRAIPFKSRS

SEQ ID NO: 4775 - DNA, 1512 bp, Arabidopsis thaliana
  misc_feature (1)..(1512): Ceres Seq. ID no. 12330300
gaaagacgacagcgtttaataatctccttctcttgtcttgcttccttgtgaatcaaaaaccagcgatcaaaagtcttcttcttgtgaatctgtgatctcaaaagctcctttaaccatggcgacttttgatgatggagatttcccagctcaaacccattctccgtctgaacacgaagactttggtggctacgataatttctccgaagcacagcaacctccgactcaacatcaatccggtggattctcttctttcaatggagatcctgcttccccaaatggatatggatttggtgcttcttcacctaaccatgacttttcctcgccttttgaatcttccgttaacgatgctaacggaaacggcggcggcagcggtggtgatgcgatcttcgcttccgatggtccgattcttccagatccaaatgagatgagagaggagggtttccaacgccgtgagtggcgccgtttgaacaccattcaccttgaggagaaggaaaagaaagagaaggagatgcggaatcagatcataactgaagcagaagatttcaagaaagccttctatgagaaaagagacaagaccattgagaccaacaagactgataaccgtgaaaaggagaagctatactgggctaaccaagagaagttccacaaagaagttgacaagcattactggaaagcaattgcagagctaatccctcgtgaggttcccaacattgagaaaaagagagggaaaaaggatccggacaagaaaccatcagtgaatgttattcagggtcctaaacctgggaagccaactgatctagggagaatgaggcagatattcttgaagctcaagacaaatcccccacctcacatgatgccgcctcctcctccagccaaagatgccaaagatgggaaggatgcgaaagatggcaaagatgcaaaaactgggaaagatgggaaggatgcaaaaggagggaaagacgctaaggacttaaaagatgggaaacctgcagatccaaaggtgacagaggaaaaacgtccttcacctgccaaagacgcaagtgttgaaacagcgaaacctgatgctgctgcctcgggagagggagagaaacctgtagctgtgactgaggccgagggaaccaaggcggagtgaagggtctttagtattactgttgggggattatttgatattgatgaagtcacaatagctgcgggcgaaaataagaagaggtaagttatgtgcacatagaagctcttatgggcgctgtctgtgagcacaacatttcctcttctggggagagaattttagtccttttgtttttggttattattttttattaccattatatttgttctgcaaaatttggttattgtcttggatgatgttcaccttaaatcattttggttccacgtattttacatttataagacttgagagaagtaaaggtttgttggatgaatcatttgattgtattgtgtgatgtgggcatgaggtagttgaggagtgtcatggcatgtgaactatctttcttt

SEQ ID NO: 4776 - protein, 338 aa, Arabidopsis thaliana
  peptide (1)..(338): Ceres Seq. ID no. 12330301
  misc_feature (1)..(338): NCBI GI NO: 18399468 NR Description: expressed protein; protein id: At2g20760
  misc_feature (1)..(338): NCBI GI NO: 21536711 NR Description: unknown [Arabidopsis thaliana]
  misc_feature (44)..(314): NCBI GI NO: 34394059 NR Description: hypothetical protein
  misc_feature (66)..(256): NCBI GI NO: 18405251 NR Description: expressed protein; protein id: At2g40060
  misc_feature (66)..(256): NCBI GI NO: 21593842 NR Description: unknown [Arabidopsis thaliana]
  misc_feature (36)..(255): NCBI GI NO: 18409442 NR Description: putative protein; protein id: At3g51890
  misc_feature (36)..(255): NCBI GI NO: 11291712 NR Description: hypothetical protein
  misc_feature (105)..(255): NCBI GI NO: 21617999 NR Description: unknown [Arabidopsis thaliana]
MATFDDGDFPAQTHSPSEHEDFGGYDNFSEAQQPPTQHQSGGFSSFNGDPASPNGYGFGASSPNHDFSSPFESSVNDANGNGGGSGGDAIFASDGPILPDPNEMREEGFQRREWRRLNTIHLEEKEKKEKEMRNQIITEAEDFKKAFYEKRDKTIETNKTDNREKEKLYWANQEKFHKEVDKHYWKAIAELIPREVPNIEKKRGKKDPDKKPSVNVIQGPKPGKPTDLGRMRQIFLKLKTNPPPHMMPPPPPAKDAKDGKDAKDGKDAKTGKDGKDAKGGKDAKDLKDGKPADPKVTEEKRPSPAKDASVETAKPDAAASGEGEKPVAVTEAEGTKAE

SEQ ID NO: 4777 - protein, 235 aa, Arabidopsis thaliana
  peptide (1)..(235): Ceres Seq. ID no. 12330302
  misc_feature (1)..(235): NCBI GI NO: 18399468 NR Description: expressed protein; protein id: At2g20760
  misc_feature (1)..(235): NCBI GI NO: 21536711 NR Description: unknown [Arabidopsis thaliana]
  misc_feature (1)..(211): NCBI GI NO: 34394059 NR Description: hypothetical protein
  misc_feature (1)..(153): NCBI GI NO: 18405251 NR Description: expressed protein; protein id: At2g40060
  misc_feature (1)..(153): NCBI GI NO: 21593842 NR Description: unknown [Arabidopsis thaliana]
  misc_feature (1)..(152): NCBI GI NO: 18409442 NR Description: putative protein; protein id: At3g51890
  misc_feature (1)..(152): NCBI GI NO: 11291712 NR Description: hypothetical protein
  misc_feature (2)..(152): NCBI GI NO: 21617999 NR Description: unknown [Arabidopsis thaliana]
MREEGFQRREWRRLNTIHLEEKEKKEKEMRNQIITEAEDFKKAFYEKRDKTIETNKTDNREKEKLYWANQEKFHKEVDKHYWKAIAELIPREVPNIEKKRGKKDPDKKPSVNVIQGPKPGKPTDLGRMRQIFLKLKTNPPPHMMPPPPPAKDAKDGKDAKDGKDAKTGKDGKDAKGGKDAKDLKDGKPADPKVTEEKRPSPAKDASVETAKPDAAASGEGEKPVAVTEAEGTKAE

SEQ ID NO: 4778 - protein, 207 aa, Arabidopsis thaliana
  peptide (1)..(207): Ceres Seq. ID no. 12330303
  misc_feature (1)..(207): NCBI GI NO: 18399468 NR Description: expressed protein; protein id: At2g20760
  misc_feature (1)..(207): NCBI GI NO: 21536711 NR Description: unknown [Arabidopsis thaliana]
  misc_feature (1)..(183): NCBI GI NO: 34394059 NR Description: hypothetical protein
  misc_feature (1)..(125): NCBI GI NO: 18405251 NR Description: expressed protein; protein id: At2g40060
  misc_feature (1)..(125): NCBI GI NO: 21593842 NR Description: unknown [Arabidopsis thaliana]
  misc_feature (1)..(124): NCBI GI NO: 18409442 NR Description: putative protein; protein id: At3g51890
  misc_feature (1)..(124): NCBI GI NO: 11291712 NR Description: hypothetical protein
  misc_feature (1)..(124): NCBI GI NO: 21617999 NR Description: unknown [Arabidopsis thaliana]
MRNQIITEAEDFKKAFYEKRDKTIETNKTDNREKEKLYWANQEKFHKEVDKHYWKAIAELIPREVPNIEKKRGKKDPDKKPSVNVIQGPKPGKPTDLGRMRQIFLKLKTNPPPHMMPPPPPAKDAKDGKDAKDGKDAKTGKDGKDAKGGKDAKDLKDGKPADPKVTEEKRPSPAKDASVETAKPDAAASGEGEKPVAVTEAEGTKAE

SEQ ID NO: 4779 - DNA, 815 bp, Arabidopsis thaliana
  misc_feature (1)..(815): Ceres Seq. ID no. 12325720
aacctggcctccacttttgtttttccacttctacggtaagtgaaagagagagagagagaggaaaaaaaaggggaaagcttaagatattggagagtaacaatgccttcaaattcaggagatgataatgttcttcaagttctcataaagaactttgatgtccttgctctcccattggttacactcgtctatcctctatatgcatcagtgaaagcaatagagacaagatcattaccagaagatgaacaatggcttacttactgggttctttacgcacttatctctctctttgaactcactttctccaaacctctcgagtggtttcctatatggccatacatgaagttgtttgggatctgttggttagtgttaccacaattcaatggagcagaacatatctacaaacatttcattagaccattctacagagatcctcaaagagctaccaccaaaatttggtatgttcctcacaagaaattcaatttcttccctaaacgcgacgacgacgacattctcactgctgctgaaaaatacatggaacaacacggtaccgaagcgtttgagcgaatgatcgttaagaaggatagttatgaaagaggtaggagtagtagaggaatcaataatcacatgatctttgatgatgactataggtactaataagttcttaaaccggtttaattagctactttcagtttataagtttgctatgtgacaatatattgtctgtttctatggttgttataatttgcgtggattatgtataagcccttatttaggactgcttatttttgtgaaaaatcaaataaacattttctctc

SEQ ID NO: 4780 - protein, 184 aa, Arabidopsis thaliana
  peptide (1)..(184): Ceres Seq. ID no. 12325721
  misc_feature (11)..(108): Pfam Name: Pfam Description:  TB2/DP1, HVA22 family
  misc_feature (1)..(184): NCBI GI NO: 15222421 NR Description: AtHVA22c; protein id: At1g69700
  misc_feature (5)..(184): NCBI GI NO: 15221266 NR Description: AtHVA22a; protein id: At1g74520
  misc_feature (4)..(184): NCBI GI NO: 4884934 NR Description: AtHVA22b [Arabidopsis thaliana]
  misc_feature (4)..(184): NCBI GI NO: 15241840 NR Description: AtHVA22b-like protein; protein id: At5g62490
  misc_feature (36)..(157): NCBI GI NO: 34910810 NR Description: P0042A10.34
  misc_feature (21)..(109): NCBI GI NO: 18423191 NR Description: putative protein; protein id: At5g50720
  misc_feature (24)..(133): NCBI GI NO: 18416458 NR Description: abscisic acid-induced - like protein
  misc_feature (14)..(105): NCBI GI NO: 1076715 NR Description: abscisic acid-induced protein HVA22 - barley
  misc_feature (14)..(105): NCBI GI NO: 33342176 NR Description: hypothetical protein [Triticum aestivum]
  misc_feature (28)..(109): NCBI GI NO: 8777395 NR Description: gene_id:MFB16
MPSNSGDDNVLQVLIKNFDVLALPLVTLVYPLYASVKAIETRSLPEDEQWLTYWVLYALISLFELTFSKPLEWFPIWPYMKLFGICWLVLPQFNGAEHIYKHFIRPFYRDPQRATTKIWYVPHKKFNFFPKRDDDDILTAAEKYMEQHGTEAFERMIVKKDSYERGRSSRGINNHMIFDDDYRY

SEQ ID NO: 4781 - protein, 105 aa, Arabidopsis thaliana
  peptide (1)..(105): Ceres Seq. ID no. 12325722
  misc_feature (1)..(105): NCBI GI NO: 15222421 NR Description: AtHVA22c; protein id: At1g69700
  misc_feature (1)..(105): NCBI GI NO: 15221266 NR Description: AtHVA22a; protein id: At1g74520
  misc_feature (1)..(105): NCBI GI NO: 4884934 NR Description: AtHVA22b [Arabidopsis thaliana]
  misc_feature (1)..(105): NCBI GI NO: 15241840 NR Description: AtHVA22b-like protein; protein id: At5g62490
  misc_feature (1)..(78): NCBI GI NO: 34910810 NR Description: P0042A10.34
  misc_feature (1)..(30): NCBI GI NO: 18423191 NR Description: putative protein; protein id: At5g50720
  misc_feature (1)..(54): NCBI GI NO: 18416458 NR Description: abscisic acid-induced - like protein
  misc_feature (1)..(26): NCBI GI NO: 1076715 NR Description: abscisic acid-induced protein HVA22 - barley
  misc_feature (1)..(26): NCBI GI NO: 33342176 NR Description: hypothetical protein [Triticum aestivum]
  misc_feature (1)..(30): NCBI GI NO: 8777395 NR Description: gene_id:MFB16
MKLFGICWLVLPQFNGAEHIYKHFIRPFYRDPQRATTKIWYVPHKKFNFFPKRDDDDILTAAEKYMEQHGTEAFERMIVKKDSYERGRSSRGINNHMIFDDDYRY

SEQ ID NO: 4782 - DNA, 1133 bp, Arabidopsis thaliana
  misc_feature (1)..(1133): Ceres Seq. ID no. 13497295
aacaaaaatcatttcgttcttttccaaaatccccaaacaatagaaacgcgttttaaacgatttgattagttttaaattaaaaagaagatccgagcgatgtctggttcgacccggaaagaaatggatcggatcaaaggaccatggagtcctgaagaagacgatctgttacaatcgttggttcagaagcacggaccaaggaactggtctctgataagcaaatcaatccctggacgttccggtaaatcttgccgtctccgttggtgtaatcagctttctccggaggtagagcaccgtggattcacggcggaggaagatgatacgattatactagcgcacgctcggtttggtaacaagtgggcgacgattgcacggcttctcaatggtcgcactgataacgcgattaagaatcactggaactcaacgctgaagcggaaatgtagcggcggaggcggcggaggagaggaagggcagagttgtgatttcggtggtaatggagggtatgatggtaatttaactgatgaaaaaccgttaaaacggagggcgagtggtggaggaggagttgttgtggtgacggcgttaagtccaacgggatctgacgtcagcgagcaatcgcaatctagtggatctgttttaccggtttcttcttcttgtcatgtttttaaaccgacggcgagagctggtggagtggtgattgagtcatcatcgtcggaggaggaggagaaagatccgatgacttgtttgaggttgtctttgccttgggtcaatgagtcaacaactccaccggagttgtttccggtgaagagagaagaagaagaagagaaggaaagagagatttctggacttggtggagattttatgacggtggtgcaggagatgattaagacggaggttaggagttacatggcggatttacagctaggaaacggcggaggagctggaggaggagcaagttcgtgtatggtgcaaggaactaatggtcgtaatgtagggtttagagagtttattggattaggtaggatcgagtagtgagtgagaaaagagaagaattgtgtagcaaatgcagagaaagagccaatttcatgatttgagatttgattcattcgaaaaaaaactgaataaatgtattgattttg

SEQ ID NO: 4783 - protein, 309 aa, Arabidopsis thaliana
  peptide (1)..(309): Ceres Seq. ID no. 13497296
  misc_feature (13)..(59): Pfam Name: Pfam Description:  Myb-like DNA-binding domain
  misc_feature (1)..(309): NCBI GI NO: 15227806 NR Description: MYB family transcription factor
  misc_feature (1)..(309): NCBI GI NO: 21593586 NR Description: putative MYB family transcription factor
  misc_feature (1)..(309): NCBI GI NO: 15235484 NR Description: myb DNA-binding protein (AtMYB73)
  misc_feature (53)..(309): NCBI GI NO: 11358558 NR Description: myb-related transcription factor MYB73
  misc_feature (10)..(309): NCBI GI NO: 15240708 NR Description: myb family transcription factor
  misc_feature (10)..(309): NCBI GI NO: 15450393 NR Description: AT5g67300/K8K14_2 [Arabidopsis thaliana]
  misc_feature (10)..(309): NCBI GI NO: 2129648 NR Description: myb-related protein, 33.3K - Arabidopsis thaliana
  misc_feature (10)..(309): NCBI GI NO: 21592897 NR Description: myb-related protein, 33.3K [Arabidopsis thaliana]
  misc_feature (10)..(301): NCBI GI NO: 15229664 NR Description: myb DNA-binding protein (MYB77)
  misc_feature (10)..(301): NCBI GI NO: 2832406 NR Description: R2R3-MYB transcription factor
MSGSTRKEMDRIKGPWSPEEDDLLQSLVQKHGPRNWSLISKSIPGRSGKSCRLRWCNQLSPEVEHRGFTAEEDDTIILAHARFGNKWATIARLLNGRTDNAIKNHWNSTLKRKCSGGGGGGEEGQSCDFGGNGGYDGNLTDEKPLKRRASGGGGVVVVTALSPTGSDVSEQSQSSGSVLPVSSSCHVFKPTARAGGVVIESSSSEEEEKDPMTCLRLSLPWVNESTTPPELFPVKREEEEEKEREISGLGGDFMTVVQEMIKTEVRSYMADLQLGNGGGAGGGASSCMVQGTNGRNVGFREFIGLGRIE

SEQ ID NO: 4784 - protein, 301 aa, Arabidopsis thaliana
  peptide (1)..(301): Ceres Seq. ID no. 13497297
  misc_feature (5)..(51): Pfam Name: Pfam Description:  Myb-like DNA-binding domain
  misc_feature (1)..(301): NCBI GI NO: 15227806 NR Description: MYB family transcription factor
  misc_feature (1)..(301): NCBI GI NO: 21593586 NR Description: putative MYB family transcription factor
  misc_feature (1)..(301): NCBI GI NO: 15235484 NR Description: myb DNA-binding protein (AtMYB73)
  misc_feature (45)..(301): NCBI GI NO: 11358558 NR Description: myb-related transcription factor MYB73
  misc_feature (2)..(301): NCBI GI NO: 15240708 NR Description: myb family transcription factor
  misc_feature (2)..(301): NCBI GI NO: 15450393 NR Description: AT5g67300/K8K14_2 [Arabidopsis thaliana]
  misc_feature (2)..(301): NCBI GI NO: 2129648 NR Description: myb-related protein, 33.3K - Arabidopsis thaliana
  misc_feature (2)..(301): NCBI GI NO: 21592897 NR Description: myb-related protein, 33.3K [Arabidopsis thaliana]
  misc_feature (2)..(293): NCBI GI NO: 15229664 NR Description: myb DNA-binding protein (MYB77)
  misc_feature (2)..(293): NCBI GI NO: 2832406 NR Description: R2R3-MYB transcription factor
MDRIKGPWSPEEDDLLQSLVQKHGPRNWSLISKSIPGRSGKSCRLRWCNQLSPEVEHRGFTAEEDDTIILAHARFGNKWATIARLLNGRTDNAIKNHWNSTLKRKCSGGGGGGEEGQSCDFGGNGGYDGNLTDEKPLKRRASGGGGVVVVTALSPTGSDVSEQSQSSGSVLPVSSSCHVFKPTARAGGVVIESSSSEEEEKDPMTCLRLSLPWVNESTTPPELFPVKREEEEEKEREISGLGGDFMTVVQEMIKTEVRSYMADLQLGNGGGAGGGASSCMVQGTNGRNVGFREFIGLGRIE

SEQ ID NO: 4785 - DNA, 1240 bp, Arabidopsis thaliana
  misc_feature (1)..(1240): Ceres Seq. ID no. 12327606
aggtgggacacggaagctgagctctaatcctgatcggagatggcgactagcgattctgaattcaattctgatcttcttctcgctcacaagcttcccgagacgcgttacacctacaatgaaagagatgtagcaatctatgctttgggaatcggcgcttgtggccaagatgctgtggattccgatgagctcaagtttgtgtatcacagaaatgggcaggatttgatccaggtcttaccaacttttgcttcactattcacacttggatctttgacagaaggactggatttgccaggttttaaatatgatcctagtctcttgttgcatgggcagcagtatattgaaatatacaggccattaccttccaaggcttccttaattaacaaagtaagcctcgctggtttgcaagataaaggtaaagcagctatccttgaattagaaaccagaagttacgaggaagggtcaggggaactgttatgcatgaataggacgactgttttcctaagaggtgctggtggtttctcaaattcatctcaaccattctcttacaaaaactatccaagtaaccagggcttagctgtgaaaatcccacaaagacaacctttgacagtgtgcgaagagcgcactcagccatcgcaggcattactttataggctgtctggtgactataatcctctgcattcagatccagaatttgcaaaacttgccggattcccacgcccgatattgcatgggctatgcacactcgggtttgcaatcaaggcaatcatcaagtgtgtttgcaagggtgacccaactgctgtcaaaaccatatctggacgattcctcacgactgtttttcctggcgaaactctgataaccgaaatgtggcttgaaggcttgagggttatatatcagacgaaagtgaaggaaaggaacaaaactgtgttagctggttatgttgatattcgtgggttatcttcgtcactttagaatgttaggtccttagatatattgggctgtcataatattgcaaaggtaataaacatgtcagaagactcttgatgtttgcttggcgtaatgagccattgagccatcaataaacactctttgatgacggtcacaatttactgaaatggttagttgtatcgtgttactgttgtaataaatgttgagtgacgcaaaatgcacatgccggatgaagcaaaatgcattgaagaaaatcctttttgggtgtcaatgaactggaacataaagcctgagt

SEQ ID NO: 4786 - protein, 309 aa, Arabidopsis thaliana
  peptide (1)..(309): Ceres Seq. ID no. 12327607
  misc_feature (174)..(299): Pfam Name: Pfam Description:  MaoC like domain
  misc_feature (1)..(309): NCBI GI NO: 22330656 NR Description: hypothetical protein; protein id: At1g76150
  misc_feature (1)..(200): NCBI GI NO: 6573727 NR Description: T23E18.9 [Arabidopsis thaliana]
  misc_feature (2)..(308): NCBI GI NO: 4504505 NR Description: hydroxysteroid (17-beta) dehydrogenase 4
  misc_feature (6)..(302): NCBI GI NO: 2315981 NR Description: 17-beta-hydroxysteroid dehydrogenase type IV
  misc_feature (1)..(302): NCBI GI NO: 13242303 NR Description: peroxisomal multifunctional enzyme type II
  misc_feature (14)..(302): NCBI GI NO: 31982273 NR Description: hydroxysteroid
  misc_feature (1)..(302): NCBI GI NO: 2492741 NR Description: Estradiol 17 beta-dehydrogenase 4
  misc_feature (14)..(309): NCBI GI NO: 499340 NR Description: 17beta-estradiol dehydrogenase [Sus scrofa]
  misc_feature (1)..(302): NCBI GI NO: 1620451 NR Description: multifunctional protein 2 [Rattus norvegicus]
  misc_feature (1)..(302): NCBI GI NO: 7514017 NR Description: multifunctional beta-oxidation protein 2
MATSDSEFNSDLLLAHKLPETRYTYNERDVAIYALGIGACGQDAVDSDELKFVYHRNGQDLIQVLPTFASLFTLGSLTEGLDLPGFKYDPSLLLHGQQYIEIYRPLPSKASLINKVSLAGLQDKGKAAILELETRSYEEGSGELLCMNRTTVFLRGAGGFSNSSQPFSYKNYPSNQGLAVKIPQRQPLTVCEERTQPSQALLYRLSGDYNPLHSDPEFAKLAGFPRPILHGLCTLGFAIKAIIKCVCKGDPTAVKTISGRFLTTVFPGETLITEMWLEGLRVIYQTKVKERNKTVLAGYVDIRGLSSSL

SEQ ID NO: 4787 - protein, 163 aa, Arabidopsis thaliana
  peptide (1)..(163): Ceres Seq. ID no. 12327608
  misc_feature (28)..(153): Pfam Name: Pfam Description:  MaoC like domain
  misc_feature (1)..(163): NCBI GI NO: 22330656 NR Description: hypothetical protein; protein id: At1g76150
  misc_feature (1)..(54): NCBI GI NO: 6573727 NR Description: T23E18.9 [Arabidopsis thaliana]
  misc_feature (1)..(162): NCBI GI NO: 4504505 NR Description: hydroxysteroid (17-beta) dehydrogenase 4
  misc_feature (1)..(156): NCBI GI NO: 2315981 NR Description: 17-beta-hydroxysteroid dehydrogenase type IV
  misc_feature (1)..(156): NCBI GI NO: 13242303 NR Description: peroxisomal multifunctional enzyme type II
  misc_feature (1)..(156): NCBI GI NO: 31982273 NR Description: hydroxysteroid
  misc_feature (1)..(156): NCBI GI NO: 2492741 NR Description: Estradiol 17 beta-dehydrogenase 4
  misc_feature (1)..(163): NCBI GI NO: 499340 NR Description: 17beta-estradiol dehydrogenase [Sus scrofa]
  misc_feature (1)..(156): NCBI GI NO: 1620451 NR Description: multifunctional protein 2 [Rattus norvegicus]
  misc_feature (1)..(156): NCBI GI NO: 7514017 NR Description: multifunctional beta-oxidation protein 2
MNRTTVFLRGAGGFSNSSQPFSYKNYPSNQGLAVKIPQRQPLTVCEERTQPSQALLYRLSGDYNPLHSDPEFAKLAGFPRPILHGLCTLGFAIKAIIKCVCKGDPTAVKTISGRFLTTVFPGETLITEMWLEGLRVIYQTKVKERNKTVLAGYVDIRGLSSSL

SEQ ID NO: 4788 - DNA, 1839 bp, Arabidopsis thaliana
  misc_feature (1)..(1839): Ceres Seq. ID no. 13491552
aaattagttggcaaactccgcctgctcttcgataattccgaggagcttcttcactcttcttaaatctcatttctctctctctctctctctctctctctctctctctctctctctctctctctctctctctctctctctctcgcattgcgattaacgaaattcgaaaaatgtctcgtcttctccaaacacccttcttaccttcagtttccctccccacaaaaacacgatcttccgttacgggtttccgggtaaagcccagaatcatcccaatccaagcaaagatccgagaaatcttcatgcctgcactaagttctacaatgaccgaaggaaaaatcgtctcttgggttaaatcagaaggcgataaactcaacaaaggagagagtgttgttgttgttgaatccgataaagctgatatggatgttgagactttctatgatggttatctagctgcaatcatggttgaagaaggtggtgttgctcctgttggttctgctattgctttgttagctgaaactgaagatgagattgctgatgctaaggctaaagcttctggtggtggaggtgattctaaggctcctcctccggcttctcctcctacggctacagttgtagcacctgtggctgttgagaagaagattgcagctcctcctgtggcgattaaggcggtggcggcgtctgcggtgcatccggcgtctgaaggagggaagaggattgtggcgtctccttatgctaagaagttagctaaggaattgaatgtggaattggctggtttagttggaagtggaccaatgggaaggattgtggctaaagatgttgaggcggttgcagctggaggaggagttcaagctgctgtagctgttaaggaggtagtggcagttcctggtgtggagttgggatcagtggttccgtttacgacaatgcagggggctgtgagtaggaatatggtggagagtcttgctgttcctacttttagagtcggttacacgattagtacggatgctcttgatgctctctacaagaagattaagtcgaaaggtgtgacaatgacggcactcctagcaaaggcaactgcacttgcactggcgaaacatccagttgtaaactcgtcctgtagagatggtaacagttttgtgtataacagtagcatcaacgttgctgttgctgttgctattgatggtggtctgataactcctgtgcttcagaacgctgataaggttgacatttattcgttatctagaaaatggaaagaattggttgataaggctcgagccaagcagctgcagcctcaggagtacaacactggtaccttcactctctctaacctaggaatgtttggcgttgatcggtttgatgctattctaccccctggaacaggagcgattatggctgtaggagcatctcaaccttcagtggttgcaactaaagacggccgcattggcatgaaaaaccagatgcaggtgaatgtgacggcagatcatcgtgtcatctatggtgctgatcttgcacagttcttgcaaacattggcaagcattatagaggacccaaaggaccttacattctaggccaaattactacttttcgcagcccagtcttctctgttcttgattccatgggagcttgtatttctgcggtaatcagtttctttgatagaatcgaacttttaagagtaatgttgaacataatcatttctttgtttgagatatatcttctgcaacattttctgcatggaaaggccgtcccacatgattttgctactgacttcatatatttccacttcatgtgatgaatcttatatgaactgataactttagcatgattaataacatgaatcttatatgg

SEQ ID NO: 4789 - protein, 464 aa, Arabidopsis thaliana; identical to SEQ ID NO: 4035
  peptide (1)..(464): Ceres Seq. ID no. 15222866
  misc_feature (240)..(464): Pfam Name: catalytic domain Pfam Description: 2-oxoacid dehydrogenases acyltransferase
  misc_feature (1)..(464): NCBI GI NO: 21536525 NR Description: dihydrolipoamide S-acetyltransferase, putative
  misc_feature (1)..(464): NCBI GI NO: 15218630 NR Description: dihydrolipoamide S-acetyltransferase -related
  misc_feature (1)..(464): NCBI GI NO: 25286434 NR Description: protein F12K21.24
  misc_feature (1)..(463): NCBI GI NO: 15230922 NR Description: dihydrolipoamide S-acetyltransferase
  misc_feature (35)..(463): NCBI GI NO: 9279589 NR Description: dihydrolipoamide S-acetyltransferase
  misc_feature (39)..(458): NCBI GI NO: 16331208 NR Description: dihydrolipoamide acetyltransferase component
  misc_feature (39)..(463): NCBI GI NO: 22298842 NR Description: dihydrolipoamide S-acetyltransferase
  misc_feature (39)..(463): NCBI GI NO: 23123757 NR Description: hypothetical protein [Nostoc punctiforme]
  misc_feature (39)..(463): NCBI GI NO: 17231098 NR Description: dihydrolipoamide S-acetyltransferase
  misc_feature (39)..(463): NCBI GI NO: 37522138 NR Description: dihydrolipoamide S-acetyltransferase

SEQ ID NO: 4790 - protein, 421 aa, Arabidopsis thaliana; identical to SEQ ID NO: 4036
  peptide (1)..(421): Ceres Seq. ID no. 15222867
  misc_feature (197)..(421): Pfam Name: catalytic domain Pfam Description: 2-oxoacid dehydrogenases acyltransferase
  misc_feature (1)..(421): NCBI GI NO: 21536525 NR Description: dihydrolipoamide S-acetyltransferase, putative
  misc_feature (1)..(421): NCBI GI NO: 15218630 NR Description: dihydrolipoamide S-acetyltransferase -related
  misc_feature (1)..(421): NCBI GI NO: 25286434 NR Description: protein F12K21.24
  misc_feature (1)..(420): NCBI GI NO: 15230922 NR Description: dihydrolipoamide S-acetyltransferase
  misc_feature (1)..(420): NCBI GI NO: 9279589 NR Description: dihydrolipoamide S-acetyltransferase
  misc_feature (1)..(415): NCBI GI NO: 16331208 NR Description: dihydrolipoamide acetyltransferase component
  misc_feature (1)..(420): NCBI GI NO: 22298842 NR Description: dihydrolipoamide S-acetyltransferase
  misc_feature (1)..(420): NCBI GI NO: 23123757 NR Description: hypothetical protein [Nostoc punctiforme]
  misc_feature (1)..(420): NCBI GI NO: 17231098 NR Description: dihydrolipoamide S-acetyltransferase
  misc_feature (1)..(420): NCBI GI NO: 37522138 NR Description: dihydrolipoamide S-acetyltransferase

SEQ ID NO: 4791 - protein, 414 aa, Arabidopsis thaliana
  peptide (1)..(414): Ceres Seq. ID no. 15222868
  misc_feature (190)..(414): Pfam Name: catalytic domain Pfam Description: 2-oxoacid dehydrogenases acyltransferase
  misc_feature (1)..(414): NCBI GI NO: 21536525 NR Description: dihydrolipoamide S-acetyltransferase, putative
  misc_feature (1)..(414): NCBI GI NO: 15218630 NR Description: dihydrolipoamide S-acetyltransferase -related
  misc_feature (1)..(414): NCBI GI NO: 25286434 NR Description: protein F12K21.24
  misc_feature (1)..(413): NCBI GI NO: 15230922 NR Description: dihydrolipoamide S-acetyltransferase
  misc_feature (1)..(413): NCBI GI NO: 9279589 NR Description: dihydrolipoamide S-acetyltransferase
  misc_feature (1)..(408): NCBI GI NO: 16331208 NR Description: dihydrolipoamide acetyltransferase component
  misc_feature (1)..(413): NCBI GI NO: 22298842 NR Description: dihydrolipoamide S-acetyltransferase
  misc_feature (1)..(413): NCBI GI NO: 23123757 NR Description: hypothetical protein [Nostoc punctiforme]
  misc_feature (1)..(413): NCBI GI NO: 17231098 NR Description: dihydrolipoamide S-acetyltransferase
  misc_feature (1)..(413): NCBI GI NO: 37522138 NR Description: dihydrolipoamide S-acetyltransferase
MTEGKIVSWVKSEGDKLNKGESVVVVESDKADMDVETFYDGYLAAIMVEEGGVAPVGSAIALLAETEDEIADAKAKASGGGGDSKAPPPASPPTATVVAPVAVEKKIAAPPVAIKAVAASAVHPASEGGKRIVASPYAKKLAKELNVELAGLVGSGPMGRIVAKDVEAVAAGGGVQAAVAVKEVVAVPGVELGSVVPFTTMQGAVSRNMVESLAVPTFRVGYTISTDALDALYKKIKSKGVTMTALLAKATALALAKHPVVNSSCRDGNSFVYNSSINVAVAVAIDGGLITPVLQNADKVDIYSLSRKWKELVDKARAKQLQPQEYNTGTFTLSNLGMFGVDRFDAILPPGTGAIMAVGASQPSVVATKDGRIGMKNQMQVNVTADHRVIYGADLAQFLQTLASIIEDPKDLTF

SEQ ID NO: 4792 - DNA, 1310 bp, Arabidopsis thaliana
  misc_feature (1)..(1310): Ceres Seq. ID no. 12371052
aagtttctttatcttttagtttcccggtaaaaaatctctctgtcatgtctatgttcttccacgtcgttcctaatctcccaagacagaatctctaaacttcattttgctccttttccacacaaaactttctctccctccaaagaccacaaaaaatgttcttccttccttcaacttcaagtatctctctttattcacacgtatagcatccaaaaccaaaaatccataaccctttcctctgtaaaagtttcttcctttctaacttccccagaaaaaaaaaaaaaaaacattctgttagaaaaccatgagaggtctcgcggcttgttacagtgaacacgccattaaagtatcagatacatattgttcaggtccttcgaatcattcctatatatctccgacattacctccttcaatccccgacacagtaaccaccacttataaatcatatctcccttcttccgacaaacccgtctctgtttcactcacctggtcggataatctcaccgtcgtcatctcaacgccgccgaaatcatactctgtttcactcagaaaacctaaaggatcaagaaagttgacttcttcctccggttcactcaacgccgagatcctatgggatctatcggaagagagtacgaaaacaacggacctgaaccaataagaagattcttcgtcgtcgtcgttgtaaattccgagattaccctcggagtcggcgacgttgaccacgagcgagacacgtcatcatcgtcgtcgtggcgagtctcaaaaacggagagattctctggaacttgttggctcacgacgaaagctcaattctccgacgtcggaaggaaacacgagatacagattcaatgcggcggaggaggaggaggaggaggaggagaggaagggtatttatggaaagtgaaaagtcctgaaacgatgtcggtttatgttgataagaggaaagtgttttcggtgaagaagcttaagtggaactttagagggaatcaaaccatgtttttcgatggaatgcttatagacatgatgtgggatttacacgactggttctacaaagaaacgttgtcgtctgtttcgactagttcatcgtctaaaacggcgtcgtcgtcatcgtcttcttcaacttcatcgtctactcctccgtgtgctgtgtttatgtttaggaggaggagtggttttgatagtagattatggattgatgaagatgaacaagagagtaagatgaagaagaatattggttctagagatgagaaacattcgttttcacttatcatttgtgcctctaaaaagtgaccaaataaacaaataaacatttt

SEQ ID NO: 4793 - protein, 226 aa, Arabidopsis thaliana
  peptide (1)..(226): Ceres Seq. ID no. 12371053
  misc_feature (7)..(226): Pfam Name: DUF868 Pfam Description: Plant protein of unknown function
  misc_feature (7)..(226): NCBI GI NO: 21536715 NR Description: unknown [Arabidopsis thaliana]
  misc_feature (7)..(226): NCBI GI NO: 18404143 NR Description: expressed protein; protein id: At2g36470
  misc_feature (7)..(147): NCBI GI NO: 15226242 NR Description: hypothetical protein; protein id: At2g27770.1
  misc_feature (7)..(147): NCBI GI NO: 21805715 NR Description: hypothetical protein [Arabidopsis thaliana]
  misc_feature (12)..(147): NCBI GI NO: 34394221 NR Description: unknown protein
  misc_feature (12)..(153): NCBI GI NO: 30102999 NR Description: hypothetical protein
  misc_feature (13)..(147): NCBI GI NO: 14719318 NR Description: hypothetical protein [Oryza sativa]
  misc_feature (11)..(174): NCBI GI NO: 15241702 NR Description: putative protein; protein id: At5g28150
  misc_feature (10)..(172): NCBI GI NO: 15235452 NR Description: putative protein; protein id: At4g12690
  misc_feature (11)..(147): NCBI GI NO: 21593854 NR Description: unknown [Arabidopsis thaliana]
MGSIGREYENNGPEPIRRFFVVVVVNSEITLGVGDVDHERDTSSSSSWRVSKTERFSGTCWLTTKAQFSDVGRKHEIQIQCGGGGGGGGGEEGYLWKVKSPETMSVYVDKRKVFSVKKLKWNFRGNQTMFFDGMLIDMMWDLHDWFYKETLSSVSTSSSSKTASSSSSSSTSSSTPPCAVFMFRRRSGFDSRLWIDEDEQESKMKKNIGSRDEKHSFSLIICASKK

SEQ ID NO: 4794 - protein, 123 aa, Arabidopsis thaliana
  peptide (1)..(123): Ceres Seq. ID no. 12371054
  misc_feature (1)..(123): Pfam Name: DUF868 Pfam Description: Plant protein of unknown function
  misc_feature (1)..(123): NCBI GI NO: 21536715 NR Description: unknown [Arabidopsis thaliana]
  misc_feature (1)..(123): NCBI GI NO: 18404143 NR Description: expressed protein; protein id: At2g36470
  misc_feature (1)..(44): NCBI GI NO: 15226242 NR Description: hypothetical protein; protein id: At2g27770.1
  misc_feature (1)..(44): NCBI GI NO: 21805715 NR Description: hypothetical protein [Arabidopsis thaliana]
  misc_feature (1)..(44): NCBI GI NO: 34394221 NR Description: unknown protein
  misc_feature (1)..(50): NCBI GI NO: 30102999 NR Description: hypothetical protein
  misc_feature (1)..(44): NCBI GI NO: 14719318 NR Description: hypothetical protein [Oryza sativa]
  misc_feature (1)..(71): NCBI GI NO: 15241702 NR Description: putative protein; protein id: At5g28150
  misc_feature (1)..(69): NCBI GI NO: 15235452 NR Description: putative protein; protein id: At4g12690
  misc_feature (1)..(44): NCBI GI NO: 21593854 NR Description: unknown [Arabidopsis thaliana]
MSVYVDKRKVFSVKKLKWNFRGNQTMFFDGMLIDMMWDLHDWFYKETLSSVSTSSSSKTASSSSSSSTSSSTPPCAVFMFRRRSGFDSRLWIDEDEQESKMKKNIGSRDEKHSFSLIICASKK

SEQ ID NO: 4795 - protein, 117 aa, Arabidopsis thaliana
  peptide (1)..(117): Ceres Seq. ID no. 12371055
  misc_feature (34)..(107): Pfam Name: DUF868 Pfam Description: Plant protein of unknown function
  misc_feature (1)..(107): NCBI GI NO: 21536715 NR Description: unknown [Arabidopsis thaliana]
  misc_feature (1)..(107): NCBI GI NO: 18404143 NR Description: expressed protein; protein id: At2g36470
MRGLAACYSEHAIKVSDTYCSGPSNHSYISPTLPPSIPDTVTTTYKSYLPSSDKPVSVSLTWSDNLTVVISTPPKSYSVSLRKPKGSRKLTSSSGSLNAEILWDLSEESTKTTDLNQ

SEQ ID NO: 4796 - DNA, 1226 bp, Arabidopsis thaliana
  misc_feature (1)..(1226): Ceres Seq. ID no. 12562726
  misc_feature (68)..(68): n is a, c, t, g, unknown, or other
attcactgattattgttttaaggcaaattaagatcatcttcaaaatcttctcagatctcttccaattntctagaaaaaacatgtcttgctgtggtggaagctgtggttgtggatctgcctgcaagtgcggcaatggttgcggagcgttgcaaaaggtaccctgacttggagaacaccgccaccgagactcttgtcctcggtgttgctccggcgatgaactctcagtacgaggcttccggcgagactttcgttgccgagaatgatgcctgcaaatgcaggcaggatccacaaccacagcttccaccagctaaagggaagaagatcaacgaagagcgtgaagatcgccgtacgctaggtttagtgttgcttagaggtgaagaagttatctcaatgactgtcgaaggaccacctcctcctgaagaatctcgtgctaaagctggctctgcagctgctgttgctggtccaggaattggccgtgccgctgggcgtggagttcctactggtccgttagttcaagctcagcctggtttatctggtcctgttcgtggtgttggtggacctgctccgggaatgatgcagcctcagatctctcgtccaccacagctttcagctcctccgattattcgacctccgggacagatgttgccaccgcctccttttggtggtcaaggtcctcctatgggaagaggtcctccaccgccttatggtatgaggccaccgccacagcagttttctggaccaccaccgcctcagtatgggcaaaggccaatgattcctcctcctggtggtatgatgagaggacctcctcctccacctcatggaatgcaaggacctcctccgcctcgccctggaatgcctcctgctcctggtggttttgctccaccgcgtcctggcatgccaccacataatcagcagcagtgattaggttagcagtgaatgaacaggactcttgtctcggctttttactgtttttgtcgctgttttcttgagattatgaaggctttaagatgtttgattgaacttcctcaggtttacggtatcgtgctatcatgttgcctttcattgactttagccgcaatttctcatctatcttagctttcaaagtttgtagatttgttgacgagtgagttgtctttgccttatcttcttgtgttttcttttaagaacgaatccattaaactttgttatgacttcttaaggtgaacatctatcttgaggatcgtttt

SEQ ID NO: 4797 - protein, 262 aa, Arabidopsis thaliana
  peptide (1)..(262): Ceres Seq. ID no. 12562727
  misc_feature (143)..(256): Pfam Name: Pfam Description:  Extensin-like region
  misc_feature (55)..(262): NCBI GI NO: 15237095 NR Description: putative snRNP protein; protein id: At4g20440
  misc_feature (55)..(261): NCBI GI NO: 15241519 NR Description: putative protein; protein id: At5g44500
  misc_feature (55)..(261): NCBI GI NO: 21536707 NR Description: putative snRNP protein [Arabidopsis thaliana]
  misc_feature (55)..(261): NCBI GI NO: 33146808 NR Description: putative snRNP
  misc_feature (55)..(261): NCBI GI NO: 34900024 NR Description: putative snRNP protein
  misc_feature (46)..(245): NCBI GI NO: 7208221 NR Description: small nuclear ribonucleoprotein B'
  misc_feature (46)..(245): NCBI GI NO: 112305 NR Description: small nuclear ribonucleo protein-associated protein N
  misc_feature (46)..(245): NCBI GI NO: 27687269 NR Description: similar to small nuclear ribonucleoprotein-associatedprotein N - rat
  misc_feature (46)..(245): NCBI GI NO: 8099650 NR Description: snRNP-associated protein; SmB [Danio rerio]
  misc_feature (46)..(245): NCBI GI NO: 337461 NR Description: small nuclear ribonucleoprotein particle (SmB')
MVAERCKRYPDLENTATETLVLGVAPAMNSQYEASGETFVAENDACKCRQDPQPQLPPAKGKKINEEREDRRTLGLVLLRGEEVISMTVEGPPPPEESRAKAGSAAAVAGPGIGRAAGRGVPTGPLVQAQPGLSGPVRGVGGPAPGMMQPQISRPPQLSAPPIIRPPGQMLPPPPFGGQGPPMGRGPPPPYGMRPPPQQFSGPPPPQYGQRPMIPPPGGMMRGPPPPPHGMQGPPPPRPGMPPAPGGFAPPRPGMPPHNQQQ

SEQ ID NO: 4798 - protein, 235 aa, Arabidopsis thaliana
  peptide (1)..(235): Ceres Seq. ID no. 12562728
  misc_feature (116)..(229): Pfam Name: Pfam Description:  Extensin-like region
  misc_feature (28)..(235): NCBI GI NO: 15237095 NR Description: putative snRNP protein; protein id: At4g20440
  misc_feature (28)..(234): NCBI GI NO: 15241519 NR Description: putative protein; protein id: At5g44500
  misc_feature (28)..(234): NCBI GI NO: 21536707 NR Description: putative snRNP protein [Arabidopsis thaliana]
  misc_feature (28)..(234): NCBI GI NO: 33146808 NR Description: putative snRNP
  misc_feature (28)..(234): NCBI GI NO: 34900024 NR Description: putative snRNP protein
  misc_feature (19)..(218): NCBI GI NO: 7208221 NR Description: small nuclear ribonucleoprotein B'
  misc_feature (19)..(218): NCBI GI NO: 112305 NR Description: small nuclear ribonucleo protein-associated protein N
  misc_feature (19)..(218): NCBI GI NO: 27687269 NR Description: similar to small nuclear ribonucleoprotein-associatedprotein N - rat
  misc_feature (19)..(218): NCBI GI NO: 8099650 NR Description: snRNP-associated protein; SmB [Danio rerio]
  misc_feature (19)..(218): NCBI GI NO: 337461 NR Description: small nuclear ribonucleoprotein particle (SmB')
MNSQYEASGETFVAENDACKCRQDPQPQLPPAKGKKINEEREDRRTLGLVLLRGEEVISMTVEGPPPPEESRAKAGSAAAVAGPGIGRAAGRGVPTGPLVQAQPGLSGPVRGVGGPAPGMMQPQISRPPQLSAPPIIRPPGQMLPPPPFGGQGPPMGRGPPPPYGMRPPPQQFSGPPPPQYGQRPMIPPPGGMMRGPPPPPHGMQGPPPPRPGMPPAPGGFAPPRPGMPPHNQQQ

SEQ ID NO: 4799 - protein, 176 aa, Arabidopsis thaliana
  peptide (1)..(176): Ceres Seq. ID no. 12562729
  misc_feature (57)..(170): Pfam Name: Pfam Description:  Extensin-like region
  misc_feature (1)..(176): NCBI GI NO: 15237095 NR Description: putative snRNP protein; protein id: At4g20440
  misc_feature (1)..(175): NCBI GI NO: 15241519 NR Description: putative protein; protein id: At5g44500
  misc_feature (1)..(175): NCBI GI NO: 21536707 NR Description: putative snRNP protein [Arabidopsis thaliana]
  misc_feature (1)..(175): NCBI GI NO: 33146808 NR Description: putative snRNP
  misc_feature (1)..(175): NCBI GI NO: 34900024 NR Description: putative snRNP protein
  misc_feature (1)..(159): NCBI GI NO: 7208221 NR Description: small nuclear ribonucleoprotein B'
  misc_feature (1)..(159): NCBI GI NO: 112305 NR Description: small nuclear ribonucleo protein-associated protein N
  misc_feature (1)..(159): NCBI GI NO: 27687269 NR Description: similar to small nuclear ribonucleoprotein-associatedprotein N - rat
  misc_feature (1)..(159): NCBI GI NO: 8099650 NR Description: snRNP-associated protein; SmB [Danio rerio]
  misc_feature (1)..(159): NCBI GI NO: 337461 NR Description: small nuclear ribonucleoprotein particle (SmB')
MTVEGPPPPEESRAKAGSAAAVAGPGIGRAAGRGVPTGPLVQAQPGLSGPVRGVGGPAPGMMQPQISRPPQLSAPPIIRPPGQMLPPPPFGGQGPPMGRGPPPPYGMRPPPQQFSGPPPPQYGQRPMIPPPGGMMRGPPPPPHGMQGPPPPRPGMPPAPGGFAPPRPGMPPHNQQQ

SEQ ID NO: 4800 - DNA, 1134 bp, Arabidopsis thaliana
  misc_feature (1)..(1134): Ceres Seq. ID no. 13489091
tcacttctccactttttttctcggttagtgtcagtttttttgttggctagtctcttcggtcaaaatgcagctctttccggtcatcctaccgacactatgcgtcttcctccaccttctaataagtggctctggctctactccaccgttgactcactccaatcaacaagtggcagccactcgttggcttcccgccaccgcaacctggtacggaagtgccgagggagacggcagcagcggaggagcttgtggttacggatcgttggtggacgtgaagccgtttaaggctagagtcggagcggtgagtccgattctgttcaaaggtggtgaaggctgcggtgcatgctacaaggtcaggtgtctcgacaagaccatttgctctaagagagcagtcaccattattgccaccgaccagtcaccgtcaggaccatctgctaaagcaaaacacactcatttcgacctcagtggcgccgcctttggacatatggctattcccggccataacggtgtcatccgcaaccgtggcctattaaacatcctctaccgccgaacggcatgcaaatacagagggaagaacatagcgtttcatgtgaacgcaggatcaactgattattggttatcgcttctcattgagtatgaagacggtgaaggagacattggctctatgcacattcgtcaagcgggatctaaggagtggatatcgatgaagcacatatggggagcgaactggtgcatcgtcgaaggaccactcaagggaccattctccgtgaagctcacaactttgtccaacaataagacactctccgccaccgacgtcatccccagtaactgggttcccaaagctacttacacctctcgcctcaacttctcccctgttctctaattagcctctcttcaaaaaaattttgttgtgggagagaggaacacagagaagacaatgagtgagccatctccaaagttaggggattaagagcttttcattgtgtgtgtgactactaacattctatgttgtcccttttcatttttttccttctccatagggatgtgtgtatcatctataatgttgtttgtgggacattactatataagaatttacaaaagatgtaataatgtaatatgcaatctcattcctttttt

SEQ ID NO: 4801 - protein, 271 aa, Arabidopsis thaliana
  peptide (1)..(271): Ceres Seq. ID no. 13489092
  misc_feature (171)..(252): Pfam Name: Pfam Description:  Pollen allergen
  misc_feature (1)..(271): NCBI GI NO: 15225423 NR Description: beta-expansin, putative (EXPB1)
  misc_feature (13)..(271): NCBI GI NO: 11357194 NR Description: beta-expansin
  misc_feature (1)..(271): NCBI GI NO: 18417157 NR Description: beta-expansin, putative (EXPB3)
  misc_feature (7)..(271): NCBI GI NO: 21592834 NR Description: putative beta-expansin/allergen protein
  misc_feature (1)..(240): NCBI GI NO: 7484871 NR Description: cim1 protein homolog F26K10
  misc_feature (10)..(271): NCBI GI NO: 38346623 NR Description: OSJNBa0074L08.17
  misc_feature (10)..(204): NCBI GI NO: 21666634 NR Description: beta-expansin [Oryza sativa]
  misc_feature (36)..(268): NCBI GI NO: 1076486 NR Description: cim1 protein - soybean
  misc_feature (3)..(267): NCBI GI NO: 20138423 NR Description: Putative beta-expansin 2 precursor
  misc_feature (24)..(267): NCBI GI NO: 12330698 NR Description: beta-expansin-like protein [Nicotiana tabacum]
MQLFPVILPTLCVFLHLLISGSGSTPPLTHSNQQVAATRWLPATATWYGSAEGDGSSGGACGYGSLVDVKPFKARVGAVSPILFKGGEGCGACYKVRCLDKTICSKRAVTIIATDQSPSGPSAKAKHTHFDLSGAAFGHMAIPGHNGVIRNRGLLNILYRRTACKYRGKNIAFHVNAGSTDYWLSLLIEYEDGEGDIGSMHIRQAGSKEWISMKHIWGANWCIVEGPLKGPFSVKLTTLSNNKTLSATDVIPSNWVPKATYTSRLNFSPVL

SEQ ID NO: 4802 - DNA, 1313 bp, Arabidopsis thaliana
  misc_feature (1)..(1313): Ceres Seq. ID no. 12328800
tttttttttgagtggtactgataggtacaagaaacacaacaaaccctagatttatcttcatctctctcaattctgtatcaagcaaagacggattcaacgatgtcttcacctgaatcaccttccggttccgactcatccacaccacttatccgttcacggcaatcatcaccacgtcgtcaacctgtaatcgcggttctattaaatcgagcttcaggacgacgaggagcttcgatggtggttagagaaacagctgcacaagagcttgaagagcgacgagctgattggggttactcgaaacctgttgttgctttggatatgctttggaacactgcttttgttcttgttgcgattgttatgcttttggtttttaaagaagagaagccaaatgttcctattaggatttggatctgtggttatgcgattcagtgtcttgttcatgttgtccttgtttggcttgagtttagaaagaggaatgctagaagcagacctggagatttagaagctgctcaagctacgaatcaggatagtgaagatgaagacaacgatgagaggtttctgagcactaagacttgtgaatcaatgaacactataatatcatttgtctggtggattgttggattctactggcttgtttctggtggtgatatccttctgcaaaacgcgacgcatttgtattggttaacctttgttttccttgcatttgatgtgttctttgccatcttttgcgttgtgctggcatgtcttattggaatcgccctctgttgttgcctaccttgtattattgctcttctttacgccgtcgcggggcaggagggtgcatcagaagcagatctcagcatccttcccaagtacaggtttcacacgatgaacaatgatgaaaagcaaagtgacggtggtgggaaaatgatacctgtggatgcagcgagtgagaatttaggaaacgagcgtgtgcttcttcccgaggatgctgactgttgtatatgtttgagttcatatgaagatggagcagagctggtctcacttccttgcaaccaccactttcattctacgtgcattgtgaaatggctgaaaatgaatgcgacatgtccactatgcaagttcaatatcctcaaaggtaatgaacaagaatgaagtaatgtagaggaaacttttcttctttttatgttgtgtttctttttgttgtatatagagtagagaaaaaagaaaatgattgtgttgtttgtaagtcataagacagtttgtttctttgttgaaatttgttgtcaattctctttttttttttatcaaataataatagatatattcatcatgtc

SEQ ID NO: 4803 - protein, 343 aa, Arabidopsis thaliana
  peptide (1)..(343): Ceres Seq. ID no. 12328801
  misc_feature (292)..(332): Pfam Name: RING finger Pfam Description: Zinc finger, C3HC4 type
  misc_feature (1)..(343): NCBI GI NO: 21536719 NR Description: putative RING zinc finger protein
  misc_feature (1)..(343): NCBI GI NO: 15220639 NR Description: putative RING zinc finger protein
  misc_feature (3)..(343): NCBI GI NO: 30677954 NR Description: RING zinc finger protein family
  misc_feature (8)..(343): NCBI GI NO: 18413629 NR Description: putative protein; protein id: At4g11680
  misc_feature (8)..(290): NCBI GI NO: 7487667 NR Description: hypothetical protein T5C23
  misc_feature (291)..(343): NCBI GI NO: 7487667 NR Description: hypothetical protein T5C23
  misc_feature (1)..(340): NCBI GI NO: 33146524 NR Description: putative RES protein
  misc_feature (41)..(343): NCBI GI NO: 38344371 NR Description: OSJNBb0032E06.5
  misc_feature (156)..(340): NCBI GI NO: 9502381 NR Description: T12C24.29 [Arabidopsis thaliana]
  misc_feature (23)..(127): NCBI GI NO: 9502381 NR Description: T12C24.29 [Arabidopsis thaliana]
MSSPESPSGSDSSTPLIRSRQSSPRRQPVIAVLLNRASGRRGASMVVRETAAQELEERRADWGYSKPVVALDMLWNTAFVLVAIVMLLVFKEEKPNVPIRIWICGYAIQCLVHVVLVWLEFRKRNARSRPGDLEAAQATNQDSEDEDNDERFLSTKTCESMNTIISFVWWIVGFYWLVSGGDILLQNATHLYWLTFVFLAFDVFFAIFCVVLACLIGIALCCCLPCIIALLYAVAGQEGASEADLSILPKYRFHTMNNDEKQSDGGGKMIPVDAASENLGNERVLLPEDADCCICLSSYEDGAELVSLPCNHHFHSTCIVKWLKMNATCPLCKFNILKGNEQE

SEQ ID NO: 4804 - protein, 299 aa, Arabidopsis thaliana
  peptide (1)..(299): Ceres Seq. ID no. 12328802
  misc_feature (248)..(288): Pfam Name: RING finger Pfam Description: Zinc finger, C3HC4 type
  misc_feature (1)..(299): NCBI GI NO: 21536719 NR Description: putative RING zinc finger protein
  misc_feature (1)..(299): NCBI GI NO: 15220639 NR Description: putative RING zinc finger protein
  misc_feature (1)..(299): NCBI GI NO: 30677954 NR Description: RING zinc finger protein family
  misc_feature (1)..(299): NCBI GI NO: 18413629 NR Description: putative protein; protein id: At4g11680
  misc_feature (1)..(246): NCBI GI NO: 7487667 NR Description: hypothetical protein T5C23
  misc_feature (247)..(299): NCBI GI NO: 7487667 NR Description: hypothetical protein T5C23
  misc_feature (1)..(296): NCBI GI NO: 33146524 NR Description: putative RES protein
  misc_feature (1)..(299): NCBI GI NO: 38344371 NR Description: OSJNBb0032E06.5
  misc_feature (112)..(296): NCBI GI NO: 9502381 NR Description: T12C24.29 [Arabidopsis thaliana]
  misc_feature (1)..(83): NCBI GI NO: 9502381 NR Description: T12C24.29 [Arabidopsis thaliana]
MVVRETAAQELEERRADWGYSKPVVALDMLWNTAFVLVAIVMLLVFKEEKPNVPIRIWICGYAIQCLVHVVLVWLEFRKRNARSRPGDLEAAQATNQDSEDEDNDERFLSTKTCESMNTIISFVWWIVGFYWLVSGGDILLQNATHLYWLTFVFLAFDVFFAIFCVVLACLIGIALCCCLPCIIALLYAVAGQEGASEADLSILPKYRFHTMNNDEKQSDGGGKMIPVDAASENLGNERVLLPEDADCCICLSSYEDGAELVSLPCNHHFHSTCIVKWLKMNATCPLCKFNILKGNEQE

SEQ ID NO: 4805 - protein, 271 aa, Arabidopsis thaliana
  peptide (1)..(271): Ceres Seq. ID no. 12328803
  misc_feature (220)..(260): Pfam Name: RING finger Pfam Description: Zinc finger, C3HC4 type
  misc_feature (1)..(271): NCBI GI NO: 21536719 NR Description: putative RING zinc finger protein
  misc_feature (1)..(271): NCBI GI NO: 15220639 NR Description: putative RING zinc finger protein
  misc_feature (1)..(271): NCBI GI NO: 30677954 NR Description: RING zinc finger protein family
  misc_feature (1)..(271): NCBI GI NO: 18413629 NR Description: putative protein; protein id: At4g11680
  misc_feature (1)..(218): NCBI GI NO: 7487667 NR Description: hypothetical protein T5C23
  misc_feature (219)..(271): NCBI GI NO: 7487667 NR Description: hypothetical protein T5C23
  misc_feature (1)..(268): NCBI GI NO: 33146524 NR Description: putative RES protein
  misc_feature (1)..(271): NCBI GI NO: 38344371 NR Description: OSJNBb0032E06.5
  misc_feature (84)..(268): NCBI GI NO: 9502381 NR Description: T12C24.29 [Arabidopsis thaliana]
  misc_feature (1)..(55): NCBI GI NO: 9502381 NR Description: T12C24.29 [Arabidopsis thaliana]
MLWNTAFVLVAIVMLLVFKEEKPNVPIRIWICGYAIQCLVHVVLVWLEFRKRNARSRPGDLEAAQATNQDSEDEDNDERFLSTKTCESMNTIISFVWWIVGFYWLVSGGDILLQNATHLYWLTFVFLAFDVFFAIFCVVLACLIGIALCCCLPCIIALLYAVAGQEGASEADLSILPKYRFHTMNNDEKQSDGGGKMIPVDAASENLGNERVLLPEDADCCICLSSYEDGAELVSLPCNHHFHSTCIVKWLKMNATCPLCKFNILKGNEQE

SEQ ID NO: 4806 - DNA, 1683 bp, Arabidopsis thaliana
  misc_feature (1)..(1683): Ceres Seq. ID no. 13491363
atggctggaggagagaaaagaagaggacttagtaaatcttgtgctcttctcatagtgattgctgggatagagagatatgcattcaaaggagttgcatcaaacttagtgacatatctaactgatgtagtgaagatgagcaattcaagagcagccacgactgtgaacacttggagtggcttcactttcatgttgcctctcttctctgctccttttgccgattcttattgggacagattcttcaccatccttgcttcttcttctctctactttgtgggtctagtgggattgacatttacggcatttgctgggtcacgttcgactacaaaaacaatctctctttacttcctctacacttcactttccctcgtcgctctaggccttggcgtcttaaacccatctctacaagcctttggtgctgaccagctcgactacgaccttgaccatgacaatgaccacgagccatcctcagagaacaaagaagtcaaatcgaaccgcaagactcagtttttccaatggtggtattttggtgtctgcgccggtagtcttctaggagtcaccgtcatggcttacatccaagacacgtttggatgggttatcggttttgcaatcccaaccgcttcgatgttgttgttgatcttcttgttcttgtgtggctgcggggtctatgtttatgctgatccagacctcaaagctaaaccatttcaaaggatattagagattatcaaagaaagagtgtgtggaagaaataagatcactcttgttaacgaccacgatttaaatgccatggaactagagctgcaagatcagaagcctctatgtaactgtagcaacactgaagctaatactactaccaagagcttacctgatgatcataaaagctgcaaaaccggtttttcggggcttgaaaccgtcaagctattgcttcgacttttacctatatggacgatgcttcttatgtttgcagttatattccaacaacccgcgacctttttcacaaagcaaggtatgactatgaagagaaacatcggaccaaacttcaagatcccaccagcaacactacaaagcactatcactttatccataatccttcttatgcccttctacgacaaaatcttgataccgatcgccaaaaaactaacgaaaaacgaaaagggtatttctgtgaaggaaagaatggggattgggatgttcctgtccatcatcgccattgttattgccgcgttagtcgaaagaaaaagactaaagataagcaaaatgatgaagactacacctaatttggaccccgtaagcatattgtggctcctacctcagtacattctattgggaatctcggacattttcacagttgttggaatgcaagagttcttctacagcgaggttcctgttagcatgagaacaatgggatttgctttgtacacaagcgttttcggtgtggggagttttgtgagtgctgcgttgatttcgataatagagacttacacgagctcaagaggtggaaaacataactggtttgcagatgatatgtcggaagctagacttgataactattattggcttttggctttcacaagtgctattagcttcttgatgtatattgttatttgcaagcatttcaagagtagaagtgatgatgatgatcaatgtgatacaaattgttaataaactaaagaaacacctcttttt

SEQ ID NO: 4807 - protein, 552 aa, Arabidopsis thaliana
  peptide (1)..(552): Ceres Seq. ID no. 13491364
  misc_feature (79)..(476): Pfam Name: Pfam Description:  POT family
  misc_feature (1)..(552): NCBI GI NO: 15242171 NR Description: oligopeptide transporter -related protein
  misc_feature (5)..(547): NCBI GI NO: 15232096 NR Description: peptide transporter -related
  misc_feature (12)..(544): NCBI GI NO: 30687920 NR Description: oligopeptide transporter -related
  misc_feature (12)..(544): NCBI GI NO: 25402970 NR Description: Similar to peptide transporter
  misc_feature (15)..(544): NCBI GI NO: 18086410 NR Description: At1g72120/F28P5_2 [Arabidopsis thaliana]
  misc_feature (301)..(538): NCBI GI NO: 15218381 NR Description: peptide transporter PTR2-B -related
  misc_feature (9)..(225): NCBI GI NO: 15218381 NR Description: peptide transporter PTR2-B -related
  misc_feature (3)..(544): NCBI GI NO: 15218352 NR Description: oligopeptide transporter -related
  misc_feature (301)..(549): NCBI GI NO: 34908690 NR Description: P0039A07.26
  misc_feature (12)..(237): NCBI GI NO: 34908690 NR Description: P0039A07.26
MAGGEKRRGLSKSCALLIVIAGIERYAFKGVASNLVTYLTDVVKMSNSRAATTVNTWSGFTFMLPLFSAPFADSYWDRFFTILASSSLYFVGLVGLTFTAFAGSRSTTKTISLYFLYTSLSLVALGLGVLNPSLQAFGADQLDYDLDHDNDHEPSSENKEVKSNRKTQFFQWWYFGVCAGSLLGVTVMAYIQDTFGWVIGFAIPTASMLLLIFLFLCGCGVYVYADPDLKAKPFQRILEIIKERVCGRNKITLVNDHDLNAMELELQDQKPLCNCSNTEANTTTKSLPDDHKSCKTGFSGLETVKLLLRLLPIWTMLLMFAVIFQQPATFFTKQGMTMKRNIGPNFKIPPATLQSTITLSIILLMPFYDKILIPIAKKLTKNEKGISVKERMGIGMFLSIIAIVIAALVERKRLKISKMMKTTPNLDPVSILWLLPQYILLGISDIFTVVGMQEFFYSEVPVSMRTMGFALYTSVFGVGSFVSAALISIIETYTSSRGGKHNWFADDMSEARLDNYYWLLAFTSAISFLMYIVICKHFKSRSDDDDQCDTNC

SEQ ID NO: 4808 - protein, 508 aa, Arabidopsis thaliana
  peptide (1)..(508): Ceres Seq. ID no. 13491365
  misc_feature (35)..(432): Pfam Name: Pfam Description:  POT family
  misc_feature (1)..(508): NCBI GI NO: 15242171 NR Description: oligopeptide transporter -related protein
  misc_feature (1)..(503): NCBI GI NO: 15232096 NR Description: peptide transporter -related
  misc_feature (1)..(500): NCBI GI NO: 30687920 NR Description: oligopeptide transporter -related
  misc_feature (1)..(500): NCBI GI NO: 25402970 NR Description: Similar to peptide transporter
  misc_feature (1)..(500): NCBI GI NO: 18086410 NR Description: At1g72120/F28P5_2 [Arabidopsis thaliana]
  misc_feature (257)..(494): NCBI GI NO: 15218381 NR Description: peptide transporter PTR2-B -related
  misc_feature (1)..(181): NCBI GI NO: 15218381 NR Description: peptide transporter PTR2-B -related
  misc_feature (1)..(500): NCBI GI NO: 15218352 NR Description: oligopeptide transporter -related
  misc_feature (257)..(505): NCBI GI NO: 34908690 NR Description: P0039A07.26
  misc_feature (1)..(193): NCBI GI NO: 34908690 NR Description: P0039A07.26
MSNSRAATTVNTWSGFTFMLPLFSAPFADSYWDRFFTILASSSLYFVGLVGLTFTAFAGSRSTTKTISLYFLYTSLSLVALGLGVLNPSLQAFGADQLDYDLDHDNDHEPSSENKEVKSNRKTQFFQWWYFGVCAGSLLGVTVMAYIQDTFGWVIGFAIPTASMLLLIFLFLCGCGVYVYADPDLKAKPFQRILEIIKERVCGRNKITLVNDHDLNAMELELQDQKPLCNCSNTEANTTTKSLPDDHKSCKTGFSGLETVKLLLRLLPIWTMLLMFAVIFQQPATFFTKQGMTMKRNIGPNFKIPPATLQSTITLSIILLMPFYDKILIPIAKKLTKNEKGISVKERMGIGMFLSIIAIVIAALVERKRLKISKMMKTTPNLDPVSILWLLPQYILLGISDIFTVVGMQEFFYSEVPVSMRTMGFALYTSVFGVGSFVSAALISIIETYTSSRGGKHNWFADDMSEARLDNYYWLLAFTSAISFLMYIVICKHFKSRSDDDDQCDTNC

SEQ ID NO: 4809 - protein, 490 aa, Arabidopsis thaliana
  peptide (1)..(490): Ceres Seq. ID no. 13491366
  misc_feature (17)..(414): Pfam Name: Pfam Description:  POT family
  misc_feature (1)..(490): NCBI GI NO: 15242171 NR Description: oligopeptide transporter -related protein
  misc_feature (1)..(485): NCBI GI NO: 15232096 NR Description: peptide transporter -related
  misc_feature (1)..(482): NCBI GI NO: 30687920 NR Description: oligopeptide transporter -related
  misc_feature (1)..(482): NCBI GI NO: 25402970 NR Description: Similar to peptide transporter
  misc_feature (1)..(482): NCBI GI NO: 18086410 NR Description: At1g72120/F28P5_2 [Arabidopsis thaliana]
  misc_feature (239)..(476): NCBI GI NO: 15218381 NR Description: peptide transporter PTR2-B -related
  misc_feature (1)..(163): NCBI GI NO: 15218381 NR Description: peptide transporter PTR2-B -related
  misc_feature (1)..(482): NCBI GI NO: 15218352 NR Description: oligopeptide transporter -related
  misc_feature (239)..(487): NCBI GI NO: 34908690 NR Description: P0039A07.26
  misc_feature (1)..(175): NCBI GI NO: 34908690 NR Description: P0039A07.26
MLPLFSAPFADSYWDRFFTILASSSLYFVGLVGLTFTAFAGSRSTTKTISLYFLYTSLSLVALGLGVLNPSLQAFGADQLDYDLDHDNDHEPSSENKEVKSNRKTQFFQWWYFGVCAGSLLGVTVMAYIQDTFGWVIGFAIPTASMLLLIFLFLCGCGVYVYADPDLKAKPFQRILEIIKERVCGRNKITLVNDHDLNAMELELQDQKPLCNCSNTEANTTTKSLPDDHKSCKTGFSGLETVKLLLRLLPIWTMLLMFAVIFQQPATFFTKQGMTMKRNIGPNFKIPPATLQSTITLSIILLMPFYDKILIPIAKKLTKNEKGISVKERMGIGMFLSIIAIVIAALVERKRLKISKMMKTTPNLDPVSILWLLPQYILLGISDIFTVVGMQEFFYSEVPVSMRTMGFALYTSVFGVGSFVSAALISIIETYTSSRGGKHNWFADDMSEARLDNYYWLLAFTSAISFLMYIVICKHFKSRSDDDDQCDTNC

SEQ ID NO: 4810 - DNA, 1422 bp, Arabidopsis thaliana
  misc_feature (1)..(1422): Ceres Seq. ID no. 12328804
acgttacgtattagcttatagccattagttttgtctcttcttcttcttctcgttggtcggcttcttcgtcttactaattccatgattcttcttcttccttctgcttcactttctcgatgatcctctgcaccagccgcgatcatgacgttgaatcctcctccgtcgcagcaaacgtctcactcgccgcgtcggattcccaatcgccgcgttctcatcgtcggaaattattgccacgacgttttaatccaaaacggatccgtcgtagctgaaactctcggcggcgccgcctctttcatatctaatgtcttagattcttcctctgtctcctgcgatttggtctccaaagtaggacacgacttcagatacgaggtcacccactctccgatcgtggctccggagaaggaaacaacagttttcgaggcgtatttcgatctgggaatcgatgggatcggtcatgctgatcgggtgttgaaaagagtctctgcatgtgatccgattcttccttcggatatacccgattcgagatttgatttcggaatggccgttggagtcggcggcgagattttaccggagacgcttgagaaaatggtggagatctgtgacgttgttgctgtggatattcaagctttgattagggtttttgatcctgttgacggagctgtgaagcttgttgatttgaaagaaagtggattttatcacatcttgcatcgaattggattcttgaaagcttcgtcagacgaagctcttttcatggatgttgaacaaatgaagcacttgtgttgtgtggtggtgactaatggtgaaaaagggtgtaggatttatcataaggatgatgaaatgacggttcctccgttcttggcgaagcaggtggatcctaccggtgccggagacagctttctcggaggtttgattgttgggcttgttgaaggtttgactgttcctgatgctgcattgttagggaacctctttggttccatcactgtagagcatattggtcagccaaagttcgatttgatgatgcttcagaaagtcaaggatgaggtacagagaaggaagaagcagtgtaacatatctagcagccataacaacgatcacaacgagttccatgagcgtctaagtccagctcggttttcatgcgtagactctcaacttcaaccaaagttattggtcaatggtcactcttgtgatgatcggtccctgtgaatacgaatcttgaatcaccttttttttactaacaaagctcttctgagttgtgtaagcttgcttcaacacgttgatgaattttggaaattttaatgtataaaacgcgttgaccagcgtcttcaaacgctctttctggtcgttcccgcaaagtttgtttatcaactccgcgtttcaaaattcgaaatgaagatgtcaaattttgttttaaaagttttggat

SEQ ID NO: 4811 - protein, 353 aa, Arabidopsis thaliana
  peptide (1)..(353): Ceres Seq. ID no. 12328805
  misc_feature (20)..(294): Pfam Name: Pfam Description:  pfkB family carbohydrate kinase
  misc_feature (1)..(353): NCBI GI NO: 15237741 NR Description: putative protein; protein id: At5g58730
  misc_feature (1)..(295): NCBI GI NO: 8843793 NR Description: gene_id:MZN1
  misc_feature (24)..(353): NCBI GI NO: 29788872 NR Description: unknown protein
  misc_feature (24)..(296): NCBI GI NO: 31126792 NR Description: unknown protein
  misc_feature (220)..(290): NCBI GI NO: 23116680 NR Description: hypothetical protein
  misc_feature (187)..(289): NCBI GI NO: 11498013 NR Description: carbohydrate kinase, pfkB family
MTLNPPPSQQTSHSPRRIPNRRVLIVGNYCHDVLIQNGSVVAETLGGAASFISNVLDSSSVSCDLVSKVGHDFRYEVTHSPIVAPEKETTVFEAYFDLGIDGIGHADRVLKRVSACDPILPSDIPDSRFDFGMAVGVGGEILPETLEKMVEICDVVAVDIQALIRVFDPVDGAVKLVDLKESGFYHILHRIGFLKASSDEALFMDVEQMKHLCCVVVTNGEKGCRIYHKDDEMTVPPFLAKQVDPTGAGDSFLGGLIVGLVEGLTVPDAALLGNLFGSITVEHIGQPKFDLMMLQKVKDEVQRRKKQCNISSSHNNDHNEFHERLSPARFSCVDSQLQPKLLVNGHSCDDRSL

SEQ ID NO: 4812 - protein, 221 aa, Arabidopsis thaliana
  peptide (1)..(221): Ceres Seq. ID no. 12328806
  misc_feature (1)..(162): Pfam Name: Pfam Description:  pfkB family carbohydrate kinase
  misc_feature (1)..(221): NCBI GI NO: 15237741 NR Description: putative protein; protein id: At5g58730
  misc_feature (1)..(163): NCBI GI NO: 8843793 NR Description: gene_id:MZN1
  misc_feature (1)..(221): NCBI GI NO: 29788872 NR Description: unknown protein
  misc_feature (1)..(164): NCBI GI NO: 31126792 NR Description: unknown protein
  misc_feature (88)..(158): NCBI GI NO: 23116680 NR Description: hypothetical protein
  misc_feature (55)..(157): NCBI GI NO: 11498013 NR Description: carbohydrate kinase, pfkB family
MAVGVGGEILPETLEKMVEICDVVAVDIQALIRVFDPVDGAVKLVDLKESGFYHILHRIGFLKASSDEALFMDVEQMKHLCCVVVTNGEKGCRIYHKDDEMTVPPFLAKQVDPTGAGDSFLGGLIVGLVEGLTVPDAALLGNLFGSITVEHIGQPKFDLMMLQKVKDEVQRRKKQCNISSSHNNDHNEFHERLSPARFSCVDSQLQPKLLVNGHSCDDRSL

SEQ ID NO: 4813 - protein, 205 aa, Arabidopsis thaliana
  peptide (1)..(205): Ceres Seq. ID no. 12328807
  misc_feature (1)..(146): Pfam Name: Pfam Description:  pfkB family carbohydrate kinase
  misc_feature (1)..(205): NCBI GI NO: 15237741 NR Description: putative protein; protein id: At5g58730
  misc_feature (1)..(147): NCBI GI NO: 8843793 NR Description: gene_id:MZN1
  misc_feature (1)..(205): NCBI GI NO: 29788872 NR Description: unknown protein
  misc_feature (1)..(148): NCBI GI NO: 31126792 NR Description: unknown protein
  misc_feature (72)..(142): NCBI GI NO: 23116680 NR Description: hypothetical protein
  misc_feature (39)..(141): NCBI GI NO: 11498013 NR Description: carbohydrate kinase, pfkB family
MVEICDVVAVDIQALIRVFDPVDGAVKLVDLKESGFYHILHRIGFLKASSDEALFMDVEQMKHLCCVVVTNGEKGCRIYHKDDEMTVPPFLAKQVDPTGAGDSFLGGLIVGLVEGLTVPDAALLGNLFGSITVEHIGQPKFDLMMLQKVKDEVQRRKKQCNISSSHNNDHNEFHERLSPARFSCVDSQLQPKLLVNGHSCDDRSL

SEQ ID NO: 4814 - DNA, 1137 bp, Arabidopsis thaliana
  misc_feature (1)..(1137): Ceres Seq. ID no. 13497222
aagataaaaacctaaaatccatcttcgttgtcgtttcgtctgcttcacatcggaaagctacatctttttcgttttttgtggtggcgatttctattctccggctgaaacctaccttcaggattcagcctttctcaggttttcagttggattcagatagcagcttgtacttcttctagataatcggcgacacatatggatgattgggaggccgaggactttcaaccacttccctcaaaagttgaactgaaaagtaactgggatgatgaggatgtggatgagaatgatatcaaggactcgtgggaggaggaagatgtatctgctccgccacctatagtaaagcctgcttctgagaaggctccaaagaaaccagcagtaaaagctgttgaaaagaaggttaaaactgttgaagctccgaaaggaacatcaagggaagaacctctagatcctattgctgagaaacttcgcatgcagaggcttgtagaggaagctgattaccaatcaactgctgaactctttggagtaaagactgaagagaaaagcgtcgatatgttaattccgaagtctgaaagcgatttcttggattatgctgagttgatatctcagagacttgtaccatttgagaaaagctttcactatatcgggctactcaaagcagtgatgagactttctgtggctaatatgaaagcagcagatgttaaagacgttgcttcgtccattacagctatagcaaatgaaaaattgaaggcggagaaagaagctgctgctggcaaaaagaagtcaggtaagaagaaacaacttcatgttgataagcctgatgatgatcttgtttcgggtccttatgatgccatggacgatgatgatttcatgtgagaaaatggcaattttggagattgcattttacctcctataggattgtaactgagaagaggtttaaatcgtcggcggttttttgttttgtatactgaattgcaaaagtgtttttcttctgttttctttgctcggtttgatttaaaaatttgtgtaataagatttgttgtgggcacactatttcctattatatgaattgaacgagtactaagagcacggcctatgattcacttagaatttgaagccacattagtaagataagttttcgat

SEQ ID NO: 4815 - protein, 225 aa, Arabidopsis thaliana
  peptide (1)..(225): Ceres Seq. ID no. 13497223
  misc_feature (1)..(225): NCBI GI NO: 30693092 NR Description: expressed protein [Arabidopsis thaliana]
  misc_feature (1)..(225): NCBI GI NO: 18408426 NR Description: expressed protein [Arabidopsis thaliana]
  misc_feature (2)..(225): NCBI GI NO: 32766433 NR Description: Unknown (protein for MGC:63801) [Danio rerio]
  misc_feature (2)..(225): NCBI GI NO: 10435304 NR Description: unnamed protein product [Homo sapiens]
  misc_feature (2)..(225): NCBI GI NO: 23503065 NR Description: Eukaryotic translation initiation factor 3 subunit 1
  misc_feature (2)..(225): NCBI GI NO: 27374242 NR Description: CG12131-PA [Drosophila erecta]
  misc_feature (2)..(225): NCBI GI NO: 34856798 NR Description: similar to Eukaryotic translation initiation factor 3 subunit 1
  misc_feature (2)..(225): NCBI GI NO: 26349519 NR Description: unnamed protein product [Mus musculus]
  misc_feature (2)..(225): NCBI GI NO: 27374365 NR Description: Adam-PA [Drosophila willistoni]
  misc_feature (2)..(225): NCBI GI NO: 4503511 NR Description: eukaryotic translation initiation factor 3
MDDWEAEDFQPLPSKVELKSNWDDEDVDENDIKDSWEEEDVSAPPPIVKPASEKAPKKPAVKAVEKKVKTVEAPKGTSREEPLDPIAEKLRMQRLVEEADYQSTAELFGVKTEEKSVDMLIPKSESDFLDYAELISQRLVPFEKSFHYIGLLKAVMRLSVANMKAADVKDVASSITAIANEKLKAEKEAAAGKKKSGKKKQLHVDKPDDDLVSGPYDAMDDDDFM

SEQ ID NO: 4816 - protein, 134 aa, Arabidopsis thaliana
  peptide (1)..(134): Ceres Seq. ID no. 13497224
  misc_feature (1)..(134): NCBI GI NO: 30693092 NR Description: expressed protein [Arabidopsis thaliana]
  misc_feature (1)..(134): NCBI GI NO: 18408426 NR Description: expressed protein [Arabidopsis thaliana]
  misc_feature (1)..(134): NCBI GI NO: 32766433 NR Description: Unknown (protein for MGC:63801) [Danio rerio]
  misc_feature (1)..(134): NCBI GI NO: 10435304 NR Description: unnamed protein product [Homo sapiens]
  misc_feature (1)..(134): NCBI GI NO: 23503065 NR Description: Eukaryotic translation initiation factor 3 subunit 1
  misc_feature (1)..(134): NCBI GI NO: 27374242 NR Description: CG12131-PA [Drosophila erecta]
  misc_feature (1)..(134): NCBI GI NO: 34856798 NR Description: similar to Eukaryotic translation initiation factor 3 subunit 1
  misc_feature (1)..(134): NCBI GI NO: 26349519 NR Description: unnamed protein product [Mus musculus]
  misc_feature (1)..(134): NCBI GI NO: 27374365 NR Description: Adam-PA [Drosophila willistoni]
  misc_feature (1)..(134): NCBI GI NO: 4503511 NR Description: eukaryotic translation initiation factor 3
MQRLVEEADYQSTAELFGVKTEEKSVDMLIPKSESDFLDYAELISQRLVPFEKSFHYIGLLKAVMRLSVANMKAADVKDVASSITAIANEKLKAEKEAAAGKKKSGKKKQLHVDKPDDDLVSGPYDAMDDDDFM

SEQ ID NO: 4817 - DNA, 616 bp, Arabidopsis thaliana
  misc_feature (1)..(616): Ceres Seq. ID no. 12338942
atcgaaaaaaagagcatcctattaagttgctaaagagagagacgccaatggctgtaaagcaaaaggtctgtgttactggtgcaggaggatttattgcttcatggctcgtcaagtttcttctctctcgtggctacactgtccatggaaccgttcgagatccttgtgatgaaaagaatgaccatttgaggaaactggataatgcttcaaaaaatctgaaacttttcaaggcagatttgtttgattatgaaggtcttttctcagccattgatggttgctctggcgttttccatatcgcttctcctgtgccttttgaaggagttcctgtcacagaggaagaactgattaaaccagctctcactggcaccaagaatgttctagaagcatgcacagaaaccaaagtgcagaaagttgtggttgtatcatcaatcgctgcagttgtttacaatccaaaatggcctcaagatgttgctaaggacgaggattgttggtcagacactcaataccttcactcacttgagggttattggcgttattactatcttgcaaaaacattaacggaacgtgaagctttagagtggagtaagaaaaactttgctgatgttgttacgctctgtcc

SEQ ID NO: 4818 - protein, 204 aa, Arabidopsis thaliana
  peptide (1)..(204): Ceres Seq. ID no. 12338943
  misc_feature (18)..(165): Pfam Name: Pfam Description:  3-beta hydroxysteroid dehydrogenase/ isomerase family
  misc_feature (16)..(203): NCBI GI NO: 6554472 NR Description: putative cinnamoyl-CoA reductase; 14056-15506
  misc_feature (16)..(203): NCBI GI NO: 15223068 NR Description: putative cinnamoyl-CoA reductase
  misc_feature (16)..(203): NCBI GI NO: 15226135 NR Description: putative cinnamoyl-CoA reductase
  misc_feature (19)..(203): NCBI GI NO: 15226134 NR Description: putative cinnamoyl-CoA reductase
  misc_feature (16)..(203): NCBI GI NO: 25140436 NR Description: cinnamoyl CoA reductase 2 [Solanum tuberosum]
  misc_feature (20)..(203): NCBI GI NO: 17978649 NR Description: cinnamoyl-CoA reductase [Pinus taeda]
  misc_feature (20)..(203): NCBI GI NO: 25989515 NR Description: cinnamoyl CoA reductase [Eucalyptus globulus]
  misc_feature (20)..(203): NCBI GI NO: 9998901 NR Description: cinnamoyl-CoA reductase
  misc_feature (20)..(203): NCBI GI NO: 40233135 NR Description: cinnamoyl CoA reductase [Populus tomentosa]
  misc_feature (20)..(203): NCBI GI NO: 31414896 NR Description: cinnamoyl CoA reductase [Fragaria x ananassa]
RKKEHPIKLLKRETPMAVKQKVCVTGAGGFIASWLVKFLLSRGYTVHGTVRDPCDEKNDHLRKLDNASKNLKLFKADLFDYEGLFSAIDGCSGVFHIASPVPFEGVPVTEEELIKPALTGTKNVLEACTETKVQKVVVVSSIAAVVYNPKWPQDVAKDEDCWSDTQYLHSLEGYWRYYYLAKTLTEREALEWSKKNFADVVTLC

SEQ ID NO: 4819 - protein, 189 aa, Arabidopsis thaliana
  peptide (1)..(189): Ceres Seq. ID no. 12338944
  misc_feature (3)..(150): Pfam Name: Pfam Description:  3-beta hydroxysteroid dehydrogenase/ isomerase family
  misc_feature (1)..(188): NCBI GI NO: 6554472 NR Description: putative cinnamoyl-CoA reductase; 14056-15506
  misc_feature (1)..(188): NCBI GI NO: 15223068 NR Description: putative cinnamoyl-CoA reductase
  misc_feature (1)..(188): NCBI GI NO: 15226135 NR Description: putative cinnamoyl-CoA reductase
  misc_feature (4)..(188): NCBI GI NO: 15226134 NR Description: putative cinnamoyl-CoA reductase
  misc_feature (1)..(188): NCBI GI NO: 25140436 NR Description: cinnamoyl CoA reductase 2 [Solanum tuberosum]
  misc_feature (5)..(188): NCBI GI NO: 17978649 NR Description: cinnamoyl-CoA reductase [Pinus taeda]
  misc_feature (5)..(188): NCBI GI NO: 25989515 NR Description: cinnamoyl CoA reductase [Eucalyptus globulus]
  misc_feature (5)..(188): NCBI GI NO: 9998901 NR Description: cinnamoyl-CoA reductase
  misc_feature (5)..(188): NCBI GI NO: 40233135 NR Description: cinnamoyl CoA reductase [Populus tomentosa]
  misc_feature (5)..(188): NCBI GI NO: 31414896 NR Description: cinnamoyl CoA reductase [Fragaria x ananassa]
MAVKQKVCVTGAGGFIASWLVKFLLSRGYTVHGTVRDPCDEKNDHLRKLDNASKNLKLFKADLFDYEGLFSAIDGCSGVFHIASPVPFEGVPVTEEELIKPALTGTKNVLEACTETKVQKVVVVSSIAAVVYNPKWPQDVAKDEDCWSDTQYLHSLEGYWRYYYLAKTLTEREALEWSKKNFADVVTLC

SEQ ID NO: 4820 - DNA, 1463 bp, Arabidopsis thaliana
  misc_feature (1)..(1463): Ceres Seq. ID no. 13488914
aataaaatccaacttcttctccttcaagaatctagagatagagagagagagagaacacaaagtgggaaaaaagataagaacccaccataaagtttttacatttctccctttaaaaggcgaaagcttttgatttgtataaaagtcccacttaatcacctctctagcttctcattccatttccatctcctctcttttgttttctaagttgcttcaagagttttggatagtgtagcagagagattttaactaatgggtttataaaattttgttcttttgcgtgaacaagttgtcaacttctagacagattttctttttgaagtgttttcttgtcgaaattcttcttcttttggtcaaagaacgcaagattcttctgtagttcctctaaaaaaaatcctaatggagggttattcaagaaacggtgaaatctctccgaagctgcttgacttgatgattccacaagagagaagaaattggtttcacgatgagaaaaactctgttttcaaaacagaggagaagaagcttgagctaaagcttggaccacctggtgaagaagatgatgatgaatcgatgataagacacatgaagaaagaaccaaaagacaaatctatcctctctctcgctggcaaatacttctctccttcttccaccaaaaccacatcccataaaagaactgctcctggtccagtggtgggatggcctccggttcgatccttcaggaagaatttagctagtggaagttcttcaaagcttggaaatgactcaaccacctccaatggtgttaccctcaagaaccaaaagtgtgatgctgctgctaagacaacagaaccaaagagacaaggaggcatgtttgtgaagatcaacatgtatggtgttcccattggtcgtaaagttgatctcagtgctcataatagctatgagcagttatctttcacagttgacaagctcttcagaggtcttcttgcagctcaaagagactttccatcatccatagaagatgaaaaaccaatcactggattattagatgggaatggagaatatactcttacatatgaagacaatgaaggagacaagatgcttgtaggagatgttccatggcaaatgtttgtgtcttcggtgaagaggctgcgtgtgattaaaacttctgagatttcttcagcattaacatatggaaatggtaagcaagagaaaatgagaagatgaagaaaaagatcttttacagcttttaaagaagtagagagatgttattaattgcattttgcctttaaactttgatgagtttttggtcttggaaaagtttctgatataagtctgatgtacattctggtttgttacatcttcttttggcttttgagatatcatagagttttgttggaactcaaagaccaaacagtgcaatgatgattttggggtcttgagtaaatttacaaacccttttaggcatattataatagtcttctgttttt

SEQ ID NO: 4821 - protein, 267 aa, Arabidopsis thaliana
  peptide (1)..(267): Ceres Seq. ID no. 13488915
  misc_feature (40)..(261): Pfam Name: Pfam Description:  AUX/IAA family
  misc_feature (1)..(267): NCBI GI NO: 15218080 NR Description: auxin-responsive protein IAA18
  misc_feature (1)..(267): NCBI GI NO: 21594025 NR Description: auxin regulated protein IAA18, putative
  misc_feature (31)..(267): NCBI GI NO: 25296228 NR Description: auxin-induced protein IAA18
  misc_feature (1)..(265): NCBI GI NO: 15228226 NR Description: auxin-responsive protein
  misc_feature (1)..(265): NCBI GI NO: 21593333 NR Description: phytochrome-associated protein 1 (PAP1)
  misc_feature (1)..(265): NCBI GI NO: 4093155 NR Description: phytochrome-associated protein 1
  misc_feature (24)..(251): NCBI GI NO: 34906394 NR Description: P0710E05.9
  misc_feature (80)..(255): NCBI GI NO: 34909384 NR Description: putative phytochrome-associated protein
  misc_feature (38)..(112): NCBI GI NO: 18420964 NR Description: auxin-responsive protein IAA28
  misc_feature (209)..(262): NCBI GI NO: 18420964 NR Description: auxin-responsive protein IAA28
MEGYSRNGEISPKLLDLMIPQERRNWFHDEKNSVFKTEEKKLELKLGPPGEEDDDESMIRHMKKEPKDKSILSLAGKYFSPSSTKTTSHKRTAPGPVVGWPPVRSFRKNLASGSSSKLGNDSTTSNGVTLKNQKCDAAAKTTEPKRQGGMFVKINMYGVPIGRKVDLSAHNSYEQLSFTVDKLFRGLLAAQRDFPSSIEDEKPITGLLDGNGEYTLTYEDNEGDKMLVGDVPWQMFVSSVKRLRVIKTSEISSALTYGNGKQEKMRR

SEQ ID NO: 4822 - protein, 250 aa, Arabidopsis thaliana
  peptide (1)..(250): Ceres Seq. ID no. 13488916
  misc_feature (23)..(244): Pfam Name: Pfam Description:  AUX/IAA family
  misc_feature (1)..(250): NCBI GI NO: 15218080 NR Description: auxin-responsive protein IAA18
  misc_feature (1)..(250): NCBI GI NO: 21594025 NR Description: auxin regulated protein IAA18, putative
  misc_feature (14)..(250): NCBI GI NO: 25296228 NR Description: auxin-induced protein IAA18
  misc_feature (1)..(248): NCBI GI NO: 15228226 NR Description: auxin-responsive protein
  misc_feature (1)..(248): NCBI GI NO: 21593333 NR Description: phytochrome-associated protein 1 (PAP1)
  misc_feature (1)..(248): NCBI GI NO: 4093155 NR Description: phytochrome-associated protein 1
  misc_feature (7)..(234): NCBI GI NO: 34906394 NR Description: P0710E05.9
  misc_feature (63)..(238): NCBI GI NO: 34909384 NR Description: putative phytochrome-associated protein
  misc_feature (21)..(95): NCBI GI NO: 18420964 NR Description: auxin-responsive protein IAA28
  misc_feature (192)..(245): NCBI GI NO: 18420964 NR Description: auxin-responsive protein IAA28
MIPQERRNWFHDEKNSVFKTEEKKLELKLGPPGEEDDDESMIRHMKKEPKDKSILSLAGKYFSPSSTKTTSHKRTAPGPVVGWPPVRSFRKNLASGSSSKLGNDSTTSNGVTLKNQKCDAAAKTTEPKRQGGMFVKINMYGVPIGRKVDLSAHNSYEQLSFTVDKLFRGLLAAQRDFPSSIEDEKPITGLLDGNGEYTLTYEDNEGDKMLVGDVPWQMFVSSVKRLRVIKTSEISSALTYGNGKQEKMRR

SEQ ID NO: 4823 - protein, 210 aa, Arabidopsis thaliana
  peptide (1)..(210): Ceres Seq. ID no. 13488917
  misc_feature (1)..(204): Pfam Name: Pfam Description:  AUX/IAA family
  misc_feature (1)..(210): NCBI GI NO: 15218080 NR Description: auxin-responsive protein IAA18
  misc_feature (1)..(210): NCBI GI NO: 21594025 NR Description: auxin regulated protein IAA18, putative
  misc_feature (1)..(210): NCBI GI NO: 25296228 NR Description: auxin-induced protein IAA18
  misc_feature (1)..(208): NCBI GI NO: 15228226 NR Description: auxin-responsive protein
  misc_feature (1)..(208): NCBI GI NO: 21593333 NR Description: phytochrome-associated protein 1 (PAP1)
  misc_feature (1)..(208): NCBI GI NO: 4093155 NR Description: phytochrome-associated protein 1
  misc_feature (1)..(194): NCBI GI NO: 34906394 NR Description: P0710E05.9
  misc_feature (23)..(198): NCBI GI NO: 34909384 NR Description: putative phytochrome-associated protein
  misc_feature (1)..(55): NCBI GI NO: 18420964 NR Description: auxin-responsive protein IAA28
  misc_feature (152)..(205): NCBI GI NO: 18420964 NR Description: auxin-responsive protein IAA28
MIRHMKKEPKDKSILSLAGKYFSPSSTKTTSHKRTAPGPVVGWPPVRSFRKNLASGSSSKLGNDSTTSNGVTLKNQKCDAAAKTTEPKRQGGMFVKINMYGVPIGRKVDLSAHNSYEQLSFTVDKLFRGLLAAQRDFPSSIEDEKPITGLLDGNGEYTLTYEDNEGDKMLVGDVPWQMFVSSVKRLRVIKTSEISSALTYGNGKQEKMRR

SEQ ID NO: 4824 - DNA, 1513 bp, Arabidopsis thaliana
  misc_feature (1)..(1513): Ceres Seq. ID no. 12331556
ttcgtactactactaccaccacatttctttagctcaaccttcattactaatctccttttaaggtttctttcgtgaatcagatcggaaaaatggaatcttttttgttcacatctgaatccgtcaacgagggacatcccgacaagctttgtgatcagatctccgacgctatcctcgatgcttgccttgaacaagaccctgagagcaaagttgcttgtgagacttgtaccaagactaacatggtcatggtttttggagaaatcaccaccaaggctaacgttgattacgagcagattgttcgtaaaacatgccgtgagattggattcgtctctgctgacgttggtctagatgctgacaattgcaaggttctggttaacattgagcaacagagtcctgacattgcacaaggtgttcatggtcatctcaccaagaagccagaggaggttggagctggtgaccaaggtcacatgtttgggtatgctactgatgagactcctgagctcatgcctcttactcacgttctcgctactaagcttggagctaaactcactgaagttcgcaagaatggaacttgcccttggttgaggccagatggtaagactcaagtcactattgagtacatcaacgaaagcggagccatggttcctgtacgtgtccacactgttctcatctcaacacagcatgacgagactgtgactaacgatgagatcgcagctgatcttaaggagcatgtgatcaagccagtgatcccagagaaataccttgatgagaaaaccatcttccatctcaacccatctggtcgttttgttatcggaggtcctcatggagatgcagggcttaccggccgtaagatcatcatcgatacttatggtggttggggtgcacacggaggtggtgctttctctggaaaggacccaaccaaggttgacaggagtggggcttacatcgttaggcaagcagctaagagcattgtagccagtgggctagcgaggcgggtcattgtgcaagtctcgtatgccattggtgtccctgagccattgtctgtgttcgtggacagttatggaacaggaaagataccagacaaggagattcttgagattgtgaaggagagttttgatttcaggccaggtatgatctccattaacttggatctgaagagaggaggtaatggtaggttcttgaagactgctgcctatggtcactttggaagggacgatgctgatttcacctgggaggtagtcaagccactcaagtctaacaaggtccaagcttgaaacctgtcagcctctgtttcacttctgtccagaatcagtcttgttctctgtattttaggctctttctgcctctttagtttcaactctgagatgggtttattcattttgttttcaactttgaagaaaaaagctaagcagctgggaatttatataattatttatatggtattcttgtgctaagaaagttaaattcataatatgtatttcttacttattttgagaagaaaatcatataagagaat

SEQ ID NO: 4825 - protein, 393 aa, Arabidopsis thaliana
  peptide (1)..(393): Ceres Seq. ID no. 12331557
  misc_feature (116)..(238): Pfam Name: Pfam Description:  S-adenosylmethionine synthetase, central domain
  misc_feature (1)..(393): NCBI GI NO: 15229033 NR Description: putative s-adenosylmethionine synthetase
  misc_feature (1)..(393): NCBI GI NO: 10443981 NR Description: S-adenosylmethionine synthetase [Brassica juncea]
  misc_feature (1)..(393): NCBI GI NO: 3024127 NR Description: S-adenosylmethionine synthetase 2
  misc_feature (1)..(392): NCBI GI NO: 5726594 NR Description: S-adenosyl-L-methionine synthetase
  misc_feature (1)..(390): NCBI GI NO: 3024126 NR Description: S-adenosylmethionine synthetase 1
  misc_feature (2)..(393): NCBI GI NO: 1346524 NR Description: S-adenosylmethionine synthetase
  misc_feature (1)..(393): NCBI GI NO: 13540316 NR Description: S-adenosyl-L-methionine synthetase
  misc_feature (1)..(393): NCBI GI NO: 13540318 NR Description: S-adenosyl-L-methionine synthetase
  misc_feature (2)..(390): NCBI GI NO: 18157331 NR Description: S-adenosylmethionine synthetase
  misc_feature (1)..(393): NCBI GI NO: 1170938 NR Description: S-adenosylmethionine synthetase 2
MESFLFTSESVNEGHPDKLCDQISDAILDACLEQDPESKVACETCTKTNMVMVFGEITTKANVDYEQIVRKTCREIGFVSADVGLDADNCKVLVNIEQQSPDIAQGVHGHLTKKPEEVGAGDQGHMFGYATDETPELMPLTHVLATKLGAKLTEVRKNGTCPWLRPDGKTQVTIEYINESGAMVPVRVHTVLISTQHDETVTNDEIAADLKEHVIKPVIPEKYLDEKTIFHLNPSGRFVIGGPHGDAGLTGRKIIIDTYGGWGAHGGGAFSGKDPTKVDRSGAYIVRQAAKSIVASGLARRVIVQVSYAIGVPEPLSVFVDSYGTGKIPDKEILEIVKESFDFRPGMISINLDLKRGGNGRFLKTAAYGHFGRDDADFTWEVVKPLKSNKVQA

SEQ ID NO: 4826 - protein, 344 aa, Arabidopsis thaliana
  peptide (1)..(344): Ceres Seq. ID no. 12331558
  misc_feature (67)..(189): Pfam Name: Pfam Description:  S-adenosylmethionine synthetase, central domain
  misc_feature (1)..(344): NCBI GI NO: 15229033 NR Description: putative s-adenosylmethionine synthetase
  misc_feature (1)..(344): NCBI GI NO: 10443981 NR Description: S-adenosylmethionine synthetase [Brassica juncea]
  misc_feature (1)..(344): NCBI GI NO: 3024127 NR Description: S-adenosylmethionine synthetase 2
  misc_feature (1)..(343): NCBI GI NO: 5726594 NR Description: S-adenosyl-L-methionine synthetase
  misc_feature (1)..(341): NCBI GI NO: 3024126 NR Description: S-adenosylmethionine synthetase 1
  misc_feature (1)..(344): NCBI GI NO: 1346524 NR Description: S-adenosylmethionine synthetase
  misc_feature (1)..(344): NCBI GI NO: 13540316 NR Description: S-adenosyl-L-methionine synthetase
  misc_feature (1)..(344): NCBI GI NO: 13540318 NR Description: S-adenosyl-L-methionine synthetase
  misc_feature (1)..(341): NCBI GI NO: 18157331 NR Description: S-adenosylmethionine synthetase
  misc_feature (1)..(344): NCBI GI NO: 1170938 NR Description: S-adenosylmethionine synthetase 2
MVMVFGEITTKANVDYEQIVRKTCREIGFVSADVGLDADNCKVLVNIEQQSPDIAQGVHGHLTKKPEEVGAGDQGHMFGYATDETPELMPLTHVLATKLGAKLTEVRKNGTCPWLRPDGKTQVTIEYINESGAMVPVRVHTVLISTQHDETVTNDEIAADLKEHVIKPVIPEKYLDEKTIFHLNPSGRFVIGGPHGDAGLTGRKIIIDTYGGWGAHGGGAFSGKDPTKVDRSGAYIVRQAAKSIVASGLARRVIVQVSYAIGVPEPLSVFVDSYGTGKIPDKEILEIVKESFDFRPGMISINLDLKRGGNGRFLKTAAYGHFGRDDADFTWEVVKPLKSNKVQA

SEQ ID NO: 4827 - protein, 342 aa, Arabidopsis thaliana
  peptide (1)..(342): Ceres Seq. ID no. 12331559
  misc_feature (65)..(187): Pfam Name: Pfam Description:  S-adenosylmethionine synthetase, central domain
  misc_feature (1)..(342): NCBI GI NO: 15229033 NR Description: putative s-adenosylmethionine synthetase
  misc_feature (1)..(342): NCBI GI NO: 10443981 NR Description: S-adenosylmethionine synthetase [Brassica juncea]
  misc_feature (1)..(342): NCBI GI NO: 3024127 NR Description: S-adenosylmethionine synthetase 2
  misc_feature (1)..(341): NCBI GI NO: 5726594 NR Description: S-adenosyl-L-methionine synthetase
  misc_feature (1)..(339): NCBI GI NO: 3024126 NR Description: S-adenosylmethionine synthetase 1
  misc_feature (1)..(342): NCBI GI NO: 1346524 NR Description: S-adenosylmethionine synthetase
  misc_feature (1)..(342): NCBI GI NO: 13540316 NR Description: S-adenosyl-L-methionine synthetase
  misc_feature (1)..(342): NCBI GI NO: 13540318 NR Description: S-adenosyl-L-methionine synthetase
  misc_feature (1)..(339): NCBI GI NO: 18157331 NR Description: S-adenosylmethionine synthetase
  misc_feature (1)..(342): NCBI GI NO: 1170938 NR Description: S-adenosylmethionine synthetase 2
MVFGEITTKANVDYEQIVRKTCREIGFVSADVGLDADNCKVLVNIEQQSPDIAQGVHGHLTKKPEEVGAGDQGHMFGYATDETPELMPLTHVLATKLGAKLTEVRKNGTCPWLRPDGKTQVTIEYINESGAMVPVRVHTVLISTQHDETVTNDEIAADLKEHVIKPVIPEKYLDEKTIFHLNPSGRFVIGGPHGDAGLTGRKIIIDTYGGWGAHGGGAFSGKDPTKVDRSGAYIVRQAAKSIVASGLARRVIVQVSYAIGVPEPLSVFVDSYGTGKIPDKEILEIVKESFDFRPGMISINLDLKRGGNGRFLKTAAYGHFGRDDADFTWEVVKPLKSNKVQA

SEQ ID NO: 4828 - DNA, 1169 bp, Arabidopsis thaliana
  misc_feature (1)..(1169): Ceres Seq. ID no. 12348407
actgggtcttcttcagcttctgagtcttctcctctctctctatctctcaagtgggctttgctttgctgtttttgtcttccttcgacgactcacttttgcagattctcataaattcttcaaagctttgagtcttttttcagattcgaaggtcggttttatatatgcttcaaatctcttacccaaatcaggtatggagactctgcatccattctctcacctacctatctctgaccaccggttcgttgttcaagagatggtgagctttcacagctcgagtagcggtagctggactaaagaagagaacaagatgttcgaacgagctcttgcgatatacgctgaagactcgcctgatcgctggtttaaagttgcttccatgatccctggaaagactgtttttgatgttatgaagcaatatagtaagcttgaagaagacgttttcgatattgaagcaggacgtgttcccattcctggttatcctgcagcttcttctcccttggggtttgacacggacatgtgtcgtaaacggcctagtggagctagaggatctgatcaagatcgaaagaaaggagtcccttggacagaggaagaacacaggagattcttgttaggcctactcaagtacggtaaaggagattggagaaacatatcgagaaacttcgtggtgtcaaagacgccaacgcaagtggcgagccacgcccaaaagtattaccagagacagctctccggagccaaggacaaacgcaggccaagtatccatgacatcacaaccggcaatcttctcaatgccaatctcaaccgttccttttccgatcatagagatattctccctgatttagggtttatcgataaggatgatacggaggagggagtaatatttatgggtcagaatctctcttcagaaaatctgttttctccatcaccaacttcattcgaagctgccattaacttcgccggagaaaatgtcttcagtgccggagcttaaggcaacatagaatccccaaactcagcgttcttaagaatctgagttttgaaactgtaattagagaaatataagcaaaaccaagtttattatatatgtattgtgtggtttaaaagtaagaacttgtttttactctgtatttttgtgtttctgtctactaaatacctgttatgttaaaaaattctgtgct

SEQ ID NO: 4829 - protein, 326 aa, Arabidopsis thaliana
  peptide (1)..(326): Ceres Seq. ID no. 12348408
  misc_feature (189)..(236): Pfam Name: Pfam Description:  Myb-like DNA-binding domain
  misc_feature (64)..(326): NCBI GI NO: 21618234 NR Description: MYB-family transcription factor, putative
  misc_feature (64)..(326): NCBI GI NO: 15229712 NR Description: MYB-family transcription factor, putative
  misc_feature (64)..(325): NCBI GI NO: 15239231 NR Description: putative protein; protein id: At5g05790.1
  misc_feature (157)..(314): NCBI GI NO: 30687381 NR Description: MYB family transcription factor -related
  misc_feature (63)..(168): NCBI GI NO: 30687381 NR Description: MYB family transcription factor -related
  misc_feature (157)..(314): NCBI GI NO: 7446171 NR Description: probable MYB family transcription factor
  misc_feature (88)..(168): NCBI GI NO: 7446171 NR Description: probable MYB family transcription factor
  misc_feature (63)..(259): NCBI GI NO: 12005328 NR Description: unknown [Hevea brasiliensis]
  misc_feature (64)..(259): NCBI GI NO: 15237776 NR Description: I-box binding factor - like protein
  misc_feature (64)..(259): NCBI GI NO: 18874263 NR Description: MYB-like transcription factor DIVARICATA
LGLLQLLSLLLSLYLSSGLCFAVFVFLRRLTFADSHKFFKALSLFSDSKVGFIYASNLLPKSGMETLHPFSHLPISDHRFVVQEMVSFHSSSSGSWTKEENKMFERALAIYAEDSPDRWFKVASMIPGKTVFDVMKQYSKLEEDVFDIEAGRVPIPGYPAASSPLGFDTDMCRKRPSGARGSDQDRKKGVPWTEEEHRRFLLGLLKYGKGDWRNISRNFVVSKTPTQVASHAQKYYQRQLSGAKDKRRPSIHDITTGNLLNANLNRSFSDHRDILPDLGFIDKDDTEEGVIFMGQNLSSENLFSPSPTSFEAAINFAGENVFSAGA

SEQ ID NO: 4830 - protein, 263 aa, Arabidopsis thaliana
  peptide (1)..(263): Ceres Seq. ID no. 12348409
  misc_feature (126)..(173): Pfam Name: Pfam Description:  Myb-like DNA-binding domain
  misc_feature (1)..(263): NCBI GI NO: 21618234 NR Description: MYB-family transcription factor, putative
  misc_feature (1)..(263): NCBI GI NO: 15229712 NR Description: MYB-family transcription factor, putative
  misc_feature (1)..(262): NCBI GI NO: 15239231 NR Description: putative protein; protein id: At5g05790.1
  misc_feature (94)..(251): NCBI GI NO: 30687381 NR Description: MYB family transcription factor -related
  misc_feature (1)..(105): NCBI GI NO: 30687381 NR Description: MYB family transcription factor -related
  misc_feature (94)..(251): NCBI GI NO: 7446171 NR Description: probable MYB family transcription factor
  misc_feature (25)..(105): NCBI GI NO: 7446171 NR Description: probable MYB family transcription factor
  misc_feature (1)..(196): NCBI GI NO: 12005328 NR Description: unknown [Hevea brasiliensis]
  misc_feature (1)..(196): NCBI GI NO: 15237776 NR Description: I-box binding factor - like protein
  misc_feature (1)..(196): NCBI GI NO: 18874263 NR Description: MYB-like transcription factor DIVARICATA
METLHPFSHLPISDHRFVVQEMVSFHSSSSGSWTKEENKMFERALAIYAEDSPDRWFKVASMIPGKTVFDVMKQYSKLEEDVFDIEAGRVPIPGYPAASSPLGFDTDMCRKRPSGARGSDQDRKKGVPWTEEEHRRFLLGLLKYGKGDWRNISRNFVVSKTPTQVASHAQKYYQRQLSGAKDKRRPSIHDITTGNLLNANLNRSFSDHRDILPDLGFIDKDDTEEGVIFMGQNLSSENLFSPSPTSFEAAINFAGENVFSAGA

SEQ ID NO: 4831 - protein, 242 aa, Arabidopsis thaliana
  peptide (1)..(242): Ceres Seq. ID no. 12348410
  misc_feature (105)..(152): Pfam Name: Pfam Description:  Myb-like DNA-binding domain
  misc_feature (1)..(242): NCBI GI NO: 21618234 NR Description: MYB-family transcription factor, putative
  misc_feature (1)..(242): NCBI GI NO: 15229712 NR Description: MYB-family transcription factor, putative
  misc_feature (1)..(241): NCBI GI NO: 15239231 NR Description: putative protein; protein id: At5g05790.1
  misc_feature (73)..(230): NCBI GI NO: 30687381 NR Description: MYB family transcription factor -related
  misc_feature (1)..(84): NCBI GI NO: 30687381 NR Description: MYB family transcription factor -related
  misc_feature (73)..(230): NCBI GI NO: 7446171 NR Description: probable MYB family transcription factor
  misc_feature (4)..(84): NCBI GI NO: 7446171 NR Description: probable MYB family transcription factor
  misc_feature (1)..(175): NCBI GI NO: 12005328 NR Description: unknown [Hevea brasiliensis]
  misc_feature (1)..(175): NCBI GI NO: 15237776 NR Description: I-box binding factor - like protein
  misc_feature (1)..(175): NCBI GI NO: 18874263 NR Description: MYB-like transcription factor DIVARICATA
MVSFHSSSSGSWTKEENKMFERALAIYAEDSPDRWFKVASMIPGKTVFDVMKQYSKLEEDVFDIEAGRVPIPGYPAASSPLGFDTDMCRKRPSGARGSDQDRKKGVPWTEEEHRRFLLGLLKYGKGDWRNISRNFVVSKTPTQVASHAQKYYQRQLSGAKDKRRPSIHDITTGNLLNANLNRSFSDHRDILPDLGFIDKDDTEEGVIFMGQNLSSENLFSPSPTSFEAAINFAGENVFSAGA

SEQ ID NO: 4832 - DNA, 1555 bp, Arabidopsis thaliana
  misc_feature (1)..(1555): Ceres Seq. ID no. 12562703
aaagttctctcagcttctttctctctctctccatcgcttttgagatcatcgaacacaatcgaaacgaataatcatttggagaataagaagatcgtgagaagcttaaagggttggatcccgtgttctgggaaatcgagtgggaggaataagacaaggaggaacggtgaccacaaactcgacaggaagtcttctgattgttctgtgtctacttcagagaaatctaaggccaagtcgtccttgagtgaatccaaaagtaaaggctctgatcacattgtggcacaaacgtttacattctctgagttagctactgccactagaaacttcagaaaagaatgtcttataggagaaggaggttttggtagagtttacaaaggatacttggccagcactagccagacagcggctatcaagcaacttgatcataatggtttacaaggaaacagggagttccttgtcgaggttctcatgttgagtcttcttcatcacccgaatcttgttaacttaataggatattgtgctgatggagatcaaaggcttctagtctacgagtacatgcccctaggttcacttgaagatcatttgcatgacatttcacctggtaagcagccacttgactggaacaccagaatgaaaatagctgccggtgctgcaaaaggattggagtatctgcatgacaaaactatgcctccagtgatctatcgagatttgaaatgctcaaatattttgctcgatgatgattactttccaaagctatccgacttcgggttggctaaacttggcccagtgggtgacaagtctcatgtgtccactcgtgttatgggaacatacggatactgtgctcccgagtatgcaatgacaggccaactaacactcaaatcagacgtttacagcttcggtgttgttctgctggagattataactggtaggaaagcaatagacagttcaagatctactggagaacagaatctagtcgcatgggcaaggcctttgtttaaagacaggatgaaattctctcaaatggctgatccaatgcttcaaggtcaataccctccgcgagggttataccaagcactcgctgtagcagcgatgtgcgtacaagagcagccaaatcttagacctctcattgctgacgtcgtcactgcactttcttacctcgcctcccaaaagtttgatcctctggctcagccagtccaaggatccctcttcgctcccgggactccacctagatcaaagagggtctgaaaataatcccgagaaccgcaatgctgtgtaagttatgtagcttaaacccattccgtgctgtctttcttggagaggaaaggtggatgattttcagactaagtgtgaatgtatggcttaagagctacttgtagatatgtgtaagaagagatagattcatatagaggccggtttataatgttgttataggtgatgttgtttaatgtaatgtttattgagcgcttgctttcaaatgtgacaatttctcattattgtactgaggatgtctgcttcgattccaaagttattgtataaatattaaagtactatagttttc

SEQ ID NO: 4833 - protein, 413 aa, Arabidopsis thaliana
  peptide (1)..(413): Ceres Seq. ID no. 12562704
  misc_feature (37)..(412): NCBI GI NO: 11259782 NR Description: protein kinase-like - Arabidopsis thaliana
  misc_feature (37)..(413): NCBI GI NO: 30679773 NR Description: protein kinase family [Arabidopsis thaliana]
  misc_feature (37)..(413): NCBI GI NO: 10445209 NR Description: protein serine/threonine kinase BNK1
  misc_feature (35)..(407): NCBI GI NO: 15238886 NR Description: protein kinase -like protein
  misc_feature (80)..(406): NCBI GI NO: 34394036 NR Description: putative protein serine/threonine kinase BNK1
  misc_feature (56)..(407): NCBI GI NO: 34907210 NR Description: putative serine/threonine kinase PBS1 protein
  misc_feature (40)..(407): NCBI GI NO: 34395193 NR Description: putative protein serine/threonine kinase
  misc_feature (14)..(411): NCBI GI NO: 7573596 NR Description: protein kinase 1 [Populus nigra]
  misc_feature (40)..(407): NCBI GI NO: 34899302 NR Description: putative protein serine/threonine kinase
  misc_feature (77)..(326): NCBI GI NO: 21740745 NR Description: OSJNBa0072K14.10
KVLSASFSLSPSLLRSSNTIETNNHLENKKIVRSLKGWIPCSGKSSGRNKTRRNGDHKLDRKSSDCSVSTSEKSKAKSSLSESKSKGSDHIVAQTFTFSELATATRNFRKECLIGEGGFGRVYKGYLASTSQTAAIKQLDHNGLQGNREFLVEVLMLSLLHHPNLVNLIGYCADGDQRLLVYEYMPLGSLEDHLHDISPGKQPLDWNTRMKIAAGAAKGLEYLHDKTMPPVIYRDLKCSNILLDDDYFPKLSDFGLAKLGPVGDKSHVSTRVMGTYGYCAPEYAMTGQLTLKSDVYSFGVVLLEIITGRKAIDSSRSTGEQNLVAWARPLFKDRMKFSQMADPMLQGQYPPRGLYQALAVAAMCVQEQPNLRPLIADVVTALSYLASQKFDPLAQPVQGSLFAPGTPPRSKRV

SEQ ID NO: 4834 - protein, 258 aa, Arabidopsis thaliana
  peptide (1)..(258): Ceres Seq. ID no. 12562705
  misc_feature (1)..(257): NCBI GI NO: 11259782 NR Description: protein kinase-like - Arabidopsis thaliana
  misc_feature (1)..(258): NCBI GI NO: 30679773 NR Description: protein kinase family [Arabidopsis thaliana]
  misc_feature (1)..(258): NCBI GI NO: 10445209 NR Description: protein serine/threonine kinase BNK1
  misc_feature (1)..(252): NCBI GI NO: 15238886 NR Description: protein kinase -like protein
  misc_feature (1)..(251): NCBI GI NO: 34394036 NR Description: putative protein serine/threonine kinase BNK1
  misc_feature (1)..(252): NCBI GI NO: 34907210 NR Description: putative serine/threonine kinase PBS1 protein
  misc_feature (1)..(252): NCBI GI NO: 34395193 NR Description: putative protein serine/threonine kinase
  misc_feature (1)..(256): NCBI GI NO: 7573596 NR Description: protein kinase 1 [Populus nigra]
  misc_feature (1)..(252): NCBI GI NO: 34899302 NR Description: putative protein serine/threonine kinase
  misc_feature (1)..(171): NCBI GI NO: 21740745 NR Description: OSJNBa0072K14.10
MLSLLHHPNLVNLIGYCADGDQRLLVYEYMPLGSLEDHLHDISPGKQPLDWNTRMKIAAGAAKGLEYLHDKTMPPVIYRDLKCSNILLDDDYFPKLSDFGLAKLGPVGDKSHVSTRVMGTYGYCAPEYAMTGQLTLKSDVYSFGVVLLEIITGRKAIDSSRSTGEQNLVAWARPLFKDRMKFSQMADPMLQGQYPPRGLYQALAVAAMCVQEQPNLRPLIADVVTALSYLASQKFDPLAQPVQGSLFAPGTPPRSKRV

SEQ ID NO: 4835 - protein, 229 aa, Arabidopsis thaliana
  peptide (1)..(229): Ceres Seq. ID no. 12562706
  misc_feature (1)..(228): NCBI GI NO: 11259782 NR Description: protein kinase-like - Arabidopsis thaliana
  misc_feature (1)..(229): NCBI GI NO: 30679773 NR Description: protein kinase family [Arabidopsis thaliana]
  misc_feature (1)..(229): NCBI GI NO: 10445209 NR Description: protein serine/threonine kinase BNK1
  misc_feature (1)..(223): NCBI GI NO: 15238886 NR Description: protein kinase -like protein
  misc_feature (1)..(222): NCBI GI NO: 34394036 NR Description: putative protein serine/threonine kinase BNK1
  misc_feature (1)..(223): NCBI GI NO: 34907210 NR Description: putative serine/threonine kinase PBS1 protein
  misc_feature (1)..(223): NCBI GI NO: 34395193 NR Description: putative protein serine/threonine kinase
  misc_feature (1)..(227): NCBI GI NO: 7573596 NR Description: protein kinase 1 [Populus nigra]
  misc_feature (1)..(223): NCBI GI NO: 34899302 NR Description: putative protein serine/threonine kinase
  misc_feature (1)..(142): NCBI GI NO: 21740745 NR Description: OSJNBa0072K14.10
MPLGSLEDHLHDISPGKQPLDWNTRMKIAAGAAKGLEYLHDKTMPPVIYRDLKCSNILLDDDYFPKLSDFGLAKLGPVGDKSHVSTRVMGTYGYCAPEYAMTGQLTLKSDVYSFGVVLLEIITGRKAIDSSRSTGEQNLVAWARPLFKDRMKFSQMADPMLQGQYPPRGLYQALAVAAMCVQEQPNLRPLIADVVTALSYLASQKFDPLAQPVQGSLFAPGTPPRSKRV

SEQ ID NO: 4836 - DNA, 2298 bp, Arabidopsis thaliana
  misc_feature (1)..(2298): Ceres Seq. ID no. 13489521
aaaaaaaatcagaacccaaagccaaagcgtttttatcatttctgtcttcttctgtgtaaacagtaagaccccaaaggtcaaacctttaggctttgtttcttcctttaaggcttttttccgacgtttatatcagatttcttcttgtcaatttcttcatttggacaacctccataatccaagaccgacccttttcctctaatctctcctgttgcagctgaatggtggaacaaactgtggttagagaacatatcaaagcgagagtcatgtcattagtgaggtctgcagagccatcctcatataggaacccgaagctttacacgttgaatgagaatggtaataacaatggtgtcagttctgctcaaatctttgatccagataggtcaaagaatccttgtctgactgatgattcttacccaagccaaagttatgagaagtactttcttgattcgccaactgatgagtttgttcaacatcctattggctctggtgcctcggttagctcatttggctctttagactcatttccttatcagtcaagaccagttcttggatgttccatggaatttcagttaccgttggattcaacctctacttcatctacaaggcttttgggagattaccaagcggtttcttacagtccgagcatggatgtagtggaggagtttgatgatgagcaaatgagatcaaagattcaagagcttgaaagagcgcttctcggcgatgaagatgataaaatggttggaatagataacctcatggagattgacagcgaatggtcgtaccaaaacgaaagcgaacagcatcaagactcgcccaaagaatcatcgtctgcagattccaactctcatgtaagtagcaaagaagtggtgtctcaagccactccaaagcaaatcttgatatcttgtgctcgtgcgctatctgaaggaaaattagaagaagctttgtcaatggtaaatgagctgaggcagatagtttctatccaaggagacccttctcagagaatcgcagcttacatggtggaaggtctagctgcaagaatggccgcttcaggaaaattcatctacagagcattgaaatgcaaagagcctccttcggatgagaggcttgcagctatgcaagtcctgtttgaagtctgcccttgtttcaagttcgggtttttagcagctaatggtgcgatacttgaagcaatcaaaggtgaagaagaagttcacataatcgatttcgatataaaccaagggaaccaatacatgacactgatacgaagcattgctgagttgcctggtaaacgacctcgcctgaggttaacaggaattgatgaccctgaatcagtccaacgctccattggagggctaagaatcatcggtctaagactcgagcaactcgcagaggataatggagtatccttcaaattcaaagcaatgccttcaaagacttcgattgtctctccatcaacactcggttgcaaaccaggagaaaccttaatagtgaactttgcattccaacttcaccacatgcctgacgagagtgtcacaacagtaaaccagcgggacgagctacttcacatggtcaaaagcttaaacccaaagcttgtcacggtcgttgaacaagacgtgaacacaaacacttcaccgttctttcccagattcatagaggcttacgaatactactcagcagttttcgagtctctagacatgacacttccaagagaaagccaagagaggatgaatgtagaaagacagtgtctcgctagagacatagtcaacattgttgcttgcgaaggagaagaacggatagagagatacgaggctgcgggaaaatggagagcaaggatgatgatggctggattcaatccaaaaccaatgagtgctaaagtaaccaacaatatacaaaacctgataaagcaacaatattgcaataagtacaagcttaaagaagaaatgggtgagctccatttttgctgggaggagaaaagcttaatcgttgcttcagcttggaggtaagataagtgacaagagcatatagtctttatgtttcataaaacataattatgtttttactgtaatcttgggttattgtgtaactggttaaatcatctccatgtattattaccagaggttaggggtgatcacaggtactaaaagctaatctaacacttatggaagaatttttctttcttttttttccctattatataaaaataattagagttttggttctaaacctatttgctaagtgtgaatgagtctttacatgttcatatttcagttcaaatggttaaatttgttaaggttctcactt

SEQ ID NO: 4837 - protein, 593 aa, Arabidopsis thaliana
  peptide (1)..(593): Ceres Seq. ID no. 13489522
  misc_feature (196)..(502): Pfam Name: Pfam Description:  GRAS family transcription factor
  misc_feature (1)..(593): NCBI GI NO: 15218990 NR Description: scarecrow-like transcription factor 1 (SCL1)
  misc_feature (242)..(593): NCBI GI NO: 11358822 NR Description: scarecrow-like protein 1
  misc_feature (135)..(593): NCBI GI NO: 34907424 NR Description: scarecrow-like protein
  misc_feature (197)..(593): NCBI GI NO: 15238903 NR Description: phytochrome A signal transduction 1 (PAT1)
  misc_feature (197)..(593): NCBI GI NO: 26450054 NR Description: putative SCARECROW gene regulator
  misc_feature (223)..(592): NCBI GI NO: 37533564 NR Description: putative SCARECROW gene regulator-like
  misc_feature (201)..(592): NCBI GI NO: 25989334 NR Description: chitin-inducible gibberellin-responsive protein
  misc_feature (179)..(593): NCBI GI NO: 14517552 NR Description: F17J6.12/F17J6.12 [Arabidopsis thaliana]
  misc_feature (179)..(593): NCBI GI NO: 23397333 NR Description: putative scarecrow protein [Arabidopsis thaliana]
  misc_feature (179)..(593): NCBI GI NO: 30694805 NR Description: scarecrow-like transcription factor 5 (SCL5)
MVEQTVVREHIKARVMSLVRSAEPSSYRNPKLYTLNENGNNNGVSSAQIFDPDRSKNPCLTDDSYPSQSYEKYFLDSPTDEFVQHPIGSGASVSSFGSLDSFPYQSRPVLGCSMEFQLPLDSTSTSSTRLLGDYQAVSYSPSMDVVEEFDDEQMRSKIQELERALLGDEDDKMVGIDNLMEIDSEWSYQNESEQHQDSPKESSSADSNSHVSSKEVVSQATPKQILISCARALSEGKLEEALSMVNELRQIVSIQGDPSQRIAAYMVEGLAARMAASGKFIYRALKCKEPPSDERLAAMQVLFEVCPCFKFGFLAANGAILEAIKGEEEVHIIDFDINQGNQYMTLIRSIAELPGKRPRLRLTGIDDPESVQRSIGGLRIIGLRLEQLAEDNGVSFKFKAMPSKTSIVSPSTLGCKPGETLIVNFAFQLHHMPDESVTTVNQRDELLHMVKSLNPKLVTVVEQDVNTNTSPFFPRFIEAYEYYSAVFESLDMTLPRESQERMNVERQCLARDIVNIVACEGEERIERYEAAGKWRARMMMAGFNPKPMSAKVTNNIQNLIKQQYCNKYKLKEEMGELHFCWEEKSLIVASAWR

SEQ ID NO: 4838 - protein, 578 aa, Arabidopsis thaliana
  peptide (1)..(578): Ceres Seq. ID no. 13489523
  misc_feature (181)..(487): Pfam Name: Pfam Description:  GRAS family transcription factor
  misc_feature (1)..(578): NCBI GI NO: 15218990 NR Description: scarecrow-like transcription factor 1 (SCL1)
  misc_feature (227)..(578): NCBI GI NO: 11358822 NR Description: scarecrow-like protein 1
  misc_feature (120)..(578): NCBI GI NO: 34907424 NR Description: scarecrow-like protein
  misc_feature (182)..(578): NCBI GI NO: 15238903 NR Description: phytochrome A signal transduction 1 (PAT1)
  misc_feature (182)..(578): NCBI GI NO: 26450054 NR Description: putative SCARECROW gene regulator
  misc_feature (208)..(577): NCBI GI NO: 37533564 NR Description: putative SCARECROW gene regulator-like
  misc_feature (186)..(577): NCBI GI NO: 25989334 NR Description: chitin-inducible gibberellin-responsive protein
  misc_feature (164)..(578): NCBI GI NO: 14517552 NR Description: F17J6.12/F17J6.12 [Arabidopsis thaliana]
  misc_feature (164)..(578): NCBI GI NO: 23397333 NR Description: putative scarecrow protein [Arabidopsis thaliana]
  misc_feature (164)..(578): NCBI GI NO: 25405382 NR Description: scarecrow-like protein
MSLVRSAEPSSYRNPKLYTLNENGNNNGVSSAQIFDPDRSKNPCLTDDSYPSQSYEKYFLDSPTDEFVQHPIGSGASVSSFGSLDSFPYQSRPVLGCSMEFQLPLDSTSTSSTRLLGDYQAVSYSPSMDVVEEFDDEQMRSKIQELERALLGDEDDKMVGIDNLMEIDSEWSYQNESEQHQDSPKESSSADSNSHVSSKEVVSQATPKQILISCARALSEGKLEEALSMVNELRQIVSIQGDPSQRIAAYMVEGLAARMAASGKFIYRALKCKEPPSDERLAAMQVLFEVCPCFKFGFLAANGAILEAIKGEEEVHIIDFDINQGNQYMTLIRSIAELPGKRPRLRLTGIDDPESVQRSIGGLRIIGLRLEQLAEDNGVSFKFKAMPSKTSIVSPSTLGCKPGETLIVNFAFQLHHMPDESVTTVNQRDELLHMVKSLNPKLVTVVEQDVNTNTSPFFPRFIEAYEYYSAVFESLDMTLPRESQERMNVERQCLARDIVNIVACEGEERIERYEAAGKWRARMMMAGFNPKPMSAKVTNNIQNLIKQQYCNKYKLKEEMGELHFCWEEKSLIVASAWR

SEQ ID NO: 4839 - protein, 480 aa, Arabidopsis thaliana
  peptide (1)..(480): Ceres Seq. ID no. 13489524
  misc_feature (83)..(389): Pfam Name: Pfam Description:  GRAS family transcription factor
  misc_feature (1)..(480): NCBI GI NO: 15218990 NR Description: scarecrow-like transcription factor 1 (SCL1)
  misc_feature (129)..(480): NCBI GI NO: 11358822 NR Description: scarecrow-like protein 1
  misc_feature (22)..(480): NCBI GI NO: 34907424 NR Description: scarecrow-like protein
  misc_feature (84)..(480): NCBI GI NO: 15238903 NR Description: phytochrome A signal transduction 1 (PAT1)
  misc_feature (84)..(480): NCBI GI NO: 26450054 NR Description: putative SCARECROW gene regulator
  misc_feature (110)..(479): NCBI GI NO: 37533564 NR Description: putative SCARECROW gene regulator-like
  misc_feature (88)..(479): NCBI GI NO: 25989334 NR Description: chitin-inducible gibberellin-responsive protein
  misc_feature (66)..(480): NCBI GI NO: 14517552 NR Description: F17J6.12/F17J6.12 [Arabidopsis thaliana]
  misc_feature (66)..(480): NCBI GI NO: 23397333 NR Description: putative scarecrow protein [Arabidopsis thaliana]
  misc_feature (66)..(480): NCBI GI NO: 30694805 NR Description: scarecrow-like transcription factor 5 (SCL5)
MEFQLPLDSTSTSSTRLLGDYQAVSYSPSMDVVEEFDDEQMRSKIQELERALLGDEDDKMVGIDNLMEIDSEWSYQNESEQHQDSPKESSSADSNSHVSSKEVVSQATPKQILISCARALSEGKLEEALSMVNELRQIVSIQGDPSQRIAAYMVEGLAARMAASGKFIYRALKCKEPPSDERLAAMQVLFEVCPCFKFGFLAANGAILEAIKGEEEVHIIDFDINQGNQYMTLIRSIAELPGKRPRLRLTGIDDPESVQRSIGGLRIIGLRLEQLAEDNGVSFKFKAMPSKTSIVSPSTLGCKPGETLIVNFAFQLHHMPDESVTTVNQRDELLHMVKSLNPKLVTVVEQDVNTNTSPFFPRFIEAYEYYSAVFESLDMTLPRESQERMNVERQCLARDIVNIVACEGEERIERYEAAGKWRARMMMAGFNPKPMSAKVTNNIQNLIKQQYCNKYKLKEEMGELHFCWEEKSLIVASAWR

SEQ ID NO: 4840 - DNA, 1598 bp, Arabidopsis thaliana
  misc_feature (1)..(1598): Ceres Seq. ID no. 12328576
aaaatcgcgtcaattctcaacccagttttcagatttggtttttggaagctaacttattgttggaggtggagagatatggctgactttggtttgttctgtttcccttgtttaatggaagttgtttcatcatcatcatcatctctgtgattgtaattgatctcacaccatgtctgattacaatggtgatgatcttgaagatgaatatatggctgatgagtatgacatggatgatctcgaggatgatatgaatgccgcgtttgatggaagagatatcgatgcttctgattccgaagtcgaagatttcgatcaattgaacaaggctgcagatacttctgctgctcaagcacggaatgggaaggatattcagggtataccgtgggatagtcttactcttactagaaaagattacagaaaaactaggctagaacaatataaaaactatgaaaatatacccaattctggtgatgaatctgccaagaaatgcatgaatactgagaaaggcagctctttctatgagttcagaaggaattctagatccgtgagatcaacgattctccattttcagttgaggaatttggtctgggctacctcaaaacacgatgtttatttattgtccaactactccatcagccactggtcttctttgacaggttgtaggagtgaaattcttaacgttaaaggtcatgtggctccgtctgagaaacatcccgagagtttgttggaaggatttacagagactcaagttagcactcttgcagtaaaagaaaggctactagttgctggtggattccaaggagaactcatttgcaagcatctcgatagacctggtgtgagcttctgctcacgcacaacttacaccgaaaacgctatcaccaatgcagtagatatatatagaaactccaacggcgcactgcatttcatggcctcaaataatgactgtggagtcagagactttgacatggagagatataagcttgtccaactcttccgttatctatggcccgtcaatcatagttccctaagtcctgatggaaaactagtagcagtcgttggagatgacccagatggtctactggtagacacaagtaacggacagacgatcgggacgctaaaaggtcacttagattattcatttgcatcagcttggcatccaaacggtgtaacatttgccacaggaagccaagacaagacctgtcgtatttgggacacaaggaaactctcggaatcagtcgctgtcctaaaaggtaaccttggagccgtacggtccattaggttcacatctgacggacggtacgttgccatggccgagccagcagatttcgttcatatctatgacacaaaatcaggatacaaaaaggagcaagagattgatttctttggagagatttctgggatatcgtttagcccagatactgaatctctcttcatcggtgtttgggacaggacttatggaagtctcttggagtatggtcgaaccagagactacacttatctcgattcattactttgatggaaatttaagctaagcctaaagaaaaaaaacttacgtaaaaataatttgttatacgccgtcttggttaggtttcataatcatatcg

SEQ ID NO: 4841 - protein, 447 aa, Arabidopsis thaliana
  peptide (1)..(447): Ceres Seq. ID no. 12328577
  misc_feature (1)..(447): NCBI GI NO: 21536732 NR Description: WD-repeat protein-like [Arabidopsis thaliana]
  misc_feature (1)..(447): NCBI GI NO: 18423837 NR Description: WD-repeat protein-like; protein id: At5g56190
  misc_feature (1)..(447): NCBI GI NO: 9758639 NR Description: WD-repeat protein-like [Arabidopsis thaliana]
  misc_feature (11)..(447): NCBI GI NO: 30696707 NR Description: WD-40 repeat protein family [Arabidopsis thaliana]
  misc_feature (1)..(447): NCBI GI NO: 18399975 NR Description: expressed protein; protein id: At3g13340
  misc_feature (1)..(447): NCBI GI NO: 18405485 NR Description: expressed protein; protein id: At1g55680
  misc_feature (1)..(447): NCBI GI NO: 25405994 NR Description: protein F20N2.10 [imported] - Arabidopsis thaliana
  misc_feature (35)..(447): NCBI GI NO: 9294540 NR Description: WD domain protein-like [Arabidopsis thaliana]
  misc_feature (1)..(446): NCBI GI NO: 13937195 NR Description: At1g78070/F28K19_28 [Arabidopsis thaliana]
  misc_feature (69)..(447): NCBI GI NO: 27948448 NR Description: GAMYB-binding protein
MSDYNGDDLEDEYMADEYDMDDLEDDMNAAFDGRDIDASDSEVEDFDQLNKAADTSAAQARNGKDIQGIPWDSLTLTRKDYRKTRLEQYKNYENIPNSGDESAKKCMNTEKGSSFYEFRRNSRSVRSTILHFQLRNLVWATSKHDVYLLSNYSISHWSSLTGCRSEILNVKGHVAPSEKHPESLLEGFTETQVSTLAVKERLLVAGGFQGELICKHLDRPGVSFCSRTTYTENAITNAVDIYRNSNGALHFMASNNDCGVRDFDMERYKLVQLFRYLWPVNHSSLSPDGKLVAVVGDDPDGLLVDTSNGQTIGTLKGHLDYSFASAWHPNGVTFATGSQDKTCRIWDTRKLSESVAVLKGNLGAVRSIRFTSDGRYVAMAEPADFVHIYDTKSGYKKEQEIDFFGEISGISFSPDTESLFIGVWDRTYGSLLEYGRTRDYTYLDSLL

SEQ ID NO: 4842 - protein, 434 aa, Arabidopsis thaliana
  peptide (1)..(434): Ceres Seq. ID no. 12328578
  misc_feature (1)..(434): NCBI GI NO: 21536732 NR Description: WD-repeat protein-like [Arabidopsis thaliana]
  misc_feature (1)..(434): NCBI GI NO: 18423837 NR Description: WD-repeat protein-like; protein id: At5g56190
  misc_feature (1)..(434): NCBI GI NO: 9758639 NR Description: WD-repeat protein-like [Arabidopsis thaliana]
  misc_feature (1)..(434): NCBI GI NO: 30696707 NR Description: WD-40 repeat protein family [Arabidopsis thaliana]
  misc_feature (1)..(434): NCBI GI NO: 18399975 NR Description: expressed protein; protein id: At3g13340
  misc_feature (1)..(434): NCBI GI NO: 18405485 NR Description: expressed protein; protein id: At1g55680
  misc_feature (1)..(434): NCBI GI NO: 25405994 NR Description: protein F20N2.10 [imported] - Arabidopsis thaliana
  misc_feature (22)..(434): NCBI GI NO: 9294540 NR Description: WD domain protein-like [Arabidopsis thaliana]
  misc_feature (1)..(433): NCBI GI NO: 13937195 NR Description: At1g78070/F28K19_28 [Arabidopsis thaliana]
  misc_feature (56)..(434): NCBI GI NO: 27948448 NR Description: GAMYB-binding protein
MADEYDMDDLEDDMNAAFDGRDIDASDSEVEDFDQLNKAADTSAAQARNGKDIQGIPWDSLTLTRKDYRKTRLEQYKNYENIPNSGDESAKKCMNTEKGSSFYEFRRNSRSVRSTILHFQLRNLVWATSKHDVYLLSNYSISHWSSLTGCRSEILNVKGHVAPSEKHPESLLEGFTETQVSTLAVKERLLVAGGFQGELICKHLDRPGVSFCSRTTYTENAITNAVDIYRNSNGALHFMASNNDCGVRDFDMERYKLVQLFRYLWPVNHSSLSPDGKLVAVVGDDPDGLLVDTSNGQTIGTLKGHLDYSFASAWHPNGVTFATGSQDKTCRIWDTRKLSESVAVLKGNLGAVRSIRFTSDGRYVAMAEPADFVHIYDTKSGYKKEQEIDFFGEISGISFSPDTESLFIGVWDRTYGSLLEYGRTRDYTYLDSLL

SEQ ID NO: 4843 - protein, 428 aa, Arabidopsis thaliana
  peptide (1)..(428): Ceres Seq. ID no. 12328579
  misc_feature (1)..(428): NCBI GI NO: 21536732 NR Description: WD-repeat protein-like [Arabidopsis thaliana]
  misc_feature (1)..(428): NCBI GI NO: 18423837 NR Description: WD-repeat protein-like; protein id: At5g56190
  misc_feature (1)..(428): NCBI GI NO: 9758639 NR Description: WD-repeat protein-like [Arabidopsis thaliana]
  misc_feature (1)..(428): NCBI GI NO: 30696707 NR Description: WD-40 repeat protein family [Arabidopsis thaliana]
  misc_feature (1)..(428): NCBI GI NO: 18399975 NR Description: expressed protein; protein id: At3g13340
  misc_feature (1)..(428): NCBI GI NO: 18405485 NR Description: expressed protein; protein id: At1g55680
  misc_feature (1)..(428): NCBI GI NO: 25405994 NR Description: protein F20N2.10 [imported] - Arabidopsis thaliana
  misc_feature (16)..(428): NCBI GI NO: 9294540 NR Description: WD domain protein-like [Arabidopsis thaliana]
  misc_feature (1)..(427): NCBI GI NO: 13937195 NR Description: At1g78070/F28K19_28 [Arabidopsis thaliana]
  misc_feature (50)..(428): NCBI GI NO: 27948448 NR Description: GAMYB-binding protein
MDDLEDDMNAAFDGRDIDASDSEVEDFDQLNKAADTSAAQARNGKDIQGIPWDSLTLTRKDYRKTRLEQYKNYENIPNSGDESAKKCMNTEKGSSFYEFRRNSRSVRSTILHFQLRNLVWATSKHDVYLLSNYSISHWSSLTGCRSEILNVKGHVAPSEKHPESLLEGFTETQVSTLAVKERLLVAGGFQGELICKHLDRPGVSFCSRTTYTENAITNAVDIYRNSNGALHFMASNNDCGVRDFDMERYKLVQLFRYLWPVNHSSLSPDGKLVAVVGDDPDGLLVDTSNGQTIGTLKGHLDYSFASAWHPNGVTFATGSQDKTCRIWDTRKLSESVAVLKGNLGAVRSIRFTSDGRYVAMAEPADFVHIYDTKSGYKKEQEIDFFGEISGISFSPDTESLFIGVWDRTYGSLLEYGRTRDYTYLDSLL

SEQ ID NO: 4844 - DNA, 1169 bp, Arabidopsis thaliana
  misc_feature (1)..(1169): Ceres Seq. ID no. 13487856
attctcacaagtcataaacagtcgtttatagttcaatccttttcctcttctttgtttctaaaaagagaaaagtcacttatggcggatatctcgggaaacggctatggcaacgccagagaagaagtagtaatggtgaatctcaaggatgaagtcgaacatcaacaagaaatggaagacattcataacccaagacccttgaagaaacaagactctctactctcagtctctgtccctttcttacaaaagttgatcgcggagtttcttggaacctactttttggtattcaccggttgtgcatcggtggttgtaaacatgcaaaacgacaatgtcgtgactcttccagggatcgctatcgtttggggactcaccattatggtcctcatttactctcttggtcacatctctggtgctcatatcaatccggccgttaccattgccttcgcctcttgtggccgtttccctctcaaacaggttccagcttatgtcatatcacaagtgataggatcaacgctcgcggctgcgacattacggttgttgttcggacttgatcacgacgtttgtagcggaaaacacgatgtgtttatcggatcatcaccagtgggatcagatcttcaggcgtttacgatggagtttatcgtcactttctatctaatgttcatcatttctggcgttgctaccgataatagagcgatcggagaacttgctggattagcaataggatcaacggtgctacttaacgtgctaattgccgcaccggtatcgagtgcgtcgatgaatccaggaagaagtttaggacctgcactggtctatggttgctacaaaggaatttggatatacttagttgcgccaactcttggtgcgattgcgggtgcatgggtttataacacagttagatataccgataaaccattgcgagaaatcactaaaagtggttcatttctaaagaccgtgagaatcggtagcacttgataagagaaaagaaaacatgggtggagttgatggagtattttcaaatgaatgtaacaactttcaccacaccttacgtatatggcctttgtattaattgctacgtttatctcttttattgttaacgccaagattctctatcttgttattaatgtgtaactgtatcgtatattttttaaataataaaattcaattttcgaaag

SEQ ID NO: 4845 - protein, 322 aa, Arabidopsis thaliana
  peptide (1)..(322): Ceres Seq. ID no. 13487857
  misc_feature (27)..(322): NCBI GI NO: 18415224 NR Description: major intrinsic protein (MIP) family
  misc_feature (27)..(322): NCBI GI NO: 25324917 NR Description: nodulin-26-like protein
  misc_feature (44)..(322): NCBI GI NO: 2677614 NR Description: NLM1 protein (NodLikeMip1) [Arabidopsis thaliana]
  misc_feature (27)..(322): NCBI GI NO: 15234059 NR Description: major intrinsic protein (MIP) family
  misc_feature (27)..(322): NCBI GI NO: 21536953 NR Description: major intrinsic protein (MIP)- like
  misc_feature (82)..(322): NCBI GI NO: 7449725 NR Description: nodulin-26-like protein F13C5
  misc_feature (58)..(315): NCBI GI NO: 5139541 NR Description: nodulin26-like major intrinsic protein
  misc_feature (75)..(315): NCBI GI NO: 17025880 NR Description: multifunctional aquaporin [Medicago truncatula]
  misc_feature (64)..(315): NCBI GI NO: 541944 NR Description: nodulin-26 - soybean
  misc_feature (76)..(317): NCBI GI NO: 9082287 NR Description: multifunctional transport intrinsic membrane protein 2
ILTSHKQSFIVQSFSSSLFLKREKSLMADISGNGYGNAREEVVMVNLKDEVEHQQEMEDIHNPRPLKKQDSLLSVSVPFLQKLIAEFLGTYFLVFTGCASVVVNMQNDNVVTLPGIAIVWGLTIMVLIYSLGHISGAHINPAVTIAFASCGRFPLKQVPAYVISQVIGSTLAAATLRLLFGLDHDVCSGKHDVFIGSSPVGSDLQAFTMEFIVTFYLMFIISGVATDNRAIGELAGLAIGSTVLLNVLIAAPVSSASMNPGRSLGPALVYGCYKGIWIYLVAPTLGAIAGAWVYNTVRYTDKPLREITKSGSFLKTVRIGST

SEQ ID NO: 4846 - protein, 296 aa, Arabidopsis thaliana
  peptide (1)..(296): Ceres Seq. ID no. 13487858
  misc_feature (1)..(296): NCBI GI NO: 18415224 NR Description: major intrinsic protein (MIP) family
  misc_feature (1)..(296): NCBI GI NO: 25324917 NR Description: nodulin-26-like protein
  misc_feature (18)..(296): NCBI GI NO: 2677614 NR Description: NLM1 protein (NodLikeMip1) [Arabidopsis thaliana]
  misc_feature (1)..(296): NCBI GI NO: 15234059 NR Description: major intrinsic protein (MIP) family
  misc_feature (1)..(296): NCBI GI NO: 21536953 NR Description: major intrinsic protein (MIP)- like
  misc_feature (56)..(296): NCBI GI NO: 7449725 NR Description: nodulin-26-like protein F13C5
  misc_feature (32)..(289): NCBI GI NO: 5139541 NR Description: nodulin26-like major intrinsic protein
  misc_feature (49)..(289): NCBI GI NO: 17025880 NR Description: multifunctional aquaporin [Medicago truncatula]
  misc_feature (38)..(289): NCBI GI NO: 541944 NR Description: nodulin-26 - soybean
  misc_feature (50)..(291): NCBI GI NO: 9082287 NR Description: multifunctional transport intrinsic membrane protein 2
MADISGNGYGNAREEVVMVNLKDEVEHQQEMEDIHNPRPLKKQDSLLSVSVPFLQKLIAEFLGTYFLVFTGCASVVVNMQNDNVVTLPGIAIVWGLTIMVLIYSLGHISGAHINPAVTIAFASCGRFPLKQVPAYVISQVIGSTLAAATLRLLFGLDHDVCSGKHDVFIGSSPVGSDLQAFTMEFIVTFYLMFIISGVATDNRAIGELAGLAIGSTVLLNVLIAAPVSSASMNPGRSLGPALVYGCYKGIWIYLVAPTLGAIAGAWVYNTVRYTDKPLREITKSGSFLKTVRIGST

SEQ ID NO: 4847 - protein, 279 aa, Arabidopsis thaliana
  peptide (1)..(279): Ceres Seq. ID no. 13487859
  misc_feature (1)..(279): NCBI GI NO: 18415224 NR Description: major intrinsic protein (MIP) family
  misc_feature (1)..(279): NCBI GI NO: 25324917 NR Description: nodulin-26-like protein
  misc_feature (1)..(279): NCBI GI NO: 2677614 NR Description: NLM1 protein (NodLikeMip1) [Arabidopsis thaliana]
  misc_feature (1)..(279): NCBI GI NO: 15234059 NR Description: major intrinsic protein (MIP) family
  misc_feature (1)..(279): NCBI GI NO: 21536953 NR Description: major intrinsic protein (MIP)- like
  misc_feature (39)..(279): NCBI GI NO: 7449725 NR Description: nodulin-26-like protein F13C5
  misc_feature (15)..(272): NCBI GI NO: 5139541 NR Description: nodulin26-like major intrinsic protein
  misc_feature (32)..(272): NCBI GI NO: 17025880 NR Description: multifunctional aquaporin [Medicago truncatula]
  misc_feature (21)..(272): NCBI GI NO: 541944 NR Description: nodulin-26 - soybean
  misc_feature (33)..(274): NCBI GI NO: 9082287 NR Description: multifunctional transport intrinsic membrane protein 2
MVNLKDEVEHQQEMEDIHNPRPLKKQDSLLSVSVPFLQKLIAEFLGTYFLVFTGCASVVVNMQNDNVVTLPGIAIVWGLTIMVLIYSLGHISGAHINPAVTIAFASCGRFPLKQVPAYVISQVIGSTLAAATLRLLFGLDHDVCSGKHDVFIGSSPVGSDLQAFTMEFIVTFYLMFIISGVATDNRAIGELAGLAIGSTVLLNVLIAAPVSSASMNPGRSLGPALVYGCYKGIWIYLVAPTLGAIAGAWVYNTVRYTDKPLREITKSGSFLKTVRIGST

SEQ ID NO: 4848 - DNA, 2028 bp, Arabidopsis thaliana
  misc_feature (1)..(2028): Ceres Seq. ID no. 13497630
tgaggcatcacaacaatcaatataagcctgggatccaattttcttatttccccaaccaaaacaggggaagaaaaaaaaagaaaacaaaaaaatcaaaaaaaattagaaaatgaaagcctcaacaagagtcatatggacaatatctgtccttatgctcgctgctgtgtccgaggccatcttccctctaccgtttctaccgttcctccctgggttcaacaacggctttagggacaatgaggctgtcaaggttgcgaaaccacagcctgcaggagcagttggtggaaaagccgcaagaaggcagcgtggcggcggtttagacgctcagacaacctggggtggtaagtgggagctcttcttggaaaactcgggtgtgtcagggatgcatgcgatccttatgccagttatcaacaaggtccagtactatgacgccaccatttggagaatttcaaagattaagttgcctccaggcgtaccatgccatgtcgtggacgctaagactaacaaggtcgattgttgggctcattcgattctcatggatgtcaacaccggcgcccttaagcctctagggctttccaccgatacatggtgctcatccggaggtctgaccgtaaatggtacattggtgagcactggaggatacggaggaggagccaacaccgcgaggtacctatccagctgtgaaaactgcaagtgggaagaataccctcaggcattggccgcgaagagatggtactcaacgcaagcaactctccctgacggaaagttcttcgtgattggtggaagagacgccttgaactacgaatacattcctgaggagggacaaaacaacaggaagctctttgactcattgctcctcaggcaaacagacgacccgaaagaaaacaacctttaccctttcgtctggcttaacaccgacggtaacctcttcattttcgctaacaaccgatccatccttctaagccccaaaacaaaccaagtcatcaaggagttccctcagctcccaggtggtgcccgtaactacccgggatcaggttcttccgcactcctccccatccaactttacgtgaaaaaccccaaggtcatcccagccgaggttctcgtctgtggtggttccaaacaagacgcgtattacaaggctggtaaaaaaatatacgaaccagcactacaagactgcgccaggataaggatcaacagcgcaaagccacgatggaagacggagatgatgccaaccccacgaatcatgagtgatactgtcatcctccctaacggagacatccttctagtcaacggagctaaacgtggttgttcaggctggggatatggtaaagaccctgcctttgctcccctcttgtacaagccccatgctgcacgtggcaagcgtttcagacagctcaagcccaccaccatcccacgtatgtaccactccagcgccatcattcttccagacggtaaggttcttgtcggtggcagcaacaccaacgacggttacaagtacaacgttgagttcccaacggagcttcgcgttgagaaattctccccaccttacctcgacccggctctagccaacataaggccaaagatcgtcaccaccggcaccccaaaacaggtcaaatacggacaattcttcaacgtgaaggtcgaccttaaagaaaagggagcaaccaagggaaatctcaaggttaccatgttagcccctgccttcacaacacacagtatctcaatgaacatgaggatgctcatcttgggtgtcaataatgtcaaacctgctggtgccggttacgatatccaggccgttgcaccaccaaatggaaacatcgctccaccgggttactatcttatctttgccatctacaaaggtgttcccagcactggagaatggattcaggtcgtctaatgacgataatttttacccattttgtcttatgaccgtaacatcttaatataaaacaatcacataatatcagtttttttttccttctatatatattgtttatgccaccattaatggatccaaattacttgtgttct

SEQ ID NO: 4849 - protein, 594 aa, Arabidopsis thaliana
  peptide (1)..(594): Ceres Seq. ID no. 13497631
  misc_feature (38)..(594): NCBI GI NO: 15220398 NR Description: glyoxal oxidase (glx1) -related
  misc_feature (69)..(593): NCBI GI NO: 34911116 NR Description: putative glyoxal oxidase
  misc_feature (77)..(593): NCBI GI NO: 15223699 NR Description: expressed protein [Arabidopsis thaliana]
  misc_feature (76)..(593): NCBI GI NO: 25352602 NR Description: F14L17.20 protein - Arabidopsis thaliana
  misc_feature (76)..(590): NCBI GI NO: 15223754 NR Description: expressed protein [Arabidopsis thaliana]
  misc_feature (77)..(593): NCBI GI NO: 15222300 NR Description: hypothetical protein [Arabidopsis thaliana]
  misc_feature (91)..(593): NCBI GI NO: 25352604 NR Description: hypothetical protein F6F9.4
  misc_feature (78)..(593): NCBI GI NO: 15230360 NR Description: expressed protein [Arabidopsis thaliana]
  misc_feature (139)..(593): NCBI GI NO: 542394 NR Description: glyoxal oxidase (EC 1
  misc_feature (129)..(180): NCBI GI NO: 542394 NR Description: glyoxal oxidase (EC 1
MKASTRVIWTISVLMLAAVSEAIFPLPFLPFLPGFNNGFRDNEAVKVAKPQPAGAVGGKAARRQRGGGLDAQTTWGGKWELFLENSGVSGMHAILMPVINKVQYYDATIWRISKIKLPPGVPCHVVDAKTNKVDCWAHSILMDVNTGALKPLGLSTDTWCSSGGLTVNGTLVSTGGYGGGANTARYLSSCENCKWEEYPQALAAKRWYSTQATLPDGKFFVIGGRDALNYEYIPEEGQNNRKLFDSLLLRQTDDPKENNLYPFVWLNTDGNLFIFANNRSILLSPKTNQVIKEFPQLPGGARNYPGSGSSALLPIQLYVKNPKVIPAEVLVCGGSKQDAYYKAGKKIYEPALQDCARIRINSAKPRWKTEMMPTPRIMSDTVILPNGDILLVNGAKRGCSGWGYGKDPAFAPLLYKPHAARGKRFRQLKPTTIPRMYHSSAIILPDGKVLVGGSNTNDGYKYNVEFPTELRVEKFSPPYLDPALANIRPKIVTTGTPKQVKYGQFFNVKVDLKEKGATKGNLKVTMLAPAFTTHSISMNMRMLILGVNNVKPAGAGYDIQAVAPPNGNIAPPGYYLIFAIYKGVPSTGEWIQVV

SEQ ID NO: 4850 - protein, 580 aa, Arabidopsis thaliana
  peptide (1)..(580): Ceres Seq. ID no. 13497632
  misc_feature (24)..(580): NCBI GI NO: 15220398 NR Description: glyoxal oxidase (glx1) -related
  misc_feature (55)..(579): NCBI GI NO: 34911116 NR Description: putative glyoxal oxidase
  misc_feature (63)..(579): NCBI GI NO: 15223699 NR Description: expressed protein [Arabidopsis thaliana]
  misc_feature (62)..(579): NCBI GI NO: 25352602 NR Description: F14L17.20 protein - Arabidopsis thaliana
  misc_feature (62)..(576): NCBI GI NO: 15223754 NR Description: expressed protein [Arabidopsis thaliana]
  misc_feature (63)..(579): NCBI GI NO: 15222300 NR Description: hypothetical protein [Arabidopsis thaliana]
  misc_feature (77)..(579): NCBI GI NO: 25352604 NR Description: hypothetical protein F6F9.4
  misc_feature (64)..(579): NCBI GI NO: 15230360 NR Description: expressed protein [Arabidopsis thaliana]
  misc_feature (125)..(579): NCBI GI NO: 542394 NR Description: glyoxal oxidase (EC 1
  misc_feature (115)..(166): NCBI GI NO: 542394 NR Description: glyoxal oxidase (EC 1
MLAAVSEAIFPLPFLPFLPGFNNGFRDNEAVKVAKPQPAGAVGGKAARRQRGGGLDAQTTWGGKWELFLENSGVSGMHAILMPVINKVQYYDATIWRISKIKLPPGVPCHVVDAKTNKVDCWAHSILMDVNTGALKPLGLSTDTWCSSGGLTVNGTLVSTGGYGGGANTARYLSSCENCKWEEYPQALAAKRWYSTQATLPDGKFFVIGGRDALNYEYIPEEGQNNRKLFDSLLLRQTDDPKENNLYPFVWLNTDGNLFIFANNRSILLSPKTNQVIKEFPQLPGGARNYPGSGSSALLPIQLYVKNPKVIPAEVLVCGGSKQDAYYKAGKKIYEPALQDCARIRINSAKPRWKTEMMPTPRIMSDTVILPNGDILLVNGAKRGCSGWGYGKDPAFAPLLYKPHAARGKRFRQLKPTTIPRMYHSSAIILPDGKVLVGGSNTNDGYKYNVEFPTELRVEKFSPPYLDPALANIRPKIVTTGTPKQVKYGQFFNVKVDLKEKGATKGNLKVTMLAPAFTTHSISMNMRMLILGVNNVKPAGAGYDIQAVAPPNGNIAPPGYYLIFAIYKGVPSTGEWIQVV

SEQ ID NO: 4851 - protein, 504 aa, Arabidopsis thaliana
  peptide (1)..(504): Ceres Seq. ID no. 13497633
  misc_feature (1)..(504): NCBI GI NO: 15220398 NR Description: glyoxal oxidase (glx1) -related
  misc_feature (1)..(503): NCBI GI NO: 34911116 NR Description: putative glyoxal oxidase
  misc_feature (1)..(503): NCBI GI NO: 15223699 NR Description: expressed protein [Arabidopsis thaliana]
  misc_feature (1)..(503): NCBI GI NO: 25352602 NR Description: F14L17.20 protein - Arabidopsis thaliana
  misc_feature (1)..(500): NCBI GI NO: 15223754 NR Description: expressed protein [Arabidopsis thaliana]
  misc_feature (1)..(503): NCBI GI NO: 15222300 NR Description: hypothetical protein [Arabidopsis thaliana]
  misc_feature (1)..(503): NCBI GI NO: 25352604 NR Description: hypothetical protein F6F9.4
  misc_feature (1)..(503): NCBI GI NO: 15230360 NR Description: expressed protein [Arabidopsis thaliana]
  misc_feature (49)..(503): NCBI GI NO: 542394 NR Description: glyoxal oxidase (EC 1
  misc_feature (39)..(90): NCBI GI NO: 542394 NR Description: glyoxal oxidase (EC 1
MHAILMPVINKVQYYDATIWRISKIKLPPGVPCHVVDAKTNKVDCWAHSILMDVNTGALKPLGLSTDTWCSSGGLTVNGTLVSTGGYGGGANTARYLSSCENCKWEEYPQALAAKRWYSTQATLPDGKFFVIGGRDALNYEYIPEEGQNNRKLFDSLLLRQTDDPKENNLYPFVWLNTDGNLFIFANNRSILLSPKTNQVIKEFPQLPGGARNYPGSGSSALLPIQLYVKNPKVIPAEVLVCGGSKQDAYYKAGKKIYEPALQDCARIRINSAKPRWKTEMMPTPRIMSDTVILPNGDILLVNGAKRGCSGWGYGKDPAFAPLLYKPHAARGKRFRQLKPTTIPRMYHSSAIILPDGKVLVGGSNTNDGYKYNVEFPTELRVEKFSPPYLDPALANIRPKIVTTGTPKQVKYGQFFNVKVDLKEKGATKGNLKVTMLAPAFTTHSISMNMRMLILGVNNVKPAGAGYDIQAVAPPNGNIAPPGYYLIFAIYKGVPSTGEWIQVV

SEQ ID NO: 4852 - DNA, 469 bp, Arabidopsis thaliana
  misc_feature (1)..(469): Ceres Seq. ID no. 12602826
acaattcagattccaattttctcaaactctaaaatcaatctctcaaatctctcaaccgtgatcaagatgcagatcttcgttaagactctcaccggaaagactatcaccctcgaggtggaaagctctgacaccatcgacaacgttaaggccaagatccaggataaggaaggtattcctccggatcagcagaggcttatcttcgccggaaagcagttggaggatggccgcacgttggcggattacaacatccagaaggagtctactcttcacttggtcctccgtctccgtggtggtttctaaaccttgtctctctcttatggttactgaaccaagttcatgtctcgtttcatctagtactttggtggtttatgttttggggccatgtaagcctctgataaataattgatcgactatgtttccgtttctttcatctctcttttctttcaaacaacaaatcgaacttattcgc

SEQ ID NO: 4853 - protein, 99 aa, Arabidopsis thaliana
  peptide (1)..(99): Ceres Seq. ID no. 13645873
  misc_feature (23)..(96): Pfam Name: Pfam Description:  Ubiquitin family
  misc_feature (23)..(99): NCBI GI NO: 6671282 NR Description: recombinant ubiquitin-somatotropin fusion protein
  misc_feature (23)..(99): NCBI GI NO: 70644 NR Description: ubiquitin precursor - common sunflower (fragment)
  misc_feature (23)..(99): NCBI GI NO: 70645 NR Description: polyubiquitin 5 - garden pea
  misc_feature (23)..(99): NCBI GI NO: 170352 NR Description: hexameric polyubiquitin
  misc_feature (23)..(99): NCBI GI NO: 6118549 NR Description: ubiquitin precursor [Hevea brasiliensis]
  misc_feature (23)..(99): NCBI GI NO: 1800281 NR Description: polyubiquitin [Fragaria x ananassa]
  misc_feature (23)..(99): NCBI GI NO: 170354 NR Description: pentameric polyubiquitin
  misc_feature (23)..(99): NCBI GI NO: 7488781 NR Description: polyubiquitin 4.4 - kidney bean
  misc_feature (23)..(99): NCBI GI NO: 18412077 NR Description: polyubiquitin (UBQ14); protein id: At4g02890
  misc_feature (23)..(99): NCBI GI NO: 15982787 NR Description: AT4g05320/C17L7_240 [Arabidopsis thaliana]
TIQIPIFSNSKINLSNLSTVIKMQIFVKTLTGKTITLEVESSDTIDNVKAKIQDKEGIPPDQQRLIFAGKQLEDGRTLADYNIQKESTLHLVLRLRGGF

SEQ ID NO: 4854 - protein, 77 aa, Arabidopsis thaliana; identical to SEQ ID NO: 1645
  peptide (1)..(77): Ceres Seq. ID no. 13645874
  misc_feature (1)..(74): Pfam Name: Pfam Description:  Ubiquitin family
  misc_feature (1)..(77): NCBI GI NO: 6671282 NR Description: recombinant ubiquitin-somatotropin fusion protein
  misc_feature (1)..(77): NCBI GI NO: 70644 NR Description: ubiquitin precursor - common sunflower (fragment)
  misc_feature (1)..(77): NCBI GI NO: 18412077 NR Description: polyubiquitin (UBQ14); protein id: At4g02890
  misc_feature (1)..(77): NCBI GI NO: 15982787 NR Description: AT4g05320/C17L7_240 [Arabidopsis thaliana]
  misc_feature (1)..(77): NCBI GI NO: 7488781 NR Description: polyubiquitin 4.4 - kidney bean
  misc_feature (1)..(77): NCBI GI NO: 6118549 NR Description: ubiquitin precursor [Hevea brasiliensis]
  misc_feature (1)..(77): NCBI GI NO: 1800281 NR Description: polyubiquitin [Fragaria x ananassa]
  misc_feature (1)..(77): NCBI GI NO: 170354 NR Description: pentameric polyubiquitin
  misc_feature (1)..(77): NCBI GI NO: 170352 NR Description: hexameric polyubiquitin
  misc_feature (1)..(77): NCBI GI NO: 70645 NR Description: polyubiquitin 5 - garden pea

SEQ ID NO: 4855 - protein, 61 aa, Arabidopsis thaliana
  peptide (1)..(61): Ceres Seq. ID no. 13645875
  misc_feature (1)..(27): NCBI GI NO: 30680052 NR Description: polyubiquitin UBQ10/SEN3 [Arabidopsis thaliana]
MAARWRITTSRRSLLFTWSSVSVVVSKPCLSLMVTEPSSCLVSSSTLVVYVLGPCKPLINN

SEQ ID NO: 4856 - DNA, 1598 bp, Arabidopsis thaliana
  misc_feature (1)..(1598): Ceres Seq. ID no. 12562571
actacaccataaaaagagaaaggcgtaaaaaggaaaaagaaaaaaaaaggtaaacgttataataaaagaaaaaaaaaatatatgacaacggcgttgttttcaccgtctaaccgtagaaaacgccgtctcacacacttcttcttcaccggtactcgctttcatcttactcgccgccttcatctacggccacgatttcatctctttctctcgtcggatctcttcactctccggacgatcgtccaccagtccgcaatcgtcgttgtagttgacgaacctcctccgcctccaccaacatctcctcctccgccttctcctccaccaccgtctcctccaccaccatctcctccaccgccatctcctccgccacctgcttttgcagtaggtaaaacgccggaaggatgcgatgtcttcaaagggaattgggtcaaagactggtcaacgcgtccactttacagagaatccgagtgtccgtacattcagccgcagctcacttgccgcacgcatggccgtcccgatagtgattatcagtcatggagatggcgacctgattcctgctcacttccttcgttagtctctctctccgttcgattttgaatgcgattcggtgattgatcttcagatcggatttgctctgtggttgttgaatgtgttaataggtttaatgcgacggtgatgttggagagcttaagagggaagaagatgatgttcgttggagattcgttgaacagaggaatgtatgtttctctcatctgtcttcttcattcacaaatcccagagaactccaaatccatggatactttcggatcactcaccgtcttctctctcaaggattacaatgcaacgattgagttctattgggcaccgtttcttctagaatcgaattcagataacgcaacagttcatagagtatcagatcgaattgtgaggaaaggatcgatcaacaaacacggtaggcattggcgaggggctgatatagttgtgttcaacacatacttgtggtggaggactggcttcaaaatgaagatcttgttctttcaaggatgagaagaagagaatcgttgagatggagagtgaagatgcttatagaatggcgttgaagactatggttaaatgggtgaagaagaatatggatccattgaagacgagggttttctttgctaccatgtctcctactcattacaagggcgaggattggggaggcgaacaaggaaaaaattgttacaatcaaacgacaccgatccaagacatgaaccattggccatcagactgcagcaaaaccttaatgaaagtgataggagaggaattagaccaaagagcagagtttccggtgacggtacttaacattacacaactctctggctatcggaaagacgcgcacacgtcaatctacaagaagcaatggagcccattgacgaaggagcagctagcaaatccggctagctactcagactgtatacattggtgcttgcctggtcttcaagatacttggaacgagcttttctttgccaagttattttatccatgattcttttctctaaattcaagatttttttagaactgtaattgtaaattatggttataatttttgttaattacgc

SEQ ID NO: 4857 - protein, 170 aa, Arabidopsis thaliana
  peptide (1)..(170): Ceres Seq. ID no. 12562572
  misc_feature (1)..(162): NCBI GI NO: 15228429 NR Description: unknown protein; protein id: At3g11030.1
  misc_feature (85)..(162): NCBI GI NO: 15226647 NR Description: hypothetical protein; protein id: At2g40320.1
  misc_feature (85)..(162): NCBI GI NO: 28393743 NR Description: unknown protein [Arabidopsis thaliana]
  misc_feature (66)..(162): NCBI GI NO: 28876013 NR Description: unknown protein
  misc_feature (96)..(153): NCBI GI NO: 4588008 NR Description: hypothetical protein [Arabidopsis thaliana]
  misc_feature (92)..(162): NCBI GI NO: 28876024 NR Description: unknown protein
  misc_feature (100)..(160): NCBI GI NO: 11291876 NR Description: hypothetical protein F7A7
  misc_feature (100)..(160): NCBI GI NO: 18413698 NR Description: putative protein; protein id: At5g01620
  misc_feature (104)..(161): NCBI GI NO: 15228789 NR Description: putative protein; protein id: At3g55990.1
  misc_feature (104)..(161): NCBI GI NO: 26452343 NR Description: unknown protein [Arabidopsis thaliana]
MTTALFSPSNRRKRRLTHFFFTGTRFHLTRRLHLRPRFHLFLSSDLFTLRTIVHQSAIVVVVDEPPPPPPTSPPPPSPPPPSPPPPSPPPPSPPPPAFAVGKTPEGCDVFKGNWVKDWSTRPLYRESECPYIQPQLTCRTHGRPDSDYQSWRWRPDSCSLPSLVSLSVRF

SEQ ID NO: 4858 - protein, 153 aa, Arabidopsis thaliana
  peptide (1)..(153): Ceres Seq. ID no. 12562573
  misc_feature (1)..(153): NCBI GI NO: 15228429 NR Description: unknown protein; protein id: At3g11030.1
  misc_feature (1)..(152): NCBI GI NO: 15226647 NR Description: hypothetical protein; protein id: At2g40320.1
  misc_feature (1)..(152): NCBI GI NO: 28393743 NR Description: unknown protein [Arabidopsis thaliana]
  misc_feature (1)..(153): NCBI GI NO: 28876013 NR Description: unknown protein
  misc_feature (1)..(152): NCBI GI NO: 4588008 NR Description: hypothetical protein [Arabidopsis thaliana]
  misc_feature (1)..(153): NCBI GI NO: 28876024 NR Description: unknown protein
  misc_feature (1)..(147): NCBI GI NO: 11291876 NR Description: hypothetical protein F7A7
  misc_feature (1)..(147): NCBI GI NO: 18413698 NR Description: putative protein; protein id: At5g01620
  misc_feature (1)..(150): NCBI GI NO: 15228789 NR Description: putative protein; protein id: At3g55990.1
  misc_feature (1)..(150): NCBI GI NO: 26452343 NR Description: unknown protein [Arabidopsis thaliana]
MESEDAYRMALKTMVKWVKKNMDPLKTRVFFATMSPTHYKGEDWGGEQGKNCYNQTTPIQDMNHWPSDCSKTLMKVIGEELDQRAEFPVTVLNITQLSGYRKDAHTSIYKKQWSPLTKEQLANPASYSDCIHWCLPGLQDTWNELFFAKLFYP

SEQ ID NO: 4859 - protein, 145 aa, Arabidopsis thaliana
  peptide (1)..(145): Ceres Seq. ID no. 12562574
  misc_feature (1)..(145): NCBI GI NO: 15228429 NR Description: unknown protein; protein id: At3g11030.1
  misc_feature (1)..(144): NCBI GI NO: 15226647 NR Description: hypothetical protein; protein id: At2g40320.1
  misc_feature (1)..(144): NCBI GI NO: 28393743 NR Description: unknown protein [Arabidopsis thaliana]
  misc_feature (1)..(145): NCBI GI NO: 28876013 NR Description: unknown protein
  misc_feature (1)..(144): NCBI GI NO: 4588008 NR Description: hypothetical protein [Arabidopsis thaliana]
  misc_feature (1)..(145): NCBI GI NO: 28876024 NR Description: unknown protein
  misc_feature (1)..(139): NCBI GI NO: 11291876 NR Description: hypothetical protein F7A7
  misc_feature (1)..(139): NCBI GI NO: 18413698 NR Description: putative protein; protein id: At5g01620
  misc_feature (1)..(142): NCBI GI NO: 15228789 NR Description: putative protein; protein id: At3g55990.1
  misc_feature (1)..(142): NCBI GI NO: 26452343 NR Description: unknown protein [Arabidopsis thaliana]
MALKTMVKWVKKNMDPLKTRVFFATMSPTHYKGEDWGGEQGKNCYNQTTPIQDMNHWPSDCSKTLMKVIGEELDQRAEFPVTVLNITQLSGYRKDAHTSIYKKQWSPLTKEQLANPASYSDCIHWCLPGLQDTWNELFFAKLFYP

SEQ ID NO: 4860 - DNA, 1400 bp, Arabidopsis thaliana
  misc_feature (1)..(1400): Ceres Seq. ID no. 13576600
aaaattctaaagaacaaaaaaggaaaaacagagcagccatgagagcttctgtttattcattgatcctactcttcttctcgtgtttactacatctatcaaagtctcaaccgttcctcggagtaaactacggcctaaccgccgacaatcttccacctccgtcagcgagtgcaaagctccttcaatccacaactttccaaaaagtccgtctttacggatccgacccggctgtaatcaaggccctagcaaacacggggatcgagatcgtcatcggggcgtctaacggcgatgtacccggtctagcatcggacccgagtttcgcccgaagctgggtcgaaaccaacgtggtaccttattatccagcgagcaagattgttctcattgccgtgggaaatgagatcacatcattcggcgacaacagtctcatgtcgcagcttttgccggcgatgaaaaatgtccaaactgccctcgaggcggcgtctcttggtggcgggaaaatcaaagtctcgacagtacacataatgtcggttctagccgggtcagaccctccttcgaccgcggtatttaaaccggagcatgctgatatattgaagggattgctagagtttaatagtgaaaccgggtcgcctttcgcggttaacccctacccgtttttcgcttaccaagatgaccggagacccgaaacgttggcctattgcttgtttcaggccaatcctggccgtgtcgaccccaacagcaacctcaagtatatgaacatgttcgatgctcaggttgatgcggtgtattcagctttgaactcgatggggttcaaggacgtagagataatggtcgctgagactggatggccatacaagggagacccggaggaggctggtgcaacagttgagaacgctagagcttacaataaaaatctcattgctcatttaaaatctgggtccgggacgccacttatgcccgggagagtgatcgacacatacttgttcgcattgtacgacgagaatctcaagcccgggaaaggttctgaacgagccttcggtttgtttagacctgatctaaccatgacttatgatatcgggctcaccaagactaccaattataaccaaacttccatggctccattgtcaccaacaaggccacgtcttccaccagccgcggccccgacgagacaaacattaccttctcctccgcagatgattcttccttcaccagttactccctccgacaaaaactctgggcaaaccgatgttcacaattccactccgcgctctgcctctctggctcacatatgccgctctctctctatttcggcatcgatgttctttgtctccgttttgtatgcattgatcatattgttgtaaaatctcttcatcgatcttatattatgtctcttactaatttaaact

SEQ ID NO: 4861 - protein, 450 aa, Arabidopsis thaliana
  peptide (1)..(450): Ceres Seq. ID no. 13576601
  misc_feature (38)..(343): Pfam Name: Pfam Description:  Glycosyl hydrolases family 17
  misc_feature (13)..(450): NCBI GI NO: 22327528 NR Description: glycosyl hydrolase family 17
  misc_feature (13)..(343): NCBI GI NO: 10177275 NR Description: beta-1,3-glucanase-like protein
  misc_feature (12)..(366): NCBI GI NO: 30690053 NR Description: glycosyl hydrolase family 17
  misc_feature (21)..(371): NCBI GI NO: 15226720 NR Description: glycosyl hydrolase family 17
  misc_feature (34)..(366): NCBI GI NO: 7447982 NR Description: hypothetical protein T4L20
  misc_feature (13)..(375): NCBI GI NO: 14279169 NR Description: beta-1,3-glucanase-like protein [Olea europaea]
  misc_feature (27)..(362): NCBI GI NO: 31126737 NR Description: putative beta 1,3-glucanase
  misc_feature (18)..(392): NCBI GI NO: 34902328 NR Description: Putative glycosyl hydrolase
  misc_feature (31)..(411): NCBI GI NO: 34395169 NR Description: putative glucan endo-1
  misc_feature (13)..(356): NCBI GI NO: 34908492 NR Description: putative beta-1,3-glucanase
NSKEQKRKNRAAMRASVYSLILLFFSCLLHLSKSQPFLGVNYGLTADNLPPPSASAKLLQSTTFQKVRLYGSDPAVIKALANTGIEIVIGASNGDVPGLASDPSFARSWVETNVVPYYPASKIVLIAVGNEITSFGDNSLMSQLLPAMKNVQTALEAASLGGGKIKVSTVHIMSVLAGSDPPSTAVFKPEHADILKGLLEFNSETGSPFAVNPYPFFAYQDDRRPETLAYCLFQANPGRVDPNSNLKYMNMFDAQVDAVYSALNSMGFKDVEIMVAETGWPYKGDPEEAGATVENARAYNKNLIAHLKSGSGTPLMPGRVIDTYLFALYDENLKPGKGSERAFGLFRPDLTMTYDIGLTKTTNYNQTSMAPLSPTRPRLPPAAAPTRQTLPSPPQMILPSPVTPSDKNSGQTDVHNSTPRSASLAHICRSLSISASMFFVSVLYALIILL

SEQ ID NO: 4862 - protein, 438 aa, Arabidopsis thaliana
  peptide (1)..(438): Ceres Seq. ID no. 13576602
  misc_feature (26)..(331): Pfam Name: Pfam Description:  Glycosyl hydrolases family 17
  misc_feature (1)..(438): NCBI GI NO: 22327528 NR Description: glycosyl hydrolase family 17
  misc_feature (1)..(331): NCBI GI NO: 10177275 NR Description: beta-1,3-glucanase-like protein
  misc_feature (1)..(354): NCBI GI NO: 30690053 NR Description: glycosyl hydrolase family 17
  misc_feature (9)..(359): NCBI GI NO: 15226720 NR Description: glycosyl hydrolase family 17
  misc_feature (22)..(354): NCBI GI NO: 7447982 NR Description: hypothetical protein T4L20
  misc_feature (1)..(363): NCBI GI NO: 14279169 NR Description: beta-1,3-glucanase-like protein [Olea europaea]
  misc_feature (15)..(350): NCBI GI NO: 31126737 NR Description: putative beta 1,3-glucanase
  misc_feature (6)..(380): NCBI GI NO: 34902328 NR Description: Putative glycosyl hydrolase
  misc_feature (19)..(399): NCBI GI NO: 34395169 NR Description: putative glucan endo-1
  misc_feature (1)..(344): NCBI GI NO: 34908492 NR Description: putative beta-1,3-glucanase
MRASVYSLILLFFSCLLHLSKSQPFLGVNYGLTADNLPPPSASAKLLQSTTFQKVRLYGSDPAVIKALANTGIEIVIGASNGDVPGLASDPSFARSWVETNVVPYYPASKIVLIAVGNEITSFGDNSLMSQLLPAMKNVQTALEAASLGGGKIKVSTVHIMSVLAGSDPPSTAVFKPEHADILKGLLEFNSETGSPFAVNPYPFFAYQDDRRPETLAYCLFQANPGRVDPNSNLKYMNMFDAQVDAVYSALNSMGFKDVEIMVAETGWPYKGDPEEAGATVENARAYNKNLIAHLKSGSGTPLMPGRVIDTYLFALYDENLKPGKGSERAFGLFRPDLTMTYDIGLTKTTNYNQTSMAPLSPTRPRLPPAAAPTRQTLPSPPQMILPSPVTPSDKNSGQTDVHNSTPRSASLAHICRSLSISASMFFVSVLYALIILL

SEQ ID NO: 4863 - protein, 310 aa, Arabidopsis thaliana
  peptide (1)..(310): Ceres Seq. ID no. 13576603
  misc_feature (1)..(203): Pfam Name: Pfam Description:  Glycosyl hydrolases family 17
  misc_feature (1)..(310): NCBI GI NO: 22327528 NR Description: glycosyl hydrolase family 17
  misc_feature (1)..(203): NCBI GI NO: 10177275 NR Description: beta-1,3-glucanase-like protein
  misc_feature (1)..(226): NCBI GI NO: 30690053 NR Description: glycosyl hydrolase family 17
  misc_feature (1)..(231): NCBI GI NO: 15226720 NR Description: glycosyl hydrolase family 17
  misc_feature (1)..(226): NCBI GI NO: 7447982 NR Description: hypothetical protein T4L20
  misc_feature (1)..(235): NCBI GI NO: 14279169 NR Description: beta-1,3-glucanase-like protein [Olea europaea]
  misc_feature (1)..(222): NCBI GI NO: 31126737 NR Description: putative beta 1,3-glucanase
  misc_feature (1)..(252): NCBI GI NO: 34902328 NR Description: Putative glycosyl hydrolase
  misc_feature (1)..(271): NCBI GI NO: 34395169 NR Description: putative glucan endo-1
  misc_feature (1)..(216): NCBI GI NO: 34908492 NR Description: putative beta-1,3-glucanase
MSQLLPAMKNVQTALEAASLGGGKIKVSTVHIMSVLAGSDPPSTAVFKPEHADILKGLLEFNSETGSPFAVNPYPFFAYQDDRRPETLAYCLFQANPGRVDPNSNLKYMNMFDAQVDAVYSALNSMGFKDVEIMVAETGWPYKGDPEEAGATVENARAYNKNLIAHLKSGSGTPLMPGRVIDTYLFALYDENLKPGKGSERAFGLFRPDLTMTYDIGLTKTTNYNQTSMAPLSPTRPRLPPAAAPTRQTLPSPPQMILPSPVTPSDKNSGQTDVHNSTPRSASLAHICRSLSISASMFFVSVLYALIILL

SEQ ID NO: 4864 - DNA, 2082 bp, Arabidopsis thaliana
  misc_feature (1)..(2082): Ceres Seq. ID no. 12396520
aagcacttcttctccgccttcgtaagttccgccgaaaagaaccaaatccttcactactctgtctcagctttcgacctctctcttctcattcctttgcaacttctcacttctcgaattccttctcttcaaaatcagaaatggctcaagtggttgctaccaggtcaattcaaggctcgatgttatctcccaacggtggatctgtgtctacaagatccgagaagctattgaaaccagcgagttttgcagtgaaggttcttggcaacgaagcaaagagaagtggaagagtctctgtaagaagcagaagagtggttgatactactgtgagatccgctcgtgttgagactgaagtcattcctgtttctcctgaagatgtgcctaacagagaggagcagcttgagaggttgttggaaatgcagcagtttggtgatacatcggtagggatgtggtcgaagccgacagtgaggaggaagacaaagattgtttgcaccgttggtccgtcgaccaacacacgagaaatgatatggaaattggctgaagctgggatgaatgttgctaggatgaatatgtctcatggagatcatgcttcacataagaaggttattgatttggttaaagaatacaatgcacaaactaaagacaacactattgctatcatgcttgacaccaagggtccggaagttaggagtggagatttacctcagccaattatgttagatcctggtcaagagtttacctttacaattgagagaggagtcagcacaccaagttgtgtcagtgttaactatgatgatttcgttaatgacgtggaagcgggtgacatgcttcttgttgatggtggtatgatgtcgtttatggtgaagtcaaagaccaaagactctgtcaaatgtgaagttgttgatggtggagaacttaagtcaaggagacacctgaatgtccgaggaaagagtgcaactttaccttcaatcactgagaaggactgggaggatattaaatttggagtggagaacaaagttgacttttatgcagtttcctttgtcaaagatgctcaagttgtacacgagttgaagaaataccttcaaaatagtggtgctgatatacacgtgatagtgaaaattgagagtgcagactccatacctaacttgcactccattatcacagcaccagatggggcaatggttgcaagaggtgatcttggtgcagagcttccaattgaagaagtccccattcttcaggaggagatcattaacctgtgccgtagtatgggaaaagctgttattgttgcgactaacatgcttgagagtatgatagttcatccaactccaacccgggcagaggtctcagacattgctatcgctgttagagaaggtgctgatgcggtaatgctttcaggagaaactgctcacggaaagttcccattgaaagctgctggagtgatgcacactgttgcattgcgaacagaagcaaccattactagcggtgaaatgccacctaatcttggtcaagccttcaagaaccatatgagtgagatgtttgcataccatgcaaccatgatgtcaaacacacttggaacttcaactgttgtcttcaccagaaccggtttcatggccatattgttaagtcactatcgtccttccggcacaatctatgccttcacaaatgagaaaaaaatacaacaaagattagctttgtatcaaggtgtatgccccatatatatggagttcacagatgatgcagaagaaacttttgctaatgctttggctacattactgaaacaaggaatggtgaagaagggagaggaaatagcaatcgtacagagcggtacacagccaatctggcgatctcaatcgacacataacatccaagtccgcaaggtttaaagcttcttttaagatgggatgtctttaatatgtagaacctcgtttttggttataattttcgttgcatgtctctcttctcttgtactattcacacttgttgtttgctgtatcttcttcttcagtttgctttgctacgattgtggtttttggagacattatagctcattaactgtttgtgagaccaaatgtgtcagaatccgctatt

SEQ ID NO: 4865 - protein, 624 aa, Arabidopsis thaliana
  peptide (1)..(624): Ceres Seq. ID no. 12396521
  misc_feature (507)..(623): Pfam Name: Pfam Description:  Pyruvate kinase, alpha/beta domain
  misc_feature (46)..(624): NCBI GI NO: 15081612 NR Description: AT5g52920/MXC20_15 [Arabidopsis thaliana]
  misc_feature (46)..(624): NCBI GI NO: 15237303 NR Description: pyruvate kinase; protein id: At5g52920
  misc_feature (46)..(620): NCBI GI NO: 34912028 NR Description: putative pyruvate kinase
  misc_feature (154)..(624): NCBI GI NO: 37537030 NR Description: putative pyruvate kinase
  misc_feature (155)..(624): NCBI GI NO: 2497542 NR Description: Pyruvate kinase isozyme G, chloroplast precursor
  misc_feature (154)..(624): NCBI GI NO: 18398434 NR Description: pyruvate kinase, plastid isozyme, putative
  misc_feature (154)..(624): NCBI GI NO: 25287763 NR Description: hypothetical protein F5D14
  misc_feature (207)..(624): NCBI GI NO: 2497540 NR Description: PYRUVATE KINASE ISOZYME G, CHLOROPLAST
  misc_feature (147)..(624): NCBI GI NO: 24217414 NR Description: pyruvate kinase
  misc_feature (155)..(610): NCBI GI NO: 18403597 NR Description: pyruvate kinase, putative; protein id: At3g22960
ALLLRLRKFRRKEPNPSLLCLSFRPLSSHSFATSHFSNSFSSKSEMAQVVATRSIQGSMLSPNGGSVSTRSEKLLKPASFAVKVLGNEAKRSGRVSVRSRRVVDTTVRSARVETEVIPVSPEDVPNREEQLERLLEMQQFGDTSVGMWSKPTVRRKTKIVCTVGPSTNTREMIWKLAEAGMNVARMNMSHGDHASHKKVIDLVKEYNAQTKDNTIAIMLDTKGPEVRSGDLPQPIMLDPGQEFTFTIERGVSTPSCVSVNYDDFVNDVEAGDMLLVDGGMMSFMVKSKTKDSVKCEVVDGGELKSRRHLNVRGKSATLPSITEKDWEDIKFGVENKVDFYAVSFVKDAQVVHELKKYLQNSGADIHVIVKIESADSIPNLHSIITAPDGAMVARGDLGAELPIEEVPILQEEIINLCRSMGKAVIVATNMLESMIVHPTPTRAEVSDIAIAVREGADAVMLSGETAHGKFPLKAAGVMHTVALRTEATITSGEMPPNLGQAFKNHMSEMFAYHATMMSNTLGTSTVVFTRTGFMAILLSHYRPSGTIYAFTNEKKIQQRLALYQGVCPIYMEFTDDAEETFANALATLLKQGMVKKGEEIAIVQSGTQPIWRSQSTHNIQVRKV

SEQ ID NO: 4866 - protein, 579 aa, Arabidopsis thaliana
  peptide (1)..(579): Ceres Seq. ID no. 12396522
  misc_feature (462)..(578): Pfam Name: Pfam Description:  Pyruvate kinase, alpha/beta domain
  misc_feature (1)..(579): NCBI GI NO: 15081612 NR Description: AT5g52920/MXC20_15 [Arabidopsis thaliana]
  misc_feature (1)..(579): NCBI GI NO: 15237303 NR Description: pyruvate kinase; protein id: At5g52920
  misc_feature (1)..(575): NCBI GI NO: 34912028 NR Description: putative pyruvate kinase
  misc_feature (109)..(579): NCBI GI NO: 37537030 NR Description: putative pyruvate kinase
  misc_feature (110)..(579): NCBI GI NO: 2497542 NR Description: Pyruvate kinase isozyme G, chloroplast precursor
  misc_feature (109)..(579): NCBI GI NO: 18398434 NR Description: pyruvate kinase, plastid isozyme, putative
  misc_feature (109)..(579): NCBI GI NO: 25287763 NR Description: hypothetical protein F5D14
  misc_feature (162)..(579): NCBI GI NO: 2497540 NR Description: PYRUVATE KINASE ISOZYME G, CHLOROPLAST
  misc_feature (102)..(579): NCBI GI NO: 24217414 NR Description: pyruvate kinase
  misc_feature (110)..(565): NCBI GI NO: 18403597 NR Description: pyruvate kinase, putative; protein id: At3g22960
MAQVVATRSIQGSMLSPNGGSVSTRSEKLLKPASFAVKVLGNEAKRSGRVSVRSRRVVDTTVRSARVETEVIPVSPEDVPNREEQLERLLEMQQFGDTSVGMWSKPTVRRKTKIVCTVGPSTNTREMIWKLAEAGMNVARMNMSHGDHASHKKVIDLVKEYNAQTKDNTIAIMLDTKGPEVRSGDLPQPIMLDPGQEFTFTIERGVSTPSCVSVNYDDFVNDVEAGDMLLVDGGMMSFMVKSKTKDSVKCEVVDGGELKSRRHLNVRGKSATLPSITEKDWEDIKFGVENKVDFYAVSFVKDAQVVHELKKYLQNSGADIHVIVKIESADSIPNLHSIITAPDGAMVARGDLGAELPIEEVPILQEEIINLCRSMGKAVIVATNMLESMIVHPTPTRAEVSDIAIAVREGADAVMLSGETAHGKFPLKAAGVMHTVALRTEATITSGEMPPNLGQAFKNHMSEMFAYHATMMSNTLGTSTVVFTRTGFMAILLSHYRPSGTIYAFTNEKKIQQRLALYQGVCPIYMEFTDDAEETFANALATLLKQGMVKKGEEIAIVQSGTQPIWRSQSTHNIQVRKV

SEQ ID NO: 4867 - protein, 566 aa, Arabidopsis thaliana
  peptide (1)..(566): Ceres Seq. ID no. 12396523
  misc_feature (449)..(565): Pfam Name: Pfam Description:  Pyruvate kinase, alpha/beta domain
  misc_feature (1)..(566): NCBI GI NO: 15081612 NR Description: AT5g52920/MXC20_15 [Arabidopsis thaliana]
  misc_feature (1)..(566): NCBI GI NO: 15237303 NR Description: pyruvate kinase; protein id: At5g52920
  misc_feature (1)..(562): NCBI GI NO: 34912028 NR Description: putative pyruvate kinase
  misc_feature (96)..(566): NCBI GI NO: 37537030 NR Description: putative pyruvate kinase
  misc_feature (97)..(566): NCBI GI NO: 2497542 NR Description: Pyruvate kinase isozyme G, chloroplast precursor
  misc_feature (96)..(566): NCBI GI NO: 18398434 NR Description: pyruvate kinase, plastid isozyme, putative
  misc_feature (96)..(566): NCBI GI NO: 25287763 NR Description: hypothetical protein F5D14
  misc_feature (149)..(566): NCBI GI NO: 2497540 NR Description: PYRUVATE KINASE ISOZYME G, CHLOROPLAST
  misc_feature (89)..(566): NCBI GI NO: 24217414 NR Description: pyruvate kinase
  misc_feature (97)..(552): NCBI GI NO: 18403597 NR Description: pyruvate kinase, putative; protein id: At3g22960
MLSPNGGSVSTRSEKLLKPASFAVKVLGNEAKRSGRVSVRSRRVVDTTVRSARVETEVIPVSPEDVPNREEQLERLLEMQQFGDTSVGMWSKPTVRRKTKIVCTVGPSTNTREMIWKLAEAGMNVARMNMSHGDHASHKKVIDLVKEYNAQTKDNTIAIMLDTKGPEVRSGDLPQPIMLDPGQEFTFTIERGVSTPSCVSVNYDDFVNDVEAGDMLLVDGGMMSFMVKSKTKDSVKCEVVDGGELKSRRHLNVRGKSATLPSITEKDWEDIKFGVENKVDFYAVSFVKDAQVVHELKKYLQNSGADIHVIVKIESADSIPNLHSIITAPDGAMVARGDLGAELPIEEVPILQEEIINLCRSMGKAVIVATNMLESMIVHPTPTRAEVSDIAIAVREGADAVMLSGETAHGKFPLKAAGVMHTVALRTEATITSGEMPPNLGQAFKNHMSEMFAYHATMMSNTLGTSTVVFTRTGFMAILLSHYRPSGTIYAFTNEKKIQQRLALYQGVCPIYMEFTDDAEETFANALATLLKQGMVKKGEEIAIVQSGTQPIWRSQSTHNIQVRKV

SEQ ID NO: 4868 - DNA, 692 bp, Arabidopsis thaliana
  misc_feature (1)..(692): Ceres Seq. ID no. 12562575
  misc_feature (123)..(123): n is a, c, t, g, unknown, or other
atcacttacttaacatactaagagagttattagatcttgaaaaacatggcttccaaggctttgattctgttgggtctcttcgcaattcttctggtggtctccgaagtttctgccgcaaggatncgggcatggtgaagccagagagtgaggaaactgtgcaacctgaaggttatcacggaggacatggtggtcacggagggggaggccactacggaggaggaggccacgggcatggaggacacaacggaggagggggccacggacttgacggatacggaggaggacatggaggacactacggaggaggaggccacggacttgacggatacggaggaggtggaggacactatggaggaggtggaggacactacggaggaggtggaggacactacggaggaggtggaggacactacggaggaggtggtggaggacacggaggtggaggacactacggaggtggtggaggaggatacggaggtggaggaggacaccacggaggaggaggccacgggctaaacgaacctgttcagactaagccgggtgtttaaaactatataatatcttcactaccatgcatgattgcatatatatatatacgcttatgtattatctatatgcctataaataaaccatggtgagtttgtaacgcagtgccttcagaaatgttcggaataaatttccataatattagt

SEQ ID NO: 4869 - protein, 181 aa, Arabidopsis thaliana
  peptide (1)..(181): Ceres Seq. ID no. 12562576
  misc_feature (46)..(180): Pfam Name: LMP1 Pfam Description: Herpesvirus latent membrane protein 1
  misc_feature (39)..(181): NCBI GI NO: 30678191 NR Description: glycine-rich protein [Arabidopsis thaliana]
  misc_feature (39)..(145): NCBI GI NO: 15224547 NR Description: putative glycine-rich protein
  misc_feature (39)..(143): NCBI GI NO: 15224540 NR Description: putative glycine-rich protein
  misc_feature (39)..(143): NCBI GI NO: 21536606 NR Description: putative glycine-rich protein
  misc_feature (70)..(181): NCBI GI NO: 15224540 NR Description: putative glycine-rich protein
  misc_feature (70)..(181): NCBI GI NO: 21536606 NR Description: putative glycine-rich protein
  misc_feature (73)..(181): NCBI GI NO: 15224547 NR Description: putative glycine-rich protein
  misc_feature (68)..(149): NCBI GI NO: 15224547 NR Description: putative glycine-rich protein
  misc_feature (39)..(136): NCBI GI NO: 9957568 NR Description: antimicrobial peptide shep-GRP
  misc_feature (89)..(181): NCBI GI NO: 9957568 NR Description: antimicrobial peptide shep-GRP
  misc_feature (41)..(41): Xaa is any aa, unknown or other
HLLNILRELLDLEKHGFQGFDSVGSLRNSSGGLRSFCRKDXGMVKPESEETVQPEGYHGGHGGHGGGGHYGGGGHGHGGHNGGGGHGLDGYGGGHGGHYGGGGHGLDGYGGGGGHYGGGGGHYGGGGGHYGGGGGHYGGGGGGHGGGGHYGGGGGGYGGGGGHHGGGGHGLNEPVQTKPGV

SEQ ID NO: 4870 - protein, 139 aa, Arabidopsis thaliana
  peptide (1)..(139): Ceres Seq. ID no. 12562577
  misc_feature (4)..(138): Pfam Name: LMP1 Pfam Description: Herpesvirus latent membrane protein 1
  misc_feature (1)..(139): NCBI GI NO: 30678191 NR Description: glycine-rich protein [Arabidopsis thaliana]
  misc_feature (1)..(103): NCBI GI NO: 15224547 NR Description: putative glycine-rich protein
  misc_feature (1)..(101): NCBI GI NO: 15224540 NR Description: putative glycine-rich protein
  misc_feature (1)..(101): NCBI GI NO: 21536606 NR Description: putative glycine-rich protein
  misc_feature (28)..(139): NCBI GI NO: 15224540 NR Description: putative glycine-rich protein
  misc_feature (28)..(139): NCBI GI NO: 21536606 NR Description: putative glycine-rich protein
  misc_feature (31)..(139): NCBI GI NO: 15224547 NR Description: putative glycine-rich protein
  misc_feature (26)..(107): NCBI GI NO: 15224547 NR Description: putative glycine-rich protein
  misc_feature (1)..(94): NCBI GI NO: 9957568 NR Description: antimicrobial peptide shep-GRP
  misc_feature (47)..(139): NCBI GI NO: 9957568 NR Description: antimicrobial peptide shep-GRP
MVKPESEETVQPEGYHGGHGGHGGGGHYGGGGHGHGGHNGGGGHGLDGYGGGHGGHYGGGGHGLDGYGGGGGHYGGGGGHYGGGGGHYGGGGGHYGGGGGGHGGGGHYGGGGGGYGGGGGHHGGGGHGLNEPVQTKPGV

SEQ ID NO: 4871 - protein, 110 aa, Arabidopsis thaliana
  peptide (1)..(110): Ceres Seq. ID no. 12562578
  misc_feature (31)..(108): Pfam Name: Pfam Description:  Prothymosin/parathymosin family
MVVTEGEATTEEEATGMEDTTEEGATDLTDTEEDMEDTTEEEATDLTDTEEVEDTMEEVEDTTEEVEDTTEEVEDTTEEVVEDTEVEDTTEVVEEDTEVEEDTTEEEATG

SEQ ID NO: 4872 - DNA, 1273 bp, Arabidopsis thaliana
  misc_feature (1)..(1273): Ceres Seq. ID no. 13500210
ggagatctttaatctcagaatacaaaaaagaaaatcaaagaagatagttttgtgattgttttctataaaaagtgcagatattttctttgtcctagagaaagaggtgataggaaaaatgggtctccaagagcttgacccgttagcccaattgagcttaccgccgggttttcggttttatccgactgacgaagagctgatggttgaatatctctgtagaaaagccgccggtcacgacttctctctccagctcatagctgaaatcgatctctacaagtttgatccatgggttttaccaagtaaggcgttattcggtgaaaaagaatggtattttttcagcccgagggataggaagtatccaaacgggtcaagacctaatcgggttgccgggtcgggttattggtaagccaccggtacggataaagttatctcgacggagggaagaagagttggtatcaagaaagctttggtgttttacattggaaaagctccaaaaggaaccaaaaccaattggattatgcatgagtaccgtctcatcgaaccctctcgtcgaaatggaagcaccaagcttgatgattgggttttatgtcgaatatacaaaaagcaaacaagcgcacaaaaacaagcttacaataatctaatgacgagtggtcgtgaatacagcaacaatggttcgtcgacatcttcttcgtctcatcaatacgacgacgttctcgagtcgttgcatgagattgacaacagaagtttggggtttgccgccggttcatcaaacgcgctgcctcatagtcatagaccggttttaaccaatcataaaaccgggtttcagggtttagccagggagccaagttttgattgggcgaatttgattggacagaactcggtcccggaactcggactgagtcataacgttccgagtattcgttacggtgacggtggaacgcagcaacaaactgaggggattcctcggtttaataataactcggacgtctcggctaatcagggttttagtgttgacccggttaacggatttgggtactcgggtcaacaatctagtgggttcgggtttatttgattgtgtaatggtaacgtaataagaaaaacatatttttattttttgtccgtgtcagattagttaattaatatagcgtagaattcgaactctagggttagatttaggttctacgacttgtattgtatattcgtcgtcatttgtcctgacatttacatttttgtaaacttttatagctggaacttttgtattgatcaattatttatt

SEQ ID NO: 4873 - protein, 184 aa, Arabidopsis thaliana
  peptide (1)..(184): Ceres Seq. ID no. 13500211
  misc_feature (1)..(184): NCBI GI NO: 15232604 NR Description: No apical meristem (NAM) protein family
  misc_feature (1)..(184): NCBI GI NO: 21536744 NR Description: putative jasmonic acid regulatory protein
  misc_feature (1)..(184): NCBI GI NO: 15219112 NR Description: No apical meristem (NAM) protein family
  misc_feature (1)..(154): NCBI GI NO: 6175246 NR Description: jasmonic acid 2 [Lycopersicon esculentum]
  misc_feature (1)..(164): NCBI GI NO: 18416983 NR Description: No apical meristem (NAM) protein family
  misc_feature (1)..(164): NCBI GI NO: 7486254 NR Description: hypothetical protein F27G19
  misc_feature (1)..(164): NCBI GI NO: 23397295 NR Description: unknown protein [Arabidopsis thaliana]
  misc_feature (1)..(62): NCBI GI NO: 40786563 NR Description: putative NAC-domain protein
  misc_feature (1)..(69): NCBI GI NO: 21105748 NR Description: nam-like protein 10 [Petunia x hybrida]
  misc_feature (1)..(82): NCBI GI NO: 34909234 NR Description: development regulation gene OsNAC4
MHEYRLIEPSRRNGSTKLDDWVLCRIYKKQTSAQKQAYNNLMTSGREYSNNGSSTSSSSHQYDDVLESLHEIDNRSLGFAAGSSNALPHSHRPVLTNHKTGFQGLAREPSFDWANLIGQNSVPELGLSHNVPSIRYGDGGTQQQTEGIPRFNNNSDVSANQGFSVDPVNGFGYSGQQSSGFGFI

SEQ ID NO: 4874 - protein, 143 aa, Arabidopsis thaliana
  peptide (1)..(143): Ceres Seq. ID no. 13500212
  misc_feature (1)..(143): NCBI GI NO: 15232604 NR Description: No apical meristem (NAM) protein family
  misc_feature (1)..(143): NCBI GI NO: 21536744 NR Description: putative jasmonic acid regulatory protein
  misc_feature (1)..(143): NCBI GI NO: 15219112 NR Description: No apical meristem (NAM) protein family
  misc_feature (1)..(113): NCBI GI NO: 6175246 NR Description: jasmonic acid 2 [Lycopersicon esculentum]
  misc_feature (1)..(123): NCBI GI NO: 18416983 NR Description: No apical meristem (NAM) protein family
  misc_feature (1)..(123): NCBI GI NO: 7486254 NR Description: hypothetical protein F27G19
  misc_feature (1)..(123): NCBI GI NO: 23397295 NR Description: unknown protein [Arabidopsis thaliana]
  misc_feature (1)..(21): NCBI GI NO: 40786563 NR Description: putative NAC-domain protein
  misc_feature (1)..(28): NCBI GI NO: 21105748 NR Description: nam-like protein 10 [Petunia x hybrida]
  misc_feature (1)..(41): NCBI GI NO: 34909234 NR Description: development regulation gene OsNAC4
MTSGREYSNNGSSTSSSSHQYDDVLESLHEIDNRSLGFAAGSSNALPHSHRPVLTNHKTGFQGLAREPSFDWANLIGQNSVPELGLSHNVPSIRYGDGGTQQQTEGIPRFNNNSDVSANQGFSVDPVNGFGYSGQQSSGFGFI

SEQ ID NO: 4875 - protein, 95 aa, Arabidopsis thaliana
  peptide (1)..(95): Ceres Seq. ID no. 13500213
  misc_feature (14)..(95): Pfam Name: NAM Pfam Description: No apical meristem
  misc_feature (1)..(95): NCBI GI NO: 15232604 NR Description: No apical meristem (NAM) protein family
  misc_feature (1)..(95): NCBI GI NO: 21536744 NR Description: putative jasmonic acid regulatory protein
  misc_feature (1)..(95): NCBI GI NO: 15219112 NR Description: No apical meristem (NAM) protein family
  misc_feature (1)..(95): NCBI GI NO: 6175246 NR Description: jasmonic acid 2 [Lycopersicon esculentum]
  misc_feature (1)..(95): NCBI GI NO: 18416983 NR Description: No apical meristem (NAM) protein family
  misc_feature (62)..(95): NCBI GI NO: 7486254 NR Description: hypothetical protein F27G19
  misc_feature (1)..(62): NCBI GI NO: 7486254 NR Description: hypothetical protein F27G19
  misc_feature (7)..(95): NCBI GI NO: 23397295 NR Description: unknown protein [Arabidopsis thaliana]
  misc_feature (1)..(95): NCBI GI NO: 40786563 NR Description: putative NAC-domain protein
  misc_feature (10)..(95): NCBI GI NO: 21105748 NR Description: nam-like protein 10 [Petunia x hybrida]
MGLQELDPLAQLSLPPGFRFYPTDEELMVEYLCRKAAGHDFSLQLIAEIDLYKFDPWVLPSKALFGEKEWYFFSPRDRKYPNGSRPNRVAGSGYW

SEQ ID NO: 4876 - DNA, 611 bp, Arabidopsis thaliana
  misc_feature (1)..(611): Ceres Seq. ID no. 12338945
acaacatgaacattagggtgagaagagatcgagagaagaatagtttgatcatcttgtgagaaaaataatggctgcttcagtgatgctatcttcggtgacattgaaaccagctggtttcacggtggagaagacggcggctagaggattaccgtcgctcacaagagctcgtccctccttcaaaattgtcgccagtggcgtcaagaagatcaagaccgacaagcccttcggaattaacggcagcatggacttgagggacggcgtcgacgcctccggcagaaagggcaagggatacggtgtttacaagtacgtcgacaagtatggagctaacgtcgatggatacagtcctatttacaacgagaacgagtggtcagcgagtggtgacgtgtacaagggaggagtcaccggattggcaatttgggcggtaactctcgccggaattcttgccggaggtgctcttcttgtgtacaacacaagtgctttggctcagtaaatcttaaagttgttagcgcatgtgtaatcatgtttctataaatgtttctgtgttgttctctttctctctaatgttgtaaaactcagacatactttgaatttataagacttctagtgtttgt

SEQ ID NO: 4877 - protein, 140 aa, Arabidopsis thaliana
  peptide (1)..(140): Ceres Seq. ID no. 12338947
  misc_feature (42)..(140): Pfam Name: Pfam Description:  Photosystem II 10 kDa polypeptide PsbR
  misc_feature (1)..(140): NCBI GI NO: 15219268 NR Description: photosystem II polypeptide, putative
  misc_feature (1)..(140): NCBI GI NO: 1346871 NR Description: Photosystem II 10 kDa polypeptide
  misc_feature (4)..(140): NCBI GI NO: 28207611 NR Description: photosystem II 10kDa polypeptide
  misc_feature (3)..(140): NCBI GI NO: 131399 NR Description: Photosystem II 10 kDa polypeptide
  misc_feature (3)..(140): NCBI GI NO: 3914471 NR Description: Photosystem II 10 kDa polypeptide
  misc_feature (3)..(140): NCBI GI NO: 21491 NR Description: ST-LS1 protein (AA 1-138) [Solanum tuberosum]
  misc_feature (1)..(140): NCBI GI NO: 3914472 NR Description: Photosystem II 10 kDa polypeptide
  misc_feature (10)..(140): NCBI GI NO: 1418984 NR Description: photosystem II 10 kD polypeptide
  misc_feature (1)..(140): NCBI GI NO: 131400 NR Description: Photosystem II 10 kDa polypeptide
  misc_feature (1)..(140): NCBI GI NO: 33694227 NR Description: 10 kDa photosystem II polypeptide
MAASVMLSSVTLKPAGFTVEKTAARGLPSLTRARPSFKIVASGVKKIKTDKPFGINGSMDLRDGVDASGRKGKGYGVYKYVDKYGANVDGYSPIYNENEWSASGDVYKGGVTGLAIWAVTLAGILAGGALLVYNTSALAQ

SEQ ID NO: 4878 - protein, 135 aa, Arabidopsis thaliana
  peptide (1)..(135): Ceres Seq. ID no. 12338948
  misc_feature (37)..(135): Pfam Name: Pfam Description:  Photosystem II 10 kDa polypeptide PsbR
  misc_feature (1)..(135): NCBI GI NO: 15219268 NR Description: photosystem II polypeptide, putative
  misc_feature (1)..(135): NCBI GI NO: 1346871 NR Description: Photosystem II 10 kDa polypeptide
  misc_feature (1)..(135): NCBI GI NO: 28207611 NR Description: photosystem II 10kDa polypeptide
  misc_feature (1)..(135): NCBI GI NO: 131399 NR Description: Photosystem II 10 kDa polypeptide
  misc_feature (1)..(135): NCBI GI NO: 3914471 NR Description: Photosystem II 10 kDa polypeptide
  misc_feature (1)..(135): NCBI GI NO: 21491 NR Description: ST-LS1 protein (AA 1-138) [Solanum tuberosum]
  misc_feature (1)..(135): NCBI GI NO: 3914472 NR Description: Photosystem II 10 kDa polypeptide
  misc_feature (5)..(135): NCBI GI NO: 1418984 NR Description: photosystem II 10 kD polypeptide
  misc_feature (1)..(135): NCBI GI NO: 131400 NR Description: Photosystem II 10 kDa polypeptide
  misc_feature (1)..(135): NCBI GI NO: 33694227 NR Description: 10 kDa photosystem II polypeptide
MLSSVTLKPAGFTVEKTAARGLPSLTRARPSFKIVASGVKKIKTDKPFGINGSMDLRDGVDASGRKGKGYGVYKYVDKYGANVDGYSPIYNENEWSASGDVYKGGVTGLAIWAVTLAGILAGGALLVYNTSALAQ

SEQ ID NO: 4879 - protein, 82 aa, Arabidopsis thaliana
  peptide (1)..(82): Ceres Seq. ID no. 12338949
  misc_feature (1)..(82): Pfam Name: Pfam Description:  Photosystem II 10 kDa polypeptide PsbR
  misc_feature (1)..(82): NCBI GI NO: 15219268 NR Description: photosystem II polypeptide, putative
  misc_feature (1)..(82): NCBI GI NO: 1346871 NR Description: Photosystem II 10 kDa polypeptide
  misc_feature (1)..(82): NCBI GI NO: 28207611 NR Description: photosystem II 10kDa polypeptide
  misc_feature (1)..(82): NCBI GI NO: 131399 NR Description: Photosystem II 10 kDa polypeptide
  misc_feature (1)..(82): NCBI GI NO: 3914471 NR Description: Photosystem II 10 kDa polypeptide
  misc_feature (1)..(82): NCBI GI NO: 21491 NR Description: ST-LS1 protein (AA 1-138) [Solanum tuberosum]
  misc_feature (1)..(82): NCBI GI NO: 3914472 NR Description: Photosystem II 10 kDa polypeptide
  misc_feature (1)..(82): NCBI GI NO: 1418984 NR Description: photosystem II 10 kD polypeptide
  misc_feature (1)..(82): NCBI GI NO: 131400 NR Description: Photosystem II 10 kDa polypeptide
  misc_feature (1)..(82): NCBI GI NO: 33694227 NR Description: 10 kDa photosystem II polypeptide
MDLRDGVDASGRKGKGYGVYKYVDKYGANVDGYSPIYNENEWSASGDVYKGGVTGLAIWAVTLAGILAGGALLVYNTSALAQ

SEQ ID NO: 4880 - DNA, 1505 bp, Arabidopsis thaliana
  misc_feature (1)..(1505): Ceres Seq. ID no. 12396743
aaaatttgctccaatgcctgtacttttctcctctcgttctctcatactctccattattgtccccttacttatatctatcgctctctacaaactcgacacattcgaccccgctattgttccttccgatgcattcacatcctctgctacttcactcccgccgcttataaacgacgaatttctcaccggagctgagtttatcggtgtcggtcttctcaatatacccgaagatatcgcctaccataaggaatctaatctcatctacactggttgtgttgatggatgggtgaaacgagtcaaggtcgccgactcggttaatgactcagtcgttgaggattgggtcaatactggtggtagaccgctcggaatcgcgttcggaatccacggcgaagtcattgtcgcagagtacacaaggttggggttttgaaatcgaattttgaaaaatcacaatcttaggtttgactttgttgttatgtatagggactgttgaatataagcggtgacggaaagaagacggaattgttgacggacgaagcggacggtgtgaagtttaagctgacggatgcagttaccgttgcagataacggcgttttgtatttcacagatgcttcttacaagtacactctcaatcaattgagtttagacatgttagaagggaaaccttttggacgactcttgagctttgatcccaccacacgtgttacaaaagtacttctcaaagacctctacttcgctaatggcatcaccatctctcctgatcaaactcatctcatcttctgtgaaactccaatgtatgtgcattggatcagttaaattttttataaatttccgactcagtttgatttggcaataagttaatttatctatatctgttatatactactttaggaaaaggtgcagcaagtattacatcagtgaggagcgtgtggaggtattcactcaaagcttaccaggttatccagataacattcgttacgatggagatggacattactggattgcattgccttcggtaacgttacaaattgaatttcttttcttttctttgaggtcatgttattaactcattacatgctaataaaggatcatctttgtgttgtggttgtgcaaacagggagtcacgacattgtggaatatctcgttgaaataccctttcttgaggaaactcacagcaatggtggctaagtacggcgtggatcttatgtttatggagaatgcaggcgttttacaggtggatttggatggaaatcccatcgcgtactaccatgatccaaaactctctcacatagccacatgtgacaagattgggaaatatctctattgtggaagtctctcgcaatcacatatcctccgacttgatctcctgaaatatcctgcacagaacaagaaactttgaaatattatgttttcacaaataaggaaagtttccattttaggaaggagcattcactgtcacaaaaatgtaaactcatttcctgagaatgaatgatgattgtatctcttttttt

SEQ ID NO: 4881 - protein, 140 aa, Arabidopsis thaliana
  peptide (1)..(140): Ceres Seq. ID no. 12396744
  misc_feature (12)..(134): Pfam Name: Pfam Description:  Strictosidine synthase
  misc_feature (5)..(134): NCBI GI NO: 15230490 NR Description: strictosidine synthase-related
  misc_feature (5)..(134): NCBI GI NO: 18409339 NR Description: strictosidine synthase-related
  misc_feature (5)..(134): NCBI GI NO: 15230488 NR Description: strictosidine synthase-related
  misc_feature (5)..(134): NCBI GI NO: 11358518 NR Description: mucin-like protein - Arabidopsis thaliana
  misc_feature (5)..(134): NCBI GI NO: 15230477 NR Description: strictosidine synthase-related
  misc_feature (10)..(134): NCBI GI NO: 37536558 NR Description: mucin-like protein
  misc_feature (14)..(134): NCBI GI NO: 23237921 NR Description: contains ESTs D41667
KFAPMPVLFSSRSLILSIIVPLLISIALYKLDTFDPAIVPSDAFTSSATSLPPLINDEFLTGAEFIGVGLLNIPEDIAYHKESNLIYTGCVDGWVKRVKVADSVNDSVVEDWVNTGGRPLGIAFGIHGEVIVAEYTRLGF

SEQ ID NO: 4882 - protein, 136 aa, Arabidopsis thaliana
  peptide (1)..(136): Ceres Seq. ID no. 12396745
  misc_feature (8)..(130): Pfam Name: Pfam Description:  Strictosidine synthase
  misc_feature (1)..(130): NCBI GI NO: 15230490 NR Description: strictosidine synthase-related
  misc_feature (1)..(130): NCBI GI NO: 18409339 NR Description: strictosidine synthase-related
  misc_feature (1)..(130): NCBI GI NO: 15230488 NR Description: strictosidine synthase-related
  misc_feature (1)..(130): NCBI GI NO: 11358518 NR Description: mucin-like protein - Arabidopsis thaliana
  misc_feature (1)..(130): NCBI GI NO: 15230477 NR Description: strictosidine synthase-related
  misc_feature (6)..(130): NCBI GI NO: 37536558 NR Description: mucin-like protein
  misc_feature (10)..(130): NCBI GI NO: 23237921 NR Description: contains ESTs D41667
MPVLFSSRSLILSIIVPLLISIALYKLDTFDPAIVPSDAFTSSATSLPPLINDEFLTGAEFIGVGLLNIPEDIAYHKESNLIYTGCVDGWVKRVKVADSVNDSVVEDWVNTGGRPLGIAFGIHGEVIVAEYTRLGF

SEQ ID NO: 4883 - protein, 73 aa, Arabidopsis thaliana
  peptide (1)..(73): Ceres Seq. ID no. 12396746
  misc_feature (1)..(58): Pfam Name: Pfam Description:  Strictosidine synthase
  misc_feature (1)..(73): NCBI GI NO: 15230490 NR Description: strictosidine synthase-related
  misc_feature (1)..(73): NCBI GI NO: 18409339 NR Description: strictosidine synthase-related
  misc_feature (1)..(73): NCBI GI NO: 15230488 NR Description: strictosidine synthase-related
  misc_feature (1)..(73): NCBI GI NO: 11358518 NR Description: mucin-like protein - Arabidopsis thaliana
  misc_feature (1)..(71): NCBI GI NO: 15230477 NR Description: strictosidine synthase-related
  misc_feature (1)..(69): NCBI GI NO: 37536558 NR Description: mucin-like protein
MVAKYGVDLMFMENAGVLQVDLDGNPIAYYHDPKLSHIATCDKIGKYLYCGSLSQSHILRLDLLKYPAQNKKL

SEQ ID NO: 4884 - DNA, 1906 bp, Arabidopsis thaliana
  misc_feature (1)..(1906): Ceres Seq. ID no. 13488813
ggcaaaatgaatagagataatatataaacacaagcattaggctgtcgagaaaacataaattttctatgattaggccatacaaatcataataagtagtagaaatacaaaaaaatctgtttgttggctaaagagaaatcgaaggaattagtcttttcacccatttttctctctctgtgtggcttcttcttcttcttcttcttcctatcaaaatcatcatcatcatcttctctatattactaaaatagagagagccaacaaaagagaggagagggcgtaaaacagcagacggtggcgcaccgtagcaccgccccctcctaacctgcgcctttcttccttctctttcattttttttttttccggtttcaggaattattcctctcctcctctctcaggtcgcttcgatcccaaggcaaaatagtttcctgatttttgattcttaccttcgattttggcttcttcttcttcttcttcagatgcattcacctagaaaactctggcggacatcaaaggaaccctagcttttctccggtcttgttatatcgcctctatcgccgccgatcggtggtttgatttcaaatccaagagaaagaaacgcagaggttcatttctcaggatgctttggatcatgagattctccggtttattctccgccgctttggttatcatcgtcctctctccttctctccaatcgtttcctccagctgaagctatcagatcctctcatctcgacgcttacctccgtttcccctcctccgatccaccgccgcatagattctccttcagaaaagctcctgttttccgcaatgccgccgattgcgccgccgcagatatcgattccggcgtctgtaacccttccttggtccacgtcgcgattactctcgatttcgagtacctgcgtggctcaatcgccgccgttcattcgattctcaagcactcgtcgtgtcccgagagcgtcttcttccatttcctcgtctccgagactgacctagaatccttgattcgttcgacttttcccgaattgaaattaaaggtttactacttcgatccggagattgtacggacgctgatctcaacctccgtgagacaagcgctcgagcagccgttgaattacgctagaaattacctagctgaccttctcgagccttgcgtgcgtcgcgtgatctacctagattccgatctaatcgtcgtcgacgacatcgcaaagctctggatgacgaaactgggatcgaaaacgatcggagctcccgagtactgtcacgcgaacttcacaaagtatttcacaccggcgttctggtccgacgagaggttctccggagctttctccgggaggaaaccgtgctacttcaacacgggagtgatggtgatggatctagagagatggaggcgcgtagggtacacggaggtgatagagaaatggatggagattcagaagagtgataggatttacgagctgggatcattgccgccgttcttgttggtgttcgccggagaagtagctccgatagagcatcggtggaaccagcatgggcttggtggagataacgtgagaggaagctgtagagatttacatcccggtccggttagcttgcttcattggtccggtagtggtaaaccgtggtttcggttagattcgagacggccttgtccacttgatactctttgggcaccttatgatttgtatggacactactctcgctgatgatgattgatgatctctgttattacatattattatagtctcagtctcagctggtaaattctctcatctcctttgacaaaaaaaaaaacattctttcttctctcttttgattttaccaacttttggttggaatttgtttcgttactctgtattctattcgattgttctgtgcatcaaaccataggatacaatcagatttgttgttgt

SEQ ID NO: 4885 - protein, 361 aa, Arabidopsis thaliana
  peptide (1)..(361): Ceres Seq. ID no. 13488814
  misc_feature (1)..(361): NCBI GI NO: 22331906 NR Description: glycosyltransferase family 8
  misc_feature (5)..(361): NCBI GI NO: 11281926 NR Description: hypothetical protein F26K9
  misc_feature (1)..(358): NCBI GI NO: 15217851 NR Description: glycosyltransferase family 8
  misc_feature (1)..(358): NCBI GI NO: 15235247 NR Description: glycosyltransferase family 8
  misc_feature (1)..(358): NCBI GI NO: 21554300 NR Description: putative glycosyl transferase
  misc_feature (1)..(327): NCBI GI NO: 20258800 NR Description: putative glycosyl transferase
  misc_feature (55)..(358): NCBI GI NO: 18409445 NR Description: glycosyltransferase family 8
  misc_feature (56)..(358): NCBI GI NO: 15221684 NR Description: glycosyltransferase family 8
  misc_feature (15)..(356): NCBI GI NO: 12003394 NR Description: Avr9/Cf-9 rapidly elicited protein 231
  misc_feature (55)..(360): NCBI GI NO: 18391493 NR Description: glycosyltransferase family 8
MLWIMRFSGLFSAALVIIVLSPSLQSFPPAEAIRSSHLDAYLRFPSSDPPPHRFSFRKAPVFRNAADCAAADIDSGVCNPSLVHVAITLDFEYLRGSIAAVHSILKHSSCPESVFFHFLVSETDLESLIRSTFPELKLKVYYFDPEIVRTLISTSVRQALEQPLNYARNYLADLLEPCVRRVIYLDSDLIVVDDIAKLWMTKLGSKTIGAPEYCHANFTKYFTPAFWSDERFSGAFSGRKPCYFNTGVMVMDLERWRRVGYTEVIEKWMEIQKSDRIYELGSLPPFLLVFAGEVAPIEHRWNQHGLGGDNVRGSCRDLHPGPVSLLHWSGSGKPWFRLDSRRPCPLDTLWAPYDLYGHYSR

SEQ ID NO: 4886 - protein, 357 aa, Arabidopsis thaliana
  peptide (1)..(357): Ceres Seq. ID no. 13488815
  misc_feature (1)..(357): NCBI GI NO: 22331906 NR Description: glycosyltransferase family 8
  misc_feature (1)..(357): NCBI GI NO: 11281926 NR Description: hypothetical protein F26K9
  misc_feature (1)..(354): NCBI GI NO: 15217851 NR Description: glycosyltransferase family 8
  misc_feature (1)..(354): NCBI GI NO: 15235247 NR Description: glycosyltransferase family 8
  misc_feature (1)..(354): NCBI GI NO: 21554300 NR Description: putative glycosyl transferase
  misc_feature (1)..(323): NCBI GI NO: 20258800 NR Description: putative glycosyl transferase
  misc_feature (51)..(354): NCBI GI NO: 18409445 NR Description: glycosyltransferase family 8
  misc_feature (52)..(354): NCBI GI NO: 15221684 NR Description: glycosyltransferase family 8
  misc_feature (11)..(352): NCBI GI NO: 12003394 NR Description: Avr9/Cf-9 rapidly elicited protein 231
  misc_feature (51)..(356): NCBI GI NO: 18391493 NR Description: glycosyltransferase family 8
MRFSGLFSAALVIIVLSPSLQSFPPAEAIRSSHLDAYLRFPSSDPPPHRFSFRKAPVFRNAADCAAADIDSGVCNPSLVHVAITLDFEYLRGSIAAVHSILKHSSCPESVFFHFLVSETDLESLIRSTFPELKLKVYYFDPEIVRTLISTSVRQALEQPLNYARNYLADLLEPCVRRVIYLDSDLIVVDDIAKLWMTKLGSKTIGAPEYCHANFTKYFTPAFWSDERFSGAFSGRKPCYFNTGVMVMDLERWRRVGYTEVIEKWMEIQKSDRIYELGSLPPFLLVFAGEVAPIEHRWNQHGLGGDNVRGSCRDLHPGPVSLLHWSGSGKPWFRLDSRRPCPLDTLWAPYDLYGHYSR

SEQ ID NO: 4887 - DNA, 1565 bp, Arabidopsis thaliana
  misc_feature (1)..(1565): Ceres Seq. ID no. 12330249
acttgaatagagatcattcgtatttcatcgacgtttctaattcgcaatcacaattgttttcttcaaggaattggtttgcttgctttgatcctcagttttgtcaaaggtcttttttttttttttcctggacttgctaaaatctcttgtggcttttgctctgatacttgttagtttgggtttcgtgagtctcgctttataaaggatatgggacaaaagagatggttcttcttgttggcaatttttgtttgtcttgtttcatcttcatgtgttagagttctcaagtttaagagcgatgatggtcgacctgtgtacaatcatacgcttgccatcacacttgtggagtatacttctgcggtctatatgtctgatttgtcagaactcttcacttggacatgcgaaagatgcaatggtttgacaaagggttttgaggtaatagagataatagttgacgttgagcactgcttacaggcatatgttggggtggctaaggatttgaatgctatcattattgcatttcggggaactcaagaacaccatacaaaattgggtctcagacttgttctggaaacagctcgatctaaattaccctgatatgcaagatgcaatggtgcaccatggcttttatagtgcttatcacaatacaactgtacggcctgcagttttggatgcagtaaaacgagcaaaggaatcctatggggccaacctcaacatcatggtgactggtcattcaatgggaggagccatggcttccttttgtgcgctagacctagttgttaatgaaggagaagaaaacgtacaagttatgacatttgggcaacctcgtgttgggaatgctgcttttgcatcttatttcaatttgcttgtgcctaataccttccggatcatacatgaccatgacatagttcctcatctgcctccttactatcatcttttccctcaaaaaacatatcaccacttccccacagaggtgtggttgacagaactaagtattttgaatattgttatccgtggtgtggaaaaagtttgtgacaacaccggtgaagatcctacatgcagcagatcggtaatgggaaatagcatatctgaccatttaacgtactttggagtggaattgatgggtgagacttggaggcaatgtaacatagtgatgggccatgagatggagagttacagtaggaaagattcaaagggtaacatattcctttcgcggacagttccttccacggaggtaatcaaaacaaaaagtatatccaaaaccggaatctcaagtctataggagttggttgattcgagactcgaacaagaatgcttgcttgaaagggaggttgggagattcaaatgtgcaggaagaagaagggttctttcattctttgtggtcgtcaaagaaagtgaaacaaatgacaatcaagacattgtaaataagtcgtaggttgataccataataccatgtagcaaaaacaatacactgttcatttgttattcccttaatttaaatccatgatcacatatgtattggattcaaccttgtaaatatgtgaatgaatatccaattgctgtggatggtt

SEQ ID NO: 4888 - protein, 259 aa, Arabidopsis thaliana
  peptide (1)..(259): Ceres Seq. ID no. 12330250
  misc_feature (8)..(259): NCBI GI NO: 15238889 NR Description: triacylglycerol lipase-like protein
  misc_feature (8)..(259): NCBI GI NO: 18418946 NR Description: triacylglycerol lipase-like protein
  misc_feature (8)..(188): NCBI GI NO: 30686925 NR Description: lipase (class 3) family [Arabidopsis thaliana]
  misc_feature (8)..(238): NCBI GI NO: 21425569 NR Description: triacylglycerol Lipase [Triticum aestivum]
  misc_feature (8)..(238): NCBI GI NO: 21425571 NR Description: triacylglycerol lipase [Triticum aestivum]
  misc_feature (8)..(250): NCBI GI NO: 34395192 NR Description: putative triacylglycerol lipase
  misc_feature (11)..(250): NCBI GI NO: 34899296 NR Description: putative triacylglycerol lipase
  misc_feature (8)..(238): NCBI GI NO: 34907212 NR Description: P0492G09.26
  misc_feature (14)..(204): NCBI GI NO: 21166167 NR Description: triacylglycerol lipase-like protein triacylglycerol lipase
  misc_feature (12)..(204): NCBI GI NO: 230348 NR Description: Triacylglycerol Acylhydrolase (E.C.3.1.1.3)
MLSLLHFGELKNTIQNWVSDLFWKQLDLNYPDMQDAMVHHGFYSAYHNTTVRPAVLDAVKRAKESYGANLNIMVTGHSMGGAMASFCALDLVVNEGEENVQVMTFGQPRVGNAAFASYFNLLVPNTFRIIHDHDIVPHLPPYYHLFPQKTYHHFPTEVWLTELSILNIVIRGVEKVCDNTGEDPTCSRSVMGNSISDHLTYFGVELMGETWRQCNIVMGHEMESYSRKDSKGNIFLSRTVPSTEVIKTKSISKTGISSL

SEQ ID NO: 4889 - protein, 227 aa, Arabidopsis thaliana
  peptide (1)..(227): Ceres Seq. ID no. 12330251
  misc_feature (1)..(227): NCBI GI NO: 15238889 NR Description: triacylglycerol lipase-like protein
  misc_feature (1)..(227): NCBI GI NO: 18418946 NR Description: triacylglycerol lipase-like protein
  misc_feature (1)..(156): NCBI GI NO: 30686925 NR Description: lipase (class 3) family [Arabidopsis thaliana]
  misc_feature (1)..(206): NCBI GI NO: 21425569 NR Description: triacylglycerol Lipase [Triticum aestivum]
  misc_feature (1)..(206): NCBI GI NO: 21425571 NR Description: triacylglycerol lipase [Triticum aestivum]
  misc_feature (1)..(218): NCBI GI NO: 34395192 NR Description: putative triacylglycerol lipase
  misc_feature (1)..(218): NCBI GI NO: 34899296 NR Description: putative triacylglycerol lipase
  misc_feature (1)..(206): NCBI GI NO: 34907212 NR Description: P0492G09.26
  misc_feature (1)..(172): NCBI GI NO: 21166167 NR Description: triacylglycerol lipase-like protein triacylglycerol lipase
  misc_feature (1)..(172): NCBI GI NO: 230348 NR Description: Triacylglycerol Acylhydrolase (E.C.3.1.1.3)
MQDAMVHHGFYSAYHNTTVRPAVLDAVKRAKESYGANLNIMVTGHSMGGAMASFCALDLVVNEGEENVQVMTFGQPRVGNAAFASYFNLLVPNTFRIIHDHDIVPHLPPYYHLFPQKTYHHFPTEVWLTELSILNIVIRGVEKVCDNTGEDPTCSRSVMGNSISDHLTYFGVELMGETWRQCNIVMGHEMESYSRKDSKGNIFLSRTVPSTEVIKTKSISKTGISSL

SEQ ID NO: 4890 - protein, 223 aa, Arabidopsis thaliana
  peptide (1)..(223): Ceres Seq. ID no. 12330252
  misc_feature (1)..(223): NCBI GI NO: 15238889 NR Description: triacylglycerol lipase-like protein
  misc_feature (1)..(223): NCBI GI NO: 18418946 NR Description: triacylglycerol lipase-like protein
  misc_feature (1)..(152): NCBI GI NO: 30686925 NR Description: lipase (class 3) family [Arabidopsis thaliana]
  misc_feature (1)..(202): NCBI GI NO: 21425569 NR Description: triacylglycerol Lipase [Triticum aestivum]
  misc_feature (1)..(202): NCBI GI NO: 21425571 NR Description: triacylglycerol lipase [Triticum aestivum]
  misc_feature (1)..(214): NCBI GI NO: 34395192 NR Description: putative triacylglycerol lipase
  misc_feature (1)..(214): NCBI GI NO: 34899296 NR Description: putative triacylglycerol lipase
  misc_feature (1)..(202): NCBI GI NO: 34907212 NR Description: P0492G09.26
  misc_feature (1)..(168): NCBI GI NO: 21166167 NR Description: triacylglycerol lipase-like protein triacylglycerol lipase
  misc_feature (1)..(168): NCBI GI NO: 230348 NR Description: Triacylglycerol Acylhydrolase (E.C.3.1.1.3)
MVHHGFYSAYHNTTVRPAVLDAVKRAKESYGANLNIMVTGHSMGGAMASFCALDLVVNEGEENVQVMTFGQPRVGNAAFASYFNLLVPNTFRIIHDHDIVPHLPPYYHLFPQKTYHHFPTEVWLTELSILNIVIRGVEKVCDNTGEDPTCSRSVMGNSISDHLTYFGVELMGETWRQCNIVMGHEMESYSRKDSKGNIFLSRTVPSTEVIKTKSISKTGISSL

SEQ ID NO: 4891 - DNA, 1138 bp, Arabidopsis thaliana
  misc_feature (1)..(1138): Ceres Seq. ID no. 12329720
actacatcttctctctcttcttcgctcattctctcttcctcatatatttccaaaacaatacctttcttcttctctcttcagaagaaacgagagattcgagtgatgttttatgaactactactagtgtttttttccgtgaagtaaagagaaacggtaactttttctatttgttttcaagaaaagccaaagaaaaaaagaatttttaatatactctgttttttgcaatgattttgttttgtgaaatttttctcggagaagaaagtaatttagaagacggagagtggcaaaacgaaatataaaaaaaaaagttttcaatttcttttaagaaaaaaaaaaagctttttcccttcttaaaacccttcctctgtttcagaaacagagacataagaagaaaatagatcacaagctaattgcgttctcttctcttcttcttctactgggttttaaaatcaagaaaccatgtctgcaagtgttctaagtgatccaacaatgttaatttcaacaccagaggtaatactcgtttcgccggtgccggttactcaaatctccggagatgagccagattcggtaacttgtgactgttgcggattaaccgaggagtgtacacaatcgtacatagagatgatcagagagcgttacatggggaaatggatctgtgggctttgttctgaagctgtgaagtatgaagtcatgagaactaaacgattgttaacgacagaagaagccatggcaagacacatgaacatgtgtaataagttcaaatcctcaagcccaccaccgaatccgacaggacatttgatctctgcgatgagacagatcttgagaagaagcttagattcaccaagaatgcttagatctatgcctaatagcccatctaaagacgaccaagatcatcatcatgattgtgtttctaatgttttgtctaggtccgatagctgtttcgctagtttgacttgaaaaaaactcatcgttgaaaaaattgttttaaaccgtcggtttagggacccacttggatcaaatccggttttctgatttgaaattttcgtcggtaaatcaaaaattggtttctgtatgtgtttttgccggatttgttgttgtacttgtggaaaattttgggctaaaagaataatttggtgcc

SEQ ID NO: 4892 - protein, 165 aa, Arabidopsis thaliana
  peptide (1)..(165): Ceres Seq. ID no. 12329721
  misc_feature (1)..(165): NCBI GI NO: 15218503 NR Description: unknown protein; protein id: At1g72510.1
  misc_feature (1)..(165): NCBI GI NO: 15226673 NR Description: unknown protein; protein id: At2g09970.1
  misc_feature (35)..(165): NCBI GI NO: 15242032 NR Description: putative protein; protein id: At5g20670
  misc_feature (36)..(165): NCBI GI NO: 21554329 NR Description: unknown [Arabidopsis thaliana]
  misc_feature (37)..(141): NCBI GI NO: 23237920 NR Description: hypothetical protein~predicted by FGENESH etc.
  misc_feature (33)..(123): NCBI GI NO: 15228776 NR Description: hypothetical protein; protein id: At3g22540.1
  misc_feature (24)..(165): NCBI GI NO: 30695655 NR Description: expressed protein [Arabidopsis thaliana]
  misc_feature (29)..(165): NCBI GI NO: 25405692 NR Description: F15I1.18 [imported] - Arabidopsis thaliana
  misc_feature (5)..(124): NCBI GI NO: 34909436 NR Description: OSJNBa0014K08.12
  misc_feature (35)..(165): NCBI GI NO: 34903632 NR Description: B1046G12.23
MSASVLSDPTMLISTPEVILVSPVPVTQISGDEPDSVTCDCCGLTEECTQSYIEMIRERYMGKWICGLCSEAVKYEVMRTKRLLTTEEAMARHMNMCNKFKSSSPPPNPTGHLISAMRQILRRSLDSPRMLRSMPNSPSKDDQDHHHDCVSNVLSRSDSCFASLT

SEQ ID NO: 4893 - protein, 155 aa, Arabidopsis thaliana
  peptide (1)..(155): Ceres Seq. ID no. 12329722
  misc_feature (1)..(155): NCBI GI NO: 15218503 NR Description: unknown protein; protein id: At1g72510.1
  misc_feature (1)..(155): NCBI GI NO: 15226673 NR Description: unknown protein; protein id: At2g09970.1
  misc_feature (25)..(155): NCBI GI NO: 15242032 NR Description: putative protein; protein id: At5g20670
  misc_feature (26)..(155): NCBI GI NO: 21554329 NR Description: unknown [Arabidopsis thaliana]
  misc_feature (27)..(131): NCBI GI NO: 23237920 NR Description: hypothetical protein~predicted by FGENESH etc.
  misc_feature (23)..(113): NCBI GI NO: 15228776 NR Description: hypothetical protein; protein id: At3g22540.1
  misc_feature (14)..(155): NCBI GI NO: 30695655 NR Description: expressed protein [Arabidopsis thaliana]
  misc_feature (19)..(155): NCBI GI NO: 25405692 NR Description: F15I1.18 [imported] - Arabidopsis thaliana
  misc_feature (1)..(114): NCBI GI NO: 34909436 NR Description: OSJNBa0014K08.12
  misc_feature (25)..(155): NCBI GI NO: 34903632 NR Description: B1046G12.23
MLISTPEVILVSPVPVTQISGDEPDSVTCDCCGLTEECTQSYIEMIRERYMGKWICGLCSEAVKYEVMRTKRLLTTEEAMARHMNMCNKFKSSSPPPNPTGHLISAMRQILRRSLDSPRMLRSMPNSPSKDDQDHHHDCVSNVLSRSDSCFASLT

SEQ ID NO: 4894 - protein, 111 aa, Arabidopsis thaliana
  peptide (1)..(111): Ceres Seq. ID no. 12329723
  misc_feature (1)..(111): NCBI GI NO: 15218503 NR Description: unknown protein; protein id: At1g72510.1
  misc_feature (1)..(111): NCBI GI NO: 15226673 NR Description: unknown protein; protein id: At2g09970.1
  misc_feature (1)..(111): NCBI GI NO: 15242032 NR Description: putative protein; protein id: At5g20670
  misc_feature (1)..(111): NCBI GI NO: 21554329 NR Description: unknown [Arabidopsis thaliana]
  misc_feature (1)..(87): NCBI GI NO: 23237920 NR Description: hypothetical protein~predicted by FGENESH etc.
  misc_feature (1)..(69): NCBI GI NO: 15228776 NR Description: hypothetical protein; protein id: At3g22540.1
  misc_feature (1)..(111): NCBI GI NO: 30695655 NR Description: expressed protein [Arabidopsis thaliana]
  misc_feature (1)..(111): NCBI GI NO: 25405692 NR Description: F15I1.18 [imported] - Arabidopsis thaliana
  misc_feature (1)..(70): NCBI GI NO: 34909436 NR Description: OSJNBa0014K08.12
  misc_feature (1)..(111): NCBI GI NO: 34903632 NR Description: B1046G12.23
MIRERYMGKWICGLCSEAVKYEVMRTKRLLTTEEAMARHMNMCNKFKSSSPPPNPTGHLISAMRQILRRSLDSPRMLRSMPNSPSKDDQDHHHDCVSNVLSRSDSCFASLT

SEQ ID NO: 4895 - DNA, 1170 bp, Arabidopsis thaliana
  misc_feature (1)..(1170): Ceres Seq. ID no. 12370981
atctttttgtaatcgatttgcaatttcaatttcgcaaagttggatcatgggcaatgtcataagcggtggaagccgcccggaaaatcatcgggaccgtacttcgccgccgtatccaaaccctaatgctcagtaccaaggcaattatccgtcgccgtaccaagattgtgctaggtatccgtatggagagatggcgtctccagtgcaatacgtagagcatcaggaagcagtgactataaggaacgacatcaatctgaagaaagaaactttgagacttgagcctgatgaacagaaccctggcaagtttttgctctccttcacttttgacgcctctgttcctggaagcatcactgtaatgttctttgctaaagaaggcaaagactgtaaccttattgcgacaaaggaggatctttttccatccactcaagttagttttgcaaaaggtctggaacagagattcaagcaggcttgtgggacagggattgatttctcagatatgtcagaggcagatttggttgaggcaaacgagacagatgtgtatcatgtggcagtgaaagcagaggtagtatcagaagatgatcatcctgagtctgggacaccaaacagacagataactcatgtggttttagagaaagatcataagggtgagtacaaggcgagagtggtgaagcagatcctgtgggtgaatgggaataggtatgttcttcaagagatttatgggattggtaatacagttgatgataatggagaagatgcgaatgaaagaggaaaagaatgcgtcatctgcttatctgagccacgggataccactgttctcccttgcaggcacatgtgtatgtgtagcggttgtgcaaagcttttgaggtttcagacaaacctctgccccatctgtagacaaccggtggataggcttttggagataacagtgaacaacaacgacaggaactagtgagccttgctacgttactcttctcctgtttttatataaagactgcttcccaatgttcttgtttgtggtatcggtatatatgcaggcattagaactcaagttacaaacttacatatgccaaatgacacttaaattccgggttttacttccaagtgttttgtaaatcatcatgctactttgtctagcggtcttcgttgttaatgaagtgaacaacttttgcagtg

SEQ ID NO: 4896 - protein, 314 aa, Arabidopsis thaliana
  peptide (1)..(314): Ceres Seq. ID no. 12370982
  misc_feature (258)..(296): Pfam Name: RING finger Pfam Description: Zinc finger, C3HC4 type
  misc_feature (16)..(314): NCBI GI NO: 15231808 NR Description: putative protein; protein id: At3g53410
  misc_feature (26)..(312): NCBI GI NO: 18398633 NR Description: expressed protein; protein id: At3g09770
  misc_feature (40)..(310): NCBI GI NO: 37532246 NR Description: putative hydroxyproline-rich glycoprotein
  misc_feature (37)..(309): NCBI GI NO: 15242675 NR Description: expressed protein; protein id: At5g03200
  misc_feature (37)..(309): NCBI GI NO: 21618140 NR Description: putative RING zinc finger protein
  misc_feature (37)..(309): NCBI GI NO: 26449588 NR Description: unknown protein [Arabidopsis thaliana]
  misc_feature (26)..(276): NCBI GI NO: 30681003 NR Description: putative RING zinc finger protein
  misc_feature (59)..(312): NCBI GI NO: 15239642 NR Description: unknown protein; protein id: At5g19080.1
  misc_feature (16)..(310): NCBI GI NO: 34914816 NR Description: B1045D11.20
  misc_feature (59)..(312): NCBI GI NO: 21928149 NR Description: AT5g19080/T16G12_120 [Arabidopsis thaliana]
SFCNRFAISISQSWIMGNVISGGSRPENHRDRTSPPYPNPNAQYQGNYPSPYQDCARYPYGEMASPVQYVEHQEAVTIRNDINLKKETLRLEPDEQNPGKFLLSFTFDASVPGSITVMFFAKEGKDCNLIATKEDLFPSTQVSFAKGLEQRFKQACGTGIDFSDMSEADLVEANETDVYHVAVKAEVVSEDDHPESGTPNRQITHVVLEKDHKGEYKARVVKQILWVNGNRYVLQEIYGIGNTVDDNGEDANERGKECVICLSEPRDTTVLPCRHMCMCSGCAKLLRFQTNLCPICRQPVDRLLEITVNNNDRN

SEQ ID NO: 4897 - protein, 299 aa, Arabidopsis thaliana
  peptide (1)..(299): Ceres Seq. ID no. 12370983
  misc_feature (243)..(281): Pfam Name: RING finger Pfam Description: Zinc finger, C3HC4 type
  misc_feature (1)..(299): NCBI GI NO: 15231808 NR Description: putative protein; protein id: At3g53410
  misc_feature (11)..(297): NCBI GI NO: 18398633 NR Description: expressed protein; protein id: At3g09770
  misc_feature (25)..(295): NCBI GI NO: 37532246 NR Description: putative hydroxyproline-rich glycoprotein
  misc_feature (22)..(294): NCBI GI NO: 15242675 NR Description: expressed protein; protein id: At5g03200
  misc_feature (22)..(294): NCBI GI NO: 21618140 NR Description: putative RING zinc finger protein
  misc_feature (22)..(294): NCBI GI NO: 26449588 NR Description: unknown protein [Arabidopsis thaliana]
  misc_feature (11)..(261): NCBI GI NO: 30681003 NR Description: putative RING zinc finger protein
  misc_feature (44)..(297): NCBI GI NO: 15239642 NR Description: unknown protein; protein id: At5g19080.1
  misc_feature (1)..(295): NCBI GI NO: 34914816 NR Description: B1045D11.20
  misc_feature (44)..(297): NCBI GI NO: 21928149 NR Description: AT5g19080/T16G12_120 [Arabidopsis thaliana]
MGNVISGGSRPENHRDRTSPPYPNPNAQYQGNYPSPYQDCARYPYGEMASPVQYVEHQEAVTIRNDINLKKETLRLEPDEQNPGKFLLSFTFDASVPGSITVMFFAKEGKDCNLIATKEDLFPSTQVSFAKGLEQRFKQACGTGIDFSDMSEADLVEANETDVYHVAVKAEVVSEDDHPESGTPNRQITHVVLEKDHKGEYKARVVKQILWVNGNRYVLQEIYGIGNTVDDNGEDANERGKECVICLSEPRDTTVLPCRHMCMCSGCAKLLRFQTNLCPICRQPVDRLLEITVNNNDRN

SEQ ID NO: 4898 - protein, 252 aa, Arabidopsis thaliana
  peptide (1)..(252): Ceres Seq. ID no. 12370984
  misc_feature (196)..(234): Pfam Name: RING finger Pfam Description: Zinc finger, C3HC4 type
  misc_feature (1)..(252): NCBI GI NO: 15231808 NR Description: putative protein; protein id: At3g53410
  misc_feature (1)..(250): NCBI GI NO: 18398633 NR Description: expressed protein; protein id: At3g09770
  misc_feature (1)..(248): NCBI GI NO: 37532246 NR Description: putative hydroxyproline-rich glycoprotein
  misc_feature (1)..(247): NCBI GI NO: 15242675 NR Description: expressed protein; protein id: At5g03200
  misc_feature (1)..(247): NCBI GI NO: 21618140 NR Description: putative RING zinc finger protein
  misc_feature (1)..(247): NCBI GI NO: 26449588 NR Description: unknown protein [Arabidopsis thaliana]
  misc_feature (1)..(214): NCBI GI NO: 30681003 NR Description: putative RING zinc finger protein
  misc_feature (1)..(250): NCBI GI NO: 15239642 NR Description: unknown protein; protein id: At5g19080.1
  misc_feature (1)..(248): NCBI GI NO: 34914816 NR Description: B1045D11.20
  misc_feature (1)..(250): NCBI GI NO: 21928149 NR Description: AT5g19080/T16G12_120 [Arabidopsis thaliana]
MASPVQYVEHQEAVTIRNDINLKKETLRLEPDEQNPGKFLLSFTFDASVPGSITVMFFAKEGKDCNLIATKEDLFPSTQVSFAKGLEQRFKQACGTGIDFSDMSEADLVEANETDVYHVAVKAEVVSEDDHPESGTPNRQITHVVLEKDHKGEYKARVVKQILWVNGNRYVLQEIYGIGNTVDDNGEDANERGKECVICLSEPRDTTVLPCRHMCMCSGCAKLLRFQTNLCPICRQPVDRLLEITVNNNDRN

SEQ ID NO: 4899 - DNA, 1659 bp, Arabidopsis thaliana
  misc_feature (1)..(1659): Ceres Seq. ID no. 13491257
aatttctcaataacgctctcagagagaccatttgatgaagcttctcgcttctggaatttgaaaaggaacttgttatggagataatctcactgaacgttgtgccccagtgctctgtggttacttggagtagtaaattagcaacgaaaagattggtcccaaatcggtcaagtttgttattctcaggggtcaaaaaatccagacttgtgattcgaagtggaaattccgatggttatgttgttggtgagaatgatgacttgggtcgtatagccagaagaggagaatcaacgtcaaaggttttgattcctggtttgcctgatgaatcaaatggtgaaattgctgctcgaatcagtcattctcactgcgagtggaagcccaagcttagagtacattatgagaaaagccggttgtgacaatctcgatgctcctgcggtgttgtttcttcctgggctttggcgttggttcatttcactatgagaagcagcttaccgatttgggaagggattatcgagtatgggctattgattttcttggacagggtttatctctccctactgaagatcctactaccatgactgaagaaaccagttcctcggaagataaggaaccattttggggatttggtgacaaaactgaaccgtgggctgatcaacttgtattctctctggatctctggagggatcaagttcagtattttgtagaagaggttatcggtgagcctgtgtacattgctgggaactcacttggagggtatgtagctctctactttgcagcaacccatcctcacctggttaagggtgttaccttgcttaatgcaacacctttctggggtttcttccctaatccagtaagatccccaaagctagcacgtctctttccatggcccggagcattccctctgccggaaagagtgaaaaaaatcacagaattggtgtggcaaaagataagtgatcctgaaagcatagctgagatacttaaacaggtctacacagaccattctaccaatgtggataaagtattctcacgtattgtggaggtcacacagcatccggctgctgcagcatcgtttgcttcaattatgcttgctcctggtggagagctatctttctccgaagctttatctaggtgtaaggaaaacaatgttcagatatgtctcatgtatggaagagaagatccatgggtgagaccgttatggggaaagaagataaagaaggaaatccccaacgctccatactacgagatcagcccagcgggtcactgcccacacgatgaagtccctgaggtggtgaactatctgatgcgcgggtggatcaagcacctggagtctggtggttttgaagcgctcccgcttttggaggacactgaagaagattgggaggagtccaggattggtagagaaattgagttcccgagagatggttggaaaaaagcagtgaatctgtggttatatgggtcaaactatacgtactggagaggagttagagaatctttcagatccagttttataagggtgtttggagggaagtctgcatagaagaagcatggaacagtcgtctagtgtaaattaattgtaatctatgttgcatccgatgctagctatataatgttgtctgtagaatcaagtttctaaaatgttcaaaaggaaaagttagaaaaatatcc

SEQ ID NO: 4900 - protein, 370 aa, Arabidopsis thaliana
  peptide (1)..(370): Ceres Seq. ID no. 13491258
  misc_feature (29)..(295): Pfam Name: Pfam Description:  alpha/beta hydrolase fold
  misc_feature (7)..(370): NCBI GI NO: 15240707 NR Description: hydrolase, alpha/beta fold family
  misc_feature (60)..(300): NCBI GI NO: 37521904 NR Description: hypothetical protein gll2335
  misc_feature (10)..(40): NCBI GI NO: 37521904 NR Description: hypothetical protein gll2335
  misc_feature (66)..(297): NCBI GI NO: 23040754 NR Description: hypothetical protein
  misc_feature (10)..(42): NCBI GI NO: 23040754 NR Description: hypothetical protein
  misc_feature (66)..(314): NCBI GI NO: 15234433 NR Description: hydrolase, alpha/beta fold family
  misc_feature (66)..(314): NCBI GI NO: 30690680 NR Description: hydrolase, alpha/beta fold family
  misc_feature (10)..(42): NCBI GI NO: 15234433 NR Description: hydrolase, alpha/beta fold family
  misc_feature (10)..(42): NCBI GI NO: 30690680 NR Description: hydrolase, alpha/beta fold family
  misc_feature (66)..(297): NCBI GI NO: 23126297 NR Description: hypothetical protein [Nostoc punctiforme]
MLLRCCFFLGFGVGSFHYEKQLTDLGRDYRVWAIDFLGQGLSLPTEDPTTMTEETSSSEDKEPFWGFGDKTEPWADQLVFSLDLWRDQVQYFVEEVIGEPVYIAGNSLGGYVALYFAATHPHLVKGVTLLNATPFWGFFPNPVRSPKLARLFPWPGAFPLPERVKKITELVWQKISDPESIAEILKQVYTDHSTNVDKVFSRIVEVTQHPAAAASFASIMLAPGGELSFSEALSRCKENNVQICLMYGREDPWVRPLWGKKIKKEIPNAPYYEISPAGHCPHDEVPEVVNYLMRGWIKHLESGGFEALPLLEDTEEDWEESRIGREIEFPRDGWKKAVNLWLYGSNYTYWRGVRESFRSSFIRVFGGKSA

SEQ ID NO: 4901 - protein, 320 aa, Arabidopsis thaliana
  peptide (1)..(320): Ceres Seq. ID no. 13491259
  misc_feature (1)..(245): Pfam Name: Pfam Description:  alpha/beta hydrolase fold
  misc_feature (1)..(320): NCBI GI NO: 15240707 NR Description: hydrolase, alpha/beta fold family
  misc_feature (10)..(250): NCBI GI NO: 37521904 NR Description: hypothetical protein gll2335
  misc_feature (16)..(247): NCBI GI NO: 23040754 NR Description: hypothetical protein
  misc_feature (16)..(264): NCBI GI NO: 15234433 NR Description: hydrolase, alpha/beta fold family
  misc_feature (16)..(264): NCBI GI NO: 30690680 NR Description: hydrolase, alpha/beta fold family
  misc_feature (16)..(247): NCBI GI NO: 23126297 NR Description: hypothetical protein [Nostoc punctiforme]
  misc_feature (16)..(247): NCBI GI NO: 17229548 NR Description: hypothetical protein [Nostoc sp. PCC 7120]
  misc_feature (16)..(247): NCBI GI NO: 16330114 NR Description: unknown protein [Synechocystis sp. PCC 6803]
  misc_feature (15)..(251): NCBI GI NO: 37523246 NR Description: hypothetical protein gll3677
  misc_feature (16)..(250): NCBI GI NO: 33864695 NR Description: conserved hypothetical protein
MTEETSSSEDKEPFWGFGDKTEPWADQLVFSLDLWRDQVQYFVEEVIGEPVYIAGNSLGGYVALYFAATHPHLVKGVTLLNATPFWGFFPNPVRSPKLARLFPWPGAFPLPERVKKITELVWQKISDPESIAEILKQVYTDHSTNVDKVFSRIVEVTQHPAAAASFASIMLAPGGELSFSEALSRCKENNVQICLMYGREDPWVRPLWGKKIKKEIPNAPYYEISPAGHCPHDEVPEVVNYLMRGWIKHLESGGFEALPLLEDTEEDWEESRIGREIEFPRDGWKKAVNLWLYGSNYTYWRGVRESFRSSFIRVFGGKSA

SEQ ID NO: 4902 - DNA, 3209 bp, Arabidopsis thaliana
  misc_feature (1)..(3209): Ceres Seq. ID no. 12599971
ctttctctctctctctctcgtgtgtgtgtgtgtgatcgagtggtgaaacgacagagaggggcgtcgttttgttgatttcttctgggtgaagatgtcaggtctcgaagatatcaagaacgagaccgttgatctggaaaaaattccgattgaggaagttttccagcagctaaaatgtacaagggaaggattgacaacgcaggaaggggaagacaggattgtgatatttggccccaacaagctcgaagagaagaaggaaagcaaaattctgaagtttctggggttcatgtggaatccgctttcatgggttatggaagctgcagctctcatggccattgctttggctaatggtgataatcgacctccggattggcaagattttgtgggtattatctgtctgcttgttatcaactccacaatcagtttcattgaagaaaacaacgccggaaatgctgcagctgctctcatggctggtcttgctcctaaaaccaaggttcttagggatggaaaatggagtgaacaagaggctgctatccttgtcccaggtgatattgttagcattaaacttggagacattatcccagccgatgcccgtcttcttgaaggagatcctttaaaggttgatcagtctgctctaactggagagtcccttcctgtgaccaagcaccctggtcaagaagttttctctggttcaacttgtaaacaaggagaaatcgaagcggttgttatagccactggagttcacaccttctttggtaaagctgctcaccttgtggacagcactaaccaagttgggcacttccagaaagttcttacatccattggaaacttctgtatctgttctattgctattggtatagcgattgaaatagtcgtcatgtaccctatccaacaccgaaagtacagagatggaattgacaatctcttggtcctcttgatcggtggtatccccattgctatgcccacggtcttgtctgtgactatggctatcgggtctcacaggttgtctcagcaaggtgctatcaccaaacgtatgacagccattgaagaaatggcgggaatggatgtcctttgcagtgacaaaaccgggacactaacccttaataaattgagtgtggataaaaacttggttgaggttttctgcaagggtgtggagaaagatcaagttctactatttgcagctatggcttctagggtggagaaccaggacgctattgatgcagccatggttggaatgcttgctgatccgaaagaggcccgagctggaatcagagaggttcacttccttccattcaaccctgtggataagagaactgctttgacttacatcgactctgatggtaactggcacagagtcagcaaaggtgctcccgagcagatccttgaccttgccaatgccaggcctgaccttaggaagaaggtactctcttgtattgacaagtacgctgagcgcggtcttaggtcgttggcagtagctcgtcaggtggtacccgagaaaacaaaagaaagcccaggtggaccatgggaatttgttggcttgttgcctctttttgaccctccaagacacgacagtgccgaaaccattcgtagggcgttgaatctaggtgttaatgtgaagatgatcactggtgatcaacttgctattggtaaggaaaccggtcgcaggcttggaatgggaaccaatatgtatccatctgcggctcttctcggtaccgacaaggactcgaacattgcatccatccctgttgaggagttgatcgagaaggctgatgggtttgccggcgtctttccagagcacaaatatgaaattgtgaaaaagctgcaggagaggaagcacattgttggtatgaccggtgatggtgttaatgatgcacccgctttgaagaaagcagatatcggtattgctgtggccgatgctacagatgctgctcgtggtgcttcagatatcgtcctcacggaacctgggctgagtgtcatcatcagtgccgttctcactagcagagctatcttccagagaatgaagaactacaccatttatgcagtctcaatcacaatccgtattgtgtttggtttcatgcttattgctttgatatgggaatttgacttctcagcgttcatggttctgattattgccatccttaatgatggtactatcatgacaatctcaaaggacagagtcaagccatctcccacacctgatagctggaagctcaaagaaattttcgccactggaattgtgctgggaggctaccaagccattatgagtgttattttcttctgggctgctcacaagaccgactttttctcggacaagttcggtgtgaggtcaatcagggacaataacgatgaactaatgggtgctgtgtatctacaagttagtatcatcagtcaagctctaatctttgtcaccaggtcaaggagttggtcatttgtcgaacgtcctggggcgcttctgatgattgcattcgtcattgcacaactggttgcaactttgatcgcagtgtatgccgactggacatttgcaaaggtgaagggtatcggttggggatgggcaggtgtgatttggatttacagtatcgtaacatacttcccacaggacattttgaagtttgccattcggtatatcttgagtggaaaggcttgggccagcttgtttgacaacaggaccgctttcacaaccaagaaagattacggtattggagaaagagaagctcaatgggcacaagctcaaaggacattgcacggtctgcagccaaaagaagatgttaatatcttcccagagaaaggaagttacagagagctgtctgagatcgcagagcaagccaagagaagggccgagatagctaggcttagggagcttcacacattgaagggacatgtggaatcagtcgcaaagctaaagggattggacattgatacagcaggacatcactacactgtgtagttggagttgcacaacaacacaaacatttaccgaaaaccaaccccatcatgactcatcttttgttttgtcttcacaaatctctctttaaaagtcattacagtagagggaagagaactcttgtgtattgccataactcttccaaaactcttttttctttttgttattgttagtcattgttcttaaaactcctactcgatatgagctttgcaaatttgcctttgaagaaacaaggccctttgcctttgaagagacaaggcactttgctttt

SEQ ID NO: 4903 - protein, 949 aa, Arabidopsis thaliana
  peptide (1)..(949): Ceres Seq. ID no. 12599972
  misc_feature (323)..(609): Pfam Name: Pfam Description:  haloacid dehalogenase-like hydrolase
  misc_feature (1)..(842): NCBI GI NO: 3348073 NR Description: plasma membrane H(+)-ATPase 1
  misc_feature (1)..(842): NCBI GI NO: 6691153 NR Description: plasma membrane H(+)-ATPase
  misc_feature (1)..(845): NCBI GI NO: 2652922 NR Description: plasma membrane (H+) ATPase [Uromyces fabae]
  misc_feature (10)..(848): NCBI GI NO: 1709664 NR Description: Probable plasma membrane ATPase
  misc_feature (10)..(748): NCBI GI NO: 1709666 NR Description: Plasma membrane ATPase (Proton pump)
  misc_feature (757)..(811): NCBI GI NO: 1709666 NR Description: Plasma membrane ATPase (Proton pump)
  misc_feature (10)..(736): NCBI GI NO: 1709665 NR Description: Plasma membrane ATPase (Proton pump)
  misc_feature (744)..(804): NCBI GI NO: 1709665 NR Description: Plasma membrane ATPase (Proton pump)
  misc_feature (10)..(750): NCBI GI NO: 16751320 NR Description: putative plasma membrane-type proton ATPase
  misc_feature (753)..(804): NCBI GI NO: 16751320 NR Description: putative plasma membrane-type proton ATPase
MSGLEDIKNETVDLEKIPIEEVFQQLKCTREGLTTQEGEDRIVIFGPNKLEEKKESKILKFLGFMWNPLSWVMEAAALMAIALANGDNRPPDWQDFVGIICLLVINSTISFIEENNAGNAAAALMAGLAPKTKVLRDGKWSEQEAAILVPGDIVSIKLGDIIPADARLLEGDPLKVDQSALTGESLPVTKHPGQEVFSGSTCKQGEIEAVVIATGVHTFFGKAAHLVDSTNQVGHFQKVLTSIGNFCICSIAIGIAIEIVVMYPIQHRKYRDGIDNLLVLLIGGIPIAMPTVLSVTMAIGSHRLSQQGAITKRMTAIEEMAGMDVLCSDKTGTLTLNKLSVDKNLVEVFCKGVEKDQVLLFAAMASRVENQDAIDAAMVGMLADPKEARAGIREVHFLPFNPVDKRTALTYIDSDGNWHRVSKGAPEQILDLANARPDLRKKVLSCIDKYAERGLRSLAVARQVVPEKTKESPGGPWEFVGLLPLFDPPRHDSAETIRRALNLGVNVKMITGDQLAIGKETGRRLGMGTNMYPSAALLGTDKDSNIASIPVEELIEKADGFAGVFPEHKYEIVKKLQERKHIVGMTGDGVNDAPALKKADIGIAVADATDAARGASDIVLTEPGLSVIISAVLTSRAIFQRMKNYTIYAVSITIRIVFGFMLIALIWEFDFSAFMVLIIAILNDGTIMTISKDRVKPSPTPDSWKLKEIFATGIVLGGYQAIMSVIFFWAAHKTDFFSDKFGVRSIRDNNDELMGAVYLQVSIISQALIFVTRSRSWSFVERPGALLMIAFVIAQLVATLIAVYADWTFAKVKGIGWGWAGVIWIYSIVTYFPQDILKFAIRYILSGKAWASLFDNRTAFTTKKDYGIGEREAQWAQAQRTLHGLQPKEDVNIFPEKGSYRELSEIAEQAKRRAEIARLRELHTLKGHVESVAKLKGLDIDTAGHHYTV

SEQ ID NO: 4904 - protein, 885 aa, Arabidopsis thaliana
  peptide (1)..(885): Ceres Seq. ID no. 12599973
  misc_feature (259)..(545): Pfam Name: Pfam Description:  haloacid dehalogenase-like hydrolase
  misc_feature (1)..(778): NCBI GI NO: 3348073 NR Description: plasma membrane H(+)-ATPase 1
  misc_feature (1)..(778): NCBI GI NO: 6691153 NR Description: plasma membrane H(+)-ATPase
  misc_feature (1)..(781): NCBI GI NO: 2652922 NR Description: plasma membrane (H+) ATPase [Uromyces fabae]
  misc_feature (1)..(784): NCBI GI NO: 1709664 NR Description: Probable plasma membrane ATPase
  misc_feature (1)..(684): NCBI GI NO: 1709666 NR Description: Plasma membrane ATPase (Proton pump)
  misc_feature (693)..(747): NCBI GI NO: 1709666 NR Description: Plasma membrane ATPase (Proton pump)
  misc_feature (1)..(672): NCBI GI NO: 1709665 NR Description: Plasma membrane ATPase (Proton pump)
  misc_feature (680)..(740): NCBI GI NO: 1709665 NR Description: Plasma membrane ATPase (Proton pump)
  misc_feature (1)..(686): NCBI GI NO: 16751320 NR Description: putative plasma membrane-type proton ATPase
  misc_feature (689)..(740): NCBI GI NO: 16751320 NR Description: putative plasma membrane-type proton ATPase
MWNPLSWVMEAAALMAIALANGDNRPPDWQDFVGIICLLVINSTISFIEENNAGNAAAALMAGLAPKTKVLRDGKWSEQEAAILVPGDIVSIKLGDIIPADARLLEGDPLKVDQSALTGESLPVTKHPGQEVFSGSTCKQGEIEAVVIATGVHTFFGKAAHLVDSTNQVGHFQKVLTSIGNFCICSIAIGIAIEIVVMYPIQHRKYRDGIDNLLVLLIGGIPIAMPTVLSVTMAIGSHRLSQQGAITKRMTAIEEMAGMDVLCSDKTGTLTLNKLSVDKNLVEVFCKGVEKDQVLLFAAMASRVENQDAIDAAMVGMLADPKEARAGIREVHFLPFNPVDKRTALTYIDSDGNWHRVSKGAPEQILDLANARPDLRKKVLSCIDKYAERGLRSLAVARQVVPEKTKESPGGPWEFVGLLPLFDPPRHDSAETIRRALNLGVNVKMITGDQLAIGKETGRRLGMGTNMYPSAALLGTDKDSNIASIPVEELIEKADGFAGVFPEHKYEIVKKLQERKHIVGMTGDGVNDAPALKKADIGIAVADATDAARGASDIVLTEPGLSVIISAVLTSRAIFQRMKNYTIYAVSITIRIVFGFMLIALIWEFDFSAFMVLIIAILNDGTIMTISKDRVKPSPTPDSWKLKEIFATGIVLGGYQAIMSVIFFWAAHKTDFFSDKFGVRSIRDNNDELMGAVYLQVSIISQALIFVTRSRSWSFVERPGALLMIAFVIAQLVATLIAVYADWTFAKVKGIGWGWAGVIWIYSIVTYFPQDILKFAIRYILSGKAWASLFDNRTAFTTKKDYGIGEREAQWAQAQRTLHGLQPKEDVNIFPEKGSYRELSEIAEQAKRRAEIARLRELHTLKGHVESVAKLKGLDIDTAGHHYTV

SEQ ID NO: 4905 - protein, 877 aa, Arabidopsis thaliana
  peptide (1)..(877): Ceres Seq. ID no. 12599974
  misc_feature (251)..(537): Pfam Name: Pfam Description:  haloacid dehalogenase-like hydrolase
  misc_feature (1)..(770): NCBI GI NO: 3348073 NR Description: plasma membrane H(+)-ATPase 1
  misc_feature (1)..(770): NCBI GI NO: 6691153 NR Description: plasma membrane H(+)-ATPase
  misc_feature (1)..(773): NCBI GI NO: 2652922 NR Description: plasma membrane (H+) ATPase [Uromyces fabae]
  misc_feature (1)..(776): NCBI GI NO: 1709664 NR Description: Probable plasma membrane ATPase
  misc_feature (1)..(676): NCBI GI NO: 1709666 NR Description: Plasma membrane ATPase (Proton pump)
  misc_feature (685)..(739): NCBI GI NO: 1709666 NR Description: Plasma membrane ATPase (Proton pump)
  misc_feature (1)..(664): NCBI GI NO: 1709665 NR Description: Plasma membrane ATPase (Proton pump)
  misc_feature (672)..(732): NCBI GI NO: 1709665 NR Description: Plasma membrane ATPase (Proton pump)
  misc_feature (1)..(678): NCBI GI NO: 16751320 NR Description: putative plasma membrane-type proton ATPase
  misc_feature (681)..(732): NCBI GI NO: 16751320 NR Description: putative plasma membrane-type proton ATPase
MEAAALMAIALANGDNRPPDWQDFVGIICLLVINSTISFIEENNAGNAAAALMAGLAPKTKVLRDGKWSEQEAAILVPGDIVSIKLGDIIPADARLLEGDPLKVDQSALTGESLPVTKHPGQEVFSGSTCKQGEIEAVVIATGVHTFFGKAAHLVDSTNQVGHFQKVLTSIGNFCICSIAIGIAIEIVVMYPIQHRKYRDGIDNLLVLLIGGIPIAMPTVLSVTMAIGSHRLSQQGAITKRMTAIEEMAGMDVLCSDKTGTLTLNKLSVDKNLVEVFCKGVEKDQVLLFAAMASRVENQDAIDAAMVGMLADPKEARAGIREVHFLPFNPVDKRTALTYIDSDGNWHRVSKGAPEQILDLANARPDLRKKVLSCIDKYAERGLRSLAVARQVVPEKTKESPGGPWEFVGLLPLFDPPRHDSAETIRRALNLGVNVKMITGDQLAIGKETGRRLGMGTNMYPSAALLGTDKDSNIASIPVEELIEKADGFAGVFPEHKYEIVKKLQERKHIVGMTGDGVNDAPALKKADIGIAVADATDAARGASDIVLTEPGLSVIISAVLTSRAIFQRMKNYTIYAVSITIRIVFGFMLIALIWEFDFSAFMVLIIAILNDGTIMTISKDRVKPSPTPDSWKLKEIFATGIVLGGYQAIMSVIFFWAAHKTDFFSDKFGVRSIRDNNDELMGAVYLQVSIISQALIFVTRSRSWSFVERPGALLMIAFVIAQLVATLIAVYADWTFAKVKGIGWGWAGVIWIYSIVTYFPQDILKFAIRYILSGKAWASLFDNRTAFTTKKDYGIGEREAQWAQAQRTLHGLQPKEDVNIFPEKGSYRELSEIAEQAKRRAEIARLRELHTLKGHVESVAKLKGLDIDTAGHHYTV

SEQ ID NO: 4906 - DNA, 1812 bp, Arabidopsis thaliana
  misc_feature (1)..(1812): Ceres Seq. ID no. 13494298
tggagagaaatcagcttcaagcttaagagagcttcgaaagcgaaagcgacgatttcttctccatcgtgagagcaaatctccagagccgttttctcttcttcttcttcctcctcgcgccgtctctgaaactccatcatcgtatcaatcaaattgcttcctcctccaaattgaaaaacaatggaattggattcggagaacaaattgttgaagacgggtttggttatagtggcgacacttgttatagccaaactcatcttctctttcttcacttctgattctaagaagaagcgtcttcctcctactcttaaagcttggcctccattggttggaagtcttatcaaattcttgaaaggacctattattatgcttagagaggaataccctaagcttggaagtgtgtttactgttaatcttgttcacaaaaagattacttttcttattggtcctgaagtctctgctcattttttcaaagcttctgaatctgatcttagtcagcaggaagtgtatcagttcaatgtccctacttttggtcctggagttgttttcgatgttgattattctgttcgtcaggagcagtttcggttcttcactgaggcacttagagttaacaagttgaagggttatgtggatatgatggttactgaagctgaggattacttctctaaatggggagagagtggtgaagttgatattaaggttgagctagagaggctcatcatcttgactgcaagtagatgtttactgggtcgagaagttcgtgatcagctttttgatgatgtctctgctttgttccatgaccttgacaatggaatgcttcccatcagtgttctcttcccatatctcccaattccagctcaccgccgtcgtgaccgtgcccgagaaaagctttcggagattttcgcaaaaatcattgggtcgagaaaacgctctggaaaaacagagaacgacatgctgcagtgtttcatcgaatcaaagtacaaagatggtagacagacaaccgaatctgaagtcactggtttgctcattgctgctctgtttgcaggacaacacacgagctctatcacttccacctggaccggtgcttatctgatgcgatacaaagagtacttctcagctgctcttgatgagcagaagaacctgattgcgaaacatggagacaagatcgatcatgatatcttatccgagatggatgttctctaccgctgcattaaggaagcgttgaggcttcaccctccactcatcatgttaatgagagcctcgcacagtgatttcagcgtgacagctcgggatggaaaaacttacgatatcccaaagggtcacatcgttgcaacctcccctgcatttgccaaccgcttaccgcacatcttcaaagaccccgacacctacgacccagaaagattctcccctggaagagaagaggacaaagccgcaggggcattctcgtacattgcattcggagggggaaggcacgggtgccttggagagccgtttgcttacctgcagatcaaagccatatggagtcatttgttgaggaacttcgagcttgagctagtttcaccgttccctgagattgactggaacgctatggtggttggagttaaaggcaatgtgatggtgcgttacaagaggcgccagctttcttaaagacaagtttaaggttattgcagctttggatttttctctctggtttctgctttgcttttgtccctctctggttttagttttgttgttgaataattcttctgtttttataaactgttgttactctttaattgacatttatttttaagcttctaagtttgttggttctgc

SEQ ID NO: 4907 - protein, 488 aa, Arabidopsis thaliana
  peptide (1)..(488): Ceres Seq. ID no. 13494299
  misc_feature (1)..(488): NCBI GI NO: 15221075 NR Description: obtusifoliol 14-demethylase (CYP51)
  misc_feature (1)..(488): NCBI GI NO: 18000074 NR Description: obtusifoliol-14-demethylase [Nicotiana tabacum]
  misc_feature (1)..(488): NCBI GI NO: 27461067 NR Description: obtusifoliol-14-demethylase [Nicotiana tabacum]
  misc_feature (6)..(487): NCBI GI NO: 27542762 NR Description: cytochrome P450-like protein [Sorghum bicolor]
  misc_feature (6)..(487): NCBI GI NO: 5921924 NR Description: Cytochrome P450 51
  misc_feature (38)..(487): NCBI GI NO: 6166036 NR Description: Cytochrome P450 51
  misc_feature (65)..(487): NCBI GI NO: 4586676 NR Description: sterol 14-demethylase
  misc_feature (9)..(488): NCBI GI NO: 15227817 NR Description: obtusifoliol 14-alpha demethylase, putative
  misc_feature (179)..(487): NCBI GI NO: 7489685 NR Description: probable obtusifoliol 14-alpha-demethylase CYP51 - wheat
  misc_feature (1)..(485): NCBI GI NO: 6978751 NR Description: cytochrome P450, subfamily 51
MELDSENKLLKTGLVIVATLVIAKLIFSFFTSDSKKKRLPPTLKAWPPLVGSLIKFLKGPIIMLREEYPKLGSVFTVNLVHKKITFLIGPEVSAHFFKASESDLSQQEVYQFNVPTFGPGVVFDVDYSVRQEQFRFFTEALRVNKLKGYVDMMVTEAEDYFSKWGESGEVDIKVELERLIILTASRCLLGREVRDQLFDDVSALFHDLDNGMLPISVLFPYLPIPAHRRRDRAREKLSEIFAKIIGSRKRSGKTENDMLQCFIESKYKDGRQTTESEVTGLLIAALFAGQHTSSITSTWTGAYLMRYKEYFSAALDEQKNLIAKHGDKIDHDILSEMDVLYRCIKEALRLHPPLIMLMRASHSDFSVTARDGKTYDIPKGHIVATSPAFANRLPHIFKDPDTYDPERFSPGREEDKAAGAFSYIAFGGGRHGCLGEPFAYLQIKAIWSHLLRNFELELVSPFPEIDWNAMVVGVKGNVMVRYKRRQLS

SEQ ID NO: 4908 - protein, 426 aa, Arabidopsis thaliana
  peptide (1)..(426): Ceres Seq. ID no. 13494300
  misc_feature (1)..(426): NCBI GI NO: 15221075 NR Description: obtusifoliol 14-demethylase (CYP51)
  misc_feature (1)..(426): NCBI GI NO: 18000074 NR Description: obtusifoliol-14-demethylase [Nicotiana tabacum]
  misc_feature (1)..(426): NCBI GI NO: 27461067 NR Description: obtusifoliol-14-demethylase [Nicotiana tabacum]
  misc_feature (1)..(425): NCBI GI NO: 27542762 NR Description: cytochrome P450-like protein [Sorghum bicolor]
  misc_feature (1)..(425): NCBI GI NO: 5921924 NR Description: Cytochrome P450 51
  misc_feature (1)..(425): NCBI GI NO: 6166036 NR Description: Cytochrome P450 51
  misc_feature (3)..(425): NCBI GI NO: 4586676 NR Description: sterol 14-demethylase
  misc_feature (1)..(426): NCBI GI NO: 15227817 NR Description: obtusifoliol 14-alpha demethylase, putative
  misc_feature (117)..(425): NCBI GI NO: 7489685 NR Description: probable obtusifoliol 14-alpha-demethylase CYP51 - wheat
  misc_feature (1)..(423): NCBI GI NO: 6978751 NR Description: cytochrome P450, subfamily 51
MLREEYPKLGSVFTVNLVHKKITFLIGPEVSAHFFKASESDLSQQEVYQFNVPTFGPGVVFDVDYSVRQEQFRFFTEALRVNKLKGYVDMMVTEAEDYFSKWGESGEVDIKVELERLIILTASRCLLGREVRDQLFDDVSALFHDLDNGMLPISVLFPYLPIPAHRRRDRAREKLSEIFAKIIGSRKRSGKTENDMLQCFIESKYKDGRQTTESEVTGLLIAALFAGQHTSSITSTWTGAYLMRYKEYFSAALDEQKNLIAKHGDKIDHDILSEMDVLYRCIKEALRLHPPLIMLMRASHSDFSVTARDGKTYDIPKGHIVATSPAFANRLPHIFKDPDTYDPERFSPGREEDKAAGAFSYIAFGGGRHGCLGEPFAYLQIKAIWSHLLRNFELELVSPFPEIDWNAMVVGVKGNVMVRYKRRQLS

SEQ ID NO: 4909 - protein, 337 aa, Arabidopsis thaliana
  peptide (1)..(337): Ceres Seq. ID no. 13494301
  misc_feature (1)..(337): NCBI GI NO: 15221075 NR Description: obtusifoliol 14-demethylase (CYP51)
  misc_feature (1)..(337): NCBI GI NO: 18000074 NR Description: obtusifoliol-14-demethylase [Nicotiana tabacum]
  misc_feature (1)..(337): NCBI GI NO: 27461067 NR Description: obtusifoliol-14-demethylase [Nicotiana tabacum]
  misc_feature (1)..(336): NCBI GI NO: 27542762 NR Description: cytochrome P450-like protein [Sorghum bicolor]
  misc_feature (1)..(336): NCBI GI NO: 5921924 NR Description: Cytochrome P450 51
  misc_feature (1)..(336): NCBI GI NO: 6166036 NR Description: Cytochrome P450 51
  misc_feature (1)..(336): NCBI GI NO: 4586676 NR Description: sterol 14-demethylase
  misc_feature (1)..(337): NCBI GI NO: 15227817 NR Description: obtusifoliol 14-alpha demethylase, putative
  misc_feature (28)..(336): NCBI GI NO: 7489685 NR Description: probable obtusifoliol 14-alpha-demethylase CYP51 - wheat
  misc_feature (1)..(334): NCBI GI NO: 6978751 NR Description: cytochrome P450, subfamily 51
MMVTEAEDYFSKWGESGEVDIKVELERLIILTASRCLLGREVRDQLFDDVSALFHDLDNGMLPISVLFPYLPIPAHRRRDRAREKLSEIFAKIIGSRKRSGKTENDMLQCFIESKYKDGRQTTESEVTGLLIAALFAGQHTSSITSTWTGAYLMRYKEYFSAALDEQKNLIAKHGDKIDHDILSEMDVLYRCIKEALRLHPPLIMLMRASHSDFSVTARDGKTYDIPKGHIVATSPAFANRLPHIFKDPDTYDPERFSPGREEDKAAGAFSYIAFGGGRHGCLGEPFAYLQIKAIWSHLLRNFELELVSPFPEIDWNAMVVGVKGNVMVRYKRRQLS

SEQ ID NO: 4910 - DNA, 756 bp, Arabidopsis thaliana
  misc_feature (1)..(756): Ceres Seq. ID no. 12673930
agaatccaaaaccaaaccttcagatcataaatccaaaaccactcatttttctattactgaaatttttcttagagaagaagaagaagaagcaaaatggccacaagcgcatcagctttgctctcaccaaccacattctccactgcaatctcccacaaaaaccctaactccatctcattccatggccttcgtcccctccgtctaggtggctcctcctccgccctacccaaactatcaaccaccgggagaaaatcctcctccgctgtcgtgagagctgagctaagcccttccatcgtcataagtctcagcacaggtctctccctcttcctcggccgtttcgtcttcttcaacttccagagagagaacgtagcaaaacagggcttaccggagcagaacggaaaaacccatttcgaagctggagatgatcgtgctaaggagtacgtcagtctcttgaaatcgaacgatccaattggattcaacattgttgatgttcttgcttggggttctattggacacatcgttgcttactacatcttggctacttccagcaatggatacgacccaagcttctttggatgattcgtttcaatgtcaatctctcgtatatgtatatgtatatgtttgacttgtgttgcaagctatctaatctgttctctatctctgtttcttcttctgttgttgttgttgttgtctaagacttgtccctctttttgcaaatgttttatttctccatttacaaagattggtttgcagagtttt

SEQ ID NO: 4911 - protein, 160 aa, Arabidopsis thaliana
  peptide (1)..(160): Ceres Seq. ID no. 12673931
  misc_feature (61)..(156): Pfam Name: Pfam Description:  Photosystem I psaG / psaK
  misc_feature (1)..(160): NCBI GI NO: 15222757 NR Description: photosystem I subunit V precursor, putative
  misc_feature (20)..(159): NCBI GI NO: 131194 NR Description: Photosystem I reaction center subunit V
  misc_feature (30)..(160): NCBI GI NO: 131192 NR Description: Photosystem I reaction center subunit V
  misc_feature (52)..(155): NCBI GI NO: 17369611 NR Description: Photosystem I reaction center subunit V
  misc_feature (55)..(151): NCBI GI NO: 131191 NR Description: Photosystem I reaction center subunit V
  misc_feature (61)..(99): NCBI GI NO: 131193 NR Description: Photosystem I reaction center subunit V
MATSASALLSPTTFSTAISHKNPNSISFHGLRPLRLGGSSSALPKLSTTGRKSSSAVVRAELSPSIVISLSTGLSLFLGRFVFFNFQRENVAKQGLPEQNGKTHFEAGDDRAKEYVSLLKSNDPIGFNIVDVLAWGSIGHIVAYYILATSSNGYDPSFFG

SEQ ID NO: 4912 - DNA, 1381 bp, Arabidopsis thaliana
  misc_feature (1)..(1381): Ceres Seq. ID no. 12329619
agttccccacaaagctcgttgtcgtcatcgcgcgagcttgaaccaaaaaaccatgaacagtgataaggaagaggagccattggaagagatcggcgattcgaataatgttctcgatctcactagctatcagctccacagtctcgatacggtcgagttaccgccgaacctgattgagctggaccttacggcgaaccgtttgtcgggattggactcgaggatcgctcagctctccacgcttaagaagctttctctccgccaaaacctaattgatgattccgccgtcgaaccgttgtctcactgggacgccttgtccgatctcgaggagttagttctcagagataacaagctagcaaaagtaccagatgtcagcatattcacgaagcttttggtttacgacatatctttcaatgaaatcacttctttggaaggaatatccaaggcctctagcacactgaaggaactctatgtgtctaaaaatgaagttaacaagattatggagattgaacacttacacaacttgcagattcttgaactggggtctaatagattgcgggtgatggaaaatctggaaaacttcacaaaattagaagaactatggctcggaagaaaccgtataaaagttgttaacctgtgtgggctcaaatgcataaaaaagattagcttgcagagcaatcgattgacctctatgaaaggatttgaggaatgtgttgctcttgaagagttatatttgagccataatggtatctccaaaatggaaggcttgagtgcattggtcaacctacgggtattggacgtgtcgaacaacaagcttacttcagttgatgacattcagaacctcacaaagttggaagatttgtggcttaatgacaaccagatagaatcactggaagcaatcacagaagctgttacaggatctaaagagaagcttaccactatctacctcgaaaataacccttgtgccaagtcttctgattatgttgctgcggtcagacaaatcttcccgaatgtggagcaaattgattctaacatatttgcttagagatggatatattccttgtcgtgctgtttgtatgaatgtctgcttcctcatcccatgggcatgggcatcgaatttaggaaatcaggtacaacacggattcctcaaaatatacatgtgtctgctgtttatcataaagaagtgcaaatgagcaaattaaatcgctctcgtcatggatatttattaaaacgtttttgaaattctagtgttcccttgcaagtaaaccaattcttgtttttggtctgtaattgtatgtggactgtgtctgtaaaagggaatccccgagtctgaagttgtctttgtttcaagtttcaaccgagaacactaacttgaatactttgatcc

SEQ ID NO: 4913 - protein, 345 aa, Arabidopsis thaliana
  peptide (1)..(345): Ceres Seq. ID no. 12329620
  misc_feature (18)..(345): NCBI GI NO: 21536755 NR Description: unknown [Arabidopsis thaliana]
  misc_feature (18)..(345): NCBI GI NO: 15241153 NR Description: putative protein; protein id: At5g19680
  misc_feature (47)..(341): NCBI GI NO: 12963569 NR Description: protein phosphatase-1 regulatory subunit 7
  misc_feature (47)..(341): NCBI GI NO: 34877683 NR Description: similar to protein phosphatase 1
  misc_feature (20)..(341): NCBI GI NO: 4506013 NR Description: protein phosphatase 1, regulatory subunit 7
  misc_feature (47)..(341): NCBI GI NO: 4633066 NR Description: protein phosphatase-1 regulatory subunit 7 alpha2
  misc_feature (13)..(341): NCBI GI NO: 6322655 NR Description: Interacts with and may be a positive regulator of GLC7 whichencodes type1 protein phosphatase
  misc_feature (48)..(343): NCBI GI NO: 6684160 NR Description: putative mitotic protein phosphatase 1 regulator
  misc_feature (79)..(341): NCBI GI NO: 40747368 NR Description: hypothetical protein AN0425.2
  misc_feature (71)..(341): NCBI GI NO: 23490241 NR Description: protein phosphatase-1 regulatory subunit 7 alpha2
VPHKARCRHRASLNQKTMNSDKEEEPLEEIGDSNNVLDLTSYQLHSLDTVELPPNLIELDLTANRLSGLDSRIAQLSTLKKLSLRQNLIDDSAVEPLSHWDALSDLEELVLRDNKLAKVPDVSIFTKLLVYDISFNEITSLEGISKASSTLKELYVSKNEVNKIMEIEHLHNLQILELGSNRLRVMENLENFTKLEELWLGRNRIKVVNLCGLKCIKKISLQSNRLTSMKGFEECVALEELYLSHNGISKMEGLSALVNLRVLDVSNNKLTSVDDIQNLTKLEDLWLNDNQIESLEAITEAVTGSKEKLTTIYLENNPCAKSSDYVAAVRQIFPNVEQIDSNIFA

SEQ ID NO: 4914 - protein, 328 aa, Arabidopsis thaliana
  peptide (1)..(328): Ceres Seq. ID no. 12329621
  misc_feature (1)..(328): NCBI GI NO: 21536755 NR Description: unknown [Arabidopsis thaliana]
  misc_feature (1)..(328): NCBI GI NO: 15241153 NR Description: putative protein; protein id: At5g19680
  misc_feature (30)..(324): NCBI GI NO: 12963569 NR Description: protein phosphatase-1 regulatory subunit 7
  misc_feature (30)..(324): NCBI GI NO: 34877683 NR Description: similar to protein phosphatase 1
  misc_feature (3)..(324): NCBI GI NO: 4506013 NR Description: protein phosphatase 1, regulatory subunit 7
  misc_feature (30)..(324): NCBI GI NO: 4633066 NR Description: protein phosphatase-1 regulatory subunit 7 alpha2
  misc_feature (1)..(324): NCBI GI NO: 6322655 NR Description: Interacts with and may be a positive regulator of GLC7 whichencodes type1 protein phosphatase
  misc_feature (31)..(326): NCBI GI NO: 6684160 NR Description: putative mitotic protein phosphatase 1 regulator
  misc_feature (62)..(324): NCBI GI NO: 40747368 NR Description: hypothetical protein AN0425.2
  misc_feature (54)..(324): NCBI GI NO: 23490241 NR Description: protein phosphatase-1 regulatory subunit 7 alpha2
MNSDKEEEPLEEIGDSNNVLDLTSYQLHSLDTVELPPNLIELDLTANRLSGLDSRIAQLSTLKKLSLRQNLIDDSAVEPLSHWDALSDLEELVLRDNKLAKVPDVSIFTKLLVYDISFNEITSLEGISKASSTLKELYVSKNEVNKIMEIEHLHNLQILELGSNRLRVMENLENFTKLEELWLGRNRIKVVNLCGLKCIKKISLQSNRLTSMKGFEECVALEELYLSHNGISKMEGLSALVNLRVLDVSNNKLTSVDDIQNLTKLEDLWLNDNQIESLEAITEAVTGSKEKLTTIYLENNPCAKSSDYVAAVRQIFPNVEQIDSNIFA

SEQ ID NO: 4915 - protein, 181 aa, Arabidopsis thaliana
  peptide (1)..(181): Ceres Seq. ID no. 12329622
  misc_feature (1)..(181): NCBI GI NO: 21536755 NR Description: unknown [Arabidopsis thaliana]
  misc_feature (1)..(181): NCBI GI NO: 15241153 NR Description: putative protein; protein id: At5g19680
  misc_feature (1)..(177): NCBI GI NO: 12963569 NR Description: protein phosphatase-1 regulatory subunit 7
  misc_feature (1)..(177): NCBI GI NO: 34877683 NR Description: similar to protein phosphatase 1
  misc_feature (1)..(177): NCBI GI NO: 4506013 NR Description: protein phosphatase 1, regulatory subunit 7
  misc_feature (1)..(177): NCBI GI NO: 4633066 NR Description: protein phosphatase-1 regulatory subunit 7 alpha2
  misc_feature (1)..(177): NCBI GI NO: 6322655 NR Description: Interacts with and may be a positive regulator of GLC7 whichencodes type1 protein phosphatase
  misc_feature (1)..(179): NCBI GI NO: 6684160 NR Description: putative mitotic protein phosphatase 1 regulator
  misc_feature (1)..(177): NCBI GI NO: 40747368 NR Description: hypothetical protein AN0425.2
  misc_feature (1)..(177): NCBI GI NO: 23490241 NR Description: protein phosphatase-1 regulatory subunit 7 alpha2
MEIEHLHNLQILELGSNRLRVMENLENFTKLEELWLGRNRIKVVNLCGLKCIKKISLQSNRLTSMKGFEECVALEELYLSHNGISKMEGLSALVNLRVLDVSNNKLTSVDDIQNLTKLEDLWLNDNQIESLEAITEAVTGSKEKLTTIYLENNPCAKSSDYVAAVRQIFPNVEQIDSNIFA

SEQ ID NO: 4916 - DNA, 975 bp, Arabidopsis thaliana
  misc_feature (1)..(975): Ceres Seq. ID no. 12558382
atttttgattagtgtgaataaataaattttaagaacaacaagttacccaatcatttgaaaaaatgatactataattcgctaaacttttttataaaagaaaaattaagagcaattgggaacgagaacgtgttgaatagttggggacgagattacaagcaccaattcatcttcagcatcatctccaaattcttcttaaaattttcttcttcctcctttaccatctccagcaccggacctagtcaaaaagtctttcttctcaaatggatcaaaagcctcttggattgctcacgatccacgtcaagagagggattaatctcgccattcgcgaccatcgtagcagcgatccttacatcgttctcaacgtcgccgatcagacattgaagacacgtgtggtgaaaaaaaattgtaacccagtatggaatgaagaaatgactgttgctatcaaagatcctaatgtcccaatccgcttgacagtgtttgattgggacaagttcacaggagatgacaaaatgggagatgcgaacatagacattcaaccatacttagaggctttgaaaatggggatggagcttttgaggctacctaatgggtgtgctatcaaaagggttcaaccatcaaggcacaattgtttatctgatgagagtagcattgtttggaacaatggtaagatcacacaagacttgatccttagacttaacaatgtcgaatgtggcgagattgagatcatgcttgaatggcatgaaggtgctggttgcagaggtatcacttcctcttccaaaggtggaggctcttcctctacctaaacttattattgttctttctttctttctttttttgttgttgtgtatcaatctgttgttgttgtttccatatgtataagcaactcaagtatgttttcttgatgaccattttcaatggcataatcaagaagaaaagctggaaaatttgagactttcttttgtatgttttcatttg

SEQ ID NO: 4917 - protein, 180 aa, Arabidopsis thaliana
  peptide (1)..(180): Ceres Seq. ID no. 12558383
  misc_feature (9)..(88): Pfam Name: Pfam Description:  C2 domain
  misc_feature (1)..(180): NCBI GI NO: 15226306 NR Description: hypothetical protein; protein id: At2g01540
  misc_feature (1)..(168): NCBI GI NO: 18409675 NR Description: zinc finger and C2 domain protein, putative
  misc_feature (6)..(168): NCBI GI NO: 18409682 NR Description: expressed protein; protein id: At1g70810
  misc_feature (6)..(168): NCBI GI NO: 13430460 NR Description: unknown protein [Arabidopsis thaliana]
  misc_feature (6)..(168): NCBI GI NO: 15240322 NR Description: putative protein; protein id: At5g37740
  misc_feature (1)..(168): NCBI GI NO: 15221907 NR Description: unknown protein; protein id: At1g48590.1
  misc_feature (1)..(168): NCBI GI NO: 25405940 NR Description: protein T1N15.21 [imported] - Arabidopsis thaliana
  misc_feature (1)..(168): NCBI GI NO: 30684739 NR Description: C2 domain-containing protein
  misc_feature (1)..(168): NCBI GI NO: 15223248 NR Description: unknown protein; protein id: At1g70800.1
  misc_feature (1)..(159): NCBI GI NO: 1808694 NR Description: hypothetical protein [Sporobolus stapfianus]
MDQKPLGLLTIHVKRGINLAIRDHRSSDPYIVLNVADQTLKTRVVKKNCNPVWNEEMTVAIKDPNVPIRLTVFDWDKFTGDDKMGDANIDIQPYLEALKMGMELLRLPNGCAIKRVQPSRHNCLSDESSIVWNNGKITQDLILRLNNVECGEIEIMLEWHEGAGCRGITSSSKGGGSSST

SEQ ID NO: 4918 - protein, 124 aa, Arabidopsis thaliana
  peptide (1)..(124): Ceres Seq. ID no. 12558384
  misc_feature (1)..(124): NCBI GI NO: 15226306 NR Description: hypothetical protein; protein id: At2g01540
  misc_feature (1)..(112): NCBI GI NO: 18409675 NR Description: zinc finger and C2 domain protein, putative
  misc_feature (1)..(112): NCBI GI NO: 18409682 NR Description: expressed protein; protein id: At1g70810
  misc_feature (1)..(112): NCBI GI NO: 13430460 NR Description: unknown protein [Arabidopsis thaliana]
  misc_feature (1)..(112): NCBI GI NO: 15240322 NR Description: putative protein; protein id: At5g37740
  misc_feature (1)..(112): NCBI GI NO: 15221907 NR Description: unknown protein; protein id: At1g48590.1
  misc_feature (1)..(112): NCBI GI NO: 25405940 NR Description: protein T1N15.21 [imported] - Arabidopsis thaliana
  misc_feature (1)..(112): NCBI GI NO: 30684739 NR Description: C2 domain-containing protein
  misc_feature (1)..(112): NCBI GI NO: 15223248 NR Description: unknown protein; protein id: At1g70800.1
  misc_feature (1)..(103): NCBI GI NO: 1808694 NR Description: hypothetical protein [Sporobolus stapfianus]
MTVAIKDPNVPIRLTVFDWDKFTGDDKMGDANIDIQPYLEALKMGMELLRLPNGCAIKRVQPSRHNCLSDESSIVWNNGKITQDLILRLNNVECGEIEIMLEWHEGAGCRGITSSSKGGGSSST

SEQ ID NO: 4919 - protein, 97 aa, Arabidopsis thaliana
  peptide (1)..(97): Ceres Seq. ID no. 12558385
  misc_feature (1)..(97): NCBI GI NO: 15226306 NR Description: hypothetical protein; protein id: At2g01540
  misc_feature (1)..(85): NCBI GI NO: 18409675 NR Description: zinc finger and C2 domain protein, putative
  misc_feature (1)..(85): NCBI GI NO: 18409682 NR Description: expressed protein; protein id: At1g70810
  misc_feature (1)..(85): NCBI GI NO: 13430460 NR Description: unknown protein [Arabidopsis thaliana]
  misc_feature (1)..(85): NCBI GI NO: 15240322 NR Description: putative protein; protein id: At5g37740
  misc_feature (1)..(85): NCBI GI NO: 15221907 NR Description: unknown protein; protein id: At1g48590.1
  misc_feature (1)..(85): NCBI GI NO: 25405940 NR Description: protein T1N15.21 [imported] - Arabidopsis thaliana
  misc_feature (1)..(85): NCBI GI NO: 30684739 NR Description: C2 domain-containing protein
  misc_feature (1)..(85): NCBI GI NO: 15223248 NR Description: unknown protein; protein id: At1g70800.1
  misc_feature (1)..(76): NCBI GI NO: 1808694 NR Description: hypothetical protein [Sporobolus stapfianus]
MGDANIDIQPYLEALKMGMELLRLPNGCAIKRVQPSRHNCLSDESSIVWNNGKITQDLILRLNNVECGEIEIMLEWHEGAGCRGITSSSKGGGSSST

SEQ ID NO: 4920 - DNA, 1133 bp, Arabidopsis thaliana
  misc_feature (1)..(1133): Ceres Seq. ID no. 12331239
actttctctttgttttctttctaacctctttccacgaaaagtcacgatgggagataccgcagaggatcaggacgaccgagctatgatggaagctgaaggagtaacgagcttctccgaacttcttatgttctctgacggcgttctcagctcctcttccgaccaccaacctgagggtaatgtcggcgatggtggagaagacagtttaggttttgtattctccggcaaaactggctcaagaatgctctgttttagtggaggctatcaaaacgacgacgagtcactcttcctagaaccttctgttccaacctccggagtctctgatcttgacccttcatgcattaagattgattgcaggaactcaaacgacgcgtgtacggtcgataaatctactaaatcatcaaccaagaagagaaccggaacgggtaatgggcaagagtcggatcaaaatcgaaaaccgggcaagaaagggaaacgaaatcaagagaaatcatcagttggaattgcaaaggtcaggaaagaaaggttaggggaaagaattgcagcgttgcagcagttggtttctccatacggcaagacagatgcagcttctgtgttgcatgaagcgatgggttacatcaaattcttacaagatcagattcaagtcctttgctctccttatctaatcaaccattctctcgacggtggagttgtcaccggagatgtaatggcggcgatgaaagcgaaagacttgagaagcagaggattatgtctagtacctgtctcatccaccgtacacgtggaaaattccaacggtgctgatttctggtcacctgctactatgggtcacactacgtcaccgtcgttacctcaaggattttaattaaacggtcgtaggctgatatatattagtagtattttagtagccttttttcttgggttttgtttttggctgaagaactattactagtaaatgttacacccagacatttttttgggattatctgggtggtataaaaaggttggaatcttttgtgtttgtaaaattagattgtctaagttttcttaaagtttctttgatgtcactgtcacagttgcgacgagtagtgatggtacttactgaaaggctaagcttattcacgctcttaaagttttgc

SEQ ID NO: 4921 - protein, 285 aa, Arabidopsis thaliana
  peptide (1)..(285): Ceres Seq. ID no. 12331240
  misc_feature (169)..(208): Pfam Name: Pfam Description:  Helix-loop-helix DNA-binding domain
  misc_feature (16)..(285): NCBI GI NO: 18402256 NR Description: expressed protein; protein id: At3g19500
  misc_feature (16)..(285): NCBI GI NO: 21536756 NR Description: unknown [Arabidopsis thaliana]
  misc_feature (30)..(177): NCBI GI NO: 15222826 NR Description: hypothetical protein; protein id: At1g49830.1
  misc_feature (231)..(278): NCBI GI NO: 15222826 NR Description: hypothetical protein; protein id: At1g49830.1
  misc_feature (80)..(278): NCBI GI NO: 14488370 NR Description: putative ethylene-responsive protein
  misc_feature (168)..(279): NCBI GI NO: 5669656 NR Description: ER33 protein [Lycopersicon esculentum]
  misc_feature (118)..(271): NCBI GI NO: 21740790 NR Description: OSJNBb0091E11.4
  misc_feature (127)..(276): NCBI GI NO: 15232315 NR Description: hypothetical protein; protein id: At3g20640.1
  misc_feature (127)..(276): NCBI GI NO: 9294343 NR Description: gene_id:F3H11.2~unknown protein
  misc_feature (132)..(270): NCBI GI NO: 22093671 NR Description: similar to bHLH
LSLCFLSNLFPRKVTMGDTAEDQDDRAMMEAEGVTSFSELLMFSDGVLSSSSDHQPEGNVGDGGEDSLGFVFSGKTGSRMLCFSGGYQNDDESLFLEPSVPTSGVSDLDPSCIKIDCRNSNDACTVDKSTKSSTKKRTGTGNGQESDQNRKPGKKGKRNQEKSSVGIAKVRKERLGERIAALQQLVSPYGKTDAASVLHEAMGYIKFLQDQIQVLCSPYLINHSLDGGVVTGDVMAAMKAKDLRSRGLCLVPVSSTVHVENSNGADFWSPATMGHTTSPSLPQGF

SEQ ID NO: 4922 - protein, 270 aa, Arabidopsis thaliana
  peptide (1)..(270): Ceres Seq. ID no. 12331241
  misc_feature (154)..(193): Pfam Name: Pfam Description:  Helix-loop-helix DNA-binding domain
  misc_feature (1)..(270): NCBI GI NO: 18402256 NR Description: expressed protein; protein id: At3g19500
  misc_feature (1)..(270): NCBI GI NO: 21536756 NR Description: unknown [Arabidopsis thaliana]
  misc_feature (15)..(162): NCBI GI NO: 15222826 NR Description: hypothetical protein; protein id: At1g49830.1
  misc_feature (216)..(263): NCBI GI NO: 15222826 NR Description: hypothetical protein; protein id: At1g49830.1
  misc_feature (65)..(263): NCBI GI NO: 14488370 NR Description: putative ethylene-responsive protein
  misc_feature (153)..(264): NCBI GI NO: 5669656 NR Description: ER33 protein [Lycopersicon esculentum]
  misc_feature (103)..(256): NCBI GI NO: 21740790 NR Description: OSJNBb0091E11.4
  misc_feature (112)..(261): NCBI GI NO: 15232315 NR Description: hypothetical protein; protein id: At3g20640.1
  misc_feature (112)..(261): NCBI GI NO: 9294343 NR Description: gene_id:F3H11.2~unknown protein
  misc_feature (117)..(255): NCBI GI NO: 22093671 NR Description: similar to bHLH
MGDTAEDQDDRAMMEAEGVTSFSELLMFSDGVLSSSSDHQPEGNVGDGGEDSLGFVFSGKTGSRMLCFSGGYQNDDESLFLEPSVPTSGVSDLDPSCIKIDCRNSNDACTVDKSTKSSTKKRTGTGNGQESDQNRKPGKKGKRNQEKSSVGIAKVRKERLGERIAALQQLVSPYGKTDAASVLHEAMGYIKFLQDQIQVLCSPYLINHSLDGGVVTGDVMAAMKAKDLRSRGLCLVPVSSTVHVENSNGADFWSPATMGHTTSPSLPQGF

SEQ ID NO: 4923 - protein, 258 aa, Arabidopsis thaliana
  peptide (1)..(258): Ceres Seq. ID no. 12331242
  misc_feature (142)..(181): Pfam Name: Pfam Description:  Helix-loop-helix DNA-binding domain
  misc_feature (1)..(258): NCBI GI NO: 18402256 NR Description: expressed protein; protein id: At3g19500
  misc_feature (1)..(258): NCBI GI NO: 21536756 NR Description: unknown [Arabidopsis thaliana]
  misc_feature (3)..(150): NCBI GI NO: 15222826 NR Description: hypothetical protein; protein id: At1g49830.1
  misc_feature (204)..(251): NCBI GI NO: 15222826 NR Description: hypothetical protein; protein id: At1g49830.1
  misc_feature (53)..(251): NCBI GI NO: 14488370 NR Description: putative ethylene-responsive protein
  misc_feature (141)..(252): NCBI GI NO: 5669656 NR Description: ER33 protein [Lycopersicon esculentum]
  misc_feature (91)..(244): NCBI GI NO: 21740790 NR Description: OSJNBb0091E11.4
  misc_feature (100)..(249): NCBI GI NO: 15232315 NR Description: hypothetical protein; protein id: At3g20640.1
  misc_feature (100)..(249): NCBI GI NO: 9294343 NR Description: gene_id:F3H11.2~unknown protein
  misc_feature (105)..(243): NCBI GI NO: 22093671 NR Description: similar to bHLH
MMEAEGVTSFSELLMFSDGVLSSSSDHQPEGNVGDGGEDSLGFVFSGKTGSRMLCFSGGYQNDDESLFLEPSVPTSGVSDLDPSCIKIDCRNSNDACTVDKSTKSSTKKRTGTGNGQESDQNRKPGKKGKRNQEKSSVGIAKVRKERLGERIAALQQLVSPYGKTDAASVLHEAMGYIKFLQDQIQVLCSPYLINHSLDGGVVTGDVMAAMKAKDLRSRGLCLVPVSSTVHVENSNGADFWSPATMGHTTSPSLPQGF

SEQ ID NO: 4924 - DNA, 659 bp, Arabidopsis thaliana
  misc_feature (1)..(659): Ceres Seq. ID no. 12337484
tgaacatttctcagtcccacagggtcgcagagctattgagcttgtagcgggtaaagagagtgccatcgctcaagtggttcggactgtcattgggaagacttacgtgctgtcttttgcggttgtagacgccaacaatgcttgcaaaggatcaatggtggttgaggcttttgcaggaaaagatacacttaaggtcccttacgagtcgaaaggcacaggagggtttaaacgagcttctattcgatttgtggcggtttcgacccgatcaagaattatgttctacagcactttctatgccatgaggagcgatgatttctcgtcattgtgtgggcctgtgatcgatgatgtcaagcttataagcgttcgtaaaccatagatgaatcaccaatcctattacaagaaaatgcatcgtgtggtcttcttttattttccttaaactgtctttggtgtgtgttggattttattgaaacgagaaggtgaaaaaaacagagttttatttacgagagttagggttttatataggcagatgggcctttgcttatattgtattttcttgtatgagaaggcaaaagaaacgttgcctatatcttatgtatctaggccttttaatttttatggaagagttacaaaacttacaataaagttgtatgcatattttactt

SEQ ID NO: 4925 - protein, 123 aa, Arabidopsis thaliana
  peptide (1)..(123): Ceres Seq. ID no. 12337485
  misc_feature (1)..(121): Pfam Name: Pfam Description:  Protein of unknown function, DUF642
  misc_feature (1)..(123): NCBI GI NO: 15239438 NR Description: putative protein; protein id: At5g25460
  misc_feature (1)..(123): NCBI GI NO: 15809822 NR Description: AT5g25460/F18G18_200 [Arabidopsis thaliana]
  misc_feature (1)..(123): NCBI GI NO: 21537379 NR Description: unknown [Arabidopsis thaliana]
  misc_feature (1)..(123): NCBI GI NO: 15239049 NR Description: putative protein; protein id: At5g11420
  misc_feature (1)..(123): NCBI GI NO: 21554402 NR Description: unknown [Arabidopsis thaliana]
  misc_feature (1)..(123): NCBI GI NO: 23397043 NR Description: unknown protein [Arabidopsis thaliana]
  misc_feature (1)..(123): NCBI GI NO: 7488898 NR Description: hypothetical protein - castor bean
  misc_feature (1)..(123): NCBI GI NO: 7486632 NR Description: hypothetical protein F8B4
  misc_feature (1)..(123): NCBI GI NO: 18418018 NR Description: putative protein; protein id: At4g32460
  misc_feature (2)..(122): NCBI GI NO: 7488741 NR Description: hypothetical protein precursor - alfalfa
EHFSVPQGRRAIELVAGKESAIAQVVRTVIGKTYVLSFAVVDANNACKGSMVVEAFAGKDTLKVPYESKGTGGFKRASIRFVAVSTRSRIMFYSTFYAMRSDDFSSLCGPVIDDVKLISVRKP

SEQ ID NO: 4926 - protein, 73 aa, Arabidopsis thaliana
  peptide (1)..(73): Ceres Seq. ID no. 12337486
  misc_feature (1)..(71): Pfam Name: Pfam Description:  Protein of unknown function, DUF642
  misc_feature (1)..(73): NCBI GI NO: 15239438 NR Description: putative protein; protein id: At5g25460
  misc_feature (1)..(73): NCBI GI NO: 15809822 NR Description: AT5g25460/F18G18_200 [Arabidopsis thaliana]
  misc_feature (1)..(73): NCBI GI NO: 21537379 NR Description: unknown [Arabidopsis thaliana]
  misc_feature (1)..(73): NCBI GI NO: 15239049 NR Description: putative protein; protein id: At5g11420
  misc_feature (1)..(73): NCBI GI NO: 21554402 NR Description: unknown [Arabidopsis thaliana]
  misc_feature (1)..(73): NCBI GI NO: 23397043 NR Description: unknown protein [Arabidopsis thaliana]
  misc_feature (1)..(73): NCBI GI NO: 7488898 NR Description: hypothetical protein - castor bean
  misc_feature (1)..(73): NCBI GI NO: 7486632 NR Description: hypothetical protein F8B4
  misc_feature (1)..(73): NCBI GI NO: 18418018 NR Description: putative protein; protein id: At4g32460
  misc_feature (1)..(72): NCBI GI NO: 7488741 NR Description: hypothetical protein precursor - alfalfa
MVVEAFAGKDTLKVPYESKGTGGFKRASIRFVAVSTRSRIMFYSTFYAMRSDDFSSLCGPVIDDVKLISVRKP

SEQ ID NO: 4927 - DNA, 2108 bp, Arabidopsis thaliana
  misc_feature (1)..(2108): Ceres Seq. ID no. 13592781
ctttctaacctacaacatcctaatcgaaaagttgttgtcctaaaattatggttcttccttgtgaatattgcttgatctaggaaactaatcaggatctggtgagaaatcaataagatgttggagaaagagtttttcacggagtatggtgaagcaagtcaatatcagatccaagaagttgttggcaaaggaagctacggagttgttgcttctgcggaatgtccacacacgggaggcaaagtagccatcaagaagatgacaaatgtgtttgaacatgtctcagatgctattcgtatcctcagagagatcaagcttctcaggcttcttcgacatcctgatatcgtggagatcaagcatatcatgcttcctccttgtcgcaaggaattcaaagatatatatgttgtttttgagttgatggagtctgatcttcaccacgttcttaaggtaaatgacgacctcactcctcagcatcatcaattcttcttgtaccaacttcttcgtggcttaaaattcatgcactcaggtaaggtttctttgttcccttgttgttttctctagctcttacattttcatctgaagatatattgtgtgtttttctttgaatcttgcttcttatcatattttgttcttgtattatagctcatgtgttccatagagatctgaagcctaagaacatcctcgctaatgctgattgcaaaatcaagatctgtgatttaggacttgctcgtgtctcctttactgattccccttctgctgtgttttggactgactacgttgctacaagatggtaccgtgcgccagagctctgtggttccttctattctaactacacgccggcgattgacatgtggagtgttgggtgcatatttgcagagatgctaactggaaaacctttgtttcctggcaaaaacgttgtgcaccagctagaactcgtgactgatctgcttggaactccgtcgccgataactctatccagggtttgttttgtttttatttttcccggaagctaaactaactctcccaatacagaggcttctctctctctatctccgagagatagacttgctttgaatgcaagtgtgtttttattagctttgtgtgtcatgaagttgtttataatgaatctgtgtagattcggaatgagaaggctagaaagtatttgggaaacatgaggcgaaaggatcctgtacctttcacccataaattccccaatatcgatcctgtggcgctgaagttacttcagcgtttgatcgcttttgacccaaaggaccgtccctctgcaaaagaggcattggctgatccgtattttcaaggattggcaaatgtggactatgaaccatcgaggcaacctatctcgaaacttgagtttgagtttgagaggaggaaattgactcgcgatgacgtgagggaactcatgtacagagagattttggagtatcatccacagatgttgcaagagtatctacaaggagaagagaacataaactctcattttctatacccaagcggagttgatcagttcaaacaagagtttgcccgactcgaagaacacaacgacgatgaagaggaacacaactccccaccacatcagagaaagtacacttcactcccytagagaacgggtgtgctcatcagaagacgaaggttctgattcagttcatgctcaatcgtcttcagcttcagtggtgtttacacctccacagactccaaacacagcaactggcttatcatcacagaaggcgtcacaagtagataaagcagcaactccggtaaaacggtctgcatgtctaatgaggagtgatagtatctgtgcttcaagatgtgttggtgtctcctctgcagtgtcatagtcagaaaaaaattgatttctcaagttgtttagcagcaaaccattgattattgtgttctgcctattgtatcatgatgtctctcctgagtgttttcattgttgtaactctcttcttcttcttcttactctctgctcatattggaatctcgtgtgtaatggtttctcttggaacttgaaattcatatatatattcttattaccaaaaaaaaaaaaaaaaaagcttatcakrtaccgtcgacctcgaggggggggccccggtacc

SEQ ID NO: 4928 - protein, 148 aa, Arabidopsis thaliana
  peptide (1)..(148): Ceres Seq. ID no. 15221147
  misc_feature (1)..(148): NCBI GI NO: 30677926 NR Description: mitogen-activated protein kinase
  misc_feature (1)..(112): NCBI GI NO: 25410906 NR Description: probable MAP kinase
  misc_feature (1)..(148): NCBI GI NO: 9294059 NR Description: MAP kinase [Arabidopsis thaliana]
  misc_feature (1)..(148): NCBI GI NO: 18401750 NR Description: mitogen-activated protein kinase
  misc_feature (1)..(148): NCBI GI NO: 7106544 NR Description: ATMPK9 [Arabidopsis thaliana]
  misc_feature (1)..(148): NCBI GI NO: 5815410 NR Description: blast and wounding induced mitogen-activated protein kinase
  misc_feature (1)..(148): NCBI GI NO: 6689924 NR Description: MAP kinase homolog [Oryza sativa]
  misc_feature (1)..(128): NCBI GI NO: 15220976 NR Description: mitogen-activated protein kinase
  misc_feature (1)..(148): NCBI GI NO: 25406284 NR Description: probable MAP kinase F25P22.9
  misc_feature (1)..(148): NCBI GI NO: 37594657 NR Description: mitogen activated protein kinase 6 [Zea mays]
  misc_feature (148)..(148): Xaa is any aa, unknown or other
MRRKDPVPFTHKFPNIDPVALKLLQRLIAFDPKDRPSAKEALADPYFQGLANVDYEPSRQPISKLEFEFERRKLTRDDVRELMYREILEYHPQMLQEYLQGEENINSHFLYPSGVDQFKQEFARLEEHNDDEEEHNSPPHQRKYTSLX

SEQ ID NO: 4929 - protein, 146 aa, Arabidopsis thaliana
  peptide (1)..(146): Ceres Seq. ID no. 15221148
  misc_feature (16)..(138): Pfam Name: Pfam Description:  Protein kinase domain
  misc_feature (1)..(138): NCBI GI NO: 30677926 NR Description: mitogen-activated protein kinase
  misc_feature (1)..(138): NCBI GI NO: 25410906 NR Description: probable MAP kinase
  misc_feature (2)..(138): NCBI GI NO: 9294059 NR Description: MAP kinase [Arabidopsis thaliana]
  misc_feature (2)..(138): NCBI GI NO: 18401750 NR Description: mitogen-activated protein kinase
  misc_feature (2)..(138): NCBI GI NO: 7106544 NR Description: ATMPK9 [Arabidopsis thaliana]
  misc_feature (5)..(138): NCBI GI NO: 5815410 NR Description: blast and wounding induced mitogen-activated protein kinase
  misc_feature (5)..(138): NCBI GI NO: 6689924 NR Description: MAP kinase homolog [Oryza sativa]
  misc_feature (1)..(138): NCBI GI NO: 15220976 NR Description: mitogen-activated protein kinase
  misc_feature (5)..(138): NCBI GI NO: 25406284 NR Description: probable MAP kinase F25P22.9
  misc_feature (3)..(138): NCBI GI NO: 37594657 NR Description: mitogen activated protein kinase 6 [Zea mays]
MLEKEFFTEYGEASQYQIQEVVGKGSYGVVASAECPHTGGKVAIKKMTNVFEHVSDAIRILREIKLLRLLRHPDIVEIKHIMLPPCRKEFKDIYVVFELMESDLHHVLKVNDDLTPQHHQFFLYQLLRGLKFMHSGKVSLFPCCFL

SEQ ID NO: 4930 - protein, 100 aa, Arabidopsis thaliana
  peptide (1)..(100): Ceres Seq. ID no. 15221149
  misc_feature (1)..(92): Pfam Name: Pfam Description:  Protein kinase domain
  misc_feature (1)..(92): NCBI GI NO: 30677926 NR Description: mitogen-activated protein kinase
  misc_feature (1)..(92): NCBI GI NO: 25410906 NR Description: probable MAP kinase
  misc_feature (1)..(92): NCBI GI NO: 9294059 NR Description: MAP kinase [Arabidopsis thaliana]
  misc_feature (1)..(92): NCBI GI NO: 18401750 NR Description: mitogen-activated protein kinase
  misc_feature (1)..(92): NCBI GI NO: 7106544 NR Description: ATMPK9 [Arabidopsis thaliana]
  misc_feature (1)..(92): NCBI GI NO: 5815410 NR Description: blast and wounding induced mitogen-activated protein kinase
  misc_feature (1)..(92): NCBI GI NO: 6689924 NR Description: MAP kinase homolog [Oryza sativa]
  misc_feature (1)..(92): NCBI GI NO: 15220976 NR Description: mitogen-activated protein kinase
  misc_feature (1)..(92): NCBI GI NO: 25406284 NR Description: probable MAP kinase F25P22.9
  misc_feature (1)..(92): NCBI GI NO: 37594657 NR Description: mitogen activated protein kinase 6 [Zea mays]
MTNVFEHVSDAIRILREIKLLRLLRHPDIVEIKHIMLPPCRKEFKDIYVVFELMESDLHHVLKVNDDLTPQHHQFFLYQLLRGLKFMHSGKVSLFPCCFL

SEQ ID NO: 4931 - DNA, 945 bp, Arabidopsis thaliana
  misc_feature (1)..(945): Ceres Seq. ID no. 13646055
atcttctcaagctttcttcttctacaacacatctagagctttgcaacaatggaggcgagtgcgaatgaaccagctatgaaaagcttgaaatccaatccttcaggaccgataccgaactttttcgtatcgctctcttcggcatttacgcaaacacctcttgtgcgttcgaacaaacccaatttgcttcttctaccaccagttgcagactccgtcaaattgattcaagactttcatcagtctctgatttctgctactgagaaatttaaaggattcctccattcgctcgcctctaagaaccctctctttcaggaagcggttcgcctatcttccgaatttcacattttgtgcgacgagattcgtttgagaaacactacaagggtgaggtttgcgatgtctaatcacggatttgcagcggttctgcctggagattcagttgcaggattggtggttgctaatggtttgatcaatttcctcaacatatataacaccatccttgtcgtccgtctagtactcacctggttcccgagtgctcctcctgccattgttaaccccctcagcactttatgtgatccatacttgaacattttccggggattcataccgcctcttggaggattagatttgtctcccattttggcgttccttgttctcaacgccttcaccagctcggctatggcacttccttgcgaactcccgtcagctgatggagccgtttctccagcttctagtgagacaaagtgggtgagaaggagaaggttgagcagccacaaagaccacagaccgagctcagcttctatgacctgaacctgtctaaaatatctactcttttctgcgcttcaaatgtaaaatctacctttcgagtaattttattactctgtatctttggatttctgagttttgtataaattttctttagaaaatgaataaaagagttgtgttcctgac

SEQ ID NO: 4932 - protein, 251 aa, Arabidopsis thaliana
  peptide (1)..(251): Ceres Seq. ID no. 13646056
  misc_feature (1)..(251): NCBI GI NO: 22326932 NR Description: expressed protein [Arabidopsis thaliana]
  misc_feature (103)..(236): NCBI GI NO: 27436744 NR Description: Hypothetical protein
  misc_feature (121)..(201): NCBI GI NO: 22298077 NR Description: ORF_ID:tsr0534~hypothetical protein
  misc_feature (138)..(220): NCBI GI NO: 17229553 NR Description: hypothetical protein [Nostoc sp. PCC 7120]
  misc_feature (134)..(201): NCBI GI NO: 37523109 NR Description: hypothetical protein [Gloeobacter violaceus]
  misc_feature (138)..(210): NCBI GI NO: 16329433 NR Description: hypothetical protein [Synechocystis sp. PCC 6803]
  misc_feature (142)..(202): NCBI GI NO: 33861467 NR Description: conserved hypothetical membrane protein
  misc_feature (142)..(202): NCBI GI NO: 33240375 NR Description: Uncharacterized YGGT family conserved membrane
  misc_feature (111)..(206): NCBI GI NO: 18397948 NR Description: expressed protein [Arabidopsis thaliana]
  misc_feature (111)..(206): NCBI GI NO: 21617923 NR Description: unknown [Arabidopsis thaliana]
MEASANEPAMKSLKSNPSGPIPNFFVSLSSAFTQTPLVRSNKPNLLLLPPVADSVKLIQDFHQSLISATEKFKGFLHSLASKNPLFQEAVRLSSEFHILCDEIRLRNTTRVRFAMSNHGFAAVLPGDSVAGLVVANGLINFLNIYNTILVVRLVLTWFPSAPPAIVNPLSTLCDPYLNIFRGFIPPLGGLDLSPILAFLVLNAFTSSAMALPCELPSADGAVSPASSETKWVRRRRLSSHKDHRPSSASMT

SEQ ID NO: 4933 - protein, 242 aa, Arabidopsis thaliana
  peptide (1)..(242): Ceres Seq. ID no. 13646057
  misc_feature (1)..(242): NCBI GI NO: 22326932 NR Description: expressed protein [Arabidopsis thaliana]
  misc_feature (94)..(227): NCBI GI NO: 27436744 NR Description: Hypothetical protein
  misc_feature (112)..(192): NCBI GI NO: 22298077 NR Description: ORF_ID:tsr0534~hypothetical protein
  misc_feature (129)..(211): NCBI GI NO: 17229553 NR Description: hypothetical protein [Nostoc sp. PCC 7120]
  misc_feature (125)..(192): NCBI GI NO: 37523109 NR Description: hypothetical protein [Gloeobacter violaceus]
  misc_feature (129)..(201): NCBI GI NO: 16329433 NR Description: hypothetical protein [Synechocystis sp. PCC 6803]
  misc_feature (133)..(193): NCBI GI NO: 33861467 NR Description: conserved hypothetical membrane protein
  misc_feature (133)..(193): NCBI GI NO: 33240375 NR Description: Uncharacterized YGGT family conserved membrane
  misc_feature (102)..(197): NCBI GI NO: 18397948 NR Description: expressed protein [Arabidopsis thaliana]
  misc_feature (102)..(197): NCBI GI NO: 21617923 NR Description: unknown [Arabidopsis thaliana]
MKSLKSNPSGPIPNFFVSLSSAFTQTPLVRSNKPNLLLLPPVADSVKLIQDFHQSLISATEKFKGFLHSLASKNPLFQEAVRLSSEFHILCDEIRLRNTTRVRFAMSNHGFAAVLPGDSVAGLVVANGLINFLNIYNTILVVRLVLTWFPSAPPAIVNPLSTLCDPYLNIFRGFIPPLGGLDLSPILAFLVLNAFTSSAMALPCELPSADGAVSPASSETKWVRRRRLSSHKDHRPSSASMT

SEQ ID NO: 4934 - protein, 137 aa, Arabidopsis thaliana
  peptide (1)..(137): Ceres Seq. ID no. 13646058
  misc_feature (1)..(137): NCBI GI NO: 22326932 NR Description: expressed protein [Arabidopsis thaliana]
  misc_feature (1)..(122): NCBI GI NO: 27436744 NR Description: Hypothetical protein
  misc_feature (7)..(87): NCBI GI NO: 22298077 NR Description: ORF_ID:tsr0534~hypothetical protein
  misc_feature (24)..(106): NCBI GI NO: 17229553 NR Description: hypothetical protein [Nostoc sp. PCC 7120]
  misc_feature (20)..(87): NCBI GI NO: 37523109 NR Description: hypothetical protein [Gloeobacter violaceus]
  misc_feature (24)..(96): NCBI GI NO: 16329433 NR Description: hypothetical protein [Synechocystis sp. PCC 6803]
  misc_feature (28)..(88): NCBI GI NO: 33861467 NR Description: conserved hypothetical membrane protein
  misc_feature (28)..(88): NCBI GI NO: 33240375 NR Description: Uncharacterized YGGT family conserved membrane
  misc_feature (1)..(92): NCBI GI NO: 18397948 NR Description: expressed protein [Arabidopsis thaliana]
  misc_feature (1)..(92): NCBI GI NO: 21617923 NR Description: unknown [Arabidopsis thaliana]
MSNHGFAAVLPGDSVAGLVVANGLINFLNIYNTILVVRLVLTWFPSAPPAIVNPLSTLCDPYLNIFRGFIPPLGGLDLSPILAFLVLNAFTSSAMALPCELPSADGAVSPASSETKWVRRRRLSSHKDHRPSSASMT

SEQ ID NO: 4935 - DNA, 1226 bp, Arabidopsis thaliana
  misc_feature (1)..(1226): Ceres Seq. ID no. 12328962
gttcacatgcacccccaaaaaaaaaaactaattttttttcttttttcttctcctcatcttcagagttttgagatttgtgattgcctccatgcaagagctgaattagccgaatctggatgtcttattctgaaaaaacgacggtggatccacttctgagagatttggatgagaagaaagagagtttccggcgaaacgtggtgtctctggctacggagctgaagcaagtgaggggccgtttggtttctcaagaacaatcttttcttaaagagaccattactagaaaagaagcagagaaaaggggaaagaatatggaaatggagatttgtaaattgcagaagagattggaagaaaggaattgtcagcttgaagcttctgcatctgctgctgataagtttatcaaagagttggaggaatttagattaaagcttgatacaaccaagcaaaccgcagaggcaagtgctgattctgctcaatctacaaagatccaatgctcaatgctaaagcaacaacttgacgacaaaacacgttctctcagagaacaagaagaccgtatgactcagcttggtcatcagcttgatgatctacagagaggtctgagcttgagagagtgctcagaaaagcagcttagagaagaagttaggagaatcgagcgtgaggttactgaggccattgcaaaagcgggaataggtggcatggacagcgagctccagaaacttctagaagatgtgtctccaatgaaatttgagaggatgaataggctagttgaagtaaaagacgaagagattacaaaactgaaagatgagataaggttaatgtcaggtcaatggaaacataagactaaggaactcgaatctcagctggagaaacagagaagaactgatcaagatttgaagaagaaggtattgaagctagagttctgtttacaagaagctcgaagccagacaagaaagctgcaaaggaaaggggaaagaagggacatggagatcaaagagataagagatcttatatcggagaagcaaaaccttaacaatgagtcttgggataaacagaagttctgggacaattcagggttcaagattgttgtatcaatgtctatgttgatgttagtggtagtctccaagagatgatgaattttgtaatgtataaatttagttgcagatagttgatgaggataatctaactcatgtatgtgtcgtcttcaggtctaatataacagccatgtactt

SEQ ID NO: 4936 - protein, 336 aa, Arabidopsis thaliana
  peptide (1)..(336): Ceres Seq. ID no. 12328963
  misc_feature (6)..(320): Pfam Name: Pfam Description:  Myosin tail
  misc_feature (1)..(336): NCBI GI NO: 18397379 NR Description: expressed protein; protein id: At3g05830
  misc_feature (4)..(336): NCBI GI NO: 4097950 NR Description: plant IF-like protein [Arabidopsis thaliana]
  misc_feature (1)..(336): NCBI GI NO: 18421042 NR Description: putative protein; protein id: At5g26770
  misc_feature (1)..(329): NCBI GI NO: 7485248 NR Description: hypothetical protein A_IG002P16
  misc_feature (10)..(336): NCBI GI NO: 22329439 NR Description: hypothetical protein; protein id: At1g09470.1
  misc_feature (10)..(335): NCBI GI NO: 25402551 NR Description: hypothetical protein
  misc_feature (233)..(326): NCBI GI NO: 22329441 NR Description: similar to contains similarity to myosin heavy chain
  misc_feature (210)..(336): NCBI GI NO: 34894370 NR Description: unnamed protein product
  misc_feature (6)..(320): NCBI GI NO: 4249699 NR Description: myosin heavy chain [Rana catesbeiana]
  misc_feature (6)..(299): NCBI GI NO: 31144 NR Description: myosin heavy chain (1167 AA) [Homo sapiens]
MSYSEKTTVDPLLRDLDEKKESFRRNVVSLATELKQVRGRLVSQEQSFLKETITRKEAEKRGKNMEMEICKLQKRLEERNCQLEASASAADKFIKELEEFRLKLDTTKQTAEASADSAQSTKIQCSMLKQQLDDKTRSLREQEDRMTQLGHQLDDLQRGLSLRECSEKQLREEVRRIEREVTEAIAKAGIGGMDSELQKLLEDVSPMKFERMNRLVEVKDEEITKLKDEIRLMSGQWKHKTKELESQLEKQRRTDQDLKKKVLKLEFCLQEARSQTRKLQRKGERRDMEIKEIRDLISEKQNLNNESWDKQKFWDNSGFKIVVSMSMLMLVVVSKR

SEQ ID NO: 4937 - protein, 272 aa, Arabidopsis thaliana
  peptide (1)..(272): Ceres Seq. ID no. 12328964
  misc_feature (1)..(256): Pfam Name: Pfam Description:  Myosin tail
  misc_feature (1)..(272): NCBI GI NO: 18397379 NR Description: expressed protein; protein id: At3g05830
  misc_feature (1)..(272): NCBI GI NO: 4097950 NR Description: plant IF-like protein [Arabidopsis thaliana]
  misc_feature (1)..(272): NCBI GI NO: 18421042 NR Description: putative protein; protein id: At5g26770
  misc_feature (1)..(265): NCBI GI NO: 7485248 NR Description: hypothetical protein A_IG002P16
  misc_feature (1)..(272): NCBI GI NO: 22329439 NR Description: hypothetical protein; protein id: At1g09470.1
  misc_feature (1)..(271): NCBI GI NO: 25402551 NR Description: hypothetical protein
  misc_feature (169)..(262): NCBI GI NO: 22329441 NR Description: similar to contains similarity to myosin heavy chain
  misc_feature (146)..(272): NCBI GI NO: 34894370 NR Description: unnamed protein product
  misc_feature (1)..(256): NCBI GI NO: 4249699 NR Description: myosin heavy chain [Rana catesbeiana]
  misc_feature (1)..(235): NCBI GI NO: 31144 NR Description: myosin heavy chain (1167 AA) [Homo sapiens]
MEMEICKLQKRLEERNCQLEASASAADKFIKELEEFRLKLDTTKQTAEASADSAQSTKIQCSMLKQQLDDKTRSLREQEDRMTQLGHQLDDLQRGLSLRECSEKQLREEVRRIEREVTEAIAKAGIGGMDSELQKLLEDVSPMKFERMNRLVEVKDEEITKLKDEIRLMSGQWKHKTKELESQLEKQRRTDQDLKKKVLKLEFCLQEARSQTRKLQRKGERRDMEIKEIRDLISEKQNLNNESWDKQKFWDNSGFKIVVSMSMLMLVVVSKR

SEQ ID NO: 4938 - protein, 270 aa, Arabidopsis thaliana
  peptide (1)..(270): Ceres Seq. ID no. 12328965
  misc_feature (1)..(254): Pfam Name: Pfam Description:  Myosin tail
  misc_feature (1)..(270): NCBI GI NO: 18397379 NR Description: expressed protein; protein id: At3g05830
  misc_feature (1)..(270): NCBI GI NO: 4097950 NR Description: plant IF-like protein [Arabidopsis thaliana]
  misc_feature (1)..(270): NCBI GI NO: 18421042 NR Description: putative protein; protein id: At5g26770
  misc_feature (1)..(263): NCBI GI NO: 7485248 NR Description: hypothetical protein A_IG002P16
  misc_feature (1)..(270): NCBI GI NO: 22329439 NR Description: hypothetical protein; protein id: At1g09470.1
  misc_feature (1)..(269): NCBI GI NO: 25402551 NR Description: hypothetical protein
  misc_feature (167)..(260): NCBI GI NO: 22329441 NR Description: similar to contains similarity to myosin heavy chain
  misc_feature (144)..(270): NCBI GI NO: 34894370 NR Description: unnamed protein product
  misc_feature (1)..(254): NCBI GI NO: 4249699 NR Description: myosin heavy chain [Rana catesbeiana]
  misc_feature (1)..(233): NCBI GI NO: 31144 NR Description: myosin heavy chain (1167 AA) [Homo sapiens]
MEICKLQKRLEERNCQLEASASAADKFIKELEEFRLKLDTTKQTAEASADSAQSTKIQCSMLKQQLDDKTRSLREQEDRMTQLGHQLDDLQRGLSLRECSEKQLREEVRRIEREVTEAIAKAGIGGMDSELQKLLEDVSPMKFERMNRLVEVKDEEITKLKDEIRLMSGQWKHKTKELESQLEKQRRTDQDLKKKVLKLEFCLQEARSQTRKLQRKGERRDMEIKEIRDLISEKQNLNNESWDKQKFWDNSGFKIVVSMSMLMLVVVSKR

SEQ ID NO: 4939 - DNA, 2397 bp, Arabidopsis thaliana
  misc_feature (1)..(2397): Ceres Seq. ID no. 13580402
acaatcacatggccttttcaaaaaatcaatcttttagttctctatcgatgcgtaggcttgaagcatgatgacgacagtcgccgccgatctccaccgttatcttttcctgattaccgtttttcttttcttcctctgcgacaaaacctctcttgctctgaccacagacggtgttcttcttctctctttccgttactcaatcgttgacgatcctctttacgtttttcggagctggagattcgacgacgagactccttgctcttggcgtggtgtcacgtgcgatgcatcttcccggcacgtgactgttctgtcacttccaagctcgaaccttaccggcacactaccttcaaatttgggttcactcaattcacttcaaagacttgatctttccaacaattccatcaatgggtctttcccggtttcgcttctcaacgcgacggagcttcgatttcttgatctgtccgataatcacatctccggtgcactaccggcgagttttggcgcgctttcgaacctccaagtgttgaatctctccgataattccttcgtcggcgaattaccgaacacattaggatggaaccggaacttaacggagatttcacttcagaaaaactatttatccggcgggattccgggaggttttaagtcgacggagtatcttgatctctcgtcaaatttgatcaaaggctcgttgccgtcacatttcagagggaatcgtctacgctatttcaacgcttcgtacaacagaatctccggcgagattccgtcaggtttcgccgacgaaatcccggaagacgccaccgttgatctctcattcaaccaacttacaggtcaaatcccgggttttcgggttctcgataaccaagaatccaactctttctccggtaacccgggtctctgcggatccgaccatgcaaaacacccttgtcgtgacggtgaagcaacctctccacctccatcgccgactccaaattctcctcctgcattagctgctataccaaatactattggcttaaccaatcacccaattagctccaaaaccggtccgaaatcaaaatgggatcataaaccggtgcttatcattggcattgttgtcggtgacttagccggtttagcaatcctcgggattgtgtttttctacatttaccagtcgagaaaacggaagaccgtaacggctacgtcaaaatggtccacgtcatcaacagattccaaggtctcaaaatggtactgtttacgcaaatccgtttacgttgacggtgactgcgaagaagaagaagaggaatctgagacatcggaatccgaatccgacgaagagaacccggtcggaccaaatcgacggtcaggattagacgatcaagaaaaaaagggaacgttagtgaatctcgattcagagaaagagcttgaaatcgaaacgcttctcaaagcatcagcttatattttgggagccaccggttcgagcataatgtataaagcggtgcttcaagacggaacagctgtggcggttcgacgaatagctgaatgcggtttagaccggtttagagatttcgaagctcaggttcgagccatggctaagttaatacatccaaacctggtacgaattcgcggtttctattggggatccgacgagaaacttgtcatttacgattttgtccctaacggcagcctcgctaacgcccgttaccggaaagtgggctcctctccttgtcatttaccttgggacgctcggctcaagatagcaaaaggcatagctcgcgggctaacatacgtacacgacaaaaagtacgtgcatggtaacctcaagcctagcaatatccttttgggcttatggagcctaaagttgcggatttcggtcttgagaagcttttgattggggacatgagttatagaaccggtggatcggctccaatattcggaagcaagagatccacaacgtctcttgagtttgggccgagtccaagcccaagtccaagttcagtcgggttaccctacaatgctccagaatctcttcggagtattaagccgaattcgaaatgggatgtgtactcgttcggagttattctgcttgagctactaacgggaaagatcgtggtggtcgacgagcttggacaggttaatgggcttgtgattgatgacggtgagcgggcaattcggatggcggactctgctatacgggctgagttagaaggcaaagaagaagctgtgttggcatgtttgaaaatgggcctagcttgtgcgtctccaataccacagagaaggcccaatatcaaagaggctttgcaagttctcgagagattccctgttcattctagtcaacagtaatgataataattaagaccaagaaagagttaaataacttgactgtgtgtacttagagttagattgataggcaagtttgatctt

SEQ ID NO: 4940 - protein, 599 aa, Arabidopsis thaliana
  peptide (1)..(599): Ceres Seq. ID no. 13580403
  misc_feature (14)..(585): NCBI GI NO: 15227808 NR Description: leucine-rich repeat transmembrane protein kinase
  misc_feature (15)..(585): NCBI GI NO: 18086496 NR Description: AT4g37250/C7A10_110 [Arabidopsis thaliana]
  misc_feature (15)..(585): NCBI GI NO: 25387059 NR Description: receptor kinase-like protein
  misc_feature (15)..(585): NCBI GI NO: 30690913 NR Description: leucine rich repeat protein family
  misc_feature (13)..(482): NCBI GI NO: 18418404 NR Description: leucine-rich repeat transmembrane protein kinase
  misc_feature (13)..(482): NCBI GI NO: 7488258 NR Description: protein kinase homolog F28A23
  misc_feature (16)..(391): NCBI GI NO: 15226197 NR Description: leucine-rich repeat transmembrane protein kinase
  misc_feature (436)..(585): NCBI GI NO: 15226197 NR Description: leucine-rich repeat transmembrane protein kinase
  misc_feature (69)..(584): NCBI GI NO: 18418404 NR Description: leucine-rich repeat transmembrane protein kinase
  misc_feature (69)..(584): NCBI GI NO: 7488258 NR Description: protein kinase homolog F28A23
MMTTVAADLHRYLFLITVFLFFLCDKTSLALTTDGVLLLSFRYSIVDDPLYVFRSWRFDDETPCSWRGVTCDASSRHVTVLSLPSSNLTGTLPSNLGSLNSLQRLDLSNNSINGSFPVSLLNATELRFLDLSDNHISGALPASFGALSNLQVLNLSDNSFVGELPNTLGWNRNLTEISLQKNYLSGGIPGGFKSTEYLDLSSNLIKGSLPSHFRGNRLRYFNASYNRISGEIPSGFADEIPEDATVDLSFNQLTGQIPGFRVLDNQESNSFSGNPGLCGSDHAKHPCRDGEATSPPPSPTPNSPPALAAIPNTIGLTNHPISSKTGPKSKWDHKPVLIIGIVVGDLAGLAILGIVFFYIYQSRKRKTVTATSKWSTSSTDSKVSKWYCLRKSVYVDGDCEEEEEESETSESESDEENPVGPNRRSGLDDQEKKGTLVNLDSEKELEIETLLKASAYILGATGSSIMYKAVLQDGTAVAVRRIAECGLDRFRDFEAQVRAMAKLIHPNLVRIRGFYWGSDEKLVIYDFVPNGSLANARYRKVGSSPCHLPWDARLKIAKGIARGLTYVHDKKYVHGNLKPSNILLGLWSLKLRISVLRSF

SEQ ID NO: 4941 - protein, 598 aa, Arabidopsis thaliana
  peptide (1)..(598): Ceres Seq. ID no. 13580404
  misc_feature (13)..(584): NCBI GI NO: 15227808 NR Description: leucine-rich repeat transmembrane protein kinase
  misc_feature (14)..(584): NCBI GI NO: 18086496 NR Description: AT4g37250/C7A10_110 [Arabidopsis thaliana]
  misc_feature (14)..(584): NCBI GI NO: 25387059 NR Description: receptor kinase-like protein
  misc_feature (14)..(584): NCBI GI NO: 30690913 NR Description: leucine rich repeat protein family
  misc_feature (12)..(481): NCBI GI NO: 18418404 NR Description: leucine-rich repeat transmembrane protein kinase
  misc_feature (12)..(481): NCBI GI NO: 7488258 NR Description: protein kinase homolog F28A23
  misc_feature (15)..(390): NCBI GI NO: 15226197 NR Description: leucine-rich repeat transmembrane protein kinase
  misc_feature (435)..(584): NCBI GI NO: 15226197 NR Description: leucine-rich repeat transmembrane protein kinase
  misc_feature (68)..(583): NCBI GI NO: 18418404 NR Description: leucine-rich repeat transmembrane protein kinase
  misc_feature (68)..(583): NCBI GI NO: 7488258 NR Description: protein kinase homolog F28A23
MTTVAADLHRYLFLITVFLFFLCDKTSLALTTDGVLLLSFRYSIVDDPLYVFRSWRFDDETPCSWRGVTCDASSRHVTVLSLPSSNLTGTLPSNLGSLNSLQRLDLSNNSINGSFPVSLLNATELRFLDLSDNHISGALPASFGALSNLQVLNLSDNSFVGELPNTLGWNRNLTEISLQKNYLSGGIPGGFKSTEYLDLSSNLIKGSLPSHFRGNRLRYFNASYNRISGEIPSGFADEIPEDATVDLSFNQLTGQIPGFRVLDNQESNSFSGNPGLCGSDHAKHPCRDGEATSPPPSPTPNSPPALAAIPNTIGLTNHPISSKTGPKSKWDHKPVLIIGIVVGDLAGLAILGIVFFYIYQSRKRKTVTATSKWSTSSTDSKVSKWYCLRKSVYVDGDCEEEEEESETSESESDEENPVGPNRRSGLDDQEKKGTLVNLDSEKELEIETLLKASAYILGATGSSIMYKAVLQDGTAVAVRRIAECGLDRFRDFEAQVRAMAKLIHPNLVRIRGFYWGSDEKLVIYDFVPNGSLANARYRKVGSSPCHLPWDARLKIAKGIARGLTYVHDKKYVHGNLKPSNILLGLWSLKLRISVLRSF

SEQ ID NO: 4942 - DNA, 1340 bp, Arabidopsis thaliana
  misc_feature (1)..(1340): Ceres Seq. ID no. 13488820
tgtatcaattctacaatcatttttgcttccctttctttgaaaacattccattttcctttctatttttttgcttatctctgtactaagaaccaaactaacccacagtagaactaaattacacttctctttcaatcatttgcgtctcaccggctaatctcattcctctgtcatttttacagttcttcgatcgaaaaccggatgtgagaagcctcgaggttcaaggatttgcagaggctcaaagctttgctttcaaagaaaaagaggaagaaggcttacaagatacagttccatttctacagatgctgcaaagtgaagacccctcatcgtttttttcaatcaaagagccaaactttctgacgctactgtctcttcaaaccctcaaggagccttgggaactcgaaagatatctttcacttgaggattcacaatttcattcaccggtccaatctgagaccaaccgcttcatggaaggagccaatcaagctgtgtcaagccaagaaattccctttagccaagcaaacatgacactcccttcttctacctcatcaccactcagtgcacattcaagacgaaagcgcaaaatcaaccacttgctgcctcaagaaatgactagagaaaagagaaagaggaggaaaacaaaaccaagtaaaaacaatgaagagattgagaatcaaagaataaaccacattgctgttgaacgaaacagaagacgtcaaatgaacgaacatatcaactctctccgggcccttctcccaccttcctacatccaacgaggagaccaagcttccatagtaggaggagcaataaactacgtgaaggtcctcgagcaaatcatacaatctctcgaatcgcaaaagagaacgcaacaacaaagtaacagtgaggtagtagaaaacgcacttaatcatctctcaggcatttcgtcgaacgacctgtggacaactcttgaagatcaaacttgtatccccaaaatcgaagctacagtgatacaaaaccatgtcagccttaaagttcaatgtgagaagaaacaaggacaacttctcaaaggaatcatatcacttgaaaagcttaaactcactgttcttcatctcaatatcactacttcgtctcattcctctgtttcttattccttcaacctcaagatggaagatgagtgcgacttagagtcagccgacgagattacggcggctgttcatcggattttcgatattccgacaatttgattaaacacatataattccaaaaatattaacagctgacaaaatggtatcttttttttttttcctacttgtaccaattttttaagaattaagagaataaaaaaatttcgtttttcgttc

SEQ ID NO: 4943 - protein, 307 aa, Arabidopsis thaliana
  peptide (1)..(307): Ceres Seq. ID no. 13488821
  misc_feature (125)..(176): Pfam Name: Pfam Description:  Helix-loop-helix DNA-binding domain
  misc_feature (1)..(307): NCBI GI NO: 18412203 NR Description: bHLH protein family [Arabidopsis thaliana]
  misc_feature (1)..(307): NCBI GI NO: 11282339 NR Description: hypothetical protein F21F14
  misc_feature (1)..(307): NCBI GI NO: 21618009 NR Description: unknown [Arabidopsis thaliana]
  misc_feature (1)..(307): NCBI GI NO: 30695519 NR Description: bHLH protein family [Arabidopsis thaliana]
  misc_feature (1)..(303): NCBI GI NO: 15226442 NR Description: bHLH protein family [Arabidopsis thaliana]
  misc_feature (45)..(303): NCBI GI NO: 15234187 NR Description: bHLH protein family [Arabidopsis thaliana]
  misc_feature (222)..(303): NCBI GI NO: 37533680 NR Description: putative helix-loop-helix DNA-binding protein
  misc_feature (107)..(186): NCBI GI NO: 37533680 NR Description: putative helix-loop-helix DNA-binding protein
  misc_feature (107)..(194): NCBI GI NO: 34902426 NR Description: Unknown protein
  misc_feature (222)..(301): NCBI GI NO: 34902426 NR Description: Unknown protein
MLQSEDPSSFFSIKEPNFLTLLSLQTLKEPWELERYLSLEDSQFHSPVQSETNRFMEGANQAVSSQEIPFSQANMTLPSSTSSPLSAHSRRKRKINHLLPQEMTREKRKRRKTKPSKNNEEIENQRINHIAVERNRRRQMNEHINSLRALLPPSYIQRGDQASIVGGAINYVKVLEQIIQSLESQKRTQQQSNSEVVENALNHLSGISSNDLWTTLEDQTCIPKIEATVIQNHVSLKVQCEKKQGQLLKGIISLEKLKLTVLHLNITTSSHSSVSYSFNLKMEDECDLESADEITAAVHRIFDIPTI

SEQ ID NO: 4944 - protein, 252 aa, Arabidopsis thaliana
  peptide (1)..(252): Ceres Seq. ID no. 13488822
  misc_feature (70)..(121): Pfam Name: Pfam Description:  Helix-loop-helix DNA-binding domain
  misc_feature (1)..(252): NCBI GI NO: 18412203 NR Description: bHLH protein family [Arabidopsis thaliana]
  misc_feature (1)..(252): NCBI GI NO: 11282339 NR Description: hypothetical protein F21F14
  misc_feature (1)..(252): NCBI GI NO: 21618009 NR Description: unknown [Arabidopsis thaliana]
  misc_feature (1)..(252): NCBI GI NO: 30695519 NR Description: bHLH protein family [Arabidopsis thaliana]
  misc_feature (1)..(248): NCBI GI NO: 15226442 NR Description: bHLH protein family [Arabidopsis thaliana]
  misc_feature (1)..(248): NCBI GI NO: 15234187 NR Description: bHLH protein family [Arabidopsis thaliana]
  misc_feature (167)..(248): NCBI GI NO: 37533680 NR Description: putative helix-loop-helix DNA-binding protein
  misc_feature (52)..(131): NCBI GI NO: 37533680 NR Description: putative helix-loop-helix DNA-binding protein
  misc_feature (52)..(139): NCBI GI NO: 34902426 NR Description: Unknown protein
  misc_feature (167)..(246): NCBI GI NO: 34902426 NR Description: Unknown protein
MEGANQAVSSQEIPFSQANMTLPSSTSSPLSAHSRRKRKINHLLPQEMTREKRKRRKTKPSKNNEEIENQRINHIAVERNRRRQMNEHINSLRALLPPSYIQRGDQASIVGGAINYVKVLEQIIQSLESQKRTQQQSNSEVVENALNHLSGISSNDLWTTLEDQTCIPKIEATVIQNHVSLKVQCEKKQGQLLKGIISLEKLKLTVLHLNITTSSHSSVSYSFNLKMEDECDLESADEITAAVHRIFDIPTI

SEQ ID NO: 4945 - protein, 233 aa, Arabidopsis thaliana
  peptide (1)..(233): Ceres Seq. ID no. 13488823
  misc_feature (51)..(102): Pfam Name: Pfam Description:  Helix-loop-helix DNA-binding domain
  misc_feature (1)..(233): NCBI GI NO: 18412203 NR Description: bHLH protein family [Arabidopsis thaliana]
  misc_feature (1)..(233): NCBI GI NO: 11282339 NR Description: hypothetical protein F21F14
  misc_feature (1)..(233): NCBI GI NO: 21618009 NR Description: unknown [Arabidopsis thaliana]
  misc_feature (1)..(233): NCBI GI NO: 30695519 NR Description: bHLH protein family [Arabidopsis thaliana]
  misc_feature (1)..(229): NCBI GI NO: 15226442 NR Description: bHLH protein family [Arabidopsis thaliana]
  misc_feature (1)..(229): NCBI GI NO: 15234187 NR Description: bHLH protein family [Arabidopsis thaliana]
  misc_feature (148)..(229): NCBI GI NO: 37533680 NR Description: putative helix-loop-helix DNA-binding protein
  misc_feature (33)..(112): NCBI GI NO: 37533680 NR Description: putative helix-loop-helix DNA-binding protein
  misc_feature (33)..(120): NCBI GI NO: 34902426 NR Description: Unknown protein
  misc_feature (148)..(227): NCBI GI NO: 34902426 NR Description: Unknown protein
MTLPSSTSSPLSAHSRRKRKINHLLPQEMTREKRKRRKTKPSKNNEEIENQRINHIAVERNRRRQMNEHINSLRALLPPSYIQRGDQASIVGGAINYVKVLEQIIQSLESQKRTQQQSNSEVVENALNHLSGISSNDLWTTLEDQTCIPKIEATVIQNHVSLKVQCEKKQGQLLKGIISLEKLKLTVLHLNITTSSHSSVSYSFNLKMEDECDLESADEITAAVHRIFDIPTI

SEQ ID NO: 4946 - DNA, 2349 bp, Arabidopsis thaliana
  misc_feature (1)..(2349): Ceres Seq. ID no. 12337988
atatttttggcttaaggtcattttgaagattaataacatgtctattttatcgcgttgtgtccgatccagaaggttctctatttttcgtggataagaagataaagttattgtttattgataagttttctgctgggaagttgcaactttttctagatttaggacgttacaaatttcaatcatgagtgcatcatgggcagatgtggctgattcagagaaggccgtttctcagtcaaagcctccttatgttcccccacacctacggaacaggccatcagagcctgttgctgctcctttgccacaaaatgatcatgcagggtatggtggtcaaccagctgggtctcgttgggctcctcctagcagtgggggtggtggtgccagcggcggtggctataggaatgatggagggcgcactggctatggttatggtgctggaggaggaggtggtggtggtggtggctggaacaacagaagtggagggtgggaccgtagggaacgtgaagtaaacccatttggagatgatgctgagttagaaccggtctttacagagcaggagaatactggcattaattttgatgcctatgaagatattccagttgagaccagtgggggagacgtgccccctcctgttaacacatttgctgacatagatcttggggatgcattaaatctgaacatccggaggtgcaagtatgtgaggccaacaccggtacagcgtcatgctattccaatactgcttgcagagagagatttgatggcctgtgcccagactgggtctgggaagactgctgctttttgctttccaataattagtggaatcatgaaagatcagcatgtagaaagaccccgtggttcacgggcggtttacccttttgcagtcatcctctcaccaacaagggaattggcatgccagatacatgatgaagccaaaaaattctcctaccaaactggtgtgaaggttgttgttgcttatggaggaacacccattcaccagcagctcagggaactcgagaggggatgtgatatccttgtggcaactcctggccggttaaatgatttgcttgaaagagctagagtctcaatgcagatgattaggtttttagctctagatgaggcagacaggatgctggacatgggttttgagccacagattagaaagattgttgagcagatggacatgcctccacgtggggtgagacagacaatgctgttcagtgctacatttccaagtcagattcagagacttgcagctgatttcatgtcaaactatatatttttggctgtgggaagagttggttcaagcactgatttaattacccaaagggttgagtttgtccaagagtctgacaagagaagccatctcatggacctgcttcacgcgcaaagagagacccaagacaagcaatcattgacattagtttttgtggagacaaagaggggagctgatactttggaaaattggctgtgcatgaatgagtttccagcaacctccattcatggcgatagaacacaacaggaaagagaagtggcactgaggtccttcaaaactgggaggacacctattttggttgcaacagacgtggcagcacgtggtcttgacattccccacgtggctcatgttgtaaacttcgatctaccaaatgacattgatgactatgtccaccgtatcggacgaacaggacgtgcaggcaaatctggaatagcaactgccttcttcaacgagaacaatgcacaactggctaggtcgcttgctgagctaatgcaagaagccaatcaagaggtccccgagtggctcacacgatatgcttcacgtgcttcatttggtggtggtaagaaacggtctggtggtcggtttggtggccgtgacttcagaagggaaggctcttacagtagaggaggaggcggcggcggcggaggaggcggcagtgattactatggcggaggaggctatggtggtggtggatacggtggtgctccaagcggtgggtatggtgctggagtgaccagtgcttgggattagccaattaggctccccaatttttcctctttttaacctgactatttatttcttctcttctacattcccaagagagcacgtgtatttgcccccacctttgagatctctcattcaagagatggatttaactaatcttgctattaggtggatctctctgttttttcaggctatttttaggatttgtcctaaaagatagacagtagtttttccgattttgatcttgttcttggtttcttctaacaatttcatttgttagtttgaaatccaatttgtctttttgtttccctttgttgttgacaatctttcttggtgaaatacaatctctctttatatct

SEQ ID NO: 4947 - protein, 612 aa, Arabidopsis thaliana; identical to SEQ ID NO: 2519
  peptide (1)..(612): Ceres Seq. ID no. 12337989
  misc_feature (164)..(381): Pfam Name: Pfam Description:  DEAD/DEAH box helicase
  misc_feature (1)..(612): NCBI GI NO: 15227951 NR Description: DEAD/DEAH box RNA helicase, putative
  misc_feature (1)..(612): NCBI GI NO: 28393424 NR Description: putative DEAD/DEAH box RNA helicase
  misc_feature (2)..(604): NCBI GI NO: 15231074 NR Description: DEAD/DEAH box RNA helicase protein, putative
  misc_feature (192)..(612): NCBI GI NO: 17064740 NR Description: ATP-dependent RNA helicase-like protein
  misc_feature (50)..(606): NCBI GI NO: 17985987 NR Description: belle CG9748-PA
  misc_feature (22)..(104): NCBI GI NO: 17985987 NR Description: belle CG9748-PA
  misc_feature (50)..(606): NCBI GI NO: 19528473 NR Description: RE28061p [Drosophila melanogaster]
  misc_feature (22)..(104): NCBI GI NO: 19528473 NR Description: RE28061p [Drosophila melanogaster]
  misc_feature (40)..(100): NCBI GI NO: 17985987 NR Description: belle CG9748-PA
  misc_feature (40)..(100): NCBI GI NO: 19528473 NR Description: RE28061p [Drosophila melanogaster]

SEQ ID NO: 4948 - protein, 421 aa, Arabidopsis thaliana; identical to SEQ ID NO: 2520
  peptide (1)..(421): Ceres Seq. ID no. 12337990
  misc_feature (1)..(190): Pfam Name: Pfam Description:  DEAD/DEAH box helicase
  misc_feature (1)..(421): NCBI GI NO: 15227951 NR Description: DEAD/DEAH box RNA helicase, putative
  misc_feature (1)..(421): NCBI GI NO: 28393424 NR Description: putative DEAD/DEAH box RNA helicase
  misc_feature (1)..(413): NCBI GI NO: 15231074 NR Description: DEAD/DEAH box RNA helicase protein, putative
  misc_feature (1)..(421): NCBI GI NO: 17064740 NR Description: ATP-dependent RNA helicase-like protein
  misc_feature (1)..(415): NCBI GI NO: 17985987 NR Description: belle CG9748-PA
  misc_feature (1)..(415): NCBI GI NO: 19528473 NR Description: RE28061p [Drosophila melanogaster]
  misc_feature (1)..(415): NCBI GI NO: 11267519 NR Description: probable ATP-dependent RNA helicase DED1
  misc_feature (1)..(415): NCBI GI NO: 32412764 NR Description: hypothetical protein [Neurospora crassa]
  misc_feature (1)..(420): NCBI GI NO: 18859239 NR Description: pl10; p110 [Danio rerio]
  misc_feature (1)..(418): NCBI GI NO: 14861844 NR Description: PL10 protein [Mus musculus]

SEQ ID NO: 4949 - protein, 399 aa, Arabidopsis thaliana; identical to SEQ ID NO: 2521
  peptide (1)..(399): Ceres Seq. ID no. 12337991
  misc_feature (1)..(168): Pfam Name: Pfam Description:  DEAD/DEAH box helicase
  misc_feature (1)..(399): NCBI GI NO: 15227951 NR Description: DEAD/DEAH box RNA helicase, putative
  misc_feature (1)..(399): NCBI GI NO: 28393424 NR Description: putative DEAD/DEAH box RNA helicase
  misc_feature (1)..(391): NCBI GI NO: 15231074 NR Description: DEAD/DEAH box RNA helicase protein, putative
  misc_feature (1)..(399): NCBI GI NO: 17064740 NR Description: ATP-dependent RNA helicase-like protein
  misc_feature (1)..(393): NCBI GI NO: 17985987 NR Description: belle CG9748-PA
  misc_feature (1)..(393): NCBI GI NO: 19528473 NR Description: RE28061p [Drosophila melanogaster]
  misc_feature (1)..(393): NCBI GI NO: 11267519 NR Description: probable ATP-dependent RNA helicase DED1
  misc_feature (1)..(393): NCBI GI NO: 32412764 NR Description: hypothetical protein [Neurospora crassa]
  misc_feature (1)..(398): NCBI GI NO: 18859239 NR Description: pl10; p110 [Danio rerio]
  misc_feature (1)..(396): NCBI GI NO: 14861844 NR Description: PL10 protein [Mus musculus]

SEQ ID NO: 4950 - DNA, 2224 bp, Arabidopsis thaliana
  misc_feature (1)..(2224): Ceres Seq. ID no. 12371951
actaaattaaatgaatagttttatttgtatattttaggcaagatggattatatataatgattaaataaattaaggtgtgtattcttcactaaatgtttgagatctatccgtcacactccagaggttaaactcagtcatctgtctttggggaggacaagcaagaacctcaccgacgattccataccaaacaaattcccgatctggaaacaactgacctgtgaaggtgaagtgtatcgctggaaatggcggtggccttccgtggaggccggggaggcgtcggatccggccaatctaccggacttcgtagtttcttctcctaccggatctttatctccgctttgttctcttttctcttcctcgccactttctccgtcgttcttaactcctctcgtcatcagcctcatcaggatcatacattgccgagtatgggcaacgcatatatgcagaggacgtttttggctttgcaatcggatccattgaaaactaggttggatctgatacacaagcaagccattgatcatttgacactggtgaatgcgtatgctgcttacgctaggaagctaaagcttgatgcttctaagcagcttaagctcttcgaagatttggctatcaacttctcggatttgcagtcaaaacctggtttgaaatctgctgtgtctgataatggtaatgctcttgaggaggattcgtttaggcagcttgagaaagaagtgaaggataaggtgaagacagcgaggatgatgatcgttgagtctaaagagagttatgatacacagcttaaaatccagaagttgaaagatacaatctttgctgtccaagaacagttgacaaaggctaagaaaaacggtgcggttgctagcttgatttcagccaagtcggttcctaaaagtcttcattgtttggccatgaggcttgtaggagagaggatctctaatcctgagaagtacaaggatgctccacctgacccagccgcagaggatccaactctttaccactatgcgattttctctgataatgtcattgctgtgtctgttgtggtgagatcggttgtgatgaacgctgaggagccatggaagcatgtcttccatgtggtgacagatcggatgaatctcgcagccatgaaggtgtggtttaagatgcgtcctttggaccgtggtgcccatgttgagattaaatccgtggaggatttcaagttcttaaactcttcctatgcgccggtcttgaggcagcttgagtctgccaagttgcagaagttttactttgagaatcaagctgagaacgcaactaaagattcacataacctcaagttcaagaaccccaagtatctctcgatgttgaaccatctcagattttacttaccagagatgtatccgaagctgaataagattttgttcttggacgatgatgttgtggtgcagaaagacgtgactggtttatggaaaatcaacttggatggcaaggtgaatggagccgttgagacatgttttggttcttttcatcgatatggtcaatacttaaacttctctcatcctttgatcaaagagaactttaaccccagtgcctgtgcttgggcctttggaatgaacatattcgatctcaatgcctggagacgcgagaagtgcaccgatcaataccattactggcagaacctgaatgaagacagaactctctggaaattgggaactctacctccgggattgatcacattctattcaaagacgaaatcattggacaaatcatggcatgtacttgggttaggctataacccgggagtgagcatggacgaaatcagaaatgcaggagtgattcattacaatggaaacatgaaaccgtggctagacattgcgatgaaccaatacaagtctctctggactaaatatgttgataacgaaatggagtttgtgcagatgtgcaattttggtctctaaagagagaacgatgaaaacaaacaaaccggaaagaggaaaaaatagggagaagaggtaacctcggatcgatgtgtttctgtctttctcggcattctttaactgatgatacgtttatctttatatagggttacaaaaaaaaagaagcattttgcttgttatttctgtcatagttttggtctttatttttattttgtaaactcttcacagcaatatgttctcccaagctacaatgtcttgttgtctttatttcatacttgtctgccttaagaatcatatagaagaaactctaaaggttt

SEQ ID NO: 4951 - protein, 561 aa, Arabidopsis thaliana
  peptide (1)..(561): Ceres Seq. ID no. 12371952
  misc_feature (1)..(561): NCBI GI NO: 18396159 NR Description: expressed protein; protein id: At3g02350
  misc_feature (9)..(561): NCBI GI NO: 15230806 NR Description: glycosyl transferase, putative
  misc_feature (124)..(558): NCBI GI NO: 15233046 NR Description: putative protein; protein id: At3g61130
  misc_feature (106)..(557): NCBI GI NO: 7271113 NR Description: 68 kDa protein [Cicer arietinum]
  misc_feature (153)..(558): NCBI GI NO: 7485958 NR Description: hypothetical protein F22I13
  misc_feature (153)..(558): NCBI GI NO: 30691875 NR Description: glycosyltransferase family 8
  misc_feature (102)..(558): NCBI GI NO: 10177914 NR Description: emb|CAB71043
  misc_feature (102)..(558): NCBI GI NO: 18422837 NR Description: putative protein; protein id: At5g47780
  misc_feature (142)..(558): NCBI GI NO: 38423965 NR Description: putative glycosyltransferase
  misc_feature (152)..(557): NCBI GI NO: 37533460 NR Description: hypothetical protein
MAVAFRGGRGGVGSGQSTGLRSFFSYRIFISALFSFLFLATFSVVLNSSRHQPHQDHTLPSMGNAYMQRTFLALQSDPLKTRLDLIHKQAIDHLTLVNAYAAYARKLKLDASKQLKLFEDLAINFSDLQSKPGLKSAVSDNGNALEEDSFRQLEKEVKDKVKTARMMIVESKESYDTQLKIQKLKDTIFAVQEQLTKAKKNGAVASLISAKSVPKSLHCLAMRLVGERISNPEKYKDAPPDPAAEDPTLYHYAIFSDNVIAVSVVVRSVVMNAEEPWKHVFHVVTDRMNLAAMKVWFKMRPLDRGAHVEIKSVEDFKFLNSSYAPVLRQLESAKLQKFYFENQAENATKDSHNLKFKNPKYLSMLNHLRFYLPEMYPKLNKILFLDDDVVVQKDVTGLWKINLDGKVNGAVETCFGSFHRYGQYLNFSHPLIKENFNPSACAWAFGMNIFDLNAWRREKCTDQYHYWQNLNEDRTLWKLGTLPPGLITFYSKTKSLDKSWHVLGLGYNPGVSMDEIRNAGVIHYNGNMKPWLDIAMNQYKSLWTKYVDNEMEFVQMCNFGL

SEQ ID NO: 4952 - protein, 500 aa, Arabidopsis thaliana
  peptide (1)..(500): Ceres Seq. ID no. 12371953
  misc_feature (1)..(500): NCBI GI NO: 18396159 NR Description: expressed protein; protein id: At3g02350
  misc_feature (1)..(500): NCBI GI NO: 15230806 NR Description: glycosyl transferase, putative
  misc_feature (63)..(497): NCBI GI NO: 15233046 NR Description: putative protein; protein id: At3g61130
  misc_feature (45)..(496): NCBI GI NO: 7271113 NR Description: 68 kDa protein [Cicer arietinum]
  misc_feature (92)..(497): NCBI GI NO: 7485958 NR Description: hypothetical protein F22I13
  misc_feature (92)..(497): NCBI GI NO: 30691875 NR Description: glycosyltransferase family 8
  misc_feature (41)..(497): NCBI GI NO: 10177914 NR Description: emb|CAB71043
  misc_feature (41)..(497): NCBI GI NO: 18422837 NR Description: putative protein; protein id: At5g47780
  misc_feature (81)..(497): NCBI GI NO: 38423965 NR Description: putative glycosyltransferase
  misc_feature (91)..(496): NCBI GI NO: 37533460 NR Description: hypothetical protein
MGNAYMQRTFLALQSDPLKTRLDLIHKQAIDHLTLVNAYAAYARKLKLDASKQLKLFEDLAINFSDLQSKPGLKSAVSDNGNALEEDSFRQLEKEVKDKVKTARMMIVESKESYDTQLKIQKLKDTIFAVQEQLTKAKKNGAVASLISAKSVPKSLHCLAMRLVGERISNPEKYKDAPPDPAAEDPTLYHYAIFSDNVIAVSVVVRSVVMNAEEPWKHVFHVVTDRMNLAAMKVWFKMRPLDRGAHVEIKSVEDFKFLNSSYAPVLRQLESAKLQKFYFENQAENATKDSHNLKFKNPKYLSMLNHLRFYLPEMYPKLNKILFLDDDVVVQKDVTGLWKINLDGKVNGAVETCFGSFHRYGQYLNFSHPLIKENFNPSACAWAFGMNIFDLNAWRREKCTDQYHYWQNLNEDRTLWKLGTLPPGLITFYSKTKSLDKSWHVLGLGYNPGVSMDEIRNAGVIHYNGNMKPWLDIAMNQYKSLWTKYVDNEMEFVQMCNFGL

SEQ ID NO: 4953 - protein, 495 aa, Arabidopsis thaliana
  peptide (1)..(495): Ceres Seq. ID no. 12371954
  misc_feature (1)..(495): NCBI GI NO: 18396159 NR Description: expressed protein; protein id: At3g02350
  misc_feature (1)..(495): NCBI GI NO: 15230806 NR Description: glycosyl transferase, putative
  misc_feature (58)..(492): NCBI GI NO: 15233046 NR Description: putative protein; protein id: At3g61130
  misc_feature (40)..(491): NCBI GI NO: 7271113 NR Description: 68 kDa protein [Cicer arietinum]
  misc_feature (87)..(492): NCBI GI NO: 7485958 NR Description: hypothetical protein F22I13
  misc_feature (87)..(492): NCBI GI NO: 30691875 NR Description: glycosyltransferase family 8
  misc_feature (36)..(492): NCBI GI NO: 10177914 NR Description: emb|CAB71043
  misc_feature (36)..(492): NCBI GI NO: 18422837 NR Description: putative protein; protein id: At5g47780
  misc_feature (76)..(492): NCBI GI NO: 38423965 NR Description: putative glycosyltransferase
  misc_feature (86)..(491): NCBI GI NO: 37533460 NR Description: hypothetical protein
MQRTFLALQSDPLKTRLDLIHKQAIDHLTLVNAYAAYARKLKLDASKQLKLFEDLAINFSDLQSKPGLKSAVSDNGNALEEDSFRQLEKEVKDKVKTARMMIVESKESYDTQLKIQKLKDTIFAVQEQLTKAKKNGAVASLISAKSVPKSLHCLAMRLVGERISNPEKYKDAPPDPAAEDPTLYHYAIFSDNVIAVSVVVRSVVMNAEEPWKHVFHVVTDRMNLAAMKVWFKMRPLDRGAHVEIKSVEDFKFLNSSYAPVLRQLESAKLQKFYFENQAENATKDSHNLKFKNPKYLSMLNHLRFYLPEMYPKLNKILFLDDDVVVQKDVTGLWKINLDGKVNGAVETCFGSFHRYGQYLNFSHPLIKENFNPSACAWAFGMNIFDLNAWRREKCTDQYHYWQNLNEDRTLWKLGTLPPGLITFYSKTKSLDKSWHVLGLGYNPGVSMDEIRNAGVIHYNGNMKPWLDIAMNQYKSLWTKYVDNEMEFVQMCNFGL

SEQ ID NO: 4954 - DNA, 2001 bp, Arabidopsis thaliana
  misc_feature (1)..(2001): Ceres Seq. ID no. 12579750
ccaaacaatcttctttgctaccaaatttctggaatctagggttcgattatatctcttttagattatccattatttttgtaattcgttttagtttcgtttttatttccttttttagattaagaagagttcatattttagaataattaaaaaaaatggattctgcaagaagttggtttcacaagtttcaaccacgagataagcctcggaaaaaggatatgttctccggaagcacttacggcggtggcgtgacagaaaccaccgtccccgacggaggaaatgatacagaaacggcaacgaaacttccaccactaggcggtgacggagaagcactctcaaattcaacaaaacagaaagttgctgcagccaaacagtacattgagaatcattataaggaacagatgaagaacctcaacgagaggaaagagagacgaacaacgttagagaagaagctagcggatgcagatgtatgtgaagaagaccaaaccaatcttatgaagtttcttgagaagaaagaaacagagtacatgagactccaaaggcataaaatgggtgctgatgacttcgaactcttaactatgatcggtaaaggtgcttttgggttcgagttgttagagagatcaacacaggtcatgtttttgctatgaagaaactcaagaaatcagaaatgcttcgcagaggccaggtggagcatgtaagagcagagaggaatctattggcagaagtagatagtaactgtatagtgaagctttactgttcttttcaagacaatgagtatctttatctgataatggagtatttgcccggtggcgatatgatgactcttctgatgaggaaagacactttaagtgaagatgaagctaagttctatatcgccgaatctgttctcgctatagaatctatccataaccgcaactatatccacagagacataaagccggataacttgttgcttgatagatatggacatttaaggttatctgattttggactatgtaagccattggattgtagtgttattgacggagaagatttcacggtaggaaatgcgggtagcggaggaggttcagagagcgtatcaaccactcctaaacgctcgcagcaagaacagttggaacattggcagaagaatcgaagaatgcttgcttactcaaccgttggtacaccagactacattgcacctgaagtcttgttaaagaaaggatacggcatggaatgtgactggtggtcactaggagctataatgtacgaaatgctggttgggtatccacccttttacgccgacgacccaatgtctacttgtagaaagatagtgaattggaaaacacatttgaagttccctgaagaatcaaggctatcacgaggggcaagagatcttattggtaagctcttgtgtagcgttaaccaacgactaggctctactggtgcctcccaaattaaggcacatccttggttcgaaggtgtacaatgggaaaagatttaccaaatggaagctgcgttcattcctgaggtcaacgacgatttggatactcaaaactttgagaagttcgatgaggaagataatcaaactcaagcaccttctagaacagggccatggagaaaaatgttatcttcaaaagacataaattttgtcggctacacatacaaaaactttgaaatcgtcaacgattatcaagtccccggtatagccgaactaaaaaagaaagagtcaaaatcaaagagaccatcggttaagtcactattcgagagcgaatcagactcgtcatcttctggttcggagcaacagaccattaaccggagctattctaatccgacgcctcgtggaatggaacccaacctgagacgtctagattctgagtagatatatatctgttatgcctatgtatatgtaaaccaaattaaaccggaaaataatgagcttaaatgtactaaaaacgtaagtaaactgaagataactaactacactcttctttctttaatacaaagaaaaatagattgcaagtc

SEQ ID NO: 4955 - protein, 405 aa, Arabidopsis thaliana
  peptide (1)..(405): Ceres Seq. ID no. 12579751
  misc_feature (1)..(271): Pfam Name: Pfam Description:  Protein kinase domain
  misc_feature (1)..(405): NCBI GI NO: 15219591 NR Description: putative protein kinase; protein id: At1g03920
  misc_feature (1)..(405): NCBI GI NO: 25287691 NR Description: hypothetical protein
  misc_feature (1)..(396): NCBI GI NO: 7339534 NR Description: protein kinase MK6 [Mesembryanthemum crystallinum]
  misc_feature (1)..(374): NCBI GI NO: 1076632 NR Description: protein kinase PKTL7 (EC 2.7.1.-) - common tobacco
  misc_feature (1)..(348): NCBI GI NO: 15225358 NR Description: putative protein kinase; protein id: At2g20470.1
  misc_feature (1)..(396): NCBI GI NO: 541816 NR Description: protein kinase (EC 2
  misc_feature (1)..(384): NCBI GI NO: 30682806 NR Description: protein kinase [Arabidopsis thaliana]
  misc_feature (1)..(379): NCBI GI NO: 22331282 NR Description: putative protein kinase; protein id: At3g23310
  misc_feature (1)..(367): NCBI GI NO: 37535354 NR Description: putative protein kinase
  misc_feature (1)..(384): NCBI GI NO: 25287694 NR Description: protein kinase [imported] - Arabidopsis thaliana
MKKLKKSEMLRRGQVEHVRAERNLLAEVDSNCIVKLYCSFQDNEYLYLIMEYLPGGDMMTLLMRKDTLSEDEAKFYIAESVLAIESIHNRNYIHRDIKPDNLLLDRYGHLRLSDFGLCKPLDCSVIDGEDFTVGNAGSGGGSESVSTTPKRSQQEQLEHWQKNRRMLAYSTVGTPDYIAPEVLLKKGYGMECDWWSLGAIMYEMLVGYPPFYADDPMSTCRKIVNWKTHLKFPEESRLSRGARDLIGKLLCSVNQRLGSTGASQIKAHPWFEGVQWEKIYQMEAAFIPEVNDDLDTQNFEKFDEEDNQTQAPSRTGPWRKMLSSKDINFVGYTYKNFEIVNDYQVPGIAELKKKESKSKRPSVKSLFESESDSSSSGSEQQTINRSYSNPTPRGMEPNLRRLDSE

SEQ ID NO: 4956 - protein, 397 aa, Arabidopsis thaliana
  peptide (1)..(397): Ceres Seq. ID no. 12579752
  misc_feature (1)..(263): Pfam Name: Pfam Description:  Protein kinase domain
  misc_feature (1)..(397): NCBI GI NO: 15219591 NR Description: putative protein kinase; protein id: At1g03920
  misc_feature (1)..(397): NCBI GI NO: 25287691 NR Description: hypothetical protein
  misc_feature (1)..(388): NCBI GI NO: 7339534 NR Description: protein kinase MK6 [Mesembryanthemum crystallinum]
  misc_feature (1)..(366): NCBI GI NO: 1076632 NR Description: protein kinase PKTL7 (EC 2.7.1.-) - common tobacco
  misc_feature (1)..(340): NCBI GI NO: 15225358 NR Description: putative protein kinase; protein id: At2g20470.1
  misc_feature (1)..(388): NCBI GI NO: 541816 NR Description: protein kinase (EC 2
  misc_feature (1)..(376): NCBI GI NO: 30682806 NR Description: protein kinase [Arabidopsis thaliana]
  misc_feature (1)..(371): NCBI GI NO: 22331282 NR Description: putative protein kinase; protein id: At3g23310
  misc_feature (1)..(359): NCBI GI NO: 37535354 NR Description: putative protein kinase
  misc_feature (1)..(376): NCBI GI NO: 25287694 NR Description: protein kinase [imported] - Arabidopsis thaliana
MLRRGQVEHVRAERNLLAEVDSNCIVKLYCSFQDNEYLYLIMEYLPGGDMMTLLMRKDTLSEDEAKFYIAESVLAIESIHNRNYIHRDIKPDNLLLDRYGHLRLSDFGLCKPLDCSVIDGEDFTVGNAGSGGGSESVSTTPKRSQQEQLEHWQKNRRMLAYSTVGTPDYIAPEVLLKKGYGMECDWWSLGAIMYEMLVGYPPFYADDPMSTCRKIVNWKTHLKFPEESRLSRGARDLIGKLLCSVNQRLGSTGASQIKAHPWFEGVQWEKIYQMEAAFIPEVNDDLDTQNFEKFDEEDNQTQAPSRTGPWRKMLSSKDINFVGYTYKNFEIVNDYQVPGIAELKKKESKSKRPSVKSLFESESDSSSSGSEQQTINRSYSNPTPRGMEPNLRRLDSE

SEQ ID NO: 4957 - protein, 356 aa, Arabidopsis thaliana
  peptide (1)..(356): Ceres Seq. ID no. 12579753
  misc_feature (1)..(222): Pfam Name: Pfam Description:  Protein kinase domain
  misc_feature (1)..(356): NCBI GI NO: 15219591 NR Description: putative protein kinase; protein id: At1g03920
  misc_feature (1)..(356): NCBI GI NO: 25287691 NR Description: hypothetical protein
  misc_feature (1)..(347): NCBI GI NO: 7339534 NR Description: protein kinase MK6 [Mesembryanthemum crystallinum]
  misc_feature (1)..(325): NCBI GI NO: 1076632 NR Description: protein kinase PKTL7 (EC 2.7.1.-) - common tobacco
  misc_feature (1)..(299): NCBI GI NO: 15225358 NR Description: putative protein kinase; protein id: At2g20470.1
  misc_feature (1)..(347): NCBI GI NO: 541816 NR Description: protein kinase (EC 2
  misc_feature (1)..(335): NCBI GI NO: 30682806 NR Description: protein kinase [Arabidopsis thaliana]
  misc_feature (1)..(330): NCBI GI NO: 22331282 NR Description: putative protein kinase; protein id: At3g23310
  misc_feature (1)..(318): NCBI GI NO: 37535354 NR Description: putative protein kinase
  misc_feature (1)..(335): NCBI GI NO: 25287694 NR Description: protein kinase [imported] - Arabidopsis thaliana
MEYLPGGDMMTLLMRKDTLSEDEAKFYIAESVLAIESIHNRNYIHRDIKPDNLLLDRYGHLRLSDFGLCKPLDCSVIDGEDFTVGNAGSGGGSESVSTTPKRSQQEQLEHWQKNRRMLAYSTVGTPDYIAPEVLLKKGYGMECDWWSLGAIMYEMLVGYPPFYADDPMSTCRKIVNWKTHLKFPEESRLSRGARDLIGKLLCSVNQRLGSTGASQIKAHPWFEGVQWEKIYQMEAAFIPEVNDDLDTQNFEKFDEEDNQTQAPSRTGPWRKMLSSKDINFVGYTYKNFEIVNDYQVPGIAELKKKESKSKRPSVKSLFESESDSSSSGSEQQTINRSYSNPTPRGMEPNLRRLDSE

SEQ ID NO: 4958 - DNA, 2451 bp, Arabidopsis thaliana
  misc_feature (1)..(2451): Ceres Seq. ID no. 13504744
atgagattactggtatttgttaatccgggccggaccgggccgtatctgaattatgaacactttcctaatgtcatagaatcgttcgtgccgtcgtcgctgcgatctgaccaaaatcaaaagtgttacgattcggtatcatcgtctctctcatttgtgattttgtcaaaccctgctctcttttctccaagtgctctcatggtgcttccgctcttccggcgcgctgcgatcgcccggacttcctcgcttctcagagctcgtcttttcgctcctgcctccgaattccattctcgcttttctaatggactataccacttggacgacaaaattagtagcagtaatggtgtgaggtctgcctctatagacttgattacaagaatggatgatagttctccaaagcccattctgcgatttggcgtgcaaaacttttcatctacaggacccatatcacagacggttcttgcaatgccagccttgtctcctactatgagtcatggaaatgttgtaaaatggatgaagaaagaaggtgacaaggtagaggtgggtgatgtactatgtgagatagagacagacaaagccactgtagaatttgagagtcaagaggaaggatttctggccaagattttagtcactgaaggatcaaaggatatccctgttaatgaaccgattgcaataatggttgaggaggaagacgacattaaaaacgttcctgctaccatagagggtggacgagatggtaaagaggaaacatcagctcatcaagtgatgaaacctgacgaaagcacacaacaaaaaagttccattcagcccgatgcatcagatcttcccccacatgtcgtcttagaaatgccagcactttctcctacaatgaaccaaggtaatattgccaaatggtggaaaaaagagggtgacaagattgaagtgggtgatgtcataggtgagatcgagactgacaaagccactctggaatttgaaagccttgaagaggggtacttagctaagattctaattcctgaaggttccaaggatgtggcggtgggaaagccgattgccctaatagttgaagatgctgaaagtattgaagccatcaagtcttcttccgcaggtagttctgaggttgatacagttaaagaagtccctgacagtgttgtagataaacctacagagaggaaagcaggcttcacaaagatcagtcctgctgcaaagctattgattttagaacatggattggaggcatcatcaattgaggcatcgggtccctatggtacattattgaaatcagacgttgtggccgcaattgcttctggaaaagcttctaaatcatctgcgtctacgaagaagaagcaaccatcaaaggagaccccgtctaaatcctcctccacatcgaagccttctgtgacacagtcagataataattatgaagattttccaaatagtcaaattcgcaagattatagcaaaacgtttattggaatcaaaacagaagataccccatttgtatttacaatcagatgttgtattggatcctcttcttgcatttagaaaagaacttcaagaaaaccatggcgttaaagtgtctgtcaatgacatagttattaaagcagtggcagtcgcactgaggaatgtacgacaagctaatgctttctgggatgctgagaaaggagatatcgttatgtgtgacagtgttgacatatcaattgcagttgcaactgagaagggcttaatgactccaattatcaagaatgcagaccagaaatctatttctgctatttccttagaggttaaggagctggcacaaaaggctcgatctggaaagcttgctcctcatgagtttcaaggagggacattcagcatatcaaatctaggaatgtatcctgtggataatttctgcgcaatcattaacccccctcaggctgggattctagcagttggtagaggaaacaaagtggttgagccagttattggactagatggaattgagaagccttctgttgtgacaaaaatgaatgtaacgttatccgctgatcatcggatctttgatggacaagttggagcttcgtttatgtctgaattgcgttcaaactttgaggatgttcgaagacttcttctgtgagaaagatccaactgtttaccaaatgaatcttggattactacataataaacctcggaccaacccacgtgcacatccagaaccagaactgctggtctacattgttaactctgatcacatgtttcatttttttccatttggttcatatacttaccaaaatttgttttggtctttaacaattcgtcttatagattggtaacttcctgaggtattttttgtctggtctgtcctctgcaaaataaataatttcagctgtcaatccgcaactggtgaaataatttaaaaagtattttaccctcaaaaaaaaaaaaaaaaacccgaattcctgcagcccgggggatccac

SEQ ID NO: 4959 - protein, 702 aa, Arabidopsis thaliana
  peptide (1)..(702): Ceres Seq. ID no. 13504745
  misc_feature (469)..(702): Pfam Name: catalytic domain Pfam Description: 2-oxoacid dehydrogenases acyltransferase
  misc_feature (93)..(702): NCBI GI NO: 1076318 NR Description: dihydrolipoamide S-acetyltransferase (EC 2
  misc_feature (147)..(702): NCBI GI NO: 21594641 NR Description: dihydrolipoamide S-acetyltransferase
  misc_feature (147)..(702): NCBI GI NO: 27762280 NR Description: dihydrolipoamide S-acetyltransferase [Danio rerio]
  misc_feature (147)..(702): NCBI GI NO: 20805283 NR Description: dihydrolipoamide acetyltransferase precursor
  misc_feature (147)..(702): NCBI GI NO: 34863356 NR Description: dihydrolipoamide acetyltransferase
  misc_feature (147)..(702): NCBI GI NO: 266685 NR Description: DIHYDROLIPOAMIDE ACETYLTRANSFERASE COMPONENT OF PYRUVATEDEHYDROGENASE COMPLEX
  misc_feature (147)..(702): NCBI GI NO: 16580128 NR Description: dihydrolipoamide S-acetyltransferase precursor
  misc_feature (147)..(702): NCBI GI NO: 14587786 NR Description: dihydrolipoamide acetyltransferase [Sus scrofa]
  misc_feature (271)..(702): NCBI GI NO: 18400212 NR Description: acetyltransferase -related [Arabidopsis thaliana]
  misc_feature (260)..(702): NCBI GI NO: 5669871 NR Description: dihydrolipoamide S-acetyltransferase [Zea mays]
MRLLVFVNPGRTGPYLNYEHFPNVIESFVPSSLRSDQNQKCYDSVSSSLSFVILSNPALFSPSALMVLPLFRRAAIARTSSLLRARLFAPASEFHSRFSNGLYHLDDKISSSNGVRSASIDLITRMDDSSPKPILRFGVQNFSSTGPISQTVLAMPALSPTMSHGNVVKWMKKEGDKVEVGDVLCEIETDKATVEFESQEEGFLAKILVTEGSKDIPVNEPIAIMVEEEDDIKNVPATIEGGRDGKEETSAHQVMKPDESTQQKSSIQPDASDLPPHVVLEMPALSPTMNQGNIAKWWKKEGDKIEVGDVIGEIETDKATLEFESLEEGYLAKILIPEGSKDVAVGKPIALIVEDAESIEAIKSSSAGSSEVDTVKEVPDSVVDKPTERKAGFTKISPAAKLLILEHGLEASSIEASGPYGTLLKSDVVAAIASGKASKSSASTKKKQPSKETPSKSSSTSKPSVTQSDNNYEDFPNSQIRKIIAKRLLESKQKIPHLYLQSDVVLDPLLAFRKELQENHGVKVSVNDIVIKAVAVALRNVRQANAFWDAEKGDIVMCDSVDISIAVATEKGLMTPIIKNADQKSISAISLEVKELAQKARSGKLAPHEFQGGTFSISNLGMYPVDNFCAIINPPQAGILAVGRGNKVVEPVIGLDGIEKPSVVTKMNVTLSADHRIFDGQVGASFMSELRSNFEDVRRLLL

SEQ ID NO: 4960 - protein, 637 aa, Arabidopsis thaliana
  peptide (1)..(637): Ceres Seq. ID no. 13504746
  misc_feature (404)..(637): Pfam Name: catalytic domain Pfam Description: 2-oxoacid dehydrogenases acyltransferase
  misc_feature (28)..(637): NCBI GI NO: 1076318 NR Description: dihydrolipoamide S-acetyltransferase (EC 2
  misc_feature (82)..(637): NCBI GI NO: 21594641 NR Description: dihydrolipoamide S-acetyltransferase
  misc_feature (82)..(637): NCBI GI NO: 27762280 NR Description: dihydrolipoamide S-acetyltransferase [Danio rerio]
  misc_feature (82)..(637): NCBI GI NO: 20805283 NR Description: dihydrolipoamide acetyltransferase precursor
  misc_feature (82)..(637): NCBI GI NO: 34863356 NR Description: dihydrolipoamide acetyltransferase
  misc_feature (82)..(637): NCBI GI NO: 266685 NR Description: DIHYDROLIPOAMIDE ACETYLTRANSFERASE COMPONENT OF PYRUVATEDEHYDROGENASE COMPLEX
  misc_feature (82)..(637): NCBI GI NO: 16580128 NR Description: dihydrolipoamide S-acetyltransferase precursor
  misc_feature (82)..(637): NCBI GI NO: 14587786 NR Description: dihydrolipoamide acetyltransferase [Sus scrofa]
  misc_feature (206)..(637): NCBI GI NO: 18400212 NR Description: acetyltransferase -related [Arabidopsis thaliana]
  misc_feature (195)..(637): NCBI GI NO: 5669871 NR Description: dihydrolipoamide S-acetyltransferase [Zea mays]
MVLPLFRRAAIARTSSLLRARLFAPASEFHSRFSNGLYHLDDKISSSNGVRSASIDLITRMDDSSPKPILRFGVQNFSSTGPISQTVLAMPALSPTMSHGNVVKWMKKEGDKVEVGDVLCEIETDKATVEFESQEEGFLAKILVTEGSKDIPVNEPIAIMVEEEDDIKNVPATIEGGRDGKEETSAHQVMKPDESTQQKSSIQPDASDLPPHVVLEMPALSPTMNQGNIAKWWKKEGDKIEVGDVIGEIETDKATLEFESLEEGYLAKILIPEGSKDVAVGKPIALIVEDAESIEAIKSSSAGSSEVDTVKEVPDSVVDKPTERKAGFTKISPAAKLLILEHGLEASSIEASGPYGTLLKSDVVAAIASGKASKSSASTKKKQPSKETPSKSSSTSKPSVTQSDNNYEDFPNSQIRKIIAKRLLESKQKIPHLYLQSDVVLDPLLAFRKELQENHGVKVSVNDIVIKAVAVALRNVRQANAFWDAEKGDIVMCDSVDISIAVATEKGLMTPIIKNADQKSISAISLEVKELAQKARSGKLAPHEFQGGTFSISNLGMYPVDNFCAIINPPQAGILAVGRGNKVVEPVIGLDGIEKPSVVTKMNVTLSADHRIFDGQVGASFMSELRSNFEDVRRLLL

SEQ ID NO: 4961 - protein, 577 aa, Arabidopsis thaliana
  peptide (1)..(577): Ceres Seq. ID no. 13504747
  misc_feature (344)..(577): Pfam Name: catalytic domain Pfam Description: 2-oxoacid dehydrogenases acyltransferase
  misc_feature (1)..(577): NCBI GI NO: 1076318 NR Description: dihydrolipoamide S-acetyltransferase (EC 2
  misc_feature (22)..(577): NCBI GI NO: 21594641 NR Description: dihydrolipoamide S-acetyltransferase
  misc_feature (22)..(577): NCBI GI NO: 27762280 NR Description: dihydrolipoamide S-acetyltransferase [Danio rerio]
  misc_feature (22)..(577): NCBI GI NO: 20805283 NR Description: dihydrolipoamide acetyltransferase precursor
  misc_feature (22)..(577): NCBI GI NO: 34863356 NR Description: dihydrolipoamide acetyltransferase
  misc_feature (22)..(577): NCBI GI NO: 266685 NR Description: DIHYDROLIPOAMIDE ACETYLTRANSFERASE COMPONENT OF PYRUVATEDEHYDROGENASE COMPLEX
  misc_feature (22)..(577): NCBI GI NO: 16580128 NR Description: dihydrolipoamide S-acetyltransferase precursor
  misc_feature (22)..(577): NCBI GI NO: 14587786 NR Description: dihydrolipoamide acetyltransferase [Sus scrofa]
  misc_feature (146)..(577): NCBI GI NO: 18400212 NR Description: acetyltransferase -related [Arabidopsis thaliana]
  misc_feature (135)..(577): NCBI GI NO: 5669871 NR Description: dihydrolipoamide S-acetyltransferase [Zea mays]
MDDSSPKPILRFGVQNFSSTGPISQTVLAMPALSPTMSHGNVVKWMKKEGDKVEVGDVLCEIETDKATVEFESQEEGFLAKILVTEGSKDIPVNEPIAIMVEEEDDIKNVPATIEGGRDGKEETSAHQVMKPDESTQQKSSIQPDASDLPPHVVLEMPALSPTMNQGNIAKWWKKEGDKIEVGDVIGEIETDKATLEFESLEEGYLAKILIPEGSKDVAVGKPIALIVEDAESIEAIKSSSAGSSEVDTVKEVPDSVVDKPTERKAGFTKISPAAKLLILEHGLEASSIEASGPYGTLLKSDVVAAIASGKASKSSASTKKKQPSKETPSKSSSTSKPSVTQSDNNYEDFPNSQIRKIIAKRLLESKQKIPHLYLQSDVVLDPLLAFRKELQENHGVKVSVNDIVIKAVAVALRNVRQANAFWDAEKGDIVMCDSVDISIAVATEKGLMTPIIKNADQKSISAISLEVKELAQKARSGKLAPHEFQGGTFSISNLGMYPVDNFCAIINPPQAGILAVGRGNKVVEPVIGLDGIEKPSVVTKMNVTLSADHRIFDGQVGASFMSELRSNFEDVRRLLL

SEQ ID NO: 4962 - DNA, 1126 bp, Arabidopsis thaliana
  misc_feature (1)..(1126): Ceres Seq. ID no. 12348411
ctgccaaacatatacatcaaagcttgactctctttttctctcccatggaatcgacaaagaagcaagtctcgctggagctacttccatggttagttgtccacaccgatggaacggtagagagactagcgggaaccgaggtttgtcctcccggtttggatccaataaccggggttttctctaaagatatcattatcgaaccgaaaaccggtttatctgcccgaatctatcgacccttctcgattcaacccggtcagaagattcctctcatgctctattttcatggcggtgcatttctcatctcctccacttccttcccctcttaccacaccagtcttaacaaaattgtcaatcaggctaacgtcatagccgtctctgtcaattacagactagcaccagaacatccacttcctacagcgtacgaagactcatggactgcgctaaatactatccaagccataaacgagccgtggatcaacgactacgccgacttggacagtatattcctagtgggagatagcgccggagctaatatctcgcaccacctcgcatttcgagccaaacaatctgaccaaaccgtgaaaataaaaggcattggaatgatccacccatatttttggggaacacaacctatcggagcagagatcaaagacgaagcgatgaaacaaatggtggacggatggtgggaatttgtgtgcccctccaagaaaggatctgatgacccgtggattaatccgtttgcggacgggtcaccggatcttggagggttagggtgtgagagagtgatgattactgtggcggagaaagatatattgaatgagagagggaagatgtattttgaaagattggtgaagagtgagtggaaaggaaaggttgagattatggagacgaaagagaaagatcatgtttttcatatttttgagcccgattgtgatgaagctatggagatggtacgatgcttggctctctttataaaccaagttgaagcttgatattatttgttttgcctaaatttgatggcttttttaatgtttgtataatttttacatgtttgttaatgttgttgttattgtcttttcttttaaatttgtgtattacatttatatgtggttaaatttgtgttttttcc

SEQ ID NO: 4963 - protein, 328 aa, Arabidopsis thaliana
  peptide (1)..(328): Ceres Seq. ID no. 12348412
  misc_feature (74)..(131): Pfam Name: Pfam Description:  Carboxylesterase
  misc_feature (15)..(328): NCBI GI NO: 21536771 NR Description: unknown [Arabidopsis thaliana]
  misc_feature (15)..(328): NCBI GI NO: 18401743 NR Description: expressed protein; protein id: At1g47480
  misc_feature (21)..(323): NCBI GI NO: 15228426 NR Description: putative protein; protein id: At3g48700.1
  misc_feature (22)..(325): NCBI GI NO: 15227669 NR Description: putative esterase; protein id: At2g03550.1
  misc_feature (22)..(325): NCBI GI NO: 28393060 NR Description: putative esterase [Arabidopsis thaliana]
  misc_feature (21)..(323): NCBI GI NO: 15228425 NR Description: putative protein; protein id: At3g48690
  misc_feature (27)..(323): NCBI GI NO: 15222791 NR Description: hypothetical protein; protein id: At1g49640.1
  misc_feature (19)..(323): NCBI GI NO: 15222795 NR Description: unknown protein; protein id: At1g49660.1
  misc_feature (21)..(323): NCBI GI NO: 18086341 NR Description: AT3g48690/T8P19_200 [Arabidopsis thaliana]
  misc_feature (18)..(323): NCBI GI NO: 21537287 NR Description: putative esterase [Arabidopsis thaliana]
AKHIHQSLTLFFSPMESTKKQVSLELLPWLVVHTDGTVERLAGTEVCPPGLDPITGVFSKDIIIEPKTGLSARIYRPFSIQPGQKIPLMLYFHGGAFLISSTSFPSYHTSLNKIVNQANVIAVSVNYRLAPEHPLPTAYEDSWTALNTIQAINEPWINDYADLDSIFLVGDSAGANISHHLAFRAKQSDQTVKIKGIGMIHPYFWGTQPIGAEIKDEAMKQMVDGWWEFVCPSKKGSDDPWINPFADGSPDLGGLGCERVMITVAEKDILNERGKMYFERLVKSEWKGKVEIMETKEKDHVFHIFEPDCDEAMEMVRCLALFINQVEA

SEQ ID NO: 4964 - protein, 314 aa, Arabidopsis thaliana
  peptide (1)..(314): Ceres Seq. ID no. 12348413
  misc_feature (60)..(117): Pfam Name: Pfam Description:  Carboxylesterase
  misc_feature (1)..(314): NCBI GI NO: 21536771 NR Description: unknown [Arabidopsis thaliana]
  misc_feature (1)..(314): NCBI GI NO: 18401743 NR Description: expressed protein; protein id: At1g47480
  misc_feature (7)..(309): NCBI GI NO: 15228426 NR Description: putative protein; protein id: At3g48700.1
  misc_feature (8)..(311): NCBI GI NO: 15227669 NR Description: putative esterase; protein id: At2g03550.1
  misc_feature (8)..(311): NCBI GI NO: 28393060 NR Description: putative esterase [Arabidopsis thaliana]
  misc_feature (7)..(309): NCBI GI NO: 15228425 NR Description: putative protein; protein id: At3g48690
  misc_feature (13)..(309): NCBI GI NO: 15222791 NR Description: hypothetical protein; protein id: At1g49640.1
  misc_feature (5)..(309): NCBI GI NO: 15222795 NR Description: unknown protein; protein id: At1g49660.1
  misc_feature (7)..(309): NCBI GI NO: 18086341 NR Description: AT3g48690/T8P19_200 [Arabidopsis thaliana]
  misc_feature (4)..(309): NCBI GI NO: 21537287 NR Description: putative esterase [Arabidopsis thaliana]
MESTKKQVSLELLPWLVVHTDGTVERLAGTEVCPPGLDPITGVFSKDIIIEPKTGLSARIYRPFSIQPGQKIPLMLYFHGGAFLISSTSFPSYHTSLNKIVNQANVIAVSVNYRLAPEHPLPTAYEDSWTALNTIQAINEPWINDYADLDSIFLVGDSAGANISHHLAFRAKQSDQTVKIKGIGMIHPYFWGTQPIGAEIKDEAMKQMVDGWWEFVCPSKKGSDDPWINPFADGSPDLGGLGCERVMITVAEKDILNERGKMYFERLVKSEWKGKVEIMETKEKDHVFHIFEPDCDEAMEMVRCLALFINQVEA

SEQ ID NO: 4965 - protein, 240 aa, Arabidopsis thaliana
  peptide (1)..(240): Ceres Seq. ID no. 12348414
  misc_feature (1)..(43): Pfam Name: Pfam Description:  Carboxylesterase
  misc_feature (1)..(240): NCBI GI NO: 21536771 NR Description: unknown [Arabidopsis thaliana]
  misc_feature (1)..(240): NCBI GI NO: 18401743 NR Description: expressed protein; protein id: At1g47480
  misc_feature (1)..(235): NCBI GI NO: 15228426 NR Description: putative protein; protein id: At3g48700.1
  misc_feature (1)..(237): NCBI GI NO: 15227669 NR Description: putative esterase; protein id: At2g03550.1
  misc_feature (1)..(237): NCBI GI NO: 28393060 NR Description: putative esterase [Arabidopsis thaliana]
  misc_feature (1)..(235): NCBI GI NO: 15228425 NR Description: putative protein; protein id: At3g48690
  misc_feature (1)..(235): NCBI GI NO: 15222791 NR Description: hypothetical protein; protein id: At1g49640.1
  misc_feature (1)..(235): NCBI GI NO: 15222795 NR Description: unknown protein; protein id: At1g49660.1
  misc_feature (1)..(235): NCBI GI NO: 18086341 NR Description: AT3g48690/T8P19_200 [Arabidopsis thaliana]
  misc_feature (1)..(235): NCBI GI NO: 21537287 NR Description: putative esterase [Arabidopsis thaliana]
MLYFHGGAFLISSTSFPSYHTSLNKIVNQANVIAVSVNYRLAPEHPLPTAYEDSWTALNTIQAINEPWINDYADLDSIFLVGDSAGANISHHLAFRAKQSDQTVKIKGIGMIHPYFWGTQPIGAEIKDEAMKQMVDGWWEFVCPSKKGSDDPWINPFADGSPDLGGLGCERVMITVAEKDILNERGKMYFERLVKSEWKGKVEIMETKEKDHVFHIFEPDCDEAMEMVRCLALFINQVEA

SEQ ID NO: 4966 - DNA, 1194 bp, Arabidopsis thaliana
  misc_feature (1)..(1194): Ceres Seq. ID no. 12330308
gtcataacagtaaatgatttccacctcgctcttaattgtctacaaatcatctctttcttcacctaacgacgatggatctccgattcttggcgtccttgacccttcttctcggtctattcttcgtcaatacaaatccaacagttggacaagtcggcgtttgctatggaagaaacggcaacaacctcccttcaccggcagaaaccattgcgctcttcaaacagaaaaacatccaacgagttaggctatacagtccggaccacgacgttctagccgccctacgtggctccaacatcgaggtaacgctgggtcttcccaactcttacctacagagcgtggcctcgagccaatcacaagctaacgcgtgggtacaaacctacgtcatgaactacgcgaatggcgtcaggttccgttacatatctgttgggaatgaagttaaaatctccgactcttacgcacagttcctagtccctgccatggaaaacattgaccgggcggttttagcagccggactcggtggtcgtatcaaggtatccacatcggtagatatgggagtgcttggagagtcttatccaccatcgaaaggttcgtttaggggagacgttatggtggtaatggaaccaatcatacgtttcttggtaagcaagaactctcctttactcttaaacctctacacttacttcagctacgcgggcaatataggccaaatccggctcgattacgctctcttcacggctccttcaggaatcgtttcggaccctcctagatcttatcaaaacctatttgatgcgatgctcgatgcgatgtactcagccctagagaaattcggtggcgcatcattggaaatagttgtggcggagactggatggccaacgggaggaggagtcgatacaaatatagagaatgcgagaatctataacaataatttgattaagcatgtgaagaatgggacaccgaagagaccagggaaagaaatcgagacatatttatttgccatttatgacgagaatcaaaagccgactcctccttatgttgagaagttttggggattgttctatcccaacaagcagcctaagtatgatattaacttttattgagccgaaccaatattctatcaagggaatggtatatttatatttgaaaactaatatagatattggtactatcattcattatacaataaataaagtttgaggc

SEQ ID NO: 4967 - protein, 340 aa, Arabidopsis thaliana
  peptide (1)..(340): Ceres Seq. ID no. 12330309
  misc_feature (27)..(339): Pfam Name: Pfam Description:  Glycosyl hydrolases family 17
  misc_feature (1)..(340): NCBI GI NO: 21536773 NR Description: glucan endo-1,3-beta-D-glucosidase-like protein
  misc_feature (1)..(340): NCBI GI NO: 15230263 NR Description: glycosyl hydrolase family 17
  misc_feature (6)..(339): NCBI GI NO: 16903144 NR Description: beta-1,3-glucanase [Prunus persica]
  misc_feature (6)..(338): NCBI GI NO: 11279332 NR Description: beta-1,3 glucanase (EC 3.2.1.-)
  misc_feature (6)..(339): NCBI GI NO: 7447980 NR Description: glucan endo-1,3-beta-D-glucosidase (EC 3
  misc_feature (6)..(339): NCBI GI NO: 1706546 NR Description: GLUCAN ENDO-1,3-BETA-GLUCOSIDASE PRECURSOR ((1-
  misc_feature (6)..(340): NCBI GI NO: 22550395 NR Description: beta-1,3-glucanase [Vitis vinifera]
  misc_feature (6)..(339): NCBI GI NO: 7801384 NR Description: beta 1-3 glucanase [Vitis vinifera]
  misc_feature (6)..(339): NCBI GI NO: 1706548 NR Description: Glucan endo-1
  misc_feature (6)..(339): NCBI GI NO: 16903142 NR Description: beta-1,3-glucanase [Prunus persica]
MDLRFLASLTLLLGLFFVNTNPTVGQVGVCYGRNGNNLPSPAETIALFKQKNIQRVRLYSPDHDVLAALRGSNIEVTLGLPNSYLQSVASSQSQANAWVQTYVMNYANGVRFRYISVGNEVKISDSYAQFLVPAMENIDRAVLAAGLGGRIKVSTSVDMGVLGESYPPSKGSFRGDVMVVMEPIIRFLVSKNSPLLLNLYTYFSYAGNIGQIRLDYALFTAPSGIVSDPPRSYQNLFDAMLDAMYSALEKFGGASLEIVVAETGWPTGGGVDTNIENARIYNNNLIKHVKNGTPKRPGKEIETYLFAIYDENQKPTPPYVEKFWGLFYPNKQPKYDINFY

SEQ ID NO: 4968 - protein, 237 aa, Arabidopsis thaliana
  peptide (1)..(237): Ceres Seq. ID no. 12330310
  misc_feature (1)..(236): Pfam Name: Pfam Description:  Glycosyl hydrolases family 17
  misc_feature (1)..(237): NCBI GI NO: 21536773 NR Description: glucan endo-1,3-beta-D-glucosidase-like protein
  misc_feature (1)..(237): NCBI GI NO: 15230263 NR Description: glycosyl hydrolase family 17
  misc_feature (1)..(236): NCBI GI NO: 16903144 NR Description: beta-1,3-glucanase [Prunus persica]
  misc_feature (1)..(235): NCBI GI NO: 11279332 NR Description: beta-1,3 glucanase (EC 3.2.1.-)
  misc_feature (1)..(236): NCBI GI NO: 7447980 NR Description: glucan endo-1,3-beta-D-glucosidase (EC 3
  misc_feature (1)..(236): NCBI GI NO: 1706546 NR Description: GLUCAN ENDO-1,3-BETA-GLUCOSIDASE PRECURSOR ((1-
  misc_feature (1)..(237): NCBI GI NO: 22550395 NR Description: beta-1,3-glucanase [Vitis vinifera]
  misc_feature (1)..(236): NCBI GI NO: 7801384 NR Description: beta 1-3 glucanase [Vitis vinifera]
  misc_feature (1)..(236): NCBI GI NO: 1706548 NR Description: Glucan endo-1
  misc_feature (1)..(236): NCBI GI NO: 16903142 NR Description: beta-1,3-glucanase [Prunus persica]
MNYANGVRFRYISVGNEVKISDSYAQFLVPAMENIDRAVLAAGLGGRIKVSTSVDMGVLGESYPPSKGSFRGDVMVVMEPIIRFLVSKNSPLLLNLYTYFSYAGNIGQIRLDYALFTAPSGIVSDPPRSYQNLFDAMLDAMYSALEKFGGASLEIVVAETGWPTGGGVDTNIENARIYNNNLIKHVKNGTPKRPGKEIETYLFAIYDENQKPTPPYVEKFWGLFYPNKQPKYDINFY

SEQ ID NO: 4969 - protein, 206 aa, Arabidopsis thaliana
  peptide (1)..(206): Ceres Seq. ID no. 12330311
  misc_feature (1)..(205): Pfam Name: Pfam Description:  Glycosyl hydrolases family 17
  misc_feature (1)..(206): NCBI GI NO: 21536773 NR Description: glucan endo-1,3-beta-D-glucosidase-like protein
  misc_feature (1)..(206): NCBI GI NO: 15230263 NR Description: glycosyl hydrolase family 17
  misc_feature (1)..(205): NCBI GI NO: 16903144 NR Description: beta-1,3-glucanase [Prunus persica]
  misc_feature (1)..(204): NCBI GI NO: 11279332 NR Description: beta-1,3 glucanase (EC 3.2.1.-)
  misc_feature (1)..(205): NCBI GI NO: 7447980 NR Description: glucan endo-1,3-beta-D-glucosidase (EC 3
  misc_feature (1)..(205): NCBI GI NO: 1706546 NR Description: GLUCAN ENDO-1,3-BETA-GLUCOSIDASE PRECURSOR ((1-
  misc_feature (1)..(206): NCBI GI NO: 22550395 NR Description: beta-1,3-glucanase [Vitis vinifera]
  misc_feature (1)..(205): NCBI GI NO: 7801384 NR Description: beta 1-3 glucanase [Vitis vinifera]
  misc_feature (1)..(205): NCBI GI NO: 1706548 NR Description: Glucan endo-1
  misc_feature (1)..(205): NCBI GI NO: 16903142 NR Description: beta-1,3-glucanase [Prunus persica]
MENIDRAVLAAGLGGRIKVSTSVDMGVLGESYPPSKGSFRGDVMVVMEPIIRFLVSKNSPLLLNLYTYFSYAGNIGQIRLDYALFTAPSGIVSDPPRSYQNLFDAMLDAMYSALEKFGGASLEIVVAETGWPTGGGVDTNIENARIYNNNLIKHVKNGTPKRPGKEIETYLFAIYDENQKPTPPYVEKFWGLFYPNKQPKYDINFY

SEQ ID NO: 4970 - DNA, 1564 bp, Arabidopsis thaliana
  misc_feature (1)..(1564): Ceres Seq. ID no. 12329690
attccctttcgatacatatatatttgagtctcttcctccaaatctgaaccgtttatacctctgattccaccgcttgttgcttattcatcggaatttctgttccttttgtgccaaatgctcaagaaatcgaaaagtattgtgtaattttcgttgttgattttgaaagtttcaatcttttgtagggtgagaattgagttttatcgaacaagatggatttcgtgaacaatcttgataccgacacgtcgctatcaattctctcttgtctagatgatccatcagatattgtccgtgccagtgctgtctcacgctcctggcgacaatttgtggttaagtatagtctctccaagaatctatgcttgaagttgttccatcagctatctaatgtggatcatataattgaaacaagtaatgatagaaatggagagtcatctgaagctgggtcaagcagtctcatggatacaaggctacttgaaaaagagcaccgggcttttgccttgttggctagagggtgcatgtcttcacctattgaaagctgtatagctgatgccattagagcttccagtactgataattacccagtagaaagcatcttaaacacactcgagaagagagatcggattggtcgaaccccttcttattggtcgagtactgggcaacacaaaactacggtgcccgaatcacttctttacaagttgattggtgatttgtgtctcattactgaagtcagcatccatcctttccaagcttattttcagcgcggtcatccgatatactcttcacattatgttcgtttccggttgggtcacgaaaaggacaattcacctcactacaacaattcacaggataaaaaaggtgagccaggaaagagttcaattgaaagcaactatgtatggacttacacttcacaagagttttcgatggctcaggaaaatcgattgcagagctttcagcttccagaacctgttctttgcattggtgggtatctgctagtcgagtttctaggtcgagttcagacacaagaaatggatggccaatactatatatgcgtgtcacatgtcaaagtggagggaagatctctagcaaaatcatttcgagttgagaatgtggatgacaatggaaagtttggattgaaggtgttgagttacaatgatccgaaaaaaatggaggagatggatgcagaggccgggcaggacatggatgcagaggcgggccaaagtcagctgagaaaccttgaacagctcttgaatttgttgcacaggcatcctctcgatgttgtcgactatgtttggcctgatgagtcagacgacgagtatgctgaatcagaagatgaggctgagccttagtcactgaattactactattcccagttatttcttctttttggttttaattttaaagaatctttaggtgttttttgtcatcttttgtgagcgtttttaaaagcttgtactccagccatcgttgttaaacattgtgtgtgttacagaccttaacagaaagttaacagccattttgggctctctcttatctgtcggtgattccagagaatcaaagcagtctttcg

SEQ ID NO: 4971 - protein, 377 aa, Arabidopsis thaliana
  peptide (1)..(377): Ceres Seq. ID no. 12329691
  misc_feature (4)..(50): Pfam Name: Pfam Description:  F-box domain
  misc_feature (1)..(377): NCBI GI NO: 18411435 NR Description: F-box protein family; protein id: At4g00755
  misc_feature (1)..(216): NCBI GI NO: 7452420 NR Description: hypothetical protein A_TM018A10
  misc_feature (279)..(377): NCBI GI NO: 7452420 NR Description: hypothetical protein A_TM018A10
  misc_feature (133)..(377): NCBI GI NO: 28393062 NR Description: putative F-box protein [Arabidopsis thaliana]
  misc_feature (231)..(297): NCBI GI NO: 18308222 NR Description: unknown protein [Oryza sativa]
  misc_feature (117)..(209): NCBI GI NO: 28850404 NR Description: hypothetical protein [Dictyostelium discoideum]
  misc_feature (230)..(287): NCBI GI NO: 28850404 NR Description: hypothetical protein [Dictyostelium discoideum]
MDFVNNLDTDTSLSILSCLDDPSDIVRASAVSRSWRQFVVKYSLSKNLCLKLFHQLSNVDHIIETSNDRNGESSEAGSSSLMDTRLLEKEHRAFALLARGCMSSPIESCIADAIRASSTDNYPVESILNTLEKRDRIGRTPSYWSSTGQHKTTVPESLLYKLIGDLCLITEVSIHPFQAYFQRGHPIYSSHYVRFRLGHEKDNSPHYNNSQDKKGEPGKSSIESNYVWTYTSQEFSMAQENRLQSFQLPEPVLCIGGYLLVEFLGRVQTQEMDGQYYICVSHVKVEGRSLAKSFRVENVDDNGKFGLKVLSYNDPKKMEEMDAEAGQDMDAEAGQSQLRNLEQLLNLLHRHPLDVVDYVWPDESDDEYAESEDEAEP

SEQ ID NO: 4972 - protein, 296 aa, Arabidopsis thaliana
  peptide (1)..(296): Ceres Seq. ID no. 12329692
  misc_feature (1)..(296): NCBI GI NO: 18411435 NR Description: F-box protein family; protein id: At4g00755
  misc_feature (1)..(135): NCBI GI NO: 7452420 NR Description: hypothetical protein A_TM018A10
  misc_feature (198)..(296): NCBI GI NO: 7452420 NR Description: hypothetical protein A_TM018A10
  misc_feature (52)..(296): NCBI GI NO: 28393062 NR Description: putative F-box protein [Arabidopsis thaliana]
  misc_feature (150)..(216): NCBI GI NO: 18308222 NR Description: unknown protein [Oryza sativa]
  misc_feature (36)..(128): NCBI GI NO: 28850404 NR Description: hypothetical protein [Dictyostelium discoideum]
  misc_feature (149)..(206): NCBI GI NO: 28850404 NR Description: hypothetical protein [Dictyostelium discoideum]
MDTRLLEKEHRAFALLARGCMSSPIESCIADAIRASSTDNYPVESILNTLEKRDRIGRTPSYWSSTGQHKTTVPESLLYKLIGDLCLITEVSIHPFQAYFQRGHPIYSSHYVRFRLGHEKDNSPHYNNSQDKKGEPGKSSIESNYVWTYTSQEFSMAQENRLQSFQLPEPVLCIGGYLLVEFLGRVQTQEMDGQYYICVSHVKVEGRSLAKSFRVENVDDNGKFGLKVLSYNDPKKMEEMDAEAGQDMDAEAGQSQLRNLEQLLNLLHRHPLDVVDYVWPDESDDEYAESEDEAEP

SEQ ID NO: 4973 - protein, 276 aa, Arabidopsis thaliana
  peptide (1)..(276): Ceres Seq. ID no. 12329693
  misc_feature (1)..(276): NCBI GI NO: 18411435 NR Description: F-box protein family; protein id: At4g00755
  misc_feature (1)..(115): NCBI GI NO: 7452420 NR Description: hypothetical protein A_TM018A10
  misc_feature (178)..(276): NCBI GI NO: 7452420 NR Description: hypothetical protein A_TM018A10
  misc_feature (32)..(276): NCBI GI NO: 28393062 NR Description: putative F-box protein [Arabidopsis thaliana]
  misc_feature (130)..(196): NCBI GI NO: 18308222 NR Description: unknown protein [Oryza sativa]
  misc_feature (16)..(108): NCBI GI NO: 28850404 NR Description: hypothetical protein [Dictyostelium discoideum]
  misc_feature (129)..(186): NCBI GI NO: 28850404 NR Description: hypothetical protein [Dictyostelium discoideum]
MSSPIESCIADAIRASSTDNYPVESILNTLEKRDRIGRTPSYWSSTGQHKTTVPESLLYKLIGDLCLITEVSIHPFQAYFQRGHPIYSSHYVRFRLGHEKDNSPHYNNSQDKKGEPGKSSIESNYVWTYTSQEFSMAQENRLQSFQLPEPVLCIGGYLLVEFLGRVQTQEMDGQYYICVSHVKVEGRSLAKSFRVENVDDNGKFGLKVLSYNDPKKMEEMDAEAGQDMDAEAGQSQLRNLEQLLNLLHRHPLDVVDYVWPDESDDEYAESEDEAEP

SEQ ID NO: 4974 - DNA, 2142 bp, Arabidopsis thaliana
  misc_feature (1)..(2142): Ceres Seq. ID no. 13489235
atctctcttcacatgcccatttgaatcgtatctcctctcatttcttcttttgttttgttggagttagataaaatcaaaggtctaataaaagtgtcaaaacccttatcgctataacctccactaccatcttaaacttctccttataactcacgcttctctgctttcttctctcagagtctaactgctcaaataagaaaatggttcatgtgtcatcatctcatggagccaaagatggctctgaagaagcctatgattacagaggaaacccaccagataagtctaaaaccggtggatggttaggcgccggtttaattttagggagcgagctatcagagagaatatgcgtgatgggcatatcaatgaatctagtgacgtaccttgttggagatttacacatctcatcagctaaatcagcgaccatagtcaccaacttcatgggaactcttaaccttctagggcttctcggtggttttttggctgacgctaaactcggtcgctacaagatggttgcaatctcagcttctgtcacagctctgggagtgttgcttttgacggtggctacaactatctcaagcatgagaccaccaatatgtgacgatttcaggagacttcatcatcagtgcatagaagcaaacggacaccagttggctcttctctatgttgctctctataccatagctctaggcggaggaggaatcaaatccaacgtctctggttttgggtctgaccagttcgatactagtgatcctaaagaagagaaacagatgattttcttcttcaacagattctatttctccatcagcgttggctctctcttcgccgtgattgctcttgtttacgttcaggacaacgtcgggagaggctggggttacgggatctctgccgcgactatggtggttgcagccattgttttactctgcggaacgaaacggtaccgtttcaagaaacctaaaggaagcccttttacaacaatatggagggttggtttcttggcttggaagaaaagaaaggagagttaccctgcgcatccaagtcttttgaacggttatgacaacaccacggttccacacacagagatgcttaagtgtttagacaaagccgcaatttccaagaacgagagctctcctagctcgaaggacttcgaagagaaggatccgtggatcgtttcgactgttacacaagtcgaagaagtgaaactcgtgatgaaattggtaccgatttgggcaacgaacattcttttctggacgatttactcccaaatgacgactttcacggtcgaacaagcgacgtttatggaccgaaaactcggatctttcactgttcctgcaggctcttactctgctttcctcatactcacaattctcctcttcacttcccttaacgagagagtctttgttcctttaacaagaaggctcacaaaaaagcctcaaggaatcacaagcctacagagaatcggagtagggctagtattctcaatggctgcaatggctgtagccgcggttatagagaacgctagacgcgaggcagcggttaacaacgataagaaaataagcgcgttttggttggttccacaatatttcttagtcggtgcgggtgaggcctttgcttacgttggacagcttgagttctttataagagaagcaccagagaggatgaaatcgatgagcaccggattgtttctaagcacgatatcgatgggattcttcgtgagtagcttgcttgtttcgcttgttgatagggttacagacaaaagctggcttagaagtaaccttaacaaagcgagattgaactacttctactggttacttgttgtcttgggagcattgaacttcttgatttttattgtgtttgccatgaaacatcagtataaagctgatgtgattactgttgttgtgactgatgatgattcagtggagaaggaagtgacgaagaaagagagctctgaatttgagcttaaggacattccttgaaaccagatttagaagaagaaaaaaaacctctggttttgttatttgctttgaagatttcattttgtctttgtatttttagtatattgtgtgtatgaaatagaaagattactatatggtttggattgtatttttttttgtaagatttttaaaaatttagttactatagtttttg

SEQ ID NO: 4975 - protein, 590 aa, Arabidopsis thaliana
  peptide (1)..(590): Ceres Seq. ID no. 13489236
  misc_feature (101)..(498): Pfam Name: Pfam Description:  POT family
  misc_feature (1)..(590): NCBI GI NO: 15233123 NR Description: nitrate transporter [Arabidopsis thaliana]
  misc_feature (1)..(590): NCBI GI NO: 21536775 NR Description: nitrate transporter [Arabidopsis thaliana]
  misc_feature (24)..(590): NCBI GI NO: 25456097 NR Description: probable nitrate transporter ntp3
  misc_feature (8)..(584): NCBI GI NO: 21741984 NR Description: OSJNBa0060P14.5
  misc_feature (16)..(583): NCBI GI NO: 25407841 NR Description: probable nitrate transporter
  misc_feature (16)..(583): NCBI GI NO: 30683214 NR Description: nitrate transporter -related
  misc_feature (16)..(583): NCBI GI NO: 20466668 NR Description: putative nitrate transporter
  misc_feature (16)..(558): NCBI GI NO: 602292 NR Description: RCH2 protein
  misc_feature (16)..(558): NCBI GI NO: 18391353 NR Description: putative NPK1-related protein kinase 2
  misc_feature (1)..(558): NCBI GI NO: 30696666 NR Description: oligopeptide transporter -related
MVHVSSSHGAKDGSEEAYDYRGNPPDKSKTGGWLGAGLILGSELSERICVMGISMNLVTYLVGDLHISSAKSATIVTNFMGTLNLLGLLGGFLADAKLGRYKMVAISASVTALGVLLLTVATTISSMRPPICDDFRRLHHQCIEANGHQLALLYVALYTIALGGGGIKSNVSGFGSDQFDTSDPKEEKQMIFFFNRFYFSISVGSLFAVIALVYVQDNVGRGWGYGISAATMVVAAIVLLCGTKRYRFKKPKGSPFTTIWRVGFLAWKKRKESYPAHPSLLNGYDNTTVPHTEMLKCLDKAAISKNESSPSSKDFEEKDPWIVSTVTQVEEVKLVMKLVPIWATNILFWTIYSQMTTFTVEQATFMDRKLGSFTVPAGSYSAFLILTILLFTSLNERVFVPLTRRLTKKPQGITSLQRIGVGLVFSMAAMAVAAVIENARREAAVNNDKKISAFWLVPQYFLVGAGEAFAYVGQLEFFIREAPERMKSMSTGLFLSTISMGFFVSSLLVSLVDRVTDKSWLRSNLNKARLNYFYWLLVVLGALNFLIFIVFAMKHQYKADVITVVVTDDDSVEKEVTKKESSEFELKDIP

SEQ ID NO: 4976 - protein, 540 aa, Arabidopsis thaliana
  peptide (1)..(540): Ceres Seq. ID no. 13489237
  misc_feature (51)..(448): Pfam Name: Pfam Description:  POT family
  misc_feature (1)..(540): NCBI GI NO: 15233123 NR Description: nitrate transporter [Arabidopsis thaliana]
  misc_feature (1)..(540): NCBI GI NO: 21536775 NR Description: nitrate transporter [Arabidopsis thaliana]
  misc_feature (1)..(540): NCBI GI NO: 25456097 NR Description: probable nitrate transporter ntp3
  misc_feature (1)..(534): NCBI GI NO: 21741984 NR Description: OSJNBa0060P14.5
  misc_feature (1)..(533): NCBI GI NO: 25407841 NR Description: probable nitrate transporter
  misc_feature (1)..(533): NCBI GI NO: 30683214 NR Description: nitrate transporter -related
  misc_feature (1)..(533): NCBI GI NO: 20466668 NR Description: putative nitrate transporter
  misc_feature (1)..(508): NCBI GI NO: 602292 NR Description: RCH2 protein
  misc_feature (1)..(508): NCBI GI NO: 18391353 NR Description: putative NPK1-related protein kinase 2
  misc_feature (1)..(508): NCBI GI NO: 30696666 NR Description: oligopeptide transporter -related
MGISMNLVTYLVGDLHISSAKSATIVTNFMGTLNLLGLLGGFLADAKLGRYKMVAISASVTALGVLLLTVATTISSMRPPICDDFRRLHHQCIEANGHQLALLYVALYTIALGGGGIKSNVSGFGSDQFDTSDPKEEKQMIFFFNRFYFSISVGSLFAVIALVYVQDNVGRGWGYGISAATMVVAAIVLLCGTKRYRFKKPKGSPFTTIWRVGFLAWKKRKESYPAHPSLLNGYDNTTVPHTEMLKCLDKAAISKNESSPSSKDFEEKDPWIVSTVTQVEEVKLVMKLVPIWATNILFWTIYSQMTTFTVEQATFMDRKLGSFTVPAGSYSAFLILTILLFTSLNERVFVPLTRRLTKKPQGITSLQRIGVGLVFSMAAMAVAAVIENARREAAVNNDKKISAFWLVPQYFLVGAGEAFAYVGQLEFFIREAPERMKSMSTGLFLSTISMGFFVSSLLVSLVDRVTDKSWLRSNLNKARLNYFYWLLVVLGALNFLIFIVFAMKHQYKADVITVVVTDDDSVEKEVTKKESSEFELKDIP

SEQ ID NO: 4977 - protein, 536 aa, Arabidopsis thaliana
  peptide (1)..(536): Ceres Seq. ID no. 13489238
  misc_feature (47)..(444): Pfam Name: Pfam Description:  POT family
  misc_feature (1)..(536): NCBI GI NO: 15233123 NR Description: nitrate transporter [Arabidopsis thaliana]
  misc_feature (1)..(536): NCBI GI NO: 21536775 NR Description: nitrate transporter [Arabidopsis thaliana]
  misc_feature (1)..(536): NCBI GI NO: 25456097 NR Description: probable nitrate transporter ntp3
  misc_feature (1)..(530): NCBI GI NO: 21741984 NR Description: OSJNBa0060P14.5
  misc_feature (1)..(529): NCBI GI NO: 25407841 NR Description: probable nitrate transporter
  misc_feature (1)..(529): NCBI GI NO: 30683214 NR Description: nitrate transporter -related
  misc_feature (1)..(529): NCBI GI NO: 20466668 NR Description: putative nitrate transporter
  misc_feature (1)..(504): NCBI GI NO: 602292 NR Description: RCH2 protein
  misc_feature (1)..(504): NCBI GI NO: 18391353 NR Description: putative NPK1-related protein kinase 2
  misc_feature (1)..(504): NCBI GI NO: 30696666 NR Description: oligopeptide transporter -related
MNLVTYLVGDLHISSAKSATIVTNFMGTLNLLGLLGGFLADAKLGRYKMVAISASVTALGVLLLTVATTISSMRPPICDDFRRLHHQCIEANGHQLALLYVALYTIALGGGGIKSNVSGFGSDQFDTSDPKEEKQMIFFFNRFYFSISVGSLFAVIALVYVQDNVGRGWGYGISAATMVVAAIVLLCGTKRYRFKKPKGSPFTTIWRVGFLAWKKRKESYPAHPSLLNGYDNTTVPHTEMLKCLDKAAISKNESSPSSKDFEEKDPWIVSTVTQVEEVKLVMKLVPIWATNILFWTIYSQMTTFTVEQATFMDRKLGSFTVPAGSYSAFLILTILLFTSLNERVFVPLTRRLTKKPQGITSLQRIGVGLVFSMAAMAVAAVIENARREAAVNNDKKISAFWLVPQYFLVGAGEAFAYVGQLEFFIREAPERMKSMSTGLFLSTISMGFFVSSLLVSLVDRVTDKSWLRSNLNKARLNYFYWLLVVLGALNFLIFIVFAMKHQYKADVITVVVTDDDSVEKEVTKKESSEFELKDIP

SEQ ID NO: 4978 - DNA, 1307 bp, Arabidopsis thaliana
  misc_feature (1)..(1307): Ceres Seq. ID no. 13487221
gtcgacccacgcgtccgctcaccatcaaacaactacaacatctgcggttagtatgttgaaagtagagagtaactgggcacaagcctgtgatacatgccgatcagccgcctgcaccgtgtactgccgggctgattctgcctacttgtgctccagttgtgatgctcaagttcatgctgccaatcgtcttgcttcccgccatgaacgtgttcgagtctgtcaatcatgtgagcgagccccggctgcctttttctgcaaggcagatgctgcatctctatgcacaacctgtgattcagagattcattccgcaaacccacttgctagacgccatcaacgagttccaattctgcccatttctgagtactcttacagttccacggccactaaccattcatgtgagacaacagtgacagatccagagaacagacttgtgcttggtcaagaagaagaggatgaagatgaagcagaggcggcttcatggttgttgcctaattcagggaaaaacagtggtaacaacaatggcttctcgattggggatgagtttctgaaccttgttgattatagttcgagtgataagcaattcacagatcaatccaatcagtatcaactagactgcaacgtacctcagaggagctatggggaagatggagttgttccacttcaaattgaagtatcaaagggcatgtaccaagagcaacagaactttcagctgagtatcaactgtggctcctggggagctcttcgaagctccaatggttccctcagtcatatggtgaatgtttcatctatggacctgggagttgtgccggagtcaacaacgagtgacgcaacagtatcaaacccaagatcgcccaaagcggtaacagaccaaccaccttaccctccagctcagatgctcagtccaagggacagagaagctagagtcctgagatacagagagaagaagaagatgaggaaatttgagaagacgataagatatgcttcaaggaaagcgtatgcagagaaaagaccacggatcaagggccggtttgcaaagaagaaagatgtcgatgaagaggcaaaccaagctttctccacaatgataacatttgacaccggatatggaattgttccatcattctgatgctgctatggcaaaactagactgcatgcttgtaaattacttctggtttgaaattcctgcaagttattaccacggttttatgcatatagggtctgtagtttactagttttgcctaactagtacgagttaattagatatacactcatacttagctgctgtaagttaatacaaattttgcccacttggt

SEQ ID NO: 4979 - protein, 372 aa, Arabidopsis thaliana
  peptide (1)..(372): Ceres Seq. ID no. 13487222
  misc_feature (24)..(71): Pfam Name: Pfam Description:  B-box zinc finger
  misc_feature (18)..(372): NCBI GI NO: 15242403 NR Description: Zinc finger protein CONSTANS-LIKE 1 (COL1)
  misc_feature (18)..(372): NCBI GI NO: 22854906 NR Description: COL1 protein [Brassica nigra]
  misc_feature (18)..(372): NCBI GI NO: 22854908 NR Description: COL1 protein [Brassica nigra]
  misc_feature (18)..(372): NCBI GI NO: 22854910 NR Description: COL1 protein [Brassica nigra]
  misc_feature (18)..(372): NCBI GI NO: 22854916 NR Description: COL1 protein [Brassica nigra]
  misc_feature (18)..(372): NCBI GI NO: 22854934 NR Description: COL1 protein [Brassica nigra]
  misc_feature (18)..(372): NCBI GI NO: 22854928 NR Description: COL1 protein [Brassica nigra]
  misc_feature (18)..(372): NCBI GI NO: 22854930 NR Description: COL1 protein [Brassica nigra]
  misc_feature (18)..(372): NCBI GI NO: 22854982 NR Description: COL1 protein [Brassica nigra]
  misc_feature (18)..(372): NCBI GI NO: 22854942 NR Description: COL1 protein [Brassica nigra]
STHASAHHQTTTTSAVSMLKVESNWAQACDTCRSAACTVYCRADSAYLCSSCDAQVHAANRLASRHERVRVCQSCERAPAAFFCKADAASLCTTCDSEIHSANPLARRHQRVPILPISEYSYSSTATNHSCETTVTDPENRLVLGQEEEDEDEAEAASWLLPNSGKNSGNNNGFSIGDEFLNLVDYSSSDKQFTDQSNQYQLDCNVPQRSYGEDGVVPLQIEVSKGMYQEQQNFQLSINCGSWGALRSSNGSLSHMVNVSSMDLGVVPESTTSDATVSNPRSPKAVTDQPPYPPAQMLSPRDREARVLRYREKKKMRKFEKTIRYASRKAYAEKRPRIKGRFAKKKDVDEEANQAFSTMITFDTGYGIVPSF

SEQ ID NO: 4980 - protein, 355 aa, Arabidopsis thaliana
  peptide (1)..(355): Ceres Seq. ID no. 13487223
  misc_feature (7)..(54): Pfam Name: Pfam Description:  B-box zinc finger
  misc_feature (1)..(355): NCBI GI NO: 15242403 NR Description: Zinc finger protein CONSTANS-LIKE 1 (COL1)
  misc_feature (1)..(355): NCBI GI NO: 22854906 NR Description: COL1 protein [Brassica nigra]
  misc_feature (1)..(355): NCBI GI NO: 22854908 NR Description: COL1 protein [Brassica nigra]
  misc_feature (1)..(355): NCBI GI NO: 22854910 NR Description: COL1 protein [Brassica nigra]
  misc_feature (1)..(355): NCBI GI NO: 22854916 NR Description: COL1 protein [Brassica nigra]
  misc_feature (1)..(355): NCBI GI NO: 22854934 NR Description: COL1 protein [Brassica nigra]
  misc_feature (1)..(355): NCBI GI NO: 22854928 NR Description: COL1 protein [Brassica nigra]
  misc_feature (1)..(355): NCBI GI NO: 22854930 NR Description: COL1 protein [Brassica nigra]
  misc_feature (1)..(355): NCBI GI NO: 22854982 NR Description: COL1 protein [Brassica nigra]
  misc_feature (1)..(355): NCBI GI NO: 22854942 NR Description: COL1 protein [Brassica nigra]
MLKVESNWAQACDTCRSAACTVYCRADSAYLCSSCDAQVHAANRLASRHERVRVCQSCERAPAAFFCKADAASLCTTCDSEIHSANPLARRHQRVPILPISEYSYSSTATNHSCETTVTDPENRLVLGQEEEDEDEAEAASWLLPNSGKNSGNNNGFSIGDEFLNLVDYSSSDKQFTDQSNQYQLDCNVPQRSYGEDGVVPLQIEVSKGMYQEQQNFQLSINCGSWGALRSSNGSLSHMVNVSSMDLGVVPESTTSDATVSNPRSPKAVTDQPPYPPAQMLSPRDREARVLRYREKKKMRKFEKTIRYASRKAYAEKRPRIKGRFAKKKDVDEEANQAFSTMITFDTGYGIVPSF

SEQ ID NO: 4981 - DNA, 1969 bp, Arabidopsis thaliana
  misc_feature (1)..(1969): Ceres Seq. ID no. 13497298
agagaaagacttttttagtgtttctttgtcattttcgttcctcaaaaaaaccttttcgaatttgacccttattgttatcctgattcttctgctcggttctcgccggagagaagacacggagaagagggttttcgaaaaggaggatgagaggttccaataacaccgatctatttgaccctaagacggagatggattccaatttctctcgccatggttcttcctccgaaggtgattttggtttcgctttcaatgacagtaacttctccgatcgtttgctccggatcgagatcttgggtgggccttcggattctaggtctgatgctgaaggatgtacgagtattgccgattgggctcgtcatcgcaagaggagaagagaggacaacaagaaggacaatggtgttgcgatttcagacattgtggcatgtgctgaagaacagattttaaccgataacaaccaacctgatatggatgatgctcctggtggtgataatcttgacgatgaaggagaggcaatggttgaagaggctttatcaggtgatgatgatgcatctagtgagccaaactggggtattgattgttctactgttgttagagttaaagaactgcatattagttctcctatcttggccgcaaaaagcccctttttctacaagctgttttctaatggaatgagggaatcagaacaaagacatgtaacccttagaattagtgcacaagaggaaggtgctttgatggagcttttaaactttatgtatagcaactctctaagtgtcacaacagcacccgctttattagatgttcttatggctgctgacaagtttgaggttgcttcctgtatgaggtattgtagtagactactgcgaaatatgcccatgacccctgattctgctttgctctatcttgagctgccctctagtgttttaatggctgaagcagtgcaacctctaaccgatgcagcaaagcagttccttgcctcgcgctacaaggatattaccaagtttcatgatgaggttatggccttaccattggctggaatagaggcgatactatcgagcgatgatctccaaattgcttctgaggatgctgtttatgattttgtcttgaaatgggcaaggggacagtatagttcattggaagatcgtagagagattctgggttcacgccttgcactctacatccgcttcccatacatgacgtgtcgaaagctgaaaaaggtactaacgtgcagtgattttgagcatgaagtagcatcaaagcaagtattagaagcgctcttcttcaaagcagaagccccacacaggcaacgcatcctcgcagctgaaggatcggactccatgaaccgccgtttcatagagagggcttacaaatacagacccgtaaaagtggtggagtttgagcttcctcgcccgcaatgtgtagtgtacctggacttgaagcgagaggaatgcgcaggactattcccttcaggaagagtctattctcaggctttccacttaggaggtcaaggtttcttcctctcagcacactgcaacatggaccagcaaagctcgttccactgctttgggctattcctcggaatgcaagagaaaggggctgtgagttttggtgtggactacgaatttgcggcaagagataaaagtacaaaggaagaatacgtaagcaaatacaaaggaaactacacattcacaggggggaaagcggttggttacagaaaccttttcgggattccatggacttcgttcatagccgaggacagtcaacatttcatcaatggcattctccatctcagagccgagctcaccattaaacgttcctcagacctgcactgactgttttcttctctctctctctctatgtcgtcacatttaagttgtataatctcgttatgtagcagctctaaccacgagtgtcctttgtacaataattgcctaaggagcaaaagtatggcttaaagagtacctcattctgt

SEQ ID NO: 4982 - protein, 561 aa, Arabidopsis thaliana
  peptide (1)..(561): Ceres Seq. ID no. 13497299
  misc_feature (1)..(561): NCBI GI NO: 18407023 NR Description: POZ domain protein family [Arabidopsis thaliana]
  misc_feature (16)..(561): NCBI GI NO: 25352317 NR Description: hypothetical protein At2g46260
  misc_feature (16)..(561): NCBI GI NO: 21536778 NR Description: unknown [Arabidopsis thaliana]
  misc_feature (1)..(559): NCBI GI NO: 30695452 NR Description: POZ domain protein family [Arabidopsis thaliana]
  misc_feature (1)..(556): NCBI GI NO: 18412063 NR Description: POZ domain protein family [Arabidopsis thaliana]
  misc_feature (16)..(559): NCBI GI NO: 11282344 NR Description: hypothetical protein F2A19
  misc_feature (25)..(555): NCBI GI NO: 15234082 NR Description: POZ domain protein family [Arabidopsis thaliana]
  misc_feature (281)..(526): NCBI GI NO: 27948452 NR Description: GAMYB-binding protein
  misc_feature (142)..(390): NCBI GI NO: 38194229 NR Description: actinfilin [Homo sapiens]
  misc_feature (142)..(390): NCBI GI NO: 21728394 NR Description: actinfilin [Rattus norvegicus]
MRGSNNTDLFDPKTEMDSNFSRHGSSSEGDFGFAFNDSNFSDRLLRIEILGGPSDSRSDAEGCTSIADWARHRKRRREDNKKDNGVAISDIVACAEEQILTDNNQPDMDDAPGGDNLDDEGEAMVEEALSGDDDASSEPNWGIDCSTVVRVKELHISSPILAAKSPFFYKLFSNGMRESEQRHVTLRISAQEEGALMELLNFMYSNSLSVTTAPALLDVLMAADKFEVASCMRYCSRLLRNMPMTPDSALLYLELPSSVLMAEAVQPLTDAAKQFLASRYKDITKFHDEVMALPLAGIEAILSSDDLQIASEDAVYDFVLKWARGQYSSLEDRREILGSRLALYIRFPYMTCRKLKKVLTCSDFEHEVASKQVLEALFFKAEAPHRQRILAAEGSDSMNRRFIERAYKYRPVKVVEFELPRPQCVVYLDLKREECAGLFPSGRVYSQAFHLGGQGFFLSAHCNMDQQSSFHCFGLFLGMQEKGAVSFGVDYEFAARDKSTKEEYVSKYKGNYTFTGGKAVGYRNLFGIPWTSFIAEDSQHFINGILHLRAELTIKRSSDLH

SEQ ID NO: 4983 - protein, 546 aa, Arabidopsis thaliana
  peptide (1)..(546): Ceres Seq. ID no. 13497300
  misc_feature (1)..(546): NCBI GI NO: 18407023 NR Description: POZ domain protein family [Arabidopsis thaliana]
  misc_feature (1)..(546): NCBI GI NO: 25352317 NR Description: hypothetical protein At2g46260
  misc_feature (1)..(546): NCBI GI NO: 21536778 NR Description: unknown [Arabidopsis thaliana]
  misc_feature (1)..(544): NCBI GI NO: 30695452 NR Description: POZ domain protein family [Arabidopsis thaliana]
  misc_feature (1)..(541): NCBI GI NO: 18412063 NR Description: POZ domain protein family [Arabidopsis thaliana]
  misc_feature (1)..(544): NCBI GI NO: 11282344 NR Description: hypothetical protein F2A19
  misc_feature (10)..(540): NCBI GI NO: 15234082 NR Description: POZ domain protein family [Arabidopsis thaliana]
  misc_feature (266)..(511): NCBI GI NO: 27948452 NR Description: GAMYB-binding protein
  misc_feature (127)..(375): NCBI GI NO: 38194229 NR Description: actinfilin [Homo sapiens]
  misc_feature (127)..(375): NCBI GI NO: 21728394 NR Description: actinfilin [Rattus norvegicus]
MDSNFSRHGSSSEGDFGFAFNDSNFSDRLLRIEILGGPSDSRSDAEGCTSIADWARHRKRRREDNKKDNGVAISDIVACAEEQILTDNNQPDMDDAPGGDNLDDEGEAMVEEALSGDDDASSEPNWGIDCSTVVRVKELHISSPILAAKSPFFYKLFSNGMRESEQRHVTLRISAQEEGALMELLNFMYSNSLSVTTAPALLDVLMAADKFEVASCMRYCSRLLRNMPMTPDSALLYLELPSSVLMAEAVQPLTDAAKQFLASRYKDITKFHDEVMALPLAGIEAILSSDDLQIASEDAVYDFVLKWARGQYSSLEDRREILGSRLALYIRFPYMTCRKLKKVLTCSDFEHEVASKQVLEALFFKAEAPHRQRILAAEGSDSMNRRFIERAYKYRPVKVVEFELPRPQCVVYLDLKREECAGLFPSGRVYSQAFHLGGQGFFLSAHCNMDQQSSFHCFGLFLGMQEKGAVSFGVDYEFAARDKSTKEEYVSKYKGNYTFTGGKAVGYRNLFGIPWTSFIAEDSQHFINGILHLRAELTIKRSSDLH

SEQ ID NO: 4984 - protein, 454 aa, Arabidopsis thaliana
  peptide (1)..(454): Ceres Seq. ID no. 13497301
  misc_feature (1)..(454): NCBI GI NO: 18407023 NR Description: POZ domain protein family [Arabidopsis thaliana]
  misc_feature (1)..(454): NCBI GI NO: 25352317 NR Description: hypothetical protein At2g46260
  misc_feature (1)..(454): NCBI GI NO: 21536778 NR Description: unknown [Arabidopsis thaliana]
  misc_feature (1)..(452): NCBI GI NO: 30695452 NR Description: POZ domain protein family [Arabidopsis thaliana]
  misc_feature (1)..(449): NCBI GI NO: 18412063 NR Description: POZ domain protein family [Arabidopsis thaliana]
  misc_feature (1)..(452): NCBI GI NO: 11282344 NR Description: hypothetical protein F2A19
  misc_feature (1)..(448): NCBI GI NO: 15234082 NR Description: POZ domain protein family [Arabidopsis thaliana]
  misc_feature (174)..(419): NCBI GI NO: 27948452 NR Description: GAMYB-binding protein
  misc_feature (35)..(283): NCBI GI NO: 38194229 NR Description: actinfilin [Homo sapiens]
  misc_feature (35)..(283): NCBI GI NO: 21728394 NR Description: actinfilin [Rattus norvegicus]
MDDAPGGDNLDDEGEAMVEEALSGDDDASSEPNWGIDCSTVVRVKELHISSPILAAKSPFFYKLFSNGMRESEQRHVTLRISAQEEGALMELLNFMYSNSLSVTTAPALLDVLMAADKFEVASCMRYCSRLLRNMPMTPDSALLYLELPSSVLMAEAVQPLTDAAKQFLASRYKDITKFHDEVMALPLAGIEAILSSDDLQIASEDAVYDFVLKWARGQYSSLEDRREILGSRLALYIRFPYMTCRKLKKVLTCSDFEHEVASKQVLEALFFKAEAPHRQRILAAEGSDSMNRRFIERAYKYRPVKVVEFELPRPQCVVYLDLKREECAGLFPSGRVYSQAFHLGGQGFFLSAHCNMDQQSSFHCFGLFLGMQEKGAVSFGVDYEFAARDKSTKEEYVSKYKGNYTFTGGKAVGYRNLFGIPWTSFIAEDSQHFINGILHLRAELTIKRSSDLH

SEQ ID NO: 4985 - DNA, 1046 bp, Arabidopsis thaliana
  misc_feature (1)..(1046): Ceres Seq. ID no. 13494184
gttaaaataaaatagaataaaaataaaggaagaagaagaagaagaagaagaagaaaggattcgtcttccttcttccacaccctttctgacacctcatctcccctcccaccttctccgtcccgttccgtttctccatcagatcctcgattccgatccaacagttcgaattcagtttccgattctgatctgatcgaaccaatactcactgagatttgatcggcgattatggagtctatatctccggtatcgaatcagcttcttcagccgacgacgacgagctctaattccgatcgctctcgtcgtaagcgtaagaagaaatcatcgccatcatcggttgagaaatctccatctccgtcaatatcgttggagaaatggagatcggagaagcagcaacagatctactcaacgaagctagttcatgctttaagagagctacgaatcagccaacaaccatcttcatcatcatcttcttcgattccacgtggaggtagagccgtacgtgaagtcgccgatagagctttagcagttgcggcgagaggtaaaacgttatggagtcgagcgatactttcaaaagctgtaaaactcaaattcaggaaacacaaacgccagagaatctctaatccgacgacgacgacgttaaccaccgggagtatcaggtcaaagaaacagagagcgacggttttgaggcttaaggctaaaggtttgccagctgtacagaggaaagtgaaagtactgagccggttagttcccggttgccgtaaacaatcattaccggtggttttagaagaaaccactgattatatagctgccatggagatgcagattcgtactatgactgcgattctctccgccgttagttcttctcctccgccgccaacgccaggtcacgaagggggacaaacacacatgcttggttagttggccaaactgtccttttatttttttccaattttaaaaaccaaaaaaaaaactgttttttttatcatattattattcttctcactgtattgtttgttgtttgaatattttactattcaactttattt

SEQ ID NO: 4986 - protein, 230 aa, Arabidopsis thaliana
  peptide (1)..(230): Ceres Seq. ID no. 13494185
  misc_feature (1)..(230): NCBI GI NO: 18401374 NR Description: bHLH protein [Arabidopsis thaliana]
  misc_feature (12)..(217): NCBI GI NO: 21618012 NR Description: unknown [Arabidopsis thaliana]
  misc_feature (12)..(217): NCBI GI NO: 18397627 NR Description: bHLH protein [Arabidopsis thaliana]
  misc_feature (18)..(218): NCBI GI NO: 18390998 NR Description: bHLH protein [Arabidopsis thaliana]
  misc_feature (78)..(219): NCBI GI NO: 34898122 NR Description: bHLH protein-like
  misc_feature (49)..(213): NCBI GI NO: 34904544 NR Description: B1066G12.17
  misc_feature (32)..(218): NCBI GI NO: 18397368 NR Description: bHLH protein [Arabidopsis thaliana]
  misc_feature (88)..(217): NCBI GI NO: 34912942 NR Description: OSJNBb0035I14.10
MESISPVSNQLLQPTTTSSNSDRSRRKRKKKSSPSSVEKSPSPSISLEKWRSEKQQQIYSTKLVHALRELRISQQPSSSSSSSIPRGGRAVREVADRALAVAARGKTLWSRAILSKAVKLKFRKHKRQRISNPTTTTLTTGSIRSKKQRATVLRLKAKGLPAVQRKVKVLSRLVPGCRKQSLPVVLEETTDYIAAMEMQIRTMTAILSAVSSSPPPPTPGHEGGQTHMLG

SEQ ID NO: 4987 - DNA, 1149 bp, Arabidopsis thaliana
  misc_feature (1)..(1149): Ceres Seq. ID no. 12327856
gtttattctttttttccggcggaagcgaattgttggttgctgtagagagaattgattggccggagagaatggtgaaagtaatcgattcccattacctagccatcaccgccattgtcaccgtgggttatcaattcatattcttcgtaatcacagctcttttcaaatttgatcaagttactgactttgccggaagtacaaatttcgtgatacttgctgtattgactctgcttctcaaagggacatggcattatcgtcagatagtcttgactgtgctagtagtcgtatggggacttcgtctgggactgttcctccttatgaggatcttgcaatggggtgaagatcgacgctttgatgacatgcgtgaaaatattgggaaactagtagtcttttggatttttcaggccgtgtgggtttggactgttagtttacctgttacctttgttaatgcaagcaacggtggaagattgtttcagcccgcagatgttatcggttggacaatgtgggttgcagggttcttgattgaagctacagctgatcaacaaaagctttcgttcaagaagtgtccagaaaacaaaggaaaatggtgtgatgttggtgtatggaagtattcacgccatccaaactactttggtgagatgttactctggtggggcttatatgtggcttcattgcctgtgcttaaaggtctcgagtaccttgtcataattggaccagtctttctcactttgctacttctcttcgttagcggcataccattactcgaggaatctgcggacaaaaagtatggtaacttgggagcttatcgacactacaagaagacaactagtcctctgattctcttaccgcgaggagtgtatgggtacttaccaatatggtgcaaatcagtctttctctttgagtttccattgtacagccgtaatcttcctcaagagactacagcttgggatagacgaaactcgaagaagagccagagaagcattgactgagagagagaaagagagtagattgtcactgattttgcaaacccgtctcctagttcttccttaatattcaaactctctttttgtatagattcttgtttgtctttgggtacttgttaaagataattgctacattgattgagaatacaataagattcaaaccaagctt

SEQ ID NO: 4988 - protein, 327 aa, Arabidopsis thaliana
  peptide (1)..(327): Ceres Seq. ID no. 12327857
  misc_feature (23)..(314): NCBI GI NO: 15221003 NR Description: hypothetical protein; protein id: At1g18180.1
  misc_feature (104)..(274): NCBI GI NO: 9719732 NR Description: T10F20.18 [Arabidopsis thaliana]
  misc_feature (23)..(86): NCBI GI NO: 9719732 NR Description: T10F20.18 [Arabidopsis thaliana]
  misc_feature (275)..(314): NCBI GI NO: 9719732 NR Description: T10F20.18 [Arabidopsis thaliana]
  misc_feature (23)..(274): NCBI GI NO: 25402844 NR Description: protein T10O22.15
  misc_feature (275)..(314): NCBI GI NO: 25402844 NR Description: protein T10O22.15
  misc_feature (23)..(310): NCBI GI NO: 18410409 NR Description: expressed protein; protein id: At1g73650
  misc_feature (23)..(310): NCBI GI NO: 30698953 NR Description: expressed protein [Arabidopsis thaliana]
  misc_feature (23)..(310): NCBI GI NO: 21537359 NR Description: unknown [Arabidopsis thaliana]
  misc_feature (23)..(309): NCBI GI NO: 13937298 NR Description: unknown protein [Oryza sativa]
LFFFSGGSELLVAVERIDWPERMVKVIDSHYLAITAIVTVGYQFIFFVITALFKFDQVTDFAGSTNFVILAVLTLLLKGTWHYRQIVLTVLVVVWGLRLGLFLLMRILQWGEDRRFDDMRENIGKLVVFWIFQAVWVWTVSLPVTFVNASNGGRLFQPADVIGWTMWVAGFLIEATADQQKLSFKKCPENKGKWCDVGVWKYSRHPNYFGEMLLWWGLYVASLPVLKGLEYLVIIGPVFLTLLLLFVSGIPLLEESADKKYGNLGAYRHYKKTTSPLILLPRGVYGYLPIWCKSVFLFEFPLYSRNLPQETTAWDRRNSKKSQRSID

SEQ ID NO: 4989 - protein, 305 aa, Arabidopsis thaliana
  peptide (1)..(305): Ceres Seq. ID no. 12327858
  misc_feature (1)..(292): NCBI GI NO: 15221003 NR Description: hypothetical protein; protein id: At1g18180.1
  misc_feature (82)..(252): NCBI GI NO: 9719732 NR Description: T10F20.18 [Arabidopsis thaliana]
  misc_feature (1)..(64): NCBI GI NO: 9719732 NR Description: T10F20.18 [Arabidopsis thaliana]
  misc_feature (253)..(292): NCBI GI NO: 9719732 NR Description: T10F20.18 [Arabidopsis thaliana]
  misc_feature (1)..(252): NCBI GI NO: 25402844 NR Description: protein T10O22.15
  misc_feature (253)..(292): NCBI GI NO: 25402844 NR Description: protein T10O22.15
  misc_feature (1)..(288): NCBI GI NO: 18410409 NR Description: expressed protein; protein id: At1g73650
  misc_feature (1)..(288): NCBI GI NO: 30698953 NR Description: expressed protein [Arabidopsis thaliana]
  misc_feature (1)..(288): NCBI GI NO: 21537359 NR Description: unknown [Arabidopsis thaliana]
  misc_feature (1)..(287): NCBI GI NO: 13937298 NR Description: unknown protein [Oryza sativa]
MVKVIDSHYLAITAIVTVGYQFIFFVITALFKFDQVTDFAGSTNFVILAVLTLLLKGTWHYRQIVLTVLVVVWGLRLGLFLLMRILQWGEDRRFDDMRENIGKLVVFWIFQAVWVWTVSLPVTFVNASNGGRLFQPADVIGWTMWVAGFLIEATADQQKLSFKKCPENKGKWCDVGVWKYSRHPNYFGEMLLWWGLYVASLPVLKGLEYLVIIGPVFLTLLLLFVSGIPLLEESADKKYGNLGAYRHYKKTTSPLILLPRGVYGYLPIWCKSVFLFEFPLYSRNLPQETTAWDRRNSKKSQRSID

SEQ ID NO: 4990 - protein, 223 aa, Arabidopsis thaliana
  peptide (1)..(223): Ceres Seq. ID no. 12327859
  misc_feature (1)..(210): NCBI GI NO: 15221003 NR Description: hypothetical protein; protein id: At1g18180.1
  misc_feature (1)..(170): NCBI GI NO: 9719732 NR Description: T10F20.18 [Arabidopsis thaliana]
  misc_feature (171)..(210): NCBI GI NO: 9719732 NR Description: T10F20.18 [Arabidopsis thaliana]
  misc_feature (1)..(170): NCBI GI NO: 25402844 NR Description: protein T10O22.15
  misc_feature (171)..(210): NCBI GI NO: 25402844 NR Description: protein T10O22.15
  misc_feature (1)..(206): NCBI GI NO: 18410409 NR Description: expressed protein; protein id: At1g73650
  misc_feature (1)..(206): NCBI GI NO: 30698953 NR Description: expressed protein [Arabidopsis thaliana]
  misc_feature (1)..(206): NCBI GI NO: 21537359 NR Description: unknown [Arabidopsis thaliana]
  misc_feature (1)..(205): NCBI GI NO: 13937298 NR Description: unknown protein [Oryza sativa]
  misc_feature (1)..(150): NCBI GI NO: 25406281 NR Description: unknown protein F25P22.7
MRILQWGEDRRFDDMRENIGKLVVFWIFQAVWVWTVSLPVTFVNASNGGRLFQPADVIGWTMWVAGFLIEATADQQKLSFKKCPENKGKWCDVGVWKYSRHPNYFGEMLLWWGLYVASLPVLKGLEYLVIIGPVFLTLLLLFVSGIPLLEESADKKYGNLGAYRHYKKTTSPLILLPRGVYGYLPIWCKSVFLFEFPLYSRNLPQETTAWDRRNSKKSQRSID

SEQ ID NO: 4991 - DNA, 1214 bp, Arabidopsis thaliana
  misc_feature (1)..(1214): Ceres Seq. ID no. 12439731
agcttcatatttcttgcacgtaaagtttactctgtctcaccgattttgtttttttctttgttttttttttgattttttaatatcgaaaccctaaagcctcgaaggttctctcgccggagaagaaattatgcagggtttggcggcgaccaccaccaaccgtggctctctcaccttcctcgctccgaggaaccatagtccaatttcaaagaaatttgtgaatccaagagtgttctttcccaacgttgattcatccgcaaaattaagattatcagctagctcaatttcacggagatgtccacgagagattgctcctctttcagcaactgcatctgtggactttgcagcagcagcaacatcatccaaccagctctttgctaatggcttgccaccattagctcctggtttgagaagacaccggagaccgatagagcctgcaagagtggctaaagatgacttctttaaaatcaaactgcctaaaatcgcagagagacctgaatggtggtggaggacgttagcttgtgttccttatttgatatccctccaaatatctgatgttggtttctatgtccaaccttttctcgaaaagcacgacgctattggggacatgatatatttcatcccgggagcgataaacagatggccgacatggttcttcatggtgtactgctacttgggttatatgtgggtggtgaagaacaaagagctgcctcattacttgaggtttcacatgatgatgggtatgcttcttgaaacagctcttcaggtcatatggtgcactagcaatttcttcccgctgattcatttcaaaggacggttcggaatgtattattggatggccatcggattcacctacatatgtctgcttctcgaatgcatacggtgcgctcttgctggagtctatgctcagattcctttcatgacagatgctgcttccattcacaccctcttcaacttgggaggttttcagagaccactcaggtgaaaggtgaaaaactggccctttcgggtgttacatactttggaataggaacaagtctcttatcgagtctacacttatatgaatttagtctttttagtgtcagtgtcttatctcatgtgtaacacagaactctctatgagagtagcttataccaatgattttaaagctgaataatccggtcggatttgtccatgatttgaaagtacgcagatcaattcagctctatattgaacgt

SEQ ID NO: 4992 - protein, 284 aa, Arabidopsis thaliana
  peptide (1)..(284): Ceres Seq. ID no. 12439732
  misc_feature (1)..(284): NCBI GI NO: 15236283 NR Description: putative chloroplast protein import component
  misc_feature (76)..(270): NCBI GI NO: 26449432 NR Description: unknown protein [Arabidopsis thaliana]
  misc_feature (91)..(270): NCBI GI NO: 6984128 NR Description: Tic20-like protein [Euphorbia esula]
  misc_feature (95)..(255): NCBI GI NO: 15220356 NR Description: unknown protein; protein id: At1g04940.1
  misc_feature (63)..(270): NCBI GI NO: 3769673 NR Description: Tic20 [Pisum sativum]
  misc_feature (85)..(276): NCBI GI NO: 34393290 NR Description: putative Tic20 protein
  misc_feature (85)..(276): NCBI GI NO: 34899836 NR Description: putative Tic20 protein
  misc_feature (198)..(255): NCBI GI NO: 25406822 NR Description: hypothetical protein
MQGLAATTTNRGSLTFLAPRNHSPISKKFVNPRVFFPNVDSSAKLRLSASSISRRCPREIAPLSATASVDFAAAATSSNQLFANGLPPLAPGLRRHRRPIEPARVAKDDFFKIKLPKIAERPEWWWRTLACVPYLISLQISDVGFYVQPFLEKHDAIGDMIYFIPGAINRWPTWFFMVYCYLGYMWVVKNKELPHYLRFHMMMGMLLETALQVIWCTSNFFPLIHFKGRFGMYYWMAIGFTYICLLLECIRCALAGVYAQIPFMTDAASIHTLFNLGGFQRPLR

SEQ ID NO: 4993 - DNA, 1566 bp, Arabidopsis thaliana
  misc_feature (1)..(1566): Ceres Seq. ID no. 12327860
gaaaaactgagaaactttcacttcttcttcgtctccgtagtttcagtttcgatctgtaaagtttcaaacttgtggtcgaatttttaaatgggaagtggaagagatagagacgaccctttatccttcaccagcaatccatctacggcgtcgtctccagtcactgtatctgactatctcgacaactttctcggcgaacccacttctcgctccggtagttttcaaagcgagagcttactcggtggaggcggtggagaaagcatcaacgacgctgattttggattcgctcgtcctgatttccgatcggaacaactagctggaaccgtacagttttacgagaggcatgtcttcttgtgctacaaaaagccatctgtttggcccgcaaggatcgaggctgctgagttcgatcgattgcctaggctactctctgctgctgtatcggccagaaagggtagcatgaagaaggagactcgactcacaatatgtgaggggcatgatggaacagagacatccaatggtgatgtacttatttttcctgatatgatcagatacaggagattgactcactttgatgtggagacctttgtggaagaggtgcttgtgaaggatggtgaatggctgcctggaaatcctgaattgctgaaaggctcatatgtctttgtatgttcccatggatcccgagaccggcgatgtggggtttgtgggccgtcgctagttagtagattcagagaagaacttgagttccatggtcttcaaggtaaagtgtcaattagcccatgttctcacataggtggtcacaaatacgctgggaatgttatcatctaccgatcaaacatcaacagggaagtcacaggacactggtatgggtatgtgaccccagaagatgtacctattcttttggagcagcacatcaacaaaggcgagattgtagaccggctatggaggggtgaaatgggtctatcagaagaagatcagaagaaaactcaagaagggcgatttcagctaaatggtacagtccattccgtaaagatcaatgggaaagtgagtcaagaatcatcggttcacaacgccgatgtttcctgttgccagtcacgagctgcagaacctaatggttgttgccaacaaaatgggaacagctcttcatgttgtcaagacgacactactctgatgttgtcactgggaacatcagaagataatcaacttgaaagtgaaaacaacactgagaagctgacaccaggaagaaaaattgcagaaaagactttctttagaattaatagtgacaaaggatcttcgacacgtaaggtttgcggaataccaacatggttagagagctgggagcgagaagatacttatgctgctcttgctgttgtctgtgctgctgcttccgtggctgttgcctatacttgctacaaacagttgtaacgaagaaatttgtagccctaagatgattgtgtattgtgttcttataagacattgtgattttgtttctgctttcaaactacattttcctttcgatttaaaggagggttcttgtcagaactgtttgatgatatgtatcctgttaactct

SEQ ID NO: 4994 - protein, 443 aa, Arabidopsis thaliana
  peptide (1)..(443): Ceres Seq. ID no. 12327861
  misc_feature (1)..(443): NCBI GI NO: 18416788 NR Description: sucrase-like protein; protein id: At4g26620
  misc_feature (1)..(443): NCBI GI NO: 16604384 NR Description: AT4g26620/T15N24_70 [Arabidopsis thaliana]
  misc_feature (1)..(230): NCBI GI NO: 7488353 NR Description: sucrose cleavage protein homolog T15N24
  misc_feature (285)..(443): NCBI GI NO: 7488353 NR Description: sucrose cleavage protein homolog T15N24
  misc_feature (1)..(355): NCBI GI NO: 15241075 NR Description: sucrose cleavage protein-like
  misc_feature (74)..(344): NCBI GI NO: 1086252 NR Description: sucrose cleavage protein - potato
  misc_feature (408)..(442): NCBI GI NO: 1086252 NR Description: sucrose cleavage protein - potato
  misc_feature (16)..(346): NCBI GI NO: 30688845 NR Description: sucrose cleavage protein -related
  misc_feature (411)..(442): NCBI GI NO: 30688845 NR Description: sucrose cleavage protein -related
  misc_feature (60)..(346): NCBI GI NO: 16604338 NR Description: AT3g27570/MMJ24_12 [Arabidopsis thaliana]
MGSGRDRDDPLSFTSNPSTASSPVTVSDYLDNFLGEPTSRSGSFQSESLLGGGGGESINDADFGFARPDFRSEQLAGTVQFYERHVFLCYKKPSVWPARIEAAEFDRLPRLLSAAVSARKGSMKKETRLTICEGHDGTETSNGDVLIFPDMIRYRRLTHFDVETFVEEVLVKDGEWLPGNPELLKGSYVFVCSHGSRDRRCGVCGPSLVSRFREELEFHGLQGKVSISPCSHIGGHKYAGNVIIYRSNINREVTGHWYGYVTPEDVPILLEQHINKGEIVDRLWRGEMGLSEEDQKKTQEGRFQLNGTVHSVKINGKVSQESSVHNADVSCCQSRAAEPNGCCQQNGNSSSCCQDDTTLMLSLGTSEDNQLESENNTEKLTPGRKIAEKTFFRINSDKGSSTRKVCGIPTWLESWEREDTYAALAVVCAAASVAVAYTCYKQL

SEQ ID NO: 4995 - protein, 321 aa, Arabidopsis thaliana
  peptide (1)..(321): Ceres Seq. ID no. 12327862
  misc_feature (1)..(321): NCBI GI NO: 18416788 NR Description: sucrase-like protein; protein id: At4g26620
  misc_feature (1)..(321): NCBI GI NO: 16604384 NR Description: AT4g26620/T15N24_70 [Arabidopsis thaliana]
  misc_feature (1)..(108): NCBI GI NO: 7488353 NR Description: sucrose cleavage protein homolog T15N24
  misc_feature (163)..(321): NCBI GI NO: 7488353 NR Description: sucrose cleavage protein homolog T15N24
  misc_feature (1)..(233): NCBI GI NO: 15241075 NR Description: sucrose cleavage protein-like
  misc_feature (1)..(222): NCBI GI NO: 1086252 NR Description: sucrose cleavage protein - potato
  misc_feature (286)..(320): NCBI GI NO: 1086252 NR Description: sucrose cleavage protein - potato
  misc_feature (1)..(224): NCBI GI NO: 30688845 NR Description: sucrose cleavage protein -related
  misc_feature (289)..(320): NCBI GI NO: 30688845 NR Description: sucrose cleavage protein -related
  misc_feature (1)..(224): NCBI GI NO: 16604338 NR Description: AT3g27570/MMJ24_12 [Arabidopsis thaliana]
MKKETRLTICEGHDGTETSNGDVLIFPDMIRYRRLTHFDVETFVEEVLVKDGEWLPGNPELLKGSYVFVCSHGSRDRRCGVCGPSLVSRFREELEFHGLQGKVSISPCSHIGGHKYAGNVIIYRSNINREVTGHWYGYVTPEDVPILLEQHINKGEIVDRLWRGEMGLSEEDQKKTQEGRFQLNGTVHSVKINGKVSQESSVHNADVSCCQSRAAEPNGCCQQNGNSSSCCQDDTTLMLSLGTSEDNQLESENNTEKLTPGRKIAEKTFFRINSDKGSSTRKVCGIPTWLESWEREDTYAALAVVCAAASVAVAYTCYKQL

SEQ ID NO: 4996 - protein, 293 aa, Arabidopsis thaliana
  peptide (1)..(293): Ceres Seq. ID no. 12327863
  misc_feature (1)..(293): NCBI GI NO: 18416788 NR Description: sucrase-like protein; protein id: At4g26620
  misc_feature (1)..(293): NCBI GI NO: 16604384 NR Description: AT4g26620/T15N24_70 [Arabidopsis thaliana]
  misc_feature (1)..(80): NCBI GI NO: 7488353 NR Description: sucrose cleavage protein homolog T15N24
  misc_feature (135)..(293): NCBI GI NO: 7488353 NR Description: sucrose cleavage protein homolog T15N24
  misc_feature (1)..(205): NCBI GI NO: 15241075 NR Description: sucrose cleavage protein-like
  misc_feature (1)..(194): NCBI GI NO: 1086252 NR Description: sucrose cleavage protein - potato
  misc_feature (258)..(292): NCBI GI NO: 1086252 NR Description: sucrose cleavage protein - potato
  misc_feature (1)..(196): NCBI GI NO: 30688845 NR Description: sucrose cleavage protein -related
  misc_feature (261)..(292): NCBI GI NO: 30688845 NR Description: sucrose cleavage protein -related
  misc_feature (1)..(196): NCBI GI NO: 16604338 NR Description: AT3g27570/MMJ24_12 [Arabidopsis thaliana]
MIRYRRLTHFDVETFVEEVLVKDGEWLPGNPELLKGSYVFVCSHGSRDRRCGVCGPSLVSRFREELEFHGLQGKVSISPCSHIGGHKYAGNVIIYRSNINREVTGHWYGYVTPEDVPILLEQHINKGEIVDRLWRGEMGLSEEDQKKTQEGRFQLNGTVHSVKINGKVSQESSVHNADVSCCQSRAAEPNGCCQQNGNSSSCCQDDTTLMLSLGTSEDNQLESENNTEKLTPGRKIAEKTFFRINSDKGSSTRKVCGIPTWLESWEREDTYAALAVVCAAASVAVAYTCYKQL

SEQ ID NO: 4997 - DNA, 1451 bp, Arabidopsis thaliana
  misc_feature (1)..(1451): Ceres Seq. ID no. 12370299
accagaagaagagccacacactcacaaattaaaaagagagagagagagagagagacagagagagagagagattctgcggaggagcttcttcttcgtagggtgttcatcgttattaacgttatcgcccctacgtcagctccatctccagaaacatgggtgcaggtggaagaatgccggttcctacttcttccaagaaatcggaaaccgacaccacaaagcgtgtgccgtgcgagaaaccgcctttctcggtgggagatctgaagaaagcaatcccgccgcattgtttcaaacgctcaatccctcgctctttctcctaccttatcagtgacatcattatagcctcatgcttctactacgtcgccaccaattacttctctctcctccctcagcctctctcttacttggcttggccactctattgggcctgtcaaggctgtgtcctaactggtatctgggtcatagcccacgaatgcggtcaccacgcattcagcgactaccaatggctggatgacacagttggtcttatcttccattccttcctcctcgtcccttacttctcctggaagtatagtcatcgccgtcaccattccaacactggatccctcgaaagagatgaagtatttgtcccaaagcagaaatcagcaatcaagtggtacgggaaatacctcaacaaccctcttggacgcatcatgatgttaaccgtccagtttgtcctcgggtggcccttgtacttagcctttaacgtctctggcagaccgtatgacgggttcgcttgccatttcttccccaacgctcccatctacaatgaccgagaacgcctccagatatacctctctgatgcgggtattctagccgtctgttttggtctttaccgttacgctgctgcacaagggatggcctcgatgatctgcctctacggagtaccgcttctgatagtgaatgcgttcctcgtcttgatcacttacttgcagcacactcatccctcgttgcctcactacgattcatcagagtgggactggctcaggggagctttggctaccgtagacagagactacggaatcttgaacaaggtgttccacaacattacagacacacacgtggctcatcacctgttctcgacaatgccgcattataacgcaatggaagctacaaaggcgataaagccaattctgggagactattaccagttcgatggaacaccgtggtatgtagcgatgtatagggaggcaaaggagtgtatctatgtagaaccggacagggaaggtgacaagaaaggtgtgtactggtacaacaataagttatgaggatgatggtgaagaaattgtcgacctttctcttgtctgtttgtcttttgttaaagaagctatgcttcgttttaataatcttattgtccattttgttgtgttatgacattttggctgctcattatgttatgtgggaagttagtgttc

SEQ ID NO: 4998 - protein, 383 aa, Arabidopsis thaliana
  peptide (1)..(383): Ceres Seq. ID no. 12370300
  misc_feature (89)..(340): Pfam Name: Pfam Description:  Fatty acid desaturase
  misc_feature (1)..(383): NCBI GI NO: 15229956 NR Description: omega-6 fatty acid desaturase
  misc_feature (1)..(383): NCBI GI NO: 21536781 NR Description: omega-6 fatty acid desaturase
  misc_feature (1)..(383): NCBI GI NO: 4378875 NR Description: delta-12 desaturase [Brassica carinata]
  misc_feature (1)..(383): NCBI GI NO: 3334184 NR Description: Omega-6 fatty acid desaturase
  misc_feature (1)..(383): NCBI GI NO: 20520624 NR Description: fatty acid desaturase 2 [Brassica rapa]
  misc_feature (1)..(383): NCBI GI NO: 8705229 NR Description: delta-12 oleate desaturase [Brassica napus]
  misc_feature (1)..(383): NCBI GI NO: 3452129 NR Description: bifunctional oleate 12-hydroxylase:desaturase
  misc_feature (1)..(382): NCBI GI NO: 27261181 NR Description: delta 12 oleic acid desaturase FAD2
  misc_feature (1)..(383): NCBI GI NO: 17225582 NR Description: delta-12 fatty acid desaturase
  misc_feature (1)..(383): NCBI GI NO: 3417601 NR Description: delta-12 fatty acid desaturase
MGAGGRMPVPTSSKKSETDTTKRVPCEKPPFSVGDLKKAIPPHCFKRSIPRSFSYLISDIIIASCFYYVATNYFSLLPQPLSYLAWPLYWACQGCVLTGIWVIAHECGHHAFSDYQWLDDTVGLIFHSFLLVPYFSWKYSHRRHHSNTGSLERDEVFVPKQKSAIKWYGKYLNNPLGRIMMLTVQFVLGWPLYLAFNVSGRPYDGFACHFFPNAPIYNDRERLQIYLSDAGILAVCFGLYRYAAAQGMASMICLYGVPLLIVNAFLVLITYLQHTHPSLPHYDSSEWDWLRGALATVDRDYGILNKVFHNITDTHVAHHLFSTMPHYNAMEATKAIKPILGDYYQFDGTPWYVAMYREAKECIYVEPDREGDKKGVYWYNNKL

SEQ ID NO: 4999 - protein, 377 aa, Arabidopsis thaliana
  peptide (1)..(377): Ceres Seq. ID no. 12370301
  misc_feature (83)..(334): Pfam Name: Pfam Description:  Fatty acid desaturase
  misc_feature (1)..(377): NCBI GI NO: 15229956 NR Description: omega-6 fatty acid desaturase
  misc_feature (1)..(377): NCBI GI NO: 21536781 NR Description: omega-6 fatty acid desaturase
  misc_feature (1)..(377): NCBI GI NO: 4378875 NR Description: delta-12 desaturase [Brassica carinata]
  misc_feature (1)..(377): NCBI GI NO: 3334184 NR Description: Omega-6 fatty acid desaturase
  misc_feature (1)..(377): NCBI GI NO: 20520624 NR Description: fatty acid desaturase 2 [Brassica rapa]
  misc_feature (1)..(377): NCBI GI NO: 8705229 NR Description: delta-12 oleate desaturase [Brassica napus]
  misc_feature (1)..(377): NCBI GI NO: 3452129 NR Description: bifunctional oleate 12-hydroxylase:desaturase
  misc_feature (1)..(376): NCBI GI NO: 27261181 NR Description: delta 12 oleic acid desaturase FAD2
  misc_feature (1)..(377): NCBI GI NO: 17225582 NR Description: delta-12 fatty acid desaturase
  misc_feature (1)..(377): NCBI GI NO: 3417601 NR Description: delta-12 fatty acid desaturase
MPVPTSSKKSETDTTKRVPCEKPPFSVGDLKKAIPPHCFKRSIPRSFSYLISDIIIASCFYYVATNYFSLLPQPLSYLAWPLYWACQGCVLTGIWVIAHECGHHAFSDYQWLDDTVGLIFHSFLLVPYFSWKYSHRRHHSNTGSLERDEVFVPKQKSAIKWYGKYLNNPLGRIMMLTVQFVLGWPLYLAFNVSGRPYDGFACHFFPNAPIYNDRERLQIYLSDAGILAVCFGLYRYAAAQGMASMICLYGVPLLIVNAFLVLITYLQHTHPSLPHYDSSEWDWLRGALATVDRDYGILNKVFHNITDTHVAHHLFSTMPHYNAMEATKAIKPILGDYYQFDGTPWYVAMYREAKECIYVEPDREGDKKGVYWYNNKL

SEQ ID NO: 5000 - protein, 204 aa, Arabidopsis thaliana
  peptide (1)..(204): Ceres Seq. ID no. 12370302
  misc_feature (1)..(161): Pfam Name: Pfam Description:  Fatty acid desaturase
  misc_feature (1)..(204): NCBI GI NO: 15229956 NR Description: omega-6 fatty acid desaturase
  misc_feature (1)..(204): NCBI GI NO: 21536781 NR Description: omega-6 fatty acid desaturase
  misc_feature (1)..(204): NCBI GI NO: 4378875 NR Description: delta-12 desaturase [Brassica carinata]
  misc_feature (1)..(204): NCBI GI NO: 3334184 NR Description: Omega-6 fatty acid desaturase
  misc_feature (1)..(204): NCBI GI NO: 20520624 NR Description: fatty acid desaturase 2 [Brassica rapa]
  misc_feature (1)..(204): NCBI GI NO: 8705229 NR Description: delta-12 oleate desaturase [Brassica napus]
  misc_feature (1)..(204): NCBI GI NO: 3452129 NR Description: bifunctional oleate 12-hydroxylase:desaturase
  misc_feature (1)..(203): NCBI GI NO: 27261181 NR Description: delta 12 oleic acid desaturase FAD2
  misc_feature (1)..(204): NCBI GI NO: 17225582 NR Description: delta-12 fatty acid desaturase
  misc_feature (1)..(204): NCBI GI NO: 3417601 NR Description: delta-12 fatty acid desaturase
MMLTVQFVLGWPLYLAFNVSGRPYDGFACHFFPNAPIYNDRERLQIYLSDAGILAVCFGLYRYAAAQGMASMICLYGVPLLIVNAFLVLITYLQHTHPSLPHYDSSEWDWLRGALATVDRDYGILNKVFHNITDTHVAHHLFSTMPHYNAMEATKAIKPILGDYYQFDGTPWYVAMYREAKECIYVEPDREGDKKGVYWYNNKL

SEQ ID NO: 5001 - DNA, 1905 bp, Arabidopsis thaliana
  misc_feature (1)..(1905): Ceres Seq. ID no. 13580417
aaaccaaaacacaattaagctaaaaaaaaaaccaaaggatgtctcagaaactcatgttcttgttcacccttgcctgcctctcctcgttaccatctccttttatctccgcccaaataccggccattggaaatgccacttcaccgtcaaatatatgtagattcgcgccggatccatcttattgtagatcggttcttccaaaccagcccggagatatatattcctacggacgtttgtctctacgaagatccctctccagcccgccggttcatttcgatgatcgacgctgaacttgaccggaaaggcaaagtggctgctaaatccacagtaggggctctcgaagactgcaaattcctagccagcctgactatggactacctccttagtagctcacagacggctgattccaccaaaacactgtcgttatctagggccgaggatgttcatacatttctgagtgctgccatcaccaatgagcagacttgtcttgaaggacttaaatcaacggcgtccgaaaatggtctttccggtgatcttttcaacgatacaaaactctatggggtgtctcttgcccttttctccaaaggttgggtgccaagaaggcaaagatcgagaccgatttggcaaccacaagccaggttcaaaaagttttttggtttccgtaacggtaaattaccgttaaagatgacggaaagggcacgtgccgtttacaacaccgtgactagaagaaagcttctccaatcggatgcagacgccgttcaggtgagcgacattgtgacggtgatccagaacgggacgggaaacttcacgaccataaacgccgccattgcagctgcaccaaataaaactgacggtagtaacggttacttcttgatctacgtaacggcgggattgtacgaggaatacgtggaagttcccaagaacaagagatatgtgatgatgatcggtgacggcatcaaccagaccgttatcaccggaaacaggagtgtcgttgatggatggacaactttcaattcagccacatttattctatcaggtcccaactttattggtgtaaacataacaatccgcaatacggcaggaccaaccaaaggccaagctgtggcattgaggagtggtggggacttgtctgttttctacagttgtagttttgaagcctatcaagacacgttatacacacattctctcagacagttttatcgtgaatgtgatgtctatggtactgttgattttatatttggtaacgctgcagtggtattacaaaactgtaatttgtatccacgtcaacctcgcaaaggtcaatcgaacgaggttacggctcaaggtcgtactgatccgaaccaaaacactgggacggcaattcatggttgtactataagaccggcagatgatttggctacgagcaactatacagtgaagacttatcttggtcgaccatggaaggaatattctagaaccgttgtcatgcaaacttacatagacgggtttctagaaccgagtggttggaatgcatggtctggtgattttgcattgagcacactttactacgcggaatataataataccggacctggttctgacacgacaaaccgagtcacttggcctggttatcacgtcatcaacgcaactgatgcttccaatttcacggtcaccaatttccttgttggtgaaggttggattggacaaaccggagtgcctttcgtgggtggactgatcgcataatcaaccaaccttatactatatatgatatgttaattagttaaattatttaatcattcatgtgttgtttttttaatcaaataattatttagtggtgcctgattcaatacgatttgtaataactttaacttactattgtacaaccgaatggttttcttcgaaatctaataataatgaacgggtaatcag

SEQ ID NO: 5002 - protein, 529 aa, Arabidopsis thaliana
  peptide (1)..(529): Ceres Seq. ID no. 13580418
  misc_feature (215)..(511): Pfam Name: Pfam Description:  Pectinesterase
  misc_feature (27)..(529): NCBI GI NO: 18407388 NR Description: pectinesterase family [Arabidopsis thaliana]
  misc_feature (210)..(529): NCBI GI NO: 7447370 NR Description: probable pectinesterase (EC 3
  misc_feature (67)..(168): NCBI GI NO: 7447370 NR Description: probable pectinesterase (EC 3
  misc_feature (1)..(41): NCBI GI NO: 7447370 NR Description: probable pectinesterase (EC 3
  misc_feature (130)..(529): NCBI GI NO: 18379010 NR Description: pectinesterase family [Arabidopsis thaliana]
  misc_feature (41)..(168): NCBI GI NO: 18379010 NR Description: pectinesterase family [Arabidopsis thaliana]
  misc_feature (185)..(529): NCBI GI NO: 27363394 NR Description: At2g47550/T30B22.15 [Arabidopsis thaliana]
  misc_feature (185)..(529): NCBI GI NO: 16604402 NR Description: At2g47550/T30B22.15 [Arabidopsis thaliana]
  misc_feature (43)..(529): NCBI GI NO: 18411914 NR Description: expressed protein [Arabidopsis thaliana]
  misc_feature (43)..(529): NCBI GI NO: 19424045 NR Description: unknown protein [Arabidopsis thaliana]
MPLHRQIYVDSRRIHLIVDRFFQTSPEIYIPTDVCLYEDPSPARRFISMIDAELDRKGKVAAKSTVGALEDCKFLASLTMDYLLSSSQTADSTKTLSLSRAEDVHTFLSAAITNEQTCLEGLKSTASENGLSGDLFNDTKLYGVSLALFSKGWVPRRQRSRPIWQPQARFKKFFGFRNGKLPLKMTERARAVYNTVTRRKLLQSDADAVQVSDIVTVIQNGTGNFTTINAAIAAAPNKTDGSNGYFLIYVTAGLYEEYVEVPKNKRYVMMIGDGINQTVITGNRSVVDGWTTFNSATFILSGPNFIGVNITIRNTAGPTKGQAVALRSGGDLSVFYSCSFEAYQDTLYTHSLRQFYRECDVYGTVDFIFGNAAVVLQNCNLYPRQPRKGQSNEVTAQGRTDPNQNTGTAIHGCTIRPADDLATSNYTVKTYLGRPWKEYSRTVVMQTYIDGFLEPSGWNAWSGDFALSTLYYAEYNNTGPGSDTTNRVTWPGYHVINATDASNFTVTNFLVGEGWIGQTGVPFVGGLIA

SEQ ID NO: 5003 - protein, 481 aa, Arabidopsis thaliana
  peptide (1)..(481): Ceres Seq. ID no. 13580419
  misc_feature (167)..(463): Pfam Name: Pfam Description:  Pectinesterase
  misc_feature (1)..(481): NCBI GI NO: 18407388 NR Description: pectinesterase family [Arabidopsis thaliana]
  misc_feature (162)..(481): NCBI GI NO: 7447370 NR Description: probable pectinesterase (EC 3
  misc_feature (19)..(120): NCBI GI NO: 7447370 NR Description: probable pectinesterase (EC 3
  misc_feature (82)..(481): NCBI GI NO: 18379010 NR Description: pectinesterase family [Arabidopsis thaliana]
  misc_feature (1)..(120): NCBI GI NO: 18379010 NR Description: pectinesterase family [Arabidopsis thaliana]
  misc_feature (137)..(481): NCBI GI NO: 27363394 NR Description: At2g47550/T30B22.15 [Arabidopsis thaliana]
  misc_feature (137)..(481): NCBI GI NO: 16604402 NR Description: At2g47550/T30B22.15 [Arabidopsis thaliana]
  misc_feature (1)..(481): NCBI GI NO: 18411914 NR Description: expressed protein [Arabidopsis thaliana]
  misc_feature (1)..(481): NCBI GI NO: 19424045 NR Description: unknown protein [Arabidopsis thaliana]
  misc_feature (1)..(479): NCBI GI NO: 34894528 NR Description: putative pectinesterase
MIDAELDRKGKVAAKSTVGALEDCKFLASLTMDYLLSSSQTADSTKTLSLSRAEDVHTFLSAAITNEQTCLEGLKSTASENGLSGDLFNDTKLYGVSLALFSKGWVPRRQRSRPIWQPQARFKKFFGFRNGKLPLKMTERARAVYNTVTRRKLLQSDADAVQVSDIVTVIQNGTGNFTTINAAIAAAPNKTDGSNGYFLIYVTAGLYEEYVEVPKNKRYVMMIGDGINQTVITGNRSVVDGWTTFNSATFILSGPNFIGVNITIRNTAGPTKGQAVALRSGGDLSVFYSCSFEAYQDTLYTHSLRQFYRECDVYGTVDFIFGNAAVVLQNCNLYPRQPRKGQSNEVTAQGRTDPNQNTGTAIHGCTIRPADDLATSNYTVKTYLGRPWKEYSRTVVMQTYIDGFLEPSGWNAWSGDFALSTLYYAEYNNTGPGSDTTNRVTWPGYHVINATDASNFTVTNFLVGEGWIGQTGVPFVGGLIA

SEQ ID NO: 5004 - protein, 450 aa, Arabidopsis thaliana
  peptide (1)..(450): Ceres Seq. ID no. 13580420
  misc_feature (136)..(432): Pfam Name: Pfam Description:  Pectinesterase
  misc_feature (1)..(450): NCBI GI NO: 18407388 NR Description: pectinesterase family [Arabidopsis thaliana]
  misc_feature (131)..(450): NCBI GI NO: 7447370 NR Description: probable pectinesterase (EC 3
  misc_feature (1)..(89): NCBI GI NO: 7447370 NR Description: probable pectinesterase (EC 3
  misc_feature (51)..(450): NCBI GI NO: 18379010 NR Description: pectinesterase family [Arabidopsis thaliana]
  misc_feature (1)..(89): NCBI GI NO: 18379010 NR Description: pectinesterase family [Arabidopsis thaliana]
  misc_feature (106)..(450): NCBI GI NO: 27363394 NR Description: At2g47550/T30B22.15 [Arabidopsis thaliana]
  misc_feature (106)..(450): NCBI GI NO: 16604402 NR Description: At2g47550/T30B22.15 [Arabidopsis thaliana]
  misc_feature (1)..(450): NCBI GI NO: 18411914 NR Description: expressed protein [Arabidopsis thaliana]
  misc_feature (1)..(450): NCBI GI NO: 19424045 NR Description: unknown protein [Arabidopsis thaliana]
  misc_feature (1)..(448): NCBI GI NO: 34894528 NR Description: putative pectinesterase
MDYLLSSSQTADSTKTLSLSRAEDVHTFLSAAITNEQTCLEGLKSTASENGLSGDLFNDTKLYGVSLALFSKGWVPRRQRSRPIWQPQARFKKFFGFRNGKLPLKMTERARAVYNTVTRRKLLQSDADAVQVSDIVTVIQNGTGNFTTINAAIAAAPNKTDGSNGYFLIYVTAGLYEEYVEVPKNKRYVMMIGDGINQTVITGNRSVVDGWTTFNSATFILSGPNFIGVNITIRNTAGPTKGQAVALRSGGDLSVFYSCSFEAYQDTLYTHSLRQFYRECDVYGTVDFIFGNAAVVLQNCNLYPRQPRKGQSNEVTAQGRTDPNQNTGTAIHGCTIRPADDLATSNYTVKTYLGRPWKEYSRTVVMQTYIDGFLEPSGWNAWSGDFALSTLYYAEYNNTGPGSDTTNRVTWPGYHVINATDASNFTVTNFLVGEGWIGQTGVPFVGGLIA

SEQ ID NO: 5005 - DNA, 1236 bp, Arabidopsis thaliana
  misc_feature (1)..(1236): Ceres Seq. ID no. 12328274
aattgtaatttttgtcacagtcattaaacaaaacgcttttatgacgatatcaacggttatagcattcatgtccatgttcctagtatttgttatgtctggtccgatagtggtggagggacgtgcttttttcgtgttcggtgactcgctcgtcgacagtggcaacaacaactatctggtgacaactgcacgtgccgactctccaccgtatggaatcgattttccaactcggagaccaaccggccggttttccaacggtcttaacattccagatcttatcagtgaggcaatcggtaacgaagagccaccgttaccttaccttagtccagagctaaggggccggagtcttcttaacggtgctaatttcgcctccgctggtatcggaattctcaatgataccggatttcaattcatcaacattataagaatgtaccaacagctcgattacttccaacaataccaacaacgtgtgagtcgcttgattgggaaaccgcaaactcagcggctcgtgagtcaagcgcttgtattaatcacggtcggtggaaatgattttgtgaacaactatttcttgtttccatattccgctagatcacgccaattcactctaccggattacgtccgactcctaatttctgaatacaaaaaaatactattgaggttaaattcacttggagtgggtcgagttctagtgacaggagctggaccactatgatgtgcaccggccgaactggcgagatcaggcacgtcgaatggaagatgctcggccgagctacaacgagctgcatctctatatgatcctcagctacttcaaatgataaatgaacttaacaaaaaaattgggagaaatgtgtttattgctgctaacactaaccaaatgcaagaggattttctaagcactccacgaagatatggatttgtaacatcgaaggttgcttgttgcggacaagggccgtacaatgggatgggtttgtgtacggttctatcaaacttgtgtccgaaccgtgagttatacgtcttttgggatgcgtttcatccgactgagaaagcatccgcatgatagtccgacatatcttgaccggtaccaccaagtatatgaaccccatgaaccttagctctgctcttgccctatgagccacacacgttgaagtgggaaactcggttttgtttatttcactcgcaagatatatgtatcgactaccgagtacaagagtatgaaataagataactcagtctcaattt

SEQ ID NO: 5006 - protein, 235 aa, Arabidopsis thaliana
  peptide (1)..(235): Ceres Seq. ID no. 12328275
  misc_feature (42)..(235): Pfam Name: Pfam Description:  GDSL-like Lipase/Acylhydrolase
  misc_feature (14)..(235): NCBI GI NO: 15238814 NR Description: putative protein; protein id: At5g18430.1
  misc_feature (23)..(235): NCBI GI NO: 15229265 NR Description: putative GDSL-motif lipase/acylhydrolase
  misc_feature (16)..(235): NCBI GI NO: 15235421 NR Description: Proline-rich APG - like protein
  misc_feature (14)..(235): NCBI GI NO: 15242808 NR Description: putative protein; protein id: At5g33370
  misc_feature (40)..(235): NCBI GI NO: 28071322 NR Description: P0705A05.30
  misc_feature (20)..(235): NCBI GI NO: 37535146 NR Description: putative early nodulin gene
  misc_feature (38)..(235): NCBI GI NO: 22758315 NR Description: putative early nodulin gene
  misc_feature (34)..(202): NCBI GI NO: 37789825 NR Description: putative GDSL-motif lipase [Vitis vinifera]
  misc_feature (41)..(235): NCBI GI NO: 15227849 NR Description: putative GDSL-motif lipase/hydrolase
  misc_feature (16)..(235): NCBI GI NO: 15224005 NR Description: putative GDSL-motif lipase/acylhydrolase
IVIFVTVIKQNAFMTISTVIAFMSMFLVFVMSGPIVVEGRAFFVFGDSLVDSGNNNYLVTTARADSPPYGIDFPTRRPTGRFSNGLNIPDLISEAIGNEEPPLPYLSPELRGRSLLNGANFASAGIGILNDTGFQFINIIRMYQQLDYFQQYQQRVSRLIGKPQTQRLVSQALVLITVGGNDFVNNYFLFPYSARSRQFTLPDYVRLLISEYKKILLRLNSLGVGRVLVTGAGPL

SEQ ID NO: 5007 - protein, 222 aa, Arabidopsis thaliana
  peptide (1)..(222): Ceres Seq. ID no. 12328276
  misc_feature (29)..(222): Pfam Name: Pfam Description:  GDSL-like Lipase/Acylhydrolase
  misc_feature (1)..(222): NCBI GI NO: 15238814 NR Description: putative protein; protein id: At5g18430.1
  misc_feature (10)..(222): NCBI GI NO: 15229265 NR Description: putative GDSL-motif lipase/acylhydrolase
  misc_feature (3)..(222): NCBI GI NO: 15235421 NR Description: Proline-rich APG - like protein
  misc_feature (1)..(222): NCBI GI NO: 15242808 NR Description: putative protein; protein id: At5g33370
  misc_feature (27)..(222): NCBI GI NO: 28071322 NR Description: P0705A05.30
  misc_feature (7)..(222): NCBI GI NO: 37535146 NR Description: putative early nodulin gene
  misc_feature (25)..(222): NCBI GI NO: 22758315 NR Description: putative early nodulin gene
  misc_feature (21)..(189): NCBI GI NO: 37789825 NR Description: putative GDSL-motif lipase [Vitis vinifera]
  misc_feature (28)..(222): NCBI GI NO: 15227849 NR Description: putative GDSL-motif lipase/hydrolase
  misc_feature (3)..(222): NCBI GI NO: 15224005 NR Description: putative GDSL-motif lipase/acylhydrolase
MTISTVIAFMSMFLVFVMSGPIVVEGRAFFVFGDSLVDSGNNNYLVTTARADSPPYGIDFPTRRPTGRFSNGLNIPDLISEAIGNEEPPLPYLSPELRGRSLLNGANFASAGIGILNDTGFQFINIIRMYQQLDYFQQYQQRVSRLIGKPQTQRLVSQALVLITVGGNDFVNNYFLFPYSARSRQFTLPDYVRLLISEYKKILLRLNSLGVGRVLVTGAGPL

SEQ ID NO: 5008 - protein, 213 aa, Arabidopsis thaliana
  peptide (1)..(213): Ceres Seq. ID no. 12328277
  misc_feature (20)..(213): Pfam Name: Pfam Description:  GDSL-like Lipase/Acylhydrolase
  misc_feature (1)..(213): NCBI GI NO: 15238814 NR Description: putative protein; protein id: At5g18430.1
  misc_feature (1)..(213): NCBI GI NO: 15229265 NR Description: putative GDSL-motif lipase/acylhydrolase
  misc_feature (1)..(213): NCBI GI NO: 15235421 NR Description: Proline-rich APG - like protein
  misc_feature (1)..(213): NCBI GI NO: 15242808 NR Description: putative protein; protein id: At5g33370
  misc_feature (18)..(213): NCBI GI NO: 28071322 NR Description: P0705A05.30
  misc_feature (1)..(213): NCBI GI NO: 37535146 NR Description: putative early nodulin gene
  misc_feature (16)..(213): NCBI GI NO: 22758315 NR Description: putative early nodulin gene
  misc_feature (12)..(180): NCBI GI NO: 37789825 NR Description: putative GDSL-motif lipase [Vitis vinifera]
  misc_feature (19)..(213): NCBI GI NO: 15227849 NR Description: putative GDSL-motif lipase/hydrolase
  misc_feature (1)..(213): NCBI GI NO: 15224005 NR Description: putative GDSL-motif lipase/acylhydrolase
MSMFLVFVMSGPIVVEGRAFFVFGDSLVDSGNNNYLVTTARADSPPYGIDFPTRRPTGRFSNGLNIPDLISEAIGNEEPPLPYLSPELRGRSLLNGANFASAGIGILNDTGFQFINIIRMYQQLDYFQQYQQRVSRLIGKPQTQRLVSQALVLITVGGNDFVNNYFLFPYSARSRQFTLPDYVRLLISEYKKILLRLNSLGVGRVLVTGAGPL

SEQ ID NO: 5009 - DNA, 2758 bp, Arabidopsis thaliana; identical to SEQ ID NO: 1234
  misc_feature (1)..(2758): Ceres Seq. ID no. 13497291

SEQ ID NO: 5010 - protein, 421 aa, Arabidopsis thaliana; identical to SEQ ID NO: 1235
  peptide (1)..(421): Ceres Seq. ID no. 13497292
  misc_feature (40)..(284): Pfam Name: Pfam Description:  Ribosomal protein L4/L1 family
  misc_feature (15)..(421): NCBI GI NO: 15242558 NR Description: 60S ribosomal protein L4/L1 (RPL4D)
  misc_feature (15)..(421): NCBI GI NO: 26450328 NR Description: putative 60S ribosomal protein
  misc_feature (16)..(421): NCBI GI NO: 15232723 NR Description: 60S ribosomal protein L4/L1 (RPL4A)
  misc_feature (16)..(421): NCBI GI NO: 21593543 NR Description: 60S ribosomal protein L4-B (L1)
  misc_feature (17)..(421): NCBI GI NO: 17367847 NR Description: 60S ribosomal protein L4 (L1)
  misc_feature (22)..(421): NCBI GI NO: 34393487 NR Description: putative 60S ribosomal protein L4/L1
  misc_feature (115)..(421): NCBI GI NO: 13605831 NR Description: AT5g02870/F9G14_180 [Arabidopsis thaliana]
  misc_feature (18)..(421): NCBI GI NO: 34897236 NR Description: putative 60S ribosomal protein L1
  misc_feature (64)..(421): NCBI GI NO: 6441068 NR Description: 60S ribosomal protein L4 [Chlamydomonas sp. HS-5]
  misc_feature (20)..(386): NCBI GI NO: 1350686 NR Description: 60S RIBOSOMAL PROTEIN L4 (L1)

SEQ ID NO: 5011 - protein, 407 aa, Arabidopsis thaliana; identical to SEQ ID NO: 1236
  peptide (1)..(407): Ceres Seq. ID no. 13497293
  misc_feature (26)..(270): Pfam Name: Pfam Description:  Ribosomal protein L4/L1 family
  misc_feature (1)..(407): NCBI GI NO: 15242558 NR Description: 60S ribosomal protein L4/L1 (RPL4D)
  misc_feature (1)..(407): NCBI GI NO: 26450328 NR Description: putative 60S ribosomal protein
  misc_feature (2)..(407): NCBI GI NO: 15232723 NR Description: 60S ribosomal protein L4/L1 (RPL4A)
  misc_feature (2)..(407): NCBI GI NO: 21593543 NR Description: 60S ribosomal protein L4-B (L1)
  misc_feature (3)..(407): NCBI GI NO: 17367847 NR Description: 60S ribosomal protein L4 (L1)
  misc_feature (8)..(407): NCBI GI NO: 34393487 NR Description: putative 60S ribosomal protein L4/L1
  misc_feature (101)..(407): NCBI GI NO: 13605831 NR Description: AT5g02870/F9G14_180 [Arabidopsis thaliana]
  misc_feature (4)..(407): NCBI GI NO: 34897236 NR Description: putative 60S ribosomal protein L1
  misc_feature (50)..(407): NCBI GI NO: 6441068 NR Description: 60S ribosomal protein L4 [Chlamydomonas sp. HS-5]
  misc_feature (6)..(372): NCBI GI NO: 1350686 NR Description: 60S RIBOSOMAL PROTEIN L4 (L1)

SEQ ID NO: 5012 - protein, 388 aa, Arabidopsis thaliana; identical to SEQ ID NO: 1237
  peptide (1)..(388): Ceres Seq. ID no. 13497294
  misc_feature (7)..(251): Pfam Name: Pfam Description:  Ribosomal protein L4/L1 family
  misc_feature (1)..(388): NCBI GI NO: 15242558 NR Description: 60S ribosomal protein L4/L1 (RPL4D)
  misc_feature (1)..(388): NCBI GI NO: 26450328 NR Description: putative 60S ribosomal protein
  misc_feature (1)..(388): NCBI GI NO: 15232723 NR Description: 60S ribosomal protein L4/L1 (RPL4A)
  misc_feature (1)..(388): NCBI GI NO: 21593543 NR Description: 60S ribosomal protein L4-B (L1)
  misc_feature (1)..(388): NCBI GI NO: 17367847 NR Description: 60S ribosomal protein L4 (L1)
  misc_feature (1)..(388): NCBI GI NO: 34393487 NR Description: putative 60S ribosomal protein L4/L1
  misc_feature (82)..(388): NCBI GI NO: 13605831 NR Description: AT5g02870/F9G14_180 [Arabidopsis thaliana]
  misc_feature (1)..(388): NCBI GI NO: 34897236 NR Description: putative 60S ribosomal protein L1
  misc_feature (31)..(388): NCBI GI NO: 6441068 NR Description: 60S ribosomal protein L4 [Chlamydomonas sp. HS-5]
  misc_feature (1)..(353): NCBI GI NO: 1350686 NR Description: 60S RIBOSOMAL PROTEIN L4 (L1)

SEQ ID NO: 5013 - DNA, 1257 bp, Arabidopsis thaliana
  misc_feature (1)..(1257): Ceres Seq. ID no. 12337370
acaatcacttgtctgattctctcatataatagagttttctttctattctcctctgcttaatttcccagaaattactctttctgtgcttatcggattcaatagattcttagtaaatcgtaatggagacaccatcatcgacaagaagagtcacgagatctcagacccgctgtgctatcaataatctcttatcctcaaagaaagcggatgattggtcagataaatgtcaatcgaagtcggtacaaagaaacggtgcaaaagacaggtctgcgttgtttgacataaccaacgactcaccgatcgtaggtctggcgatgcagacaccgtcctcaggagttgttgggaagaggaacatgagcagaatcaataacactcctggatctggtgaggctctcttgagaggccaagtcaagactctcttgcagaaggttgaggaagaagcagatctcaccaagatttcgttggaatctcgtcctttcatccatctcgttacttctcccatgggtcttctcgccccaactccggccaacaccccccaagttcttggtttctcagacgaagtgcaggttgtgatcacttctccggtagttgcaggacaattcagagcaccgtctcaggtggtggaaagcaacatgtttgatgagaaagaagaaagcttggagttagagaagagcccgagcattactcggtcattgcttctggactttagtgataaatcagaattatgggagagctcagactgctcatctgtggtgactcaaaacccagaggatgataactcgtcggtgtggtcgatgcaggccaatgcaagtgccaaagacgaagagtatgatgatgaagaggaagaagcctattcttacggtgaggaatatgatgaggaatactacgacgaggaagaggaggaagaagagggagggattgtggatgggttgtgtgagggaattaggaagatgagcgtagagactgactttgcagggaaacacactagatttgtgtatgacagtgaagatgaagagattgtggaggccaaagatcaatctccaggagtgttgcgtttgaaaggctttcctacaccgacaggaaaacatgtcagatttgccggtgatgaatgagttcagtttgaatctttcttcttggagttgtgacaaaaagcctcatatgtctcgacttttttttttttttttcttgttgttgaagattcacaaatctgattcttgttattaccttgttgttatttttcaataactaaaagtgtaatcg

SEQ ID NO: 5014 - protein, 329 aa, Arabidopsis thaliana; identical to SEQ ID NO: 4420
  peptide (1)..(329): Ceres Seq. ID no. 12337371
  misc_feature (1)..(329): NCBI GI NO: 15239303 NR Description: putative protein; protein id: At5g66230.1
  misc_feature (1)..(182): NCBI GI NO: 15230432 NR Description: hypothetical protein; protein id: At3g51230.1
  misc_feature (274)..(329): NCBI GI NO: 15230432 NR Description: hypothetical protein; protein id: At3g51230.1
  misc_feature (1)..(328): NCBI GI NO: 37537140 NR Description: putative proline and glutamic acid rich nuclear protein

SEQ ID NO: 5015 - protein, 265 aa, Arabidopsis thaliana; identical to SEQ ID NO: 4421
  peptide (1)..(265): Ceres Seq. ID no. 12337372
  misc_feature (1)..(265): NCBI GI NO: 15239303 NR Description: putative protein; protein id: At5g66230.1
  misc_feature (1)..(118): NCBI GI NO: 15230432 NR Description: hypothetical protein; protein id: At3g51230.1
  misc_feature (210)..(265): NCBI GI NO: 15230432 NR Description: hypothetical protein; protein id: At3g51230.1
  misc_feature (1)..(264): NCBI GI NO: 37537140 NR Description: putative proline and glutamic acid rich nuclear protein

SEQ ID NO: 5016 - protein, 252 aa, Arabidopsis thaliana; identical to SEQ ID NO: 4422
  peptide (1)..(252): Ceres Seq. ID no. 12337373
  misc_feature (1)..(252): NCBI GI NO: 15239303 NR Description: putative protein; protein id: At5g66230.1
  misc_feature (1)..(105): NCBI GI NO: 15230432 NR Description: hypothetical protein; protein id: At3g51230.1
  misc_feature (197)..(252): NCBI GI NO: 15230432 NR Description: hypothetical protein; protein id: At3g51230.1
  misc_feature (1)..(251): NCBI GI NO: 37537140 NR Description: putative proline and glutamic acid rich nuclear protein

SEQ ID NO: 5017 - DNA, 1387 bp, Arabidopsis thaliana
  misc_feature (1)..(1387): Ceres Seq. ID no. 13575410
ggaggagacgaaaccgagagaaacaatgggagacgctgcgatccgtaccgtcgtcgaagccattcactcatctccgacgcaggccgtcgtctatctttgcggcggtgcctctctggctttaggttggttgatgtcggttcctggagcgtcgaacacgcttctcgagtccgtggttccttattcgagagtatctatggttcaattactcggcagggttccgagccaacactgtagccaagcattggccaaggagatggccttgttagcctacaatcgggcgcttaagctctctaaaccaggatatccggttctcggtgtcgggtttacgggatcattggtaacttctcgtcctaagcgtggagatcacaggttctttttgtctatgagagcatccgaccggattttggaatcttcagtcactctaactaagaacttacggagccgagaagaagaagataaggtgtcaagctgtgcactgatccaggctatggccaaggcatgccaagtttctgggacacttgactctggcttgaccgagtctgaggtgccttatgagtctgaaacccactttactgaagaacaagaactagagcagcttataaatgggcacttgtgctgtaagatttatccattttctggggaagcacacgggtctgatgaagacagaaagattatactacctggctcttttaacccattacatgaaggtcatctcaagctgttagaagttgctatgagtgtttgtgggggcggctacccatgttttgaaatatccgcaataaatgccgacaaaccaccgcttacaattgcacagattaaagatcgtgtcaagcaatttgaagtagttggaaagacgataatagtttcaaatcagccatacttctacaagaaagctgaactcttcccaggaagcagttttgtaattggcgctgacactgcagcgaggcttgtcaatccaaagtactatgaaggaagcatcaaaaggatgttggagatacttggtgattgcaaacggacaggttgcactttccttgttggtggccgcaatgtagatggtgtatttaaggttcttgaagatgttgatattccagaggaaataatcgacatgtttatttcaattccagcagatatattccggatggatatatcctctacagagataagaaaaaaacaagggggtggtacgaactaatgacttctcaacccgcttgaaagtcttggctcgcaagacaatttatttagtgcagttactttttgatttgatatgtattgtgttgcattctgttcttattatggaatccggatcaatggtatgagcatttgcacatgacatcgaaagagcattgcagagttgcatgggaaacgtttaaagagtgcgaatatttgc

SEQ ID NO: 5018 - protein, 396 aa, Arabidopsis thaliana
  peptide (1)..(396): Ceres Seq. ID no. 13575411
  misc_feature (9)..(396): NCBI GI NO: 30677893 NR Description: expressed protein [Arabidopsis thaliana]
  misc_feature (9)..(396): NCBI GI NO: 26451899 NR Description: unknown protein [Arabidopsis thaliana]
  misc_feature (9)..(396): NCBI GI NO: 30677890 NR Description: expressed protein [Arabidopsis thaliana]
  misc_feature (9)..(396): NCBI GI NO: 21537099 NR Description: unknown [Arabidopsis thaliana]
  misc_feature (9)..(393): NCBI GI NO: 15232221 NR Description: expressed protein [Arabidopsis thaliana]
  misc_feature (9)..(393): NCBI GI NO: 9294466 NR Description: gb|AAD14522
  misc_feature (159)..(279): NCBI GI NO: 34911372 NR Description: P0034C09.17
  misc_feature (14)..(104): NCBI GI NO: 34911372 NR Description: P0034C09.17
  misc_feature (319)..(392): NCBI GI NO: 34911372 NR Description: P0034C09.17
  misc_feature (9)..(161): NCBI GI NO: 25371182 NR Description: hypothetical protein At2g01220
EETKPRETMGDAAIRTVVEAIHSSPTQAVVYLCGGASLALGWLMSVPGASNTLLESVVPYSRVSMVQLLGRVPSQHCSQALAKEMALLAYNRALKLSKPGYPVLGVGFTGSLVTSRPKRGDHRFFLSMRASDRILESSVTLTKNLRSREEEDKVSSCALIQAMAKACQVSGTLDSGLTESEVPYESETHFTEEQELEQLINGHLCCKIYPFSGEAHGSDEDRKIILPGSFNPLHEGHLKLLEVAMSVCGGGYPCFEISAINADKPPLTIAQIKDRVKQFEVVGKTIIVSNQPYFYKKAELFPGSSFVIGADTAARLVNPKYYEGSIKRMLEILGDCKRTGCTFLVGGRNVDGVFKVLEDVDIPEEIIDMFISIPADIFRMDISSTEIRKKQGGGTN

SEQ ID NO: 5019 - protein, 388 aa, Arabidopsis thaliana
  peptide (1)..(388): Ceres Seq. ID no. 13575412
  misc_feature (1)..(388): NCBI GI NO: 30677893 NR Description: expressed protein [Arabidopsis thaliana]
  misc_feature (1)..(388): NCBI GI NO: 26451899 NR Description: unknown protein [Arabidopsis thaliana]
  misc_feature (1)..(388): NCBI GI NO: 30677890 NR Description: expressed protein [Arabidopsis thaliana]
  misc_feature (1)..(388): NCBI GI NO: 21537099 NR Description: unknown [Arabidopsis thaliana]
  misc_feature (1)..(385): NCBI GI NO: 15232221 NR Description: expressed protein [Arabidopsis thaliana]
  misc_feature (1)..(385): NCBI GI NO: 9294466 NR Description: gb|AAD14522
  misc_feature (151)..(271): NCBI GI NO: 34911372 NR Description: P0034C09.17
  misc_feature (6)..(96): NCBI GI NO: 34911372 NR Description: P0034C09.17
  misc_feature (311)..(384): NCBI GI NO: 34911372 NR Description: P0034C09.17
  misc_feature (1)..(153): NCBI GI NO: 25371182 NR Description: hypothetical protein At2g01220
MGDAAIRTVVEAIHSSPTQAVVYLCGGASLALGWLMSVPGASNTLLESVVPYSRVSMVQLLGRVPSQHCSQALAKEMALLAYNRALKLSKPGYPVLGVGFTGSLVTSRPKRGDHRFFLSMRASDRILESSVTLTKNLRSREEEDKVSSCALIQAMAKACQVSGTLDSGLTESEVPYESETHFTEEQELEQLINGHLCCKIYPFSGEAHGSDEDRKIILPGSFNPLHEGHLKLLEVAMSVCGGGYPCFEISAINADKPPLTIAQIKDRVKQFEVVGKTIIVSNQPYFYKKAELFPGSSFVIGADTAARLVNPKYYEGSIKRMLEILGDCKRTGCTFLVGGRNVDGVFKVLEDVDIPEEIIDMFISIPADIFRMDISSTEIRKKQGGGTN

SEQ ID NO: 5020 - protein, 353 aa, Arabidopsis thaliana
  peptide (1)..(353): Ceres Seq. ID no. 13575413
  misc_feature (1)..(353): NCBI GI NO: 30677893 NR Description: expressed protein [Arabidopsis thaliana]
  misc_feature (1)..(353): NCBI GI NO: 26451899 NR Description: unknown protein [Arabidopsis thaliana]
  misc_feature (1)..(353): NCBI GI NO: 30677890 NR Description: expressed protein [Arabidopsis thaliana]
  misc_feature (1)..(353): NCBI GI NO: 21537099 NR Description: unknown [Arabidopsis thaliana]
  misc_feature (1)..(350): NCBI GI NO: 15232221 NR Description: expressed protein [Arabidopsis thaliana]
  misc_feature (1)..(350): NCBI GI NO: 9294466 NR Description: gb|AAD14522
  misc_feature (116)..(236): NCBI GI NO: 34911372 NR Description: P0034C09.17
  misc_feature (1)..(61): NCBI GI NO: 34911372 NR Description: P0034C09.17
  misc_feature (276)..(349): NCBI GI NO: 34911372 NR Description: P0034C09.17
  misc_feature (1)..(118): NCBI GI NO: 25371182 NR Description: hypothetical protein At2g01220
MSVPGASNTLLESVVPYSRVSMVQLLGRVPSQHCSQALAKEMALLAYNRALKLSKPGYPVLGVGFTGSLVTSRPKRGDHRFFLSMRASDRILESSVTLTKNLRSREEEDKVSSCALIQAMAKACQVSGTLDSGLTESEVPYESETHFTEEQELEQLINGHLCCKIYPFSGEAHGSDEDRKIILPGSFNPLHEGHLKLLEVAMSVCGGGYPCFEISAINADKPPLTIAQIKDRVKQFEVVGKTIIVSNQPYFYKKAELFPGSSFVIGADTAARLVNPKYYEGSIKRMLEILGDCKRTGCTFLVGGRNVDGVFKVLEDVDIPEEIIDMFISIPADIFRMDISSTEIRKKQGGGTN

SEQ ID NO: 5021 - DNA, 1145 bp, Arabidopsis thaliana
  misc_feature (1)..(1145): Ceres Seq. ID no. 12345029
ggggttctctaacaatgtctataaaatcagtacaggtctattcttgttcactagcttcgaaattttagtcgaagaaacaaaaaaaaatggcgacggtacaattgtccacccaatttagctgccaaaccagagtttcaatctcaccgaactctaaatctatctccaagcctccgtttctggtaccggtgacctcaattattcaccgcctgatgatctccaccggaggaatcgctgtttccccccgtagagttttcaaagtccgagccacagatacgggagagataggatcagctctattggcggcggaggaagcaattgaagacgtggaagagacggagcggctaaagagatcgctcgtggattcgttgtacggaacagatcgaggtttaagcgcatcgagcgaaaccagagctgaaatcggagatctaatcacacagctcgagtctaagaaccctactccagctccgacggaagctcttttccttctcaacggcaaatggatcctcgcctacacatcgttcgtgaatttgttcccgttgctatcacgaggaatcgtaccgttaataaaagtcgatgagatctctcaaaccattgattcagataacttcaccgtccagaactctgttcgtttcgctggtcctttaggtacaaactcgattagcaccaacgctaaattcgaaatccgaagccctaaacgcgtccagattaagtttgagcaaggcgtaattgggacgcctcagctaacggattctattgagataccggaatatgtagaggttcttggtcaaaagattgatcttaacccgatcagagggttacttacctcggtgcaagacacagcctcgtctgtggctagaaccatatcaagccaaccaccgttgaaattctttttgccggcggacaatgcgcagtcttggctactcacgacttatctagacaaagacattcggatctctagaggagacggtggaagtgtctttgtgcttatcaaagaaggaagccctctcttgaatccttgaacttggtcaaaatatatgtctctctcttgtcgttgtgttaagtgagacaaatatatagtgtggttgtaggtttacttcttaatcgttgttattaactcgatgataaggaatataatgtttttaacc

SEQ ID NO: 5022 - protein, 310 aa, Arabidopsis thaliana
  peptide (1)..(310): Ceres Seq. ID no. 12345030
  misc_feature (84)..(301): Pfam Name: Pfam Description:  PAP_fibrillin
  misc_feature (1)..(310): NCBI GI NO: 18377868 NR Description: AT4g22240/T10I14_70 [Arabidopsis thaliana]
  misc_feature (1)..(310): NCBI GI NO: 15235575 NR Description: fibrillin precursor-like protein
  misc_feature (1)..(310): NCBI GI NO: 21618237 NR Description: fibrillin precursor-like protein
  misc_feature (1)..(310): NCBI GI NO: 14248556 NR Description: plastid-lipid associated protein PAP2
  misc_feature (1)..(310): NCBI GI NO: 14248550 NR Description: plastid-lipid associated protein PAP2
  misc_feature (1)..(310): NCBI GI NO: 15233357 NR Description: putative fibrillin; protein id: At4g04020
  misc_feature (3)..(310): NCBI GI NO: 14248554 NR Description: plastid-lipid associated protein PAP1
  misc_feature (3)..(310): NCBI GI NO: 14248548 NR Description: plastid-lipid associated protein PAP1
  misc_feature (74)..(310): NCBI GI NO: 4139097 NR Description: fibrillin [Brassica napus]
  misc_feature (1)..(310): NCBI GI NO: 3928760 NR Description: homolog to plastid-lipid-associated protein
MATVQLSTQFSCQTRVSISPNSKSISKPPFLVPVTSIIHRLMISTGGIAVSPRRVFKVRATDTGEIGSALLAAEEAIEDVEETERLKRSLVDSLYGTDRGLSASSETRAEIGDLITQLESKNPTPAPTEALFLLNGKWILAYTSFVNLFPLLSRGIVPLIKVDEISQTIDSDNFTVQNSVRFAGPLGTNSISTNAKFEIRSPKRVQIKFEQGVIGTPQLTDSIEIPEYVEVLGQKIDLNPIRGLLTSVQDTASSVARTISSQPPLKFFLPADNAQSWLLTTYLDKDIRISRGDGGSVFVLIKEGSPLLNP

SEQ ID NO: 5023 - protein, 269 aa, Arabidopsis thaliana
  peptide (1)..(269): Ceres Seq. ID no. 12345031
  misc_feature (43)..(260): Pfam Name: Pfam Description:  PAP_fibrillin
  misc_feature (1)..(269): NCBI GI NO: 18377868 NR Description: AT4g22240/T10I14_70 [Arabidopsis thaliana]
  misc_feature (1)..(269): NCBI GI NO: 15235575 NR Description: fibrillin precursor-like protein
  misc_feature (1)..(269): NCBI GI NO: 21618237 NR Description: fibrillin precursor-like protein
  misc_feature (1)..(269): NCBI GI NO: 14248556 NR Description: plastid-lipid associated protein PAP2
  misc_feature (1)..(269): NCBI GI NO: 14248550 NR Description: plastid-lipid associated protein PAP2
  misc_feature (1)..(269): NCBI GI NO: 15233357 NR Description: putative fibrillin; protein id: At4g04020
  misc_feature (1)..(269): NCBI GI NO: 14248554 NR Description: plastid-lipid associated protein PAP1
  misc_feature (1)..(269): NCBI GI NO: 14248548 NR Description: plastid-lipid associated protein PAP1
  misc_feature (33)..(269): NCBI GI NO: 4139097 NR Description: fibrillin [Brassica napus]
  misc_feature (1)..(269): NCBI GI NO: 3928760 NR Description: homolog to plastid-lipid-associated protein
MISTGGIAVSPRRVFKVRATDTGEIGSALLAAEEAIEDVEETERLKRSLVDSLYGTDRGLSASSETRAEIGDLITQLESKNPTPAPTEALFLLNGKWILAYTSFVNLFPLLSRGIVPLIKVDEISQTIDSDNFTVQNSVRFAGPLGTNSISTNAKFEIRSPKRVQIKFEQGVIGTPQLTDSIEIPEYVEVLGQKIDLNPIRGLLTSVQDTASSVARTISSQPPLKFFLPADNAQSWLLTTYLDKDIRISRGDGGSVFVLIKEGSPLLNP

SEQ ID NO: 5024 - DNA, 1078 bp, Arabidopsis thaliana
  misc_feature (1)..(1078): Ceres Seq. ID no. 12653446
actcacacatccacaaaaagagagttagagattccaaggaggagagtgcgtgagcgtgacaatggaaactgacaaaagatggtctctcgccgggaaaacagctctggtaaccggcgggactcgtggaatcgggagagcagttgtagaggaactagcaaaatttggtgcaaaagttcatacttgttcaaggaaccaggaagagctaaatgcatgcttgaatgattggaaagcgaatggtttagtcgtgtctggttcggtttgtgatgcttcggttagggatcagagggagaagttgattcaggaagcttcttctgccttcagtggcaagctcaacatccttataaacaatgttggaactaatgtcaggaaaccaacagttgaatactcaagcgaggaatatgccaaaatcatgtcgaccaacttagaatccgctttccatttatctcaaattgctcatcctcttctaaaagcatctggtgtcggaagcattgtgttcatctcctctgtagctggcctggtgcatcttagcagtggatctatctatggtgcaactaaaggagcacttaatcagcttacaagaaatctagcttgcgagtgggcaagcgacaacatcagaaccaattgcgtggcgccatggtacatcaagacctcacttgtggaaacgctacttgagaagaaagaatttgtggaggctgtagtttcaaggaccccacttgggcgcgttggagaaccagaggaagtctcatcgttggttgcctttctctgccttcccgcatcatcttatattaccggacaggtcatatccgtcgatggaggattcactgtcaacggttttagctatgctatgaagccttaatctcgaatcgcaacattactaataaagcaagaatcctcgtgatgtgttggtcttgtttgtctttgtttagtttttgtgacttctttaaacatatagtaatatcaaaacgtttgaatttctaatgtagccgttaaataaatcaaggcacagttgtgcaccagtttatgtagacctacaacatttgtcattgatttaggtatatggatgagagtattttgatcg

SEQ ID NO: 5025 - protein, 264 aa, Arabidopsis thaliana
  peptide (1)..(264): Ceres Seq. ID no. 12653447
  misc_feature (1)..(264): NCBI GI NO: 15239327 NR Description: short chain alcohol dehydrogenase-like
  misc_feature (1)..(264): NCBI GI NO: 21536785 NR Description: short chain alcohol dehydrogenase-like
  misc_feature (1)..(200): NCBI GI NO: 29893663 NR Description: unknown protein
  misc_feature (196)..(252): NCBI GI NO: 29893663 NR Description: unknown protein
  misc_feature (1)..(258): NCBI GI NO: 15227060 NR Description: putative tropinone reductase
  misc_feature (4)..(260): NCBI GI NO: 15227069 NR Description: putative tropinone reductase
  misc_feature (1)..(258): NCBI GI NO: 28393476 NR Description: putative tropinone reductase
  misc_feature (1)..(251): NCBI GI NO: 34902058 NR Description: putative pfam00106
  misc_feature (4)..(264): NCBI GI NO: 15227075 NR Description: putative tropinone reductase
  misc_feature (4)..(258): NCBI GI NO: 38707448 NR Description: short chain alcohol dehydrogenase-like protein
METDKRWSLAGKTALVTGGTRGIGRAVVEELAKFGAKVHTCSRNQEELNACLNDWKANGLVVSGSVCDASVRDQREKLIQEASSAFSGKLNILINNVGTNVRKPTVEYSSEEYAKIMSTNLESAFHLSQIAHPLLKASGVGSIVFISSVAGLVHLSSGSIYGATKGALNQLTRNLACEWASDNIRTNCVAPWYIKTSLVETLLEKKEFVEAVVSRTPLGRVGEPEEVSSLVAFLCLPASSYITGQVISVDGGFTVNGFSYAMKP

SEQ ID NO: 5026 - protein, 148 aa, Arabidopsis thaliana
  peptide (1)..(148): Ceres Seq. ID no. 12653448
  misc_feature (1)..(148): NCBI GI NO: 15239327 NR Description: short chain alcohol dehydrogenase-like
  misc_feature (1)..(148): NCBI GI NO: 21536785 NR Description: short chain alcohol dehydrogenase-like
  misc_feature (1)..(84): NCBI GI NO: 29893663 NR Description: unknown protein
  misc_feature (80)..(136): NCBI GI NO: 29893663 NR Description: unknown protein
  misc_feature (1)..(142): NCBI GI NO: 15227060 NR Description: putative tropinone reductase
  misc_feature (1)..(144): NCBI GI NO: 15227069 NR Description: putative tropinone reductase
  misc_feature (1)..(142): NCBI GI NO: 28393476 NR Description: putative tropinone reductase
  misc_feature (1)..(135): NCBI GI NO: 34902058 NR Description: putative pfam00106
  misc_feature (1)..(148): NCBI GI NO: 15227075 NR Description: putative tropinone reductase
  misc_feature (1)..(142): NCBI GI NO: 38707448 NR Description: short chain alcohol dehydrogenase-like protein
MSTNLESAFHLSQIAHPLLKASGVGSIVFISSVAGLVHLSSGSIYGATKGALNQLTRNLACEWASDNIRTNCVAPWYIKTSLVETLLEKKEFVEAVVSRTPLGRVGEPEEVSSLVAFLCLPASSYITGQVISVDGGFTVNGFSYAMKP

SEQ ID NO: 5027 - DNA, 781 bp, Arabidopsis thaliana
  misc_feature (1)..(781): Ceres Seq. ID no. 12395884
ctttttcattctcttcttacaccttttctccagagttccgacaatggcttcagcatcagcgacagctactcttctcaaacccaatcttccgccgcataaaccgaccatcatcgcctcctccgtatctccgcctcttcctcctccacgtcgcaaccacctcctccgccgcgatttcctctccctggcggcaacatccacgcttctaacacaatcgattcagtttctagctccggcgccggtctccgccgctgaagatgaagagtatatcaaagatacgtcggcagtgatcagtaaagtaaggagtacgctttcgatgcagaagacagatccgaatgtggctgatgcggtggcggagctgagagaagcgtcgaattcttgggttgccaagtaccggaaagagaaagctcttctcggaaaagcttctttccgggatatatactcggcgttgaatgctgtttcaggtcattatgtgagttttggtccgacggctccgattccggcgaagaggaaggcgaggattcttgaagagatggaaactgctgagaaagctctcacaagaggaagatgaaaaaactgcagtcaggccttcttctccattttcttgttgatgaaaattttattttcctaaaaatgccaatcgaattatatgagaagagaaacttgaattggctcgcctgcttttttttttcattcctgtaaaatacttaatgttctgcatgataattgcttaattatcattatcagagatacttatataacttatatcgaattccattttccc

SEQ ID NO: 5028 - protein, 188 aa, Arabidopsis thaliana
  peptide (1)..(188): Ceres Seq. ID no. 12395885
  misc_feature (15)..(188): NCBI GI NO: 18379115 NR Description: photosystem II protein family
  misc_feature (15)..(108): NCBI GI NO: 11692876 NR Description: At1g03600 [Arabidopsis thaliana]
  misc_feature (68)..(186): NCBI GI NO: 22300006 NR Description: photosystem II 11 kD protein
  misc_feature (87)..(187): NCBI GI NO: 17228753 NR Description: photosystem II 11 kD protein [Nostoc sp. PCC 7120]
  misc_feature (54)..(187): NCBI GI NO: 23125315 NR Description: hypothetical protein [Nostoc punctiforme]
  misc_feature (59)..(187): NCBI GI NO: 33866304 NR Description: possible photosystem II Psb27 protein
  misc_feature (88)..(187): NCBI GI NO: 23041360 NR Description: hypothetical protein
  misc_feature (51)..(188): NCBI GI NO: 33863528 NR Description: possible Photosystem II reaction center Psb27
  misc_feature (88)..(187): NCBI GI NO: 6919945 NR Description: Photosystem II 11 kDa protein precursor
  misc_feature (88)..(187): NCBI GI NO: 16331054 NR Description: photosystem II 11 kD protein
FFILFLHLFSRVPTMASASATATLLKPNLPPHKPTIIASSVSPPLPPPRRNHLLRRDFLSLAATSTLLTQSIQFLAPAPVSAAEDEEYIKDTSAVISKVRSTLSMQKTDPNVADAVAELREASNSWVAKYRKEKALLGKASFRDIYSALNAVSGHYVSFGPTAPIPAKRKARILEEMETAEKALTRGR

SEQ ID NO: 5029 - protein, 174 aa, Arabidopsis thaliana
  peptide (1)..(174): Ceres Seq. ID no. 12395886
  misc_feature (1)..(174): NCBI GI NO: 18379115 NR Description: photosystem II protein family
  misc_feature (1)..(94): NCBI GI NO: 11692876 NR Description: At1g03600 [Arabidopsis thaliana]
  misc_feature (54)..(172): NCBI GI NO: 22300006 NR Description: photosystem II 11 kD protein
  misc_feature (73)..(173): NCBI GI NO: 17228753 NR Description: photosystem II 11 kD protein [Nostoc sp. PCC 7120]
  misc_feature (40)..(173): NCBI GI NO: 23125315 NR Description: hypothetical protein [Nostoc punctiforme]
  misc_feature (45)..(173): NCBI GI NO: 33866304 NR Description: possible photosystem II Psb27 protein
  misc_feature (74)..(173): NCBI GI NO: 23041360 NR Description: hypothetical protein
  misc_feature (37)..(174): NCBI GI NO: 33863528 NR Description: possible Photosystem II reaction center Psb27
  misc_feature (74)..(173): NCBI GI NO: 6919945 NR Description: Photosystem II 11 kDa protein precursor
  misc_feature (74)..(173): NCBI GI NO: 16331054 NR Description: photosystem II 11 kD protein
MASASATATLLKPNLPPHKPTIIASSVSPPLPPPRRNHLLRRDFLSLAATSTLLTQSIQFLAPAPVSAAEDEEYIKDTSAVISKVRSTLSMQKTDPNVADAVAELREASNSWVAKYRKEKALLGKASFRDIYSALNAVSGHYVSFGPTAPIPAKRKARILEEMETAEKALTRGR

SEQ ID NO: 5030 - DNA, 1227 bp, Arabidopsis thaliana
  misc_feature (1)..(1227): Ceres Seq. ID no. 12328278
atctctctctctctctaccctttggatctttcttctcgatcaattatccattttgcccagattttttccagaagctcatcgaattcatcaaatcacaatgtttgaaatttggtttcactgttgctgagtgtgtttggaggagaagcttgattggttcggtgtttcactgtttgaagattataagagttatggagaatggtggtcagtatgataatgcgcggttcaagcccgattacttcaaaggtgcacaatctatgtggaatatgattccccagcatcagattaaggaacaacataatgcgttggtgatgaataagaagatcatgtccatccttgctgagagagacgctgctgtacatgaaagaaatcaagctgtctctgctaaaaaggaagctgtcgctgctcgggacgaagcgcttcagcaacgtgacaaagctctttctgagagagataaagctttgatagagagagataatgcttatgctgctcttcaacaccatgaaaatagtctcaactttgctttgtctggtgggaagtgtgttgatggagatgattgttttggtattggggaaccccacaaacttgaagtcttccctttgtcaactattccgcctgaggttacaaacacgaaggtggtgaacaaaaggaagaaagagaacaagcagggactatcaaaggtgaaaaaagtgggtgaagatctgaaccgtcgagttcctgctcctggaaagaaatctagaacagattgggacagtcaagatgtcggtttgaacttagtcaccttcgatgagacgacaatgcctgtacccatgtgttcgtgcacaggctctacgcgtcagtgttacaaatggggaaatggcggctggcaatcgtcttgctgcacaaccaccttatcccagtatccattaccgcagatgccaaacaagaggcattctcggatgggcggtaggaaaatgagcggaaacgttttctcgagattactcagccgtttatcagcagaaggatatgatctctcgtgtcctgttgatcttaaagactattgggctaggcacgggacaaaccgctacatcactatcaagtagcctctgttgtttacacagtccaagtatgtttctctcgtcttcttaagattaggtgttgtctttgtctttattgtccatagtttgttctttgttgtgtatggtaaaaccattgttatgtgtatcttttggatgggcaaaaatggtttgc

SEQ ID NO: 5031 - protein, 358 aa, Arabidopsis thaliana
  peptide (1)..(358): Ceres Seq. ID no. 12328279
  misc_feature (63)..(358): NCBI GI NO: 18399638 NR Description: expressed protein; protein id: At2g21240
  misc_feature (63)..(330): NCBI GI NO: 15234867 NR Description: putative protein; protein id: At4g38910.1
  misc_feature (63)..(358): NCBI GI NO: 9759488 NR Description: gb|AAF18661
  misc_feature (202)..(358): NCBI GI NO: 18422219 NR Description: putative protein; protein id: At5g42520
  misc_feature (78)..(358): NCBI GI NO: 20530716 NR Description: GAGA-binding protein [Glycine max]
  misc_feature (205)..(358): NCBI GI NO: 30686452 NR Description: expressed protein [Arabidopsis thaliana]
  misc_feature (205)..(358): NCBI GI NO: 30686455 NR Description: expressed protein [Arabidopsis thaliana]
  misc_feature (296)..(358): NCBI GI NO: 6006362 NR Description: Similar to Arabidopsis thaliana chromosome II BAC T32F12
  misc_feature (113)..(164): NCBI GI NO: 6006362 NR Description: Similar to Arabidopsis thaliana chromosome II BAC T32F12
  misc_feature (203)..(358): NCBI GI NO: 26190436 NR Description: barley B recombinant [Hordeum vulgare]
LSLSLPFGSFFSINYPFCPDFFQKLIEFIKSQCLKFGFTVAECVWRRSLIGSVFHCLKIIRVMENGGQYDNARFKPDYFKGAQSMWNMIPQHQIKEQHNALVMNKKIMSILAERDAAVHERNQAVSAKKEAVAARDEALQQRDKALSERDKALIERDNAYAALQHHENSLNFALSGGKCVDGDDCFGIGEPHKLEVFPLSTIPPEVTNTKVVNKRKKENKQGLSKVKKVGEDLNRRVPAPGKKSRTDWDSQDVGLNLVTFDETTMPVPMCSCTGSTRQCYKWGNGGWQSSCCTTTLSQYPLPQMPNKRHSRMGGRKMSGNVFSRLLSRLSAEGYDLSCPVDLKDYWARHGTNRYITIK

SEQ ID NO: 5032 - protein, 296 aa, Arabidopsis thaliana
  peptide (1)..(296): Ceres Seq. ID no. 12328280
  misc_feature (1)..(296): NCBI GI NO: 18399638 NR Description: expressed protein; protein id: At2g21240
  misc_feature (1)..(268): NCBI GI NO: 15234867 NR Description: putative protein; protein id: At4g38910.1
  misc_feature (1)..(296): NCBI GI NO: 9759488 NR Description: gb|AAF18661
  misc_feature (140)..(296): NCBI GI NO: 18422219 NR Description: putative protein; protein id: At5g42520
  misc_feature (16)..(296): NCBI GI NO: 20530716 NR Description: GAGA-binding protein [Glycine max]
  misc_feature (143)..(296): NCBI GI NO: 30686452 NR Description: expressed protein [Arabidopsis thaliana]
  misc_feature (143)..(296): NCBI GI NO: 30686455 NR Description: expressed protein [Arabidopsis thaliana]
  misc_feature (234)..(296): NCBI GI NO: 6006362 NR Description: Similar to Arabidopsis thaliana chromosome II BAC T32F12
  misc_feature (51)..(102): NCBI GI NO: 6006362 NR Description: Similar to Arabidopsis thaliana chromosome II BAC T32F12
  misc_feature (141)..(296): NCBI GI NO: 26190436 NR Description: barley B recombinant [Hordeum vulgare]
MENGGQYDNARFKPDYFKGAQSMWNMIPQHQIKEQHNALVMNKKIMSILAERDAAVHERNQAVSAKKEAVAARDEALQQRDKALSERDKALIERDNAYAALQHHENSLNFALSGGKCVDGDDCFGIGEPHKLEVFPLSTIPPEVTNTKVVNKRKKENKQGLSKVKKVGEDLNRRVPAPGKKSRTDWDSQDVGLNLVTFDETTMPVPMCSCTGSTRQCYKWGNGGWQSSCCTTTLSQYPLPQMPNKRHSRMGGRKMSGNVFSRLLSRLSAEGYDLSCPVDLKDYWARHGTNRYITIK

SEQ ID NO: 5033 - protein, 274 aa, Arabidopsis thaliana
  peptide (1)..(274): Ceres Seq. ID no. 12328281
  misc_feature (1)..(274): NCBI GI NO: 18399638 NR Description: expressed protein; protein id: At2g21240
  misc_feature (1)..(246): NCBI GI NO: 15234867 NR Description: putative protein; protein id: At4g38910.1
  misc_feature (1)..(274): NCBI GI NO: 9759488 NR Description: gb|AAF18661
  misc_feature (118)..(274): NCBI GI NO: 18422219 NR Description: putative protein; protein id: At5g42520
  misc_feature (1)..(274): NCBI GI NO: 20530716 NR Description: GAGA-binding protein [Glycine max]
  misc_feature (121)..(274): NCBI GI NO: 30686452 NR Description: expressed protein [Arabidopsis thaliana]
  misc_feature (121)..(274): NCBI GI NO: 30686455 NR Description: expressed protein [Arabidopsis thaliana]
  misc_feature (212)..(274): NCBI GI NO: 6006362 NR Description: Similar to Arabidopsis thaliana chromosome II BAC T32F12
  misc_feature (29)..(80): NCBI GI NO: 6006362 NR Description: Similar to Arabidopsis thaliana chromosome II BAC T32F12
  misc_feature (119)..(274): NCBI GI NO: 26190436 NR Description: barley B recombinant [Hordeum vulgare]
MWNMIPQHQIKEQHNALVMNKKIMSILAERDAAVHERNQAVSAKKEAVAARDEALQQRDKALSERDKALIERDNAYAALQHHENSLNFALSGGKCVDGDDCFGIGEPHKLEVFPLSTIPPEVTNTKVVNKRKKENKQGLSKVKKVGEDLNRRVPAPGKKSRTDWDSQDVGLNLVTFDETTMPVPMCSCTGSTRQCYKWGNGGWQSSCCTTTLSQYPLPQMPNKRHSRMGGRKMSGNVFSRLLSRLSAEGYDLSCPVDLKDYWARHGTNRYITIK

SEQ ID NO: 5034 - DNA, 1763 bp, Arabidopsis thaliana
  misc_feature (1)..(1763): Ceres Seq. ID no. 13488927
aaaatttaaatcttcattgaatgctttttctgaagctttatctaataaatctcttcgttgatccttcctttccattaacgaggtagaaattccaaaacgcgtaataatcttgtcgtcattacaaattacaataaaaagaagacatttttatttagatttccctctgatcctctcttttagatttcgaatcgagaccagatctgcgtgaagatgatagagaagtgtataggagcgcatcggtttcggagattacagagattcatgcgtcaagggaaagtgacgattctttgtctcgttctcaccgtcatcgtcttacgtggcacaatcggagccggtaagtttggtacgccggagaaagatatcgaggagatccgtgagcatttcttctacacgcgtaaacgcggcgagcctcaccgtgtcctcgtcgaggtctcttccaaaacgacgtcgtccgaagacggaggaaatggtggtaacagctacgagaccttcgatatcaacaagctattcgttgatgaaggagacgaagagaaatctcgagaccggactaataaaccttattctcttggtcccaagatctctgattgggatgagcagagacgtgattggctcaaacaaaaccctagcttccctaatttcgtggcgccaaacaagcctagggttcttcttgtcacaggttcagctcctaaaccgtgtgagaatcctgtaggagaccattacctcttgaaatcgattaagaacaaaatcgattactgtagaatacacggaatcgagatcttctacaacatggcgttgctcgatgctgagatggctggattctgggctaagcttccgttgattaggaagttactcttgtcacatcctgagattgagtttctatggtggatggatagtgatgccatgttcacggacatggtgttcgagcttccatgggagaggtacaaagattacaacttggtgatgcatggttggaacgagatggtttatgaccagaagaattggattggtctcaacacgggaagtttcttgctcaggaactcacagtggtcgcttgatcttcttgacgcttgggctcctatgggcccaaaagggaagatccgagaagaagcgggtaaagtcttgacccgggaacttaaagaccgacccgctttcgaagctgacgatcaatcggcgatggtttatctgctggcgacggagagagagaaatggggaggcaaagtttatctagagagtggttattacttgcacggttattgggggattttggtagaccggtacgaggagatgattgagaatcataaaccgggttttggagaccatcggtggccattggttacgcatttcgtcgggtgtaaaccgtgcgggaaatttggagattatccggtggaacggtgtctacggcagatggatagagcgtttaatttcggagacaatcagatccttcaaatgtatggtttcacgcataaatcgcttgggagccggcgcgtgaaacccacgcgcaatcagacggataggccgctcgatgccaaggacgagtttgggctgcttcatccgccgttcaaagcggccaagcttagtacgacgacgacgtgagtgagtgagaggatatattgttttgtatcttttaattttgcgtttaggggacacacgtttatttgttttattcaattttatttgtttgtagtttacttaattgttttgatctcccattcatggtggagtcgtgtatggagtatttaatgatttattgtagacgttatttc

SEQ ID NO: 5035 - protein, 460 aa, Arabidopsis thaliana
  peptide (1)..(460): Ceres Seq. ID no. 13488928
  misc_feature (147)..(391): Pfam Name: Pfam Description:  galactosyl transferase GMA12/MNN10 family
  misc_feature (1)..(460): NCBI GI NO: 15228843 NR Description: transferase - related [Arabidopsis thaliana]
  misc_feature (1)..(457): NCBI GI NO: 18411962 NR Description: transferase - related [Arabidopsis thaliana]
  misc_feature (1)..(454): NCBI GI NO: 25349323 NR Description: probable glycosyltransferase
  misc_feature (105)..(449): NCBI GI NO: 15221224 NR Description: transferase - related [Arabidopsis thaliana]
  misc_feature (10)..(108): NCBI GI NO: 15221224 NR Description: transferase - related [Arabidopsis thaliana]
  misc_feature (114)..(445): NCBI GI NO: 15240848 NR Description: transferase - related [Arabidopsis thaliana]
  misc_feature (10)..(82): NCBI GI NO: 15240848 NR Description: transferase - related [Arabidopsis thaliana]
  misc_feature (114)..(445): NCBI GI NO: 15221850 NR Description: transferase - related [Arabidopsis thaliana]
  misc_feature (114)..(445): NCBI GI NO: 25349326 NR Description: hypothetical protein F6A14
  misc_feature (89)..(359): NCBI GI NO: 32127690 NR Description: galactomannan galactosyltransferase
MIEKCIGAHRFRRLQRFMRQGKVTILCLVLTVIVLRGTIGAGKFGTPEKDIEEIREHFFYTRKRGEPHRVLVEVSSKTTSSEDGGNGGNSYETFDINKLFVDEGDEEKSRDRTNKPYSLGPKISDWDEQRRDWLKQNPSFPNFVAPNKPRVLLVTGSAPKPCENPVGDHYLLKSIKNKIDYCRIHGIEIFYNMALLDAEMAGFWAKLPLIRKLLLSHPEIEFLWWMDSDAMFTDMVFELPWERYKDYNLVMHGWNEMVYDQKNWIGLNTGSFLLRNSQWSLDLLDAWAPMGPKGKIREEAGKVLTRELKDRPAFEADDQSAMVYLLATEREKWGGKVYLESGYYLHGYWGILVDRYEEMIENHKPGFGDHRWPLVTHFVGCKPCGKFGDYPVERCLRQMDRAFNFGDNQILQMYGFTHKSLGSRRVKPTRNQTDRPLDAKDEFGLLHPPFKAAKLSTTTT

SEQ ID NO: 5036 - protein, 443 aa, Arabidopsis thaliana
  peptide (1)..(443): Ceres Seq. ID no. 13488929
  misc_feature (130)..(374): Pfam Name: Pfam Description:  galactosyl transferase GMA12/MNN10 family
  misc_feature (1)..(443): NCBI GI NO: 15228843 NR Description: transferase - related [Arabidopsis thaliana]
  misc_feature (1)..(440): NCBI GI NO: 18411962 NR Description: transferase - related [Arabidopsis thaliana]
  misc_feature (1)..(437): NCBI GI NO: 25349323 NR Description: probable glycosyltransferase
  misc_feature (88)..(432): NCBI GI NO: 15221224 NR Description: transferase - related [Arabidopsis thaliana]
  misc_feature (1)..(91): NCBI GI NO: 15221224 NR Description: transferase - related [Arabidopsis thaliana]
  misc_feature (97)..(428): NCBI GI NO: 15240848 NR Description: transferase - related [Arabidopsis thaliana]
  misc_feature (1)..(65): NCBI GI NO: 15240848 NR Description: transferase - related [Arabidopsis thaliana]
  misc_feature (97)..(428): NCBI GI NO: 15221850 NR Description: transferase - related [Arabidopsis thaliana]
  misc_feature (97)..(428): NCBI GI NO: 25349326 NR Description: hypothetical protein F6A14
  misc_feature (72)..(342): NCBI GI NO: 32127690 NR Description: galactomannan galactosyltransferase
MRQGKVTILCLVLTVIVLRGTIGAGKFGTPEKDIEEIREHFFYTRKRGEPHRVLVEVSSKTTSSEDGGNGGNSYETFDINKLFVDEGDEEKSRDRTNKPYSLGPKISDWDEQRRDWLKQNPSFPNFVAPNKPRVLLVTGSAPKPCENPVGDHYLLKSIKNKIDYCRIHGIEIFYNMALLDAEMAGFWAKLPLIRKLLLSHPEIEFLWWMDSDAMFTDMVFELPWERYKDYNLVMHGWNEMVYDQKNWIGLNTGSFLLRNSQWSLDLLDAWAPMGPKGKIREEAGKVLTRELKDRPAFEADDQSAMVYLLATEREKWGGKVYLESGYYLHGYWGILVDRYEEMIENHKPGFGDHRWPLVTHFVGCKPCGKFGDYPVERCLRQMDRAFNFGDNQILQMYGFTHKSLGSRRVKPTRNQTDRPLDAKDEFGLLHPPFKAAKLSTTTT

SEQ ID NO: 5037 - protein, 268 aa, Arabidopsis thaliana
  peptide (1)..(268): Ceres Seq. ID no. 13488930
  misc_feature (1)..(199): Pfam Name: Pfam Description:  galactosyl transferase GMA12/MNN10 family
  misc_feature (1)..(268): NCBI GI NO: 15228843 NR Description: transferase - related [Arabidopsis thaliana]
  misc_feature (1)..(265): NCBI GI NO: 18411962 NR Description: transferase - related [Arabidopsis thaliana]
  misc_feature (1)..(262): NCBI GI NO: 25349323 NR Description: probable glycosyltransferase
  misc_feature (1)..(257): NCBI GI NO: 15221224 NR Description: transferase - related [Arabidopsis thaliana]
  misc_feature (1)..(253): NCBI GI NO: 15240848 NR Description: transferase - related [Arabidopsis thaliana]
  misc_feature (1)..(253): NCBI GI NO: 15221850 NR Description: transferase - related [Arabidopsis thaliana]
  misc_feature (1)..(253): NCBI GI NO: 25349326 NR Description: hypothetical protein F6A14
  misc_feature (1)..(167): NCBI GI NO: 32127690 NR Description: galactomannan galactosyltransferase
  misc_feature (162)..(236): NCBI GI NO: 32127690 NR Description: galactomannan galactosyltransferase
  misc_feature (1)..(171): NCBI GI NO: 25486551 NR Description: alpha galactosyltransferase (EC 2.4.1.-)
MALLDAEMAGFWAKLPLIRKLLLSHPEIEFLWWMDSDAMFTDMVFELPWERYKDYNLVMHGWNEMVYDQKNWIGLNTGSFLLRNSQWSLDLLDAWAPMGPKGKIREEAGKVLTRELKDRPAFEADDQSAMVYLLATEREKWGGKVYLESGYYLHGYWGILVDRYEEMIENHKPGFGDHRWPLVTHFVGCKPCGKFGDYPVERCLRQMDRAFNFGDNQILQMYGFTHKSLGSRRVKPTRNQTDRPLDAKDEFGLLHPPFKAAKLSTTTT

SEQ ID NO: 5038 - DNA, 1290 bp, Arabidopsis thaliana
  misc_feature (1)..(1290): Ceres Seq. ID no. 12328789
cctcacccatcaagtcccaattcccaacactgtcactcaaaaagaatcttcaaacaatgaatctcaacgtcgtcgttttactcctactccttctaatctcatccgccacgtgttgtccgccgtcagaccgccgtgcacttctagctttccgatcagctcttcacgagccttacctcggcattttcaactcatggacaggccaagactgttgccacaactggtacggtattagctgcgactcgctcactcaccgagtcgccgacataaatctccgcggcgagtcagaagatccaatcttcgaacgagctcaccgaaccggttacatgaccggacacatctccgcctcgatatgtgagctcactcgtctctccgccattacaatcgccgattggaaaggtatctccggcgaaatccctaaatgtatcactcgtcttccttttctccgtacactcgacttaatcggaaaccaaatctccggtgggattccatacgacatcggaagattaaaccggttagctgttttaaacgtagccgataaccgaatctccggttcaattccaaaatcattaaccaatctctctagcttaatgcatttagatctccgtaacaacttaatctccggtgtaatcccgtcggacgtcggaagattaaaaatgctcagccgtgcgttattatccggtaaccgaataaccggtcggatcccagaatcattaaccaatatctaccggttagctgacgtggatctctccggtaaccaactctacggtacaatcccaccgtctctaggacgtatgtcggtactagccacacttaacctcgacggaaacaaaatctccggcgagatacctcaaactctgatgacgtcgtcggtgatgaatctgaatttgagccggaacttgctacaagggaagatacctgaagggtttggaccaaggtcttacttcacagttcttgatttgtcgtataataatctgaaaggaccaataccgagatcgatctcaggtgcgtcgtttattggtcatttggatcttagccataaccatctctgtgggaggattccggtaggttcaccgtttgatcatcttgaagcggcgtcgtttatgtttaacgactgtctttgtggtaaacctttaagagcttgcttgaaaaattgatttttatatgtaatttgagttttttcattagagacattattatatttatggttatgcattttataaaaaaaagatttaaaattgtatgctacgtttagttgaattatgggatgattaacaaaatatataaacttcc

SEQ ID NO: 5039 - protein, 383 aa, Arabidopsis thaliana
  peptide (1)..(383): Ceres Seq. ID no. 12328790
  misc_feature (146)..(169): Pfam Name: Pfam Description:  Leucine Rich Repeat
  misc_feature (19)..(383): NCBI GI NO: 15232373 NR Description: disease resistance protein family
  misc_feature (10)..(382): NCBI GI NO: 21593689 NR Description: leucine rich repeat protein, putative
  misc_feature (10)..(382): NCBI GI NO: 15239943 NR Description: leucine rich repeat protein family
  misc_feature (61)..(380): NCBI GI NO: 25004882 NR Description: polygalacturonase inhibitor-like protein
  misc_feature (10)..(382): NCBI GI NO: 14532722 NR Description: unknown protein [Arabidopsis thaliana]
  misc_feature (24)..(380): NCBI GI NO: 38566726 NR Description: leucine rich repeat protein [Cicer arietinum]
  misc_feature (12)..(377): NCBI GI NO: 15230539 NR Description: DNA-damage-repair/toleration protein, putative
  misc_feature (40)..(373): NCBI GI NO: 421844 NR Description: DRT100 protein precursor - Arabidopsis thaliana
  misc_feature (24)..(346): NCBI GI NO: 15225296 NR Description: disease resistance protien-related
  misc_feature (5)..(353): NCBI GI NO: 25518158 NR Description: Hypothetical 55
SPIKSQFPTLSLKKNLQTMNLNVVVLLLLLLISSATCCPPSDRRALLAFRSALHEPYLGIFNSWTGQDCCHNWYGISCDSLTHRVADINLRGESEDPIFERAHRTGYMTGHISASICELTRLSAITIADWKGISGEIPKCITRLPFLRTLDLIGNQISGGIPYDIGRLNRLAVLNVADNRISGSIPKSLTNLSSLMHLDLRNNLISGVIPSDVGRLKMLSRALLSGNRITGRIPESLTNIYRLADVDLSGNQLYGTIPPSLGRMSVLATLNLDGNKISGEIPQTLMTSSVMNLNLSRNLLQGKIPEGFGPRSYFTVLDLSYNNLKGPIPRSISGASFIGHLDLSHNHLCGRIPVGSPFDHLEAASFMFNDCLCGKPLRACLKN

SEQ ID NO: 5040 - protein, 365 aa, Arabidopsis thaliana
  peptide (1)..(365): Ceres Seq. ID no. 12328791
  misc_feature (128)..(151): Pfam Name: Pfam Description:  Leucine Rich Repeat
  misc_feature (1)..(365): NCBI GI NO: 15232373 NR Description: disease resistance protein family
  misc_feature (1)..(364): NCBI GI NO: 21593689 NR Description: leucine rich repeat protein, putative
  misc_feature (1)..(364): NCBI GI NO: 15239943 NR Description: leucine rich repeat protein family
  misc_feature (43)..(362): NCBI GI NO: 25004882 NR Description: polygalacturonase inhibitor-like protein
  misc_feature (1)..(364): NCBI GI NO: 14532722 NR Description: unknown protein [Arabidopsis thaliana]
  misc_feature (6)..(362): NCBI GI NO: 38566726 NR Description: leucine rich repeat protein [Cicer arietinum]
  misc_feature (1)..(359): NCBI GI NO: 15230539 NR Description: DNA-damage-repair/toleration protein, putative
  misc_feature (22)..(355): NCBI GI NO: 421844 NR Description: DRT100 protein precursor - Arabidopsis thaliana
  misc_feature (6)..(328): NCBI GI NO: 15225296 NR Description: disease resistance protien-related
  misc_feature (1)..(335): NCBI GI NO: 25518158 NR Description: Hypothetical 55
MNLNVVVLLLLLLISSATCCPPSDRRALLAFRSALHEPYLGIFNSWTGQDCCHNWYGISCDSLTHRVADINLRGESEDPIFERAHRTGYMTGHISASICELTRLSAITIADWKGISGEIPKCITRLPFLRTLDLIGNQISGGIPYDIGRLNRLAVLNVADNRISGSIPKSLTNLSSLMHLDLRNNLISGVIPSDVGRLKMLSRALLSGNRITGRIPESLTNIYRLADVDLSGNQLYGTIPPSLGRMSVLATLNLDGNKISGEIPQTLMTSSVMNLNLSRNLLQGKIPEGFGPRSYFTVLDLSYNNLKGPIPRSISGASFIGHLDLSHNHLCGRIPVGSPFDHLEAASFMFNDCLCGKPLRACLKN

SEQ ID NO: 5041 - protein, 276 aa, Arabidopsis thaliana
  peptide (1)..(276): Ceres Seq. ID no. 12328792
  misc_feature (39)..(62): Pfam Name: Pfam Description:  Leucine Rich Repeat
  misc_feature (1)..(276): NCBI GI NO: 15232373 NR Description: disease resistance protein family
  misc_feature (1)..(275): NCBI GI NO: 21593689 NR Description: leucine rich repeat protein, putative
  misc_feature (1)..(275): NCBI GI NO: 15239943 NR Description: leucine rich repeat protein family
  misc_feature (1)..(273): NCBI GI NO: 25004882 NR Description: polygalacturonase inhibitor-like protein
  misc_feature (1)..(275): NCBI GI NO: 14532722 NR Description: unknown protein [Arabidopsis thaliana]
  misc_feature (1)..(273): NCBI GI NO: 38566726 NR Description: leucine rich repeat protein [Cicer arietinum]
  misc_feature (1)..(270): NCBI GI NO: 15230539 NR Description: DNA-damage-repair/toleration protein, putative
  misc_feature (1)..(266): NCBI GI NO: 421844 NR Description: DRT100 protein precursor - Arabidopsis thaliana
  misc_feature (1)..(239): NCBI GI NO: 15225296 NR Description: disease resistance protien-related
  misc_feature (1)..(246): NCBI GI NO: 25518158 NR Description: Hypothetical 55
MTGHISASICELTRLSAITIADWKGISGEIPKCITRLPFLRTLDLIGNQISGGIPYDIGRLNRLAVLNVADNRISGSIPKSLTNLSSLMHLDLRNNLISGVIPSDVGRLKMLSRALLSGNRITGRIPESLTNIYRLADVDLSGNQLYGTIPPSLGRMSVLATLNLDGNKISGEIPQTLMTSSVMNLNLSRNLLQGKIPEGFGPRSYFTVLDLSYNNLKGPIPRSISGASFIGHLDLSHNHLCGRIPVGSPFDHLEAASFMFNDCLCGKPLRACLKN

SEQ ID NO: 5042 - DNA, 1036 bp, Arabidopsis thaliana
  misc_feature (1)..(1036): Ceres Seq. ID no. 12329101
aactaaaccatcatcatcatcatcatctcttggtgacagaagaaaagagttgaggaacagagaaaatggcagcacaagcacttgtgtcttcttcacttacctcctctgttcagacagctagacagatatttggctcaaaaccagttgcgtctgcctcacagaagaagagttcctttgttgttaaagctgctgcaactccacctgtcaagcaaggagcaaacagaccattgtggtttgcatcatcgcagagtctctcttacttggatggcagcttacctggtgactatggattcgaccctcttggcctttcagacccagaaggtactggaggattcattgagccaagatggctagcatacggagagatcatcaacggacggttcgccatcagctggagctattgctcctgagattctaggaaaggctggtctgattccagcagagactgctcttccttggttccaaaccggtgtgattccaccagcagggacatacacttactgggcagacaattacacactctttgttctcgagatggctctgatgggattcgctgagcaccggaggttacaggactggtacaacccaggatctatgggaaaacagtacttcttggggttagagaagggtttggccggttcaggtaacccggcttaccccggtggacctttcttcaaccctcttgggtttgggaaagatgagaagtcactgaaggagttgaaactcaaggaggtcaagaacggtagactggctatgctcgccatcctcggttactttatccaaggactagtgaccggtgtgggaccttaccagaacctgcttgatcacttggctgatcccgtcaacaacaacgtcttgaccagcctcaagttccactgaggtgatcatcatctcatgtgtttttatgtctcttgtatcgtacaatatttccatctttcgctaccattggcttcttcgtattgtaacaccctgtgtaaacatattcgtgttttgtaagaaatgacaatgtcaatggccaaacgaaaaaacttttagg

SEQ ID NO: 5043 - protein, 114 aa, Arabidopsis thaliana
  peptide (1)..(114): Ceres Seq. ID no. 12329102
  misc_feature (1)..(108): NCBI GI NO: 15219941 NR Description: light-harvesting chlorophyll a/b binding protein
  misc_feature (1)..(108): NCBI GI NO: 430947 NR Description: PSI type III chlorophyll a/b-binding protein
  misc_feature (1)..(108): NCBI GI NO: 21554335 NR Description: PSI type III chlorophyll a/b-binding protein
  misc_feature (1)..(108): NCBI GI NO: 82080 NR Description: chlorophyll a/b-binding protein type III precursor
  misc_feature (1)..(108): NCBI GI NO: 115813 NR Description: Chlorophyll A-B binding protein 8
  misc_feature (1)..(108): NCBI GI NO: 7443229 NR Description: probable chlorophyll a/b-binding protein type III precursor
  misc_feature (1)..(108): NCBI GI NO: 99487 NR Description: chlorophyll a/b-binding protein
  misc_feature (72)..(108): NCBI GI NO: 7271947 NR Description: chlorophyll a/b-binding protein type III
  misc_feature (11)..(108): NCBI GI NO: 40714511 NR Description: light-harvesting chlorophyll-a/b protein of photosystem I
  misc_feature (8)..(108): NCBI GI NO: 2129879 NR Description: chlorophyll a/b-binding protein type II precursor
MAAQALVSSSLTSSVQTARQIFGSKPVASASQKKSSFVVKAAATPPVKQGANRPLWFASSQSLSYLDGSLPGDYGFDPLGLSDPEGTGGFIEPRWLAYGEIINGRFAISWSYCS

SEQ ID NO: 5044 - protein, 114 aa, Arabidopsis thaliana
  peptide (1)..(114): Ceres Seq. ID no. 12329103
  misc_feature (1)..(85): Pfam Name: Pfam Description:  Chlorophyll A-B binding protein
  misc_feature (1)..(114): NCBI GI NO: 15219941 NR Description: light-harvesting chlorophyll a/b binding protein
  misc_feature (1)..(114): NCBI GI NO: 430947 NR Description: PSI type III chlorophyll a/b-binding protein
  misc_feature (1)..(114): NCBI GI NO: 21554335 NR Description: PSI type III chlorophyll a/b-binding protein
  misc_feature (1)..(114): NCBI GI NO: 82080 NR Description: chlorophyll a/b-binding protein type III precursor
  misc_feature (1)..(114): NCBI GI NO: 115813 NR Description: Chlorophyll A-B binding protein 8
  misc_feature (1)..(114): NCBI GI NO: 7443229 NR Description: probable chlorophyll a/b-binding protein type III precursor
  misc_feature (1)..(114): NCBI GI NO: 99487 NR Description: chlorophyll a/b-binding protein
  misc_feature (1)..(105): NCBI GI NO: 7271947 NR Description: chlorophyll a/b-binding protein type III
  misc_feature (1)..(114): NCBI GI NO: 37780998 NR Description: chlorophyll a/b binding protein [Vitis vinifera]
  misc_feature (1)..(110): NCBI GI NO: 40714511 NR Description: light-harvesting chlorophyll-a/b protein of photosystem I
MALMGFAEHRRLQDWYNPGSMGKQYFLGLEKGLAGSGNPAYPGGPFFNPLGFGKDEKSLKELKLKEVKNGRLAMLAILGYFIQGLVTGVGPYQNLLDHLADPVNNNVLTSLKFH

SEQ ID NO: 5045 - protein, 111 aa, Arabidopsis thaliana
  peptide (1)..(111): Ceres Seq. ID no. 12329104
  misc_feature (1)..(82): Pfam Name: Pfam Description:  Chlorophyll A-B binding protein
  misc_feature (1)..(111): NCBI GI NO: 15219941 NR Description: light-harvesting chlorophyll a/b binding protein
  misc_feature (1)..(111): NCBI GI NO: 430947 NR Description: PSI type III chlorophyll a/b-binding protein
  misc_feature (1)..(111): NCBI GI NO: 21554335 NR Description: PSI type III chlorophyll a/b-binding protein
  misc_feature (1)..(111): NCBI GI NO: 82080 NR Description: chlorophyll a/b-binding protein type III precursor
  misc_feature (1)..(111): NCBI GI NO: 115813 NR Description: Chlorophyll A-B binding protein 8
  misc_feature (1)..(111): NCBI GI NO: 7443229 NR Description: probable chlorophyll a/b-binding protein type III precursor
  misc_feature (1)..(111): NCBI GI NO: 99487 NR Description: chlorophyll a/b-binding protein
  misc_feature (1)..(102): NCBI GI NO: 7271947 NR Description: chlorophyll a/b-binding protein type III
  misc_feature (1)..(111): NCBI GI NO: 37780998 NR Description: chlorophyll a/b binding protein [Vitis vinifera]
  misc_feature (1)..(107): NCBI GI NO: 40714511 NR Description: light-harvesting chlorophyll-a/b protein of photosystem I
MGFAEHRRLQDWYNPGSMGKQYFLGLEKGLAGSGNPAYPGGPFFNPLGFGKDEKSLKELKLKEVKNGRLAMLAILGYFIQGLVTGVGPYQNLLDHLADPVNNNVLTSLKFH

SEQ ID NO: 5046 - DNA, 1355 bp, Arabidopsis thaliana
  misc_feature (1)..(1355): Ceres Seq. ID no. 13575049
atcatttccctttctcttcccattttagtcttcctataacttcttctcaatcctctctcatatcttttttcttagtttaaatttcaataaaatagaaaaaaacatatacaaatctacagagaagagaagctttattttaatcttatgtgtgtgtgtgtgttttatataatttttattttttttcaaattaaaatctcttctttgcttttgatgtgggcatggctggtcttgatctaggcacagcttttcgttacgttaatcaccagctccatcgtcccgatctccaccttcaccacaattcctcctccgatgacgtcactcccggagccgggatgggtcatttcaccgtcgacgacgaagacaacaacaacaaccatcaaggtcttgacttagcctctggtggaggatcaggaagctctggaggaggaggaggtcacggcgggggaggagacgtcgttggtcgtcgtccacgtggcagaccaccgggatccaagaacaaaccgaaacctccggtaattatcacgcgcgagagcgcaaacactctaagagctcacattcttgaagtaacaaacggctgcgatgttttcgactgcgttgcgacttatgctcgtcggagacagcgagggatctgcgttctgagcggtagcggaacggtcacgaacgtcagcatacgtcagccatctgcggctggagcggttgtgacgctacaaggaacgttcgagattctttctctctccggatcgtttcttcctcctccggcacctcccggagcaacgagtttgacaattttcttagccggaggacaaggtcaggtggttggaggaagcgttgtgggtgagcttacggcggctggaccggtgattgtgattgcagcttcgtttactaatgttgcttatgagagacttcctttagaagaagatgagcagcagcaacagcttggaggaggatctaacggcggaggtaatttgtttccggaggtggcagctggaggaggaggaggacttccgttctttaatttaccgatgaatatgcaaccaaatgtgcaacttccggtggaaggttggccggggaattccggtggaagaggtcctttctgatgtgtatatattgataatcattatatatataccggcggagaagcttttccggcgaagaatttgcgagagtgaagaaaggttagaaaagcttttaatggactaatgaatttcaaattatcatcgtgatttcggacattgtcttgttcatcatgttaagcttaggtttattttttgtcgtttgtagaattttatgtttgaatccttttttttttctgtgaaactctattgtgttcgtctgcgaaggaaaaaaaaattctc

SEQ ID NO: 5047 - protein, 292 aa, Arabidopsis thaliana
  peptide (1)..(292): Ceres Seq. ID no. 13575050
  misc_feature (1)..(292): NCBI GI NO: 15236657 NR Description: expressed protein [Arabidopsis thaliana]
  misc_feature (1)..(292): NCBI GI NO: 15226945 NR Description: hypothetical protein [Arabidopsis thaliana]
  misc_feature (1)..(292): NCBI GI NO: 38346718 NR Description: OSJNBa0086O06.16
  misc_feature (18)..(292): NCBI GI NO: 34905212 NR Description: P0672D01.8
  misc_feature (43)..(278): NCBI GI NO: 15234404 NR Description: DNA-binding protein -related
  misc_feature (44)..(250): NCBI GI NO: 15235815 NR Description: DNA binding protein -related
  misc_feature (45)..(285): NCBI GI NO: 15225475 NR Description: AT-hook DNA-binding protein -related
  misc_feature (16)..(290): NCBI GI NO: 18396925 NR Description: expressed protein [Arabidopsis thaliana]
  misc_feature (46)..(258): NCBI GI NO: 34902080 NR Description: unknown protein
  misc_feature (75)..(274): NCBI GI NO: 18414224 NR Description: expressed protein [Arabidopsis thaliana]
MAGLDLGTAFRYVNHQLHRPDLHLHHNSSSDDVTPGAGMGHFTVDDEDNNNNHQGLDLASGGGSGSSGGGGGHGGGGDVVGRRPRGRPPGSKNKPKPPVIITRESANTLRAHILEVTNGCDVFDCVATYARRRQRGICVLSGSGTVTNVSIRQPSAAGAVVTLQGTFEILSLSGSFLPPPAPPGATSLTIFLAGGQGQVVGGSVVGELTAAGPVIVIAASFTNVAYERLPLEEDEQQQQLGGGSNGGGNLFPEVAAGGGGGLPFFNLPMNMQPNVQLPVEGWPGNSGGRGPF

SEQ ID NO: 5048 - protein, 254 aa, Arabidopsis thaliana
  peptide (1)..(254): Ceres Seq. ID no. 13575051
  misc_feature (1)..(254): NCBI GI NO: 15236657 NR Description: expressed protein [Arabidopsis thaliana]
  misc_feature (1)..(254): NCBI GI NO: 15226945 NR Description: hypothetical protein [Arabidopsis thaliana]
  misc_feature (1)..(254): NCBI GI NO: 38346718 NR Description: OSJNBa0086O06.16
  misc_feature (1)..(254): NCBI GI NO: 34905212 NR Description: P0672D01.8
  misc_feature (5)..(240): NCBI GI NO: 15234404 NR Description: DNA-binding protein -related
  misc_feature (6)..(212): NCBI GI NO: 15235815 NR Description: DNA binding protein -related
  misc_feature (7)..(247): NCBI GI NO: 15225475 NR Description: AT-hook DNA-binding protein -related
  misc_feature (1)..(252): NCBI GI NO: 18396925 NR Description: expressed protein [Arabidopsis thaliana]
  misc_feature (8)..(220): NCBI GI NO: 34902080 NR Description: unknown protein
  misc_feature (37)..(236): NCBI GI NO: 18414224 NR Description: expressed protein [Arabidopsis thaliana]
MGHFTVDDEDNNNNHQGLDLASGGGSGSSGGGGGHGGGGDVVGRRPRGRPPGSKNKPKPPVIITRESANTLRAHILEVTNGCDVFDCVATYARRRQRGICVLSGSGTVTNVSIRQPSAAGAVVTLQGTFEILSLSGSFLPPPAPPGATSLTIFLAGGQGQVVGGSVVGELTAAGPVIVIAASFTNVAYERLPLEEDEQQQQLGGGSNGGGNLFPEVAAGGGGGLPFFNLPMNMQPNVQLPVEGWPGNSGGRGPF

SEQ ID NO: 5049 - DNA, 1356 bp, Arabidopsis thaliana
  misc_feature (1)..(1356): Ceres Seq. ID no. 12329865
actagtgatcagtgataatctattaatcatctaggtggcaaaagcagcatcgttgagaacgaagaagcttgaaaaagttgcgagctcagagaatctggaagtagcaaaatttggcggctttaactcagcaatttgttctgtacatgaagagagcattcagctcacagttacgctctgcctatccagcttctaaatctactcactttggtcgagtcatggcttcttctggatctgaggcaaaagctaattacgcacccatatctaccaatgaacctgttgtgtctgttgattggctccactctaatcttggagatgctgatataaaggttttggatgcctcatggtacatggcacatgagcaaagaaatccaatccaagagtatcaagttgctcatattccaggtgctctcttctttgatttgaatggaatagcagatcgaaaaacaaatttacgacacatgctaccatctgaggaagcttttgctgctggttgttctgctcttggaatcgagaacaacgatggagtggttgtgtatgatggaatggggctctttagtgcagctcgtgtatggtggatgtttagagtctttggacatgacaaagtatgggtacttgatggaggcttgccgaaatggcgtgcttcaggctatgacgttgaatccagtgtttcaaatgatgccattttgaaagccagtgcagcaactgaggctatagagaagatctatcaaggacaaacaattagcccaataacttttcagacgaagttccggccacatcttgtattggcacttgatcaggtgaaggaaaacatcgaggataagacttatcagcacatcgatgcgcgttcaaaggctagatttgacggtattgctccagaaccttggaagggtttaccgagtggtcatatacccggtagcaagtgtgtcccttttcccctaatgtttgattcctctcaaacactgttaccagcagaggagctgaagaagcagtttgaacaggaagacatatctctggacagtccgattgcggcctcatgtggaaccggtgtaacagcttgtattttggcattgggactttatcgtctgggaaaaactaatgtggcaatctatgatgggtcttggactgaatgggcaactgcaccaaacttgcccatagtgggttcttcttcataagaaagtccaagaaaaagctacaagatcacaagccagtggatatatatttataagcttagcttggttcaatccatttctgtgttaaactttaacaaatttgctgggagggttgtattagtattatacatcagtattcaggattcttgagtttggtctcatctttgtggagattgattaaaagtcc

SEQ ID NO: 5050 - protein, 342 aa, Arabidopsis thaliana
  peptide (1)..(342): Ceres Seq. ID no. 12329866
  misc_feature (47)..(167): Pfam Name: Pfam Description:  Rhodanese-like domain
  misc_feature (1)..(342): NCBI GI NO: 25456716 NR Description: thiosulfate sulfurtransferase (EC 2.8.1.1)
  misc_feature (1)..(342): NCBI GI NO: 30684873 NR Description: mercaptopyruvate sulfurtransferase (Mst2/Rdh2)
  misc_feature (25)..(342): NCBI GI NO: 18394364 NR Description: mercaptopyruvate sulfurtransferase
  misc_feature (25)..(342): NCBI GI NO: 25288797 NR Description: hypothetical protein F3O9.26
  misc_feature (1)..(342): NCBI GI NO: 18412307 NR Description: mercaptopyruvate sulfurtransferase
  misc_feature (1)..(342): NCBI GI NO: 25288794 NR Description: thiosulfate sulfurtransferase (EC 2
  misc_feature (1)..(337): NCBI GI NO: 4406372 NR Description: thiosulfate sulfurtransferase [Datisca glomerata]
  misc_feature (39)..(341): NCBI GI NO: 14571545 NR Description: thiosulfate transferase [Triticum aestivum]
  misc_feature (41)..(195): NCBI GI NO: 27381801 NR Description: thiosulfate sulfurtransferase
  misc_feature (201)..(337): NCBI GI NO: 27381801 NR Description: thiosulfate sulfurtransferase
MKRAFSSQLRSAYPASKSTHFGRVMASSGSEAKANYAPISTNEPVVSVDWLHSNLGDADIKVLDASWYMAHEQRNPIQEYQVAHIPGALFFDLNGIADRKTNLRHMLPSEEAFAAGCSALGIENNDGVVVYDGMGLFSAARVWWMFRVFGHDKVWVLDGGLPKWRASGYDVESSVSNDAILKASAATEAIEKIYQGQTISPITFQTKFRPHLVLALDQVKENIEDKTYQHIDARSKARFDGIAPEPWKGLPSGHIPGSKCVPFPLMFDSSQTLLPAEELKKQFEQEDISLDSPIAASCGTGVTACILALGLYRLGKTNVAIYDGSWTEWATAPNLPIVGSSS

SEQ ID NO: 5051 - protein, 318 aa, Arabidopsis thaliana
  peptide (1)..(318): Ceres Seq. ID no. 12329867
  misc_feature (23)..(143): Pfam Name: Pfam Description:  Rhodanese-like domain
  misc_feature (1)..(318): NCBI GI NO: 25456716 NR Description: thiosulfate sulfurtransferase (EC 2.8.1.1)
  misc_feature (1)..(318): NCBI GI NO: 30684873 NR Description: mercaptopyruvate sulfurtransferase (Mst2/Rdh2)
  misc_feature (1)..(318): NCBI GI NO: 18394364 NR Description: mercaptopyruvate sulfurtransferase
  misc_feature (1)..(318): NCBI GI NO: 25288797 NR Description: hypothetical protein F3O9.26
  misc_feature (1)..(318): NCBI GI NO: 18412307 NR Description: mercaptopyruvate sulfurtransferase
  misc_feature (1)..(318): NCBI GI NO: 25288794 NR Description: thiosulfate sulfurtransferase (EC 2
  misc_feature (1)..(313): NCBI GI NO: 4406372 NR Description: thiosulfate sulfurtransferase [Datisca glomerata]
  misc_feature (15)..(317): NCBI GI NO: 14571545 NR Description: thiosulfate transferase [Triticum aestivum]
  misc_feature (17)..(171): NCBI GI NO: 27381801 NR Description: thiosulfate sulfurtransferase
  misc_feature (177)..(313): NCBI GI NO: 27381801 NR Description: thiosulfate sulfurtransferase
MASSGSEAKANYAPISTNEPVVSVDWLHSNLGDADIKVLDASWYMAHEQRNPIQEYQVAHIPGALFFDLNGIADRKTNLRHMLPSEEAFAAGCSALGIENNDGVVVYDGMGLFSAARVWWMFRVFGHDKVWVLDGGLPKWRASGYDVESSVSNDAILKASAATEAIEKIYQGQTISPITFQTKFRPHLVLALDQVKENIEDKTYQHIDARSKARFDGIAPEPWKGLPSGHIPGSKCVPFPLMFDSSQTLLPAEELKKQFEQEDISLDSPIAASCGTGVTACILALGLYRLGKTNVAIYDGSWTEWATAPNLPIVGSSS

SEQ ID NO: 5052 - protein, 274 aa, Arabidopsis thaliana
  peptide (1)..(274): Ceres Seq. ID no. 12329868
  misc_feature (1)..(99): Pfam Name: Pfam Description:  Rhodanese-like domain
  misc_feature (1)..(274): NCBI GI NO: 25456716 NR Description: thiosulfate sulfurtransferase (EC 2.8.1.1)
  misc_feature (1)..(274): NCBI GI NO: 30684873 NR Description: mercaptopyruvate sulfurtransferase (Mst2/Rdh2)
  misc_feature (1)..(274): NCBI GI NO: 18394364 NR Description: mercaptopyruvate sulfurtransferase
  misc_feature (1)..(274): NCBI GI NO: 25288797 NR Description: hypothetical protein F3O9.26
  misc_feature (1)..(274): NCBI GI NO: 18412307 NR Description: mercaptopyruvate sulfurtransferase
  misc_feature (1)..(274): NCBI GI NO: 25288794 NR Description: thiosulfate sulfurtransferase (EC 2
  misc_feature (1)..(269): NCBI GI NO: 4406372 NR Description: thiosulfate sulfurtransferase [Datisca glomerata]
  misc_feature (1)..(273): NCBI GI NO: 14571545 NR Description: thiosulfate transferase [Triticum aestivum]
  misc_feature (1)..(127): NCBI GI NO: 27381801 NR Description: thiosulfate sulfurtransferase
  misc_feature (133)..(269): NCBI GI NO: 27381801 NR Description: thiosulfate sulfurtransferase
MAHEQRNPIQEYQVAHIPGALFFDLNGIADRKTNLRHMLPSEEAFAAGCSALGIENNDGVVVYDGMGLFSAARVWWMFRVFGHDKVWVLDGGLPKWRASGYDVESSVSNDAILKASAATEAIEKIYQGQTISPITFQTKFRPHLVLALDQVKENIEDKTYQHIDARSKARFDGIAPEPWKGLPSGHIPGSKCVPFPLMFDSSQTLLPAEELKKQFEQEDISLDSPIAASCGTGVTACILALGLYRLGKTNVAIYDGSWTEWATAPNLPIVGSSS

SEQ ID NO: 5053 - DNA, 2458 bp, Arabidopsis thaliana
  misc_feature (1)..(2458): Ceres Seq. ID no. 13488149
tctcaaatctcaaatctcaaattttttattaaacgcctacatatattactcacacttgttttcagatcataaagttttttcttggatttatatataatgcactaatacatacacacccacatgcttacacacatgttcgacctgtaatcagtaaaagaaacatcagagaggaagagaaggagaagaaaagatggagatgggtcgtctggtcttcgggttgtgtttgattcttattgtgggtacgtttcttgaattctccggcggtgctacggcggcgaagggagtaacgtacgacggacggtctttgataatcgatggacagaggaagcttctcttctccggttccatccactatcctcgcagcacacccgagatgtggccgtctctgataaaaaagacaaaggaaggaggcatcgatgtgatccaaacgtacgttttctggaacctccatgagcctaagcttggacagtatgattttagtggaagaaacgatttagtgaagtttattaaagaaattagatcacaaggtctctatgtctgtctacgtattggacccttcatcgaagccgagtggaattacgggggattgccattttggttacgggatgtacccggtatggtataccgaaccgacaatgagcccttcaagttccacatgcaaaaattcaccgctaagatcgtagatttgatgaaatctgagggcttatatgcttctcaaggaggtccaattattctttctcagatcgagaacgagtatgcaaacgtggagggggctttccatgagaaaggagcatcgtacatcaagtgggcaggtcaaatggcggtcgggcttaagaccggagtgccatggatcatgtgcaagtcgcccgacgctcctgatcccgtgatcaatacctgcaacgggatgaaatgcggcgagacttttcctggaccaaactcacccaataagccgaaaatgtggactgaggattggacttcattctttcaggtttatggaaaagagccttatattagatctgctgaggatattgctttccatgccgctcttttcgttgcaaaaaatggaagttacatcaactattacatgtaccatggtggaacaaactttggaaggacttcatcttcgtatttcattacaggatactatgatcaagctcctctcgacgaatacggtcttttaagacagcctaagtacggtcatttgaaggagcttcacgctgcgataaaatcctctgcaaatcctctgcttcaaggaaagcaaacgattctctccttgggaccaatgcaacaagcttatgtctttgaagacgcgaacaatggatgcgttgcgtttctggtaaacaatgacgctaaagccagtcaaatacaattcagaaacaatgcgtatagcttgagtcccaagtcaattggtattcttcagaactgcaaaaacctaatttatgaaactgcaaaagtgaatgtgaagatgaatacgagagttacaacgccggttcaagtgttcaacgttcccgataactggaatttgtttagagaaacaatccctgcattcccaggcacatctttgaagacaaatgctttgttggaacacactaatttgacaaaggacaaaactgattatctttggtacacttcaagctttaagctggattcaccctgcacgaacccgtctatctacacagaatcatcaggacatgttgtccacgtgttcgtcaacaatgcactagcaggatctggacatggaagcagagacataagggtagttaaactacaagctccggttagcttaatcaatggacaaaacaatatatcgatcctcagcggcatggttggtctaccggactctggagcttacatggagaggagatcttatggactaaccaaagtacaaattagctgtggcgggacaaaacccatcgatttgagtagatctcaatggggttactcggtgggtttgcttggagagaaagttaggttatatcaatggaagaatttaaatagagtgaagtggagtatgaataaagctggactaattaagaaccgccccctcgcttggtacaagacaacgtttgatgggccgaatggagatgggcccgtgggcctacacatgtcgagtatgggtaaaggagaaatttgggtgaatggtgaaagcattggtcgttattgggtctcgtttctcacccctgctggacaaccttctcaatctatatatcatattcctcgggcgttcttaaaaccatctggaaatttattggtggtatttgaagaggaaggtggtgatcctcttgggatatctttgaatacaatatcggttgttggttcgagtcaagctcaatctcaattctcctgaagattattttttaaaaaatggtttttgggtaattgggggtgttttataaaccaaacaatacattatattgaaatgatacaatacacaaattgaatgaaatatacaggtttc

SEQ ID NO: 5054 - protein, 718 aa, Arabidopsis thaliana
  peptide (1)..(718): Ceres Seq. ID no. 13488150
  misc_feature (32)..(707): NCBI GI NO: 26451843 NR Description: unknown protein [Arabidopsis thaliana]
  misc_feature (32)..(707): NCBI GI NO: 30699255 NR Description: glycosyl hydrolase family 35 (beta-galactosidase)
  misc_feature (299)..(718): NCBI GI NO: 16649045 NR Description: beta-galactosidase [Arabidopsis thaliana]
  misc_feature (32)..(646): NCBI GI NO: 12323389 NR Description: putative beta-galactosidase, 3' partial; 3669-1
  misc_feature (32)..(664): NCBI GI NO: 25326165 NR Description: probable beta-galactosidase
  misc_feature (12)..(706): NCBI GI NO: 10862896 NR Description: putative beta-galactosidase [Nicotiana tabacum]
  misc_feature (12)..(693): NCBI GI NO: 25326168 NR Description: probable beta-galactosidase
  misc_feature (30)..(693): NCBI GI NO: 30679742 NR Description: glycosyl hydrolase family 35 (beta-galactosidase)
  misc_feature (5)..(663): NCBI GI NO: 18419821 NR Description: glycosyl hydrolase family 35 (beta-galactosidase)
  misc_feature (5)..(663): NCBI GI NO: 30690633 NR Description: glycosyl hydrolase family 35 (beta-galactosidase)
MEMGRLVFGLCLILIVGTFLEFSGGATAAKGVTYDGRSLIIDGQRKLLFSGSIHYPRSTPEMWPSLIKKTKEGGIDVIQTYVFWNLHEPKLGQYDFSGRNDLVKFIKEIRSQGLYVCLRIGPFIEAEWNYGGLPFWLRDVPGMVYRTDNEPFKFHMQKFTAKIVDLMKSEGLYASQGGPIILSQIENEYANVEGAFHEKGASYIKWAGQMAVGLKTGVPWIMCKSPDAPDPVINTCNGMKCGETFPGPNSPNKPKMWTEDWTSFFQVYGKEPYIRSAEDIAFHAALFVAKNGSYINYYMYHGGTNFGRTSSSYFITGYYDQAPLDEYGLLRQPKYGHLKELHAAIKSSANPLLQGKQTILSLGPMQQAYVFEDANNGCVAFLVNNDAKASQIQFRNNAYSLSPKSIGILQNCKNLIYETAKVNVKMNTRVTTPVQVFNVPDNWNLFRETIPAFPGTSLKTNALLEHTNLTKDKTDYLWYTSSFKLDSPCTNPSIYTESSGHVVHVFVNNALAGSGHGSRDIRVVKLQAPVSLINGQNNISILSGMVGLPDSGAYMERRSYGLTKVQISCGGTKPIDLSRSQWGYSVGLLGEKVRLYQWKNLNRVKWSMNKAGLIKNRPLAWYKTTFDGPNGDGPVGLHMSSMGKGEIWVNGESIGRYWVSFLTPAGQPSQSIYHIPRAFLKPSGNLLVVFEEEGGDPLGISLNTISVVGSSQAQSQFS

SEQ ID NO: 5055 - protein, 716 aa, Arabidopsis thaliana
  peptide (1)..(716): Ceres Seq. ID no. 13488151
  misc_feature (30)..(705): NCBI GI NO: 26451843 NR Description: unknown protein [Arabidopsis thaliana]
  misc_feature (30)..(705): NCBI GI NO: 30699255 NR Description: glycosyl hydrolase family 35 (beta-galactosidase)
  misc_feature (297)..(716): NCBI GI NO: 16649045 NR Description: beta-galactosidase [Arabidopsis thaliana]
  misc_feature (30)..(644): NCBI GI NO: 12323389 NR Description: putative beta-galactosidase, 3' partial; 3669-1
  misc_feature (30)..(662): NCBI GI NO: 25326165 NR Description: probable beta-galactosidase
  misc_feature (10)..(704): NCBI GI NO: 10862896 NR Description: putative beta-galactosidase [Nicotiana tabacum]
  misc_feature (10)..(691): NCBI GI NO: 25326168 NR Description: probable beta-galactosidase
  misc_feature (28)..(691): NCBI GI NO: 30679742 NR Description: glycosyl hydrolase family 35 (beta-galactosidase)
  misc_feature (3)..(661): NCBI GI NO: 18419821 NR Description: glycosyl hydrolase family 35 (beta-galactosidase)
  misc_feature (3)..(661): NCBI GI NO: 25326166 NR Description: beta-galactosidase like protein
MGRLVFGLCLILIVGTFLEFSGGATAAKGVTYDGRSLIIDGQRKLLFSGSIHYPRSTPEMWPSLIKKTKEGGIDVIQTYVFWNLHEPKLGQYDFSGRNDLVKFIKEIRSQGLYVCLRIGPFIEAEWNYGGLPFWLRDVPGMVYRTDNEPFKFHMQKFTAKIVDLMKSEGLYASQGGPIILSQIENEYANVEGAFHEKGASYIKWAGQMAVGLKTGVPWIMCKSPDAPDPVINTCNGMKCGETFPGPNSPNKPKMWTEDWTSFFQVYGKEPYIRSAEDIAFHAALFVAKNGSYINYYMYHGGTNFGRTSSSYFITGYYDQAPLDEYGLLRQPKYGHLKELHAAIKSSANPLLQGKQTILSLGPMQQAYVFEDANNGCVAFLVNNDAKASQIQFRNNAYSLSPKSIGILQNCKNLIYETAKVNVKMNTRVTTPVQVFNVPDNWNLFRETIPAFPGTSLKTNALLEHTNLTKDKTDYLWYTSSFKLDSPCTNPSIYTESSGHVVHVFVNNALAGSGHGSRDIRVVKLQAPVSLINGQNNISILSGMVGLPDSGAYMERRSYGLTKVQISCGGTKPIDLSRSQWGYSVGLLGEKVRLYQWKNLNRVKWSMNKAGLIKNRPLAWYKTTFDGPNGDGPVGLHMSSMGKGEIWVNGESIGRYWVSFLTPAGQPSQSIYHIPRAFLKPSGNLLVVFEEEGGDPLGISLNTISVVGSSQAQSQFS

SEQ ID NO: 5056 - protein, 657 aa, Arabidopsis thaliana
  peptide (1)..(657): Ceres Seq. ID no. 13488152
  misc_feature (1)..(646): NCBI GI NO: 26451843 NR Description: unknown protein [Arabidopsis thaliana]
  misc_feature (1)..(646): NCBI GI NO: 30699255 NR Description: glycosyl hydrolase family 35 (beta-galactosidase)
  misc_feature (238)..(657): NCBI GI NO: 16649045 NR Description: beta-galactosidase [Arabidopsis thaliana]
  misc_feature (1)..(585): NCBI GI NO: 12323389 NR Description: putative beta-galactosidase, 3' partial; 3669-1
  misc_feature (1)..(603): NCBI GI NO: 25326165 NR Description: probable beta-galactosidase
  misc_feature (1)..(645): NCBI GI NO: 10862896 NR Description: putative beta-galactosidase [Nicotiana tabacum]
  misc_feature (1)..(632): NCBI GI NO: 25326168 NR Description: probable beta-galactosidase
  misc_feature (1)..(632): NCBI GI NO: 30679742 NR Description: glycosyl hydrolase family 35 (beta-galactosidase)
  misc_feature (1)..(602): NCBI GI NO: 18419821 NR Description: glycosyl hydrolase family 35 (beta-galactosidase)
  misc_feature (1)..(602): NCBI GI NO: 30690633 NR Description: glycosyl hydrolase family 35 (beta-galactosidase)
MWPSLIKKTKEGGIDVIQTYVFWNLHEPKLGQYDFSGRNDLVKFIKEIRSQGLYVCLRIGPFIEAEWNYGGLPFWLRDVPGMVYRTDNEPFKFHMQKFTAKIVDLMKSEGLYASQGGPIILSQIENEYANVEGAFHEKGASYIKWAGQMAVGLKTGVPWIMCKSPDAPDPVINTCNGMKCGETFPGPNSPNKPKMWTEDWTSFFQVYGKEPYIRSAEDIAFHAALFVAKNGSYINYYMYHGGTNFGRTSSSYFITGYYDQAPLDEYGLLRQPKYGHLKELHAAIKSSANPLLQGKQTILSLGPMQQAYVFEDANNGCVAFLVNNDAKASQIQFRNNAYSLSPKSIGILQNCKNLIYETAKVNVKMNTRVTTPVQVFNVPDNWNLFRETIPAFPGTSLKTNALLEHTNLTKDKTDYLWYTSSFKLDSPCTNPSIYTESSGHVVHVFVNNALAGSGHGSRDIRVVKLQAPVSLINGQNNISILSGMVGLPDSGAYMERRSYGLTKVQISCGGTKPIDLSRSQWGYSVGLLGEKVRLYQWKNLNRVKWSMNKAGLIKNRPLAWYKTTFDGPNGDGPVGLHMSSMGKGEIWVNGESIGRYWVSFLTPAGQPSQSIYHIPRAFLKPSGNLLVVFEEEGGDPLGISLNTISVVGSSQAQSQFS

SEQ ID NO: 5057 - DNA, 1437 bp, Arabidopsis thaliana
  misc_feature (1)..(1437): Ceres Seq. ID no. 12371961
atcaaattaaaaccctccagcctccaacaacaaaatttaccaacactctctctttctctttctctctgaaaacttaaaacgatggctataaccgccactcaaaacgacggcgtttcactaaacgccaataagatttcgtatgatcttgtggaaactgatgttgagatcatcacctccggtcgtcgtagtattccggcacactccggcatcctcgcttcggtctcaccggtactgacgaacatcatcgagaagccgaggaagattcacggcggatcatcgaagaaagttattaagattctcggtgttccatgcgacgccgtttcagtcttcgtcagattcctctattctccgagtgtcacggagaatgagatggaaaaatacggaatccatctactggctttatcacacgtgtatatggtgactcagttaaagcaacggtgcactaaaggcgtcggtgagagagtaaccgccgaaaacgttgtcgatattctccagctggctcgtctctgcgacgcacctgacctctgtctcaagtgtatgcgattcattcactacaagttcaagaccgttgaacagacagaaggatggaagtttcttcaagaacacgatccttttcttgaacttgacattctccaattcatcgacgatgcagaatcgaggaagaaaagaagaaggagacacagacgagaacagaatctgtatttgcagctgagtgaagccatggaatgtatagaacacatatgcaccgaaggttgcacactggtcggaccatcgtctaacttagacaacaagtcaacatgtcaagcaaaacccggtccatgcagtgcgttttcgacttgttaaggacttcaacttcttatacgtcactttgcagtatgcaagaaaagagtcgatggcaaaggttgtgtccgatgcaagagaatgattcaactccttagactccattcttcgatttgtgaccaatctgaatcttgccgtgtccctctttgcaggcaatataagaatagaggtgaaaaggacaagaaaatggttgaggacacgaagtggaaggttctggtgagaagagtagcgtctgctaaagccatgtcttcgttgtctcaatcaaagaagaaaaaaagtgaagtgttatttaaagaagaagcagaagatttgatcagaatccggaacaagttaatgtgaatatacaatatatgtgtttttattagattatatagtgagcgattgttagaagccattaattacttgagtcggaaggtttatttgtttgttatttgtctctcggactggttgattgggttaaacttgtcaatgagtaaccctttgaatctgtcgttttgtttggtcggtcgaattatatagaaatgtattattggttataaaatggtattagggtttttggagactttgtggcaaaaagtatacagattgatccggttt

SEQ ID NO: 5058 - protein, 253 aa, Arabidopsis thaliana
  peptide (1)..(253): Ceres Seq. ID no. 12371962
  misc_feature (1)..(253): NCBI GI NO: 15242656 NR Description: putative protein; protein id: At5g63160.1
  misc_feature (1)..(253): NCBI GI NO: 18408618 NR Description: putative protein; protein id: At3g48360
  misc_feature (1)..(253): NCBI GI NO: 7487530 NR Description: hypothetical protein T29H11
  misc_feature (26)..(253): NCBI GI NO: 20804890 NR Description: P0497A05.15
  misc_feature (23)..(253): NCBI GI NO: 38345257 NR Description: OSJNBb0011N17.18
  misc_feature (16)..(253): NCBI GI NO: 15240763 NR Description: putative protein; protein id: At5g67480
  misc_feature (26)..(253): NCBI GI NO: 15221235 NR Description: hypothetical protein; protein id: At1g05690.1
  misc_feature (26)..(253): NCBI GI NO: 7485765 NR Description: hypothetical protein F19F18
  misc_feature (26)..(253): NCBI GI NO: 26453150 NR Description: unknown protein [Arabidopsis thaliana]
  misc_feature (26)..(253): NCBI GI NO: 18420081 NR Description: putative protein; protein id: At4g37610
MAITATQNDGVSLNANKISYDLVETDVEIITSGRRSIPAHSGILASVSPVLTNIIEKPRKIHGGSSKKVIKILGVPCDAVSVFVRFLYSPSVTENEMEKYGIHLLALSHVYMVTQLKQRCTKGVGERVTAENVVDILQLARLCDAPDLCLKCMRFIHYKFKTVEQTEGWKFLQEHDPFLELDILQFIDDAESRKKRRRRHRREQNLYLQLSEAMECIEHICTEGCTLVGPSSNLDNKSTCQAKPGPCSAFSTC

SEQ ID NO: 5059 - protein, 157 aa, Arabidopsis thaliana
  peptide (1)..(157): Ceres Seq. ID no. 12371963
  misc_feature (1)..(157): NCBI GI NO: 15242656 NR Description: putative protein; protein id: At5g63160.1
  misc_feature (1)..(157): NCBI GI NO: 18408618 NR Description: putative protein; protein id: At3g48360
  misc_feature (1)..(157): NCBI GI NO: 7487530 NR Description: hypothetical protein T29H11
  misc_feature (1)..(157): NCBI GI NO: 20804890 NR Description: P0497A05.15
  misc_feature (1)..(157): NCBI GI NO: 38345257 NR Description: OSJNBb0011N17.18
  misc_feature (1)..(157): NCBI GI NO: 15240763 NR Description: putative protein; protein id: At5g67480
  misc_feature (1)..(157): NCBI GI NO: 15221235 NR Description: hypothetical protein; protein id: At1g05690.1
  misc_feature (1)..(157): NCBI GI NO: 7485765 NR Description: hypothetical protein F19F18
  misc_feature (1)..(157): NCBI GI NO: 26453150 NR Description: unknown protein [Arabidopsis thaliana]
  misc_feature (1)..(157): NCBI GI NO: 18420081 NR Description: putative protein; protein id: At4g37610
MEKYGIHLLALSHVYMVTQLKQRCTKGVGERVTAENVVDILQLARLCDAPDLCLKCMRFIHYKFKTVEQTEGWKFLQEHDPFLELDILQFIDDAESRKKRRRRHRREQNLYLQLSEAMECIEHICTEGCTLVGPSSNLDNKSTCQAKPGPCSAFSTC

SEQ ID NO: 5060 - protein, 142 aa, Arabidopsis thaliana
  peptide (1)..(142): Ceres Seq. ID no. 12371964
  misc_feature (1)..(142): NCBI GI NO: 15242656 NR Description: putative protein; protein id: At5g63160.1
  misc_feature (1)..(142): NCBI GI NO: 18408618 NR Description: putative protein; protein id: At3g48360
  misc_feature (1)..(142): NCBI GI NO: 7487530 NR Description: hypothetical protein T29H11
  misc_feature (1)..(142): NCBI GI NO: 20804890 NR Description: P0497A05.15
  misc_feature (1)..(142): NCBI GI NO: 38345257 NR Description: OSJNBb0011N17.18
  misc_feature (1)..(142): NCBI GI NO: 15240763 NR Description: putative protein; protein id: At5g67480
  misc_feature (1)..(142): NCBI GI NO: 15221235 NR Description: hypothetical protein; protein id: At1g05690.1
  misc_feature (1)..(142): NCBI GI NO: 7485765 NR Description: hypothetical protein F19F18
  misc_feature (1)..(142): NCBI GI NO: 18420081 NR Description: putative protein; protein id: At4g37610
  misc_feature (1)..(142): NCBI GI NO: 26453150 NR Description: unknown protein [Arabidopsis thaliana]
MVTQLKQRCTKGVGERVTAENVVDILQLARLCDAPDLCLKCMRFIHYKFKTVEQTEGWKFLQEHDPFLELDILQFIDDAESRKKRRRRHRREQNLYLQLSEAMECIEHICTEGCTLVGPSSNLDNKSTCQAKPGPCSAFSTC

SEQ ID NO: 5061 - DNA, 2412 bp, Arabidopsis thaliana
  misc_feature (1)..(2412): Ceres Seq. ID no. 13494097
aaaaaaagcgtcgttgagaggttagagacgaaggaaggaggcagaggatagagagatagcgaggctaatggatcagtgactcactgagtcagattttaccgattcattgcctccattgaagcctcttttctcagattctacgcttcactgtctcttctccatgtgcgtctcctcctcctccgtttcttcagatcttgctttccggtgacggttttaatcttcttctctctggtaacacgtataaagcatggcttacctgatgtagacatgtagtgttaggctaaagactcctcttttcacttctgtcttgttgagtttgtgttggtttaaggctttaagccaaaggcgttgttggtctgacaagatggcaatggcggtgtttaaggctcctctaaaaggggaatttcatggggctagaaagatggaagggaagcaatataagcaccatctgcttcagcaacagtctacagggagaagacgtgtgttcgtgcaaaccgatactggctgtgtgttgggagttgagttggatcgtaatgacaatgttcatactgtgaagaaaaggcttcagattgcgtttaactttcctactgaggaaagctctttgacctttggggatatggtgttgaagaatgacttgagtgctgtgaggaatgattctccgcttctcttaaagcgtaacttaatgcacagaagctcttctactccgtgtctttcacctactgggaatgatctgcagaggaaagatcgaagtggtcctattgagatacttagtcactcgccctgttttctgtctttgaagcaaacagcgaatgacattgttaaggcgatgaagatgggtgttgaaccaatccctgttaatggtgggcttggaggggcatactattttagggatgaaaagggtcaaagtgttgctattgtcaagcctacggatgaagagccgtttgcccctaacaatcctaaaggcttcgtagggaaagcgcttgggcagcctggtttaaagccttctgtgcgggttggggaaaccgggtttagagaagttgctgcataccttcttgattatgatcactttgctaatgttcctcctacggctcttgtgaagataacacactctgttttcaatgtcaatgatggaatggatgggaacaaatctcgtgagaagaagaagctggtcagcagcaagattgcttcgttccagaagtttgtacctcatgattttgatgccagtgatcacgggacttcaagcttccctgtcgcttctgtgcaccgcattgggattttggacataaggattctcaacacagaccggcatggtggaaatcttttggtgaagaagcttgatgatggtggtgttgggaggtttggtcaagtggagcttattccaatagatcatggtctttgcttaccagaaacactcgaagatccttacttcgaatggattcattggcctcaggcttcaatacctttctctgaagaagaacttgactacatacaaagtcttgatccagtgaaagattgtgaaatgcttcgaagagagcttccgatgattcgagaggcttgtctcagggttctagttctctgtaccgttttccttaaagaagctgctgtttttggactttgtcttgcagagatcggtgagatgatgactcgagaatttcgtgcaggagaagaggaaccaagtgaactagaaatgttgtgtatcgaagccaagagattaaccactgaacaagacgttttgtctcccaagtcagatggagaaggagagacagagtttcagtttgatatagactacaatgagctagactcggtttatggctctgagacagaaaccgatgagttcttcgccaagaacccattttcaaacggacgttcttcacttggagagctcaaagagagcattgctgaagaagaagaagatgacgaagaggaggcaaaacttactctatctctctcaaagctttccacatcaatgaagaacaatctaagcaacaccatgggatccggatacctgaaacctccgaaagacaaccaaaccgacaaagcattggtaagtcacaagagcgcgaacgtgcagctcccgcttagcgtaaactttgtgaagttagccgacatgaaagaagttgaatgggttgtgttcttggagaggtttcaggagttgctttactcggcttttgcagaacgcaagaccatgacgttgaggaacacacagagacttggtacatcgtgcaagttttgagatcatacgagttcacataagagaagaccaaagatttcacttttacgagttttgaagcaattacttgttagctacgttaagattagtttacttttgtagcgaccacgagcacttgcaatgtgaagaaatgtttattttgcctgtaaatattctttaccatttttttttccctaacttcc

SEQ ID NO: 5062 - protein, 622 aa, Arabidopsis thaliana
  peptide (1)..(622): Ceres Seq. ID no. 13494098
  misc_feature (167)..(429): Pfam Name: Pfam Description:  Phosphatidylinositol 3- and 4-kinase
  misc_feature (1)..(525): NCBI GI NO: 18395629 NR Description: phosphatidylinositol 3- and 4-kinase family
  misc_feature (527)..(622): NCBI GI NO: 18395629 NR Description: phosphatidylinositol 3- and 4-kinase family
  misc_feature (1)..(525): NCBI GI NO: 25363315 NR Description: hypothetical protein At2g03890
  misc_feature (527)..(622): NCBI GI NO: 25363315 NR Description: hypothetical protein At2g03890
  misc_feature (1)..(622): NCBI GI NO: 18395825 NR Description: phosphatidylinositol 3- and 4-kinase family
  misc_feature (107)..(610): NCBI GI NO: 19310381 NR Description: At2g40850/T20B5.5 [Arabidopsis thaliana]
  misc_feature (107)..(610): NCBI GI NO: 15226765 NR Description: phosphatidylinositol 3- and 4-kinase family
  misc_feature (105)..(478): NCBI GI NO: 15228965 NR Description: phosphatidylinositol 3- and 4-kinase family
  misc_feature (223)..(474): NCBI GI NO: 34903186 NR Description: unnamed protein product
  misc_feature (117)..(429): NCBI GI NO: 34904388 NR Description: unnamed protein product
MAMAVFKAPLKGEFHGARKMEGKQYKHHLLQQQSTGRRRVFVQTDTGCVLGVELDRNDNVHTVKKRLQIAFNFPTEESSLTFGDMVLKNDLSAVRNDSPLLLKRNLMHRSSSTPCLSPTGNDLQRKDRSGPIEILSHSPCFLSLKQTANDIVKAMKMGVEPIPVNGGLGGAYYFRDEKGQSVAIVKPTDEEPFAPNNPKGFVGKALGQPGLKPSVRVGETGFREVAAYLLDYDHFANVPPTALVKITHSVFNVNDGMDGNKSREKKKLVSSKIASFQKFVPHDFDASDHGTSSFPVASVHRIGILDIRILNTDRHGGNLLVKKLDDGGVGRFGQVELIPIDHGLCLPETLEDPYFEWIHWPQASIPFSEEELDYIQSLDPVKDCEMLRRELPMIREACLRVLVLCTVFLKEAAVFGLCLAEIGEMMTREFRAGEEEPSELEMLCIEAKRLTTEQDVLSPKSDGEGETEFQFDIDYNELDSVYGSETETDEFFAKNPFSNGRSSLGELKESIAEEEEDDEEEAKLTLSLSKLSTSMKNNLSNTMGSGYLKPPKDNQTDKALVSHKSANVQLPLSVNFVKLADMKEVEWVVFLERFQELLYSAFAERKTMTLRNTQRLGTSCKF

SEQ ID NO: 5063 - protein, 620 aa, Arabidopsis thaliana
  peptide (1)..(620): Ceres Seq. ID no. 13494099
  misc_feature (165)..(427): Pfam Name: Pfam Description:  Phosphatidylinositol 3- and 4-kinase
  misc_feature (1)..(523): NCBI GI NO: 18395629 NR Description: phosphatidylinositol 3- and 4-kinase family
  misc_feature (525)..(620): NCBI GI NO: 18395629 NR Description: phosphatidylinositol 3- and 4-kinase family
  misc_feature (1)..(523): NCBI GI NO: 25363315 NR Description: hypothetical protein At2g03890
  misc_feature (525)..(620): NCBI GI NO: 25363315 NR Description: hypothetical protein At2g03890
  misc_feature (1)..(620): NCBI GI NO: 18395825 NR Description: phosphatidylinositol 3- and 4-kinase family
  misc_feature (105)..(608): NCBI GI NO: 19310381 NR Description: At2g40850/T20B5.5 [Arabidopsis thaliana]
  misc_feature (105)..(608): NCBI GI NO: 15226765 NR Description: phosphatidylinositol 3- and 4-kinase family
  misc_feature (103)..(476): NCBI GI NO: 15228965 NR Description: phosphatidylinositol 3- and 4-kinase family
  misc_feature (221)..(472): NCBI GI NO: 34903186 NR Description: unnamed protein product
  misc_feature (115)..(427): NCBI GI NO: 34904388 NR Description: unnamed protein product
MAVFKAPLKGEFHGARKMEGKQYKHHLLQQQSTGRRRVFVQTDTGCVLGVELDRNDNVHTVKKRLQIAFNFPTEESSLTFGDMVLKNDLSAVRNDSPLLLKRNLMHRSSSTPCLSPTGNDLQRKDRSGPIEILSHSPCFLSLKQTANDIVKAMKMGVEPIPVNGGLGGAYYFRDEKGQSVAIVKPTDEEPFAPNNPKGFVGKALGQPGLKPSVRVGETGFREVAAYLLDYDHFANVPPTALVKITHSVFNVNDGMDGNKSREKKKLVSSKIASFQKFVPHDFDASDHGTSSFPVASVHRIGILDIRILNTDRHGGNLLVKKLDDGGVGRFGQVELIPIDHGLCLPETLEDPYFEWIHWPQASIPFSEEELDYIQSLDPVKDCEMLRRELPMIREACLRVLVLCTVFLKEAAVFGLCLAEIGEMMTREFRAGEEEPSELEMLCIEAKRLTTEQDVLSPKSDGEGETEFQFDIDYNELDSVYGSETETDEFFAKNPFSNGRSSLGELKESIAEEEEDDEEEAKLTLSLSKLSTSMKNNLSNTMGSGYLKPPKDNQTDKALVSHKSANVQLPLSVNFVKLADMKEVEWVVFLERFQELLYSAFAERKTMTLRNTQRLGTSCKF

SEQ ID NO: 5064 - protein, 603 aa, Arabidopsis thaliana
  peptide (1)..(603): Ceres Seq. ID no. 13494100
  misc_feature (148)..(410): Pfam Name: Pfam Description:  Phosphatidylinositol 3- and 4-kinase
  misc_feature (1)..(506): NCBI GI NO: 18395629 NR Description: phosphatidylinositol 3- and 4-kinase family
  misc_feature (508)..(603): NCBI GI NO: 18395629 NR Description: phosphatidylinositol 3- and 4-kinase family
  misc_feature (1)..(506): NCBI GI NO: 25363315 NR Description: hypothetical protein At2g03890
  misc_feature (508)..(603): NCBI GI NO: 25363315 NR Description: hypothetical protein At2g03890
  misc_feature (1)..(603): NCBI GI NO: 18395825 NR Description: phosphatidylinositol 3- and 4-kinase family
  misc_feature (88)..(591): NCBI GI NO: 19310381 NR Description: At2g40850/T20B5.5 [Arabidopsis thaliana]
  misc_feature (88)..(591): NCBI GI NO: 15226765 NR Description: phosphatidylinositol 3- and 4-kinase family
  misc_feature (86)..(459): NCBI GI NO: 15228965 NR Description: phosphatidylinositol 3- and 4-kinase family
  misc_feature (204)..(455): NCBI GI NO: 34903186 NR Description: unnamed protein product
  misc_feature (98)..(410): NCBI GI NO: 34904388 NR Description: unnamed protein product
MEGKQYKHHLLQQQSTGRRRVFVQTDTGCVLGVELDRNDNVHTVKKRLQIAFNFPTEESSLTFGDMVLKNDLSAVRNDSPLLLKRNLMHRSSSTPCLSPTGNDLQRKDRSGPIEILSHSPCFLSLKQTANDIVKAMKMGVEPIPVNGGLGGAYYFRDEKGQSVAIVKPTDEEPFAPNNPKGFVGKALGQPGLKPSVRVGETGFREVAAYLLDYDHFANVPPTALVKITHSVFNVNDGMDGNKSREKKKLVSSKIASFQKFVPHDFDASDHGTSSFPVASVHRIGILDIRILNTDRHGGNLLVKKLDDGGVGRFGQVELIPIDHGLCLPETLEDPYFEWIHWPQASIPFSEEELDYIQSLDPVKDCEMLRRELPMIREACLRVLVLCTVFLKEAAVFGLCLAEIGEMMTREFRAGEEEPSELEMLCIEAKRLTTEQDVLSPKSDGEGETEFQFDIDYNELDSVYGSETETDEFFAKNPFSNGRSSLGELKESIAEEEEDDEEEAKLTLSLSKLSTSMKNNLSNTMGSGYLKPPKDNQTDKALVSHKSANVQLPLSVNFVKLADMKEVEWVVFLERFQELLYSAFAERKTMTLRNTQRLGTSCKF

SEQ ID NO: 5065 - DNA, 2117 bp, Arabidopsis thaliana
  misc_feature (1)..(2117): Ceres Seq. ID no. 13575052
accgttgttttgcgtctataattaagtatcttccactaatctcatatttcaaactgtactttttcctcgagctctctccaatttcctcatagctctattgttcgaaaattctgaaacgaacgttaccactatggacactaagatcggatctatcgacgcgtgtaacccgaccaaccacgatatcggcggtcctccaaacggcggagtctccaccgttcaaaacacaagtccacttcactccaccaccgtcagcccctgcgacgcgactcttggccgttacctagcaagacggttagtcgaaatcggcgtcaccgatgtcttctccgttcctggtgatttcaacctgacgcttctcgatcacctaatcgccgaaccaaacctcaagctgatcggttgctgcaacgagcttaacgccggatacgctgctgacggttacgctagatctcgcggtgttggtgcgtgcgtcgttacgttcaccgtcggtggattgagtgttctgaatgcgatcgccggtgcttacagtgagaatctgcctctgatttgcatcgtcggtggtccaaactccaacgattacggtaccaataggattcttcatcatacaattggtttacctgatttcactcaagagcttaggtgttttcaagctgttacttgttttcaagctgtgattaataacttagaagaggctcatgaacttatcgatactgcgatttcaactgctttgaaagaaagcaaacctgtttatatcagtatcagctgtaatttaccggcgattcctcttccgacgtttagtcgtcatcctgttccgttcatgcttccgatgaaggttagcaatcagattggtttagatgcggcggtggaggcagctgctgagttcttgaacaaagctgtgaagccagttcttgttggtgggccgaaaatgcgggttgcgaaagccgcggatgcttttgttgagcttgctgatgcttctggctatggtcttgctgtgatgccttctgctaaaggacaagtacctgagcatcacaagcattttatagggacgtattggggagctgtgagtacagctttttgtgctgaaatcgttgaatctgcggatgcttatctgtttgcaggtccgattttcaacgattacagttctgttgggtattctctgcttctcaagaaggagaaggcaatcatcgttcagcctgatcgggttactatcggtaacggacctgcgtttggatgtgttcttatgaaggattttctaagcgagttggctaaacgaattaagcacaacaacacttcttatgagaattatcacaggatctatgtcccagaaggaaagcctttgagagataacccgaatgagtctttgagggttaatgtactgttccaacacattcagaatatgctctcttctgagtctgctgtgcttgctgagacaggagattcctggttcaactgtcagaagctgaagctccctgaaggatgcggttacgaattccaaatgcagtacggatcaattggctggtcagtgggtgctactctaggctatgctcaagccatgccaaacaggcgtgtcattgcttgtattggagatggtagtttccaggtaaccgcacaggatgtatctacgatgatacggtgtgggcaaaagaccataatcttcctcatcaacaacggaggctacaccattgaggtggaaattcacgatggtccttacaatgtcataaagaactggaactacacagcttttgttgaggccatacacaatggagaaggaaaatgctggactgccaaggtgagatgcgaggaggagttagtgaaagcaatcaacacggcaaccaatgaggaaaaagagagcttttgtttcattgaagtgatagtgcacaaagacgatacaagcaaggaacttttggagtggggctctagagtctctgctgctaatagtcgtcccccaaatccgcagtagagtatataaatgcactcaacttatatatatttcagatttggtagtgtcttcaccgttctatgtaaagtagtgtggatccttttacacccatctggatgggaaaaaaatgtgtgtccccttgaggatataaactgtttgagtgcctaaataagaacttgtttcc

SEQ ID NO: 5066 - protein, 607 aa, Arabidopsis thaliana
  peptide (1)..(607): Ceres Seq. ID no. 13575053
  misc_feature (1)..(607): NCBI GI NO: 29373077 NR Description: pyruvate decarboxylase 1 [Lotus corniculatus]
  misc_feature (1)..(607): NCBI GI NO: 10121330 NR Description: pyruvate decarboxylase [Fragaria x ananassa]
  misc_feature (1)..(607): NCBI GI NO: 17225598 NR Description: pyruvate decarboxylase [Fragaria x ananassa]
  misc_feature (1)..(607): NCBI GI NO: 15234062 NR Description: pyruvate decarboxylase-1 (Pdc1)
  misc_feature (1)..(607): NCBI GI NO: 15240950 NR Description: pyruvate decarboxylase-related protein
  misc_feature (13)..(607): NCBI GI NO: 24745919 NR Description: pyruvate decarboxylase [Solanum tuberosum]
  misc_feature (38)..(607): NCBI GI NO: 10732644 NR Description: pyruvate decarboxylase 1 [Vitis vinifera]
  misc_feature (1)..(607): NCBI GI NO: 1616785 NR Description: pyruvate decarboxylase [Arabidopsis thaliana]
  misc_feature (24)..(607): NCBI GI NO: 34896032 NR Description: Similar to Zea mays mRNA for pyruvate decarboxylase
  misc_feature (33)..(607): NCBI GI NO: 34898228 NR Description: putative pyruvate decarboxylase
MDTKIGSIDACNPTNHDIGGPPNGGVSTVQNTSPLHSTTVSPCDATLGRYLARRLVEIGVTDVFSVPGDFNLTLLDHLIAEPNLKLIGCCNELNAGYAADGYARSRGVGACVVTFTVGGLSVLNAIAGAYSENLPLICIVGGPNSNDYGTNRILHHTIGLPDFTQELRCFQAVTCFQAVINNLEEAHELIDTAISTALKESKPVYISISCNLPAIPLPTFSRHPVPFMLPMKVSNQIGLDAAVEAAAEFLNKAVKPVLVGGPKMRVAKAADAFVELADASGYGLAVMPSAKGQVPEHHKHFIGTYWGAVSTAFCAEIVESADAYLFAGPIFNDYSSVGYSLLLKKEKAIIVQPDRVTIGNGPAFGCVLMKDFLSELAKRIKHNNTSYENYHRIYVPEGKPLRDNPNESLRVNVLFQHIQNMLSSESAVLAETGDSWFNCQKLKLPEGCGYEFQMQYGSIGWSVGATLGYAQAMPNRRVIACIGDGSFQVTAQDVSTMIRCGQKTIIFLINNGGYTIEVEIHDGPYNVIKNWNYTAFVEAIHNGEGKCWTAKVRCEEELVKAINTATNEEKESFCFIEVIVHKDDTSKELLEWGSRVSAANSRPPNPQ

SEQ ID NO: 5067 - protein, 380 aa, Arabidopsis thaliana
  peptide (1)..(380): Ceres Seq. ID no. 13575054
  misc_feature (1)..(380): NCBI GI NO: 29373077 NR Description: pyruvate decarboxylase 1 [Lotus corniculatus]
  misc_feature (1)..(380): NCBI GI NO: 10121330 NR Description: pyruvate decarboxylase [Fragaria x ananassa]
  misc_feature (1)..(380): NCBI GI NO: 17225598 NR Description: pyruvate decarboxylase [Fragaria x ananassa]
  misc_feature (1)..(380): NCBI GI NO: 15234062 NR Description: pyruvate decarboxylase-1 (Pdc1)
  misc_feature (1)..(380): NCBI GI NO: 15240950 NR Description: pyruvate decarboxylase-related protein
  misc_feature (1)..(380): NCBI GI NO: 24745919 NR Description: pyruvate decarboxylase [Solanum tuberosum]
  misc_feature (1)..(380): NCBI GI NO: 10732644 NR Description: pyruvate decarboxylase 1 [Vitis vinifera]
  misc_feature (1)..(380): NCBI GI NO: 1616785 NR Description: pyruvate decarboxylase [Arabidopsis thaliana]
  misc_feature (1)..(380): NCBI GI NO: 34896032 NR Description: Similar to Zea mays mRNA for pyruvate decarboxylase
  misc_feature (1)..(380): NCBI GI NO: 34898228 NR Description: putative pyruvate decarboxylase
MLPMKVSNQIGLDAAVEAAAEFLNKAVKPVLVGGPKMRVAKAADAFVELADASGYGLAVMPSAKGQVPEHHKHFIGTYWGAVSTAFCAEIVESADAYLFAGPIFNDYSSVGYSLLLKKEKAIIVQPDRVTIGNGPAFGCVLMKDFLSELAKRIKHNNTSYENYHRIYVPEGKPLRDNPNESLRVNVLFQHIQNMLSSESAVLAETGDSWFNCQKLKLPEGCGYEFQMQYGSIGWSVGATLGYAQAMPNRRVIACIGDGSFQVTAQDVSTMIRCGQKTIIFLINNGGYTIEVEIHDGPYNVIKNWNYTAFVEAIHNGEGKCWTAKVRCEEELVKAINTATNEEKESFCFIEVIVHKDDTSKELLEWGSRVSAANSRPPNPQ

SEQ ID NO: 5068 - protein, 377 aa, Arabidopsis thaliana
  peptide (1)..(377): Ceres Seq. ID no. 13575055
  misc_feature (1)..(377): NCBI GI NO: 29373077 NR Description: pyruvate decarboxylase 1 [Lotus corniculatus]
  misc_feature (1)..(377): NCBI GI NO: 10121330 NR Description: pyruvate decarboxylase [Fragaria x ananassa]
  misc_feature (1)..(377): NCBI GI NO: 17225598 NR Description: pyruvate decarboxylase [Fragaria x ananassa]
  misc_feature (1)..(377): NCBI GI NO: 15234062 NR Description: pyruvate decarboxylase-1 (Pdc1)
  misc_feature (1)..(377): NCBI GI NO: 15240950 NR Description: pyruvate decarboxylase-related protein
  misc_feature (1)..(377): NCBI GI NO: 24745919 NR Description: pyruvate decarboxylase [Solanum tuberosum]
  misc_feature (1)..(377): NCBI GI NO: 10732644 NR Description: pyruvate decarboxylase 1 [Vitis vinifera]
  misc_feature (1)..(377): NCBI GI NO: 1616785 NR Description: pyruvate decarboxylase [Arabidopsis thaliana]
  misc_feature (1)..(377): NCBI GI NO: 34896032 NR Description: Similar to Zea mays mRNA for pyruvate decarboxylase
  misc_feature (1)..(377): NCBI GI NO: 34898228 NR Description: putative pyruvate decarboxylase
MKVSNQIGLDAAVEAAAEFLNKAVKPVLVGGPKMRVAKAADAFVELADASGYGLAVMPSAKGQVPEHHKHFIGTYWGAVSTAFCAEIVESADAYLFAGPIFNDYSSVGYSLLLKKEKAIIVQPDRVTIGNGPAFGCVLMKDFLSELAKRIKHNNTSYENYHRIYVPEGKPLRDNPNESLRVNVLFQHIQNMLSSESAVLAETGDSWFNCQKLKLPEGCGYEFQMQYGSIGWSVGATLGYAQAMPNRRVIACIGDGSFQVTAQDVSTMIRCGQKTIIFLINNGGYTIEVEIHDGPYNVIKNWNYTAFVEAIHNGEGKCWTAKVRCEEELVKAINTATNEEKESFCFIEVIVHKDDTSKELLEWGSRVSAANSRPPNPQ

SEQ ID NO: 5069 - DNA, 1563 bp, Arabidopsis thaliana
  misc_feature (1)..(1563): Ceres Seq. ID no. 13576556
aacaaaactaagattgaataatcataaagaagaaaactgagaatgagaggtaattatctttctttgctagtagtgctcattgtcttggcctccaatgatgttcttgccaacaacaactcttcaacacctaaattaagaagaagtgattttcctgaagatttcatttttggatctgcaacatctgcttaccaggtcgaaggaggtgctcatgaagatggtagaggacctagtatctgggataccttctctgagaaatatccagagaagataaaggatggtagcaatgggtctgttgcagataactcttaccatctttacaaggaagatgtggcgttattgcatcaaattgggtttaatgcatacagattctcaatctcatggtcgaggatcttgcctcgtgggaatctaaaaggaggaatcaaccaggctggtattgactattacaacaacttgatcaatgaacttttgtccaaaggaattaagccttttgcaaccatgttccattgggacacaccacaagcccttgaagatgcttatggtggattccgtggtgccgagattgtgaacgatttccgcgattatgcggatatttgcttcaagaattttggagatagagtgaagcattggatgacattgaacgagccattgacagtggtgcaacaagggtatgttgcaggtgtaatggctccaggaagatgctccaaattcacaaaccctaattgcacagatggaaatggagccaccgagccttatatcgttggtcacaacctcatcctttctcacggagccgccgtccaagtctacagagaaaaatacaaggcttctcaacaaggtcaagttggtattgctttgaacgcgggttggaacttgccatatacagaatcaccgaaggatagattagctgcggcacgagccatggccttcacatttgactactttatggagccgcttgtgacgggtaaatacccggttgatatggtcaacaacgtaaaaggccgcttacctatattcactgcacaacaatctaagatgttgaaaggctcatatgatttcattggcatcaactattactcttctacttatgcaaaggatgttccctgctccaccaaagatgttactatgttctctgatccttgtgccagtgtcacaggtgaaagagatggagttcccattggtccaaaggctgcatcagattggcttttaatatatccaaagggaattcgtgatcttgtgctctatgcaaaatacaagtttaaggaccctgtcatgtacataactgaaaacgggagagatgaatttagtaccaataaaatcttccttaaagacggtgacaggatcgattactacgctcgacatctcgaaatggttcaagacgctatctctgttggagccaatgtgaagggatttttcgcatggtcgttgctagacaatttcgaatgggcaatgggatacacggtccggtttggactggtttatgtggatttcaaagacggatgtaagagatatcccaagaaatcagctgaatggttcagaaagttattgaatgaaaagaaaaacgattga

SEQ ID NO: 5070 - protein, 506 aa, Arabidopsis thaliana
  peptide (1)..(506): Ceres Seq. ID no. 13576557
  misc_feature (1)..(506): NCBI GI NO: 15224879 NR Description: glycosyl hydrolase family 1 [Arabidopsis thaliana]
  misc_feature (1)..(506): NCBI GI NO: 15241543 NR Description: glycosyl hydrolase family 1 [Arabidopsis thaliana]
  misc_feature (1)..(506): NCBI GI NO: 15238331 NR Description: glycosyl hydrolase family 1 [Arabidopsis thaliana]
  misc_feature (1)..(506): NCBI GI NO: 30682835 NR Description: glycosyl hydrolase family 1 [Arabidopsis thaliana]
  misc_feature (1)..(500): NCBI GI NO: 15232261 NR Description: glycosyl hydrolase family 1 [Arabidopsis thaliana]
  misc_feature (1)..(384): NCBI GI NO: 25289508 NR Description: probable beta-glucosidase
  misc_feature (36)..(500): NCBI GI NO: 1155255 NR Description: beta-glucosidase
  misc_feature (7)..(500): NCBI GI NO: 15617209 NR Description: putative prunasin hydrolase isoform PH-L1 precursor
  misc_feature (7)..(502): NCBI GI NO: 16757966 NR Description: amygdalin hydrolase isoform AH I precursor
  misc_feature (7)..(502): NCBI GI NO: 7435445 NR Description: beta-glucosidase (EC 3
MRGNYLSLLVVLIVLASNDVLANNNSSTPKLRRSDFPEDFIFGSATSAYQVEGGAHEDGRGPSIWDTFSEKYPEKIKDGSNGSVADNSYHLYKEDVALLHQIGFNAYRFSISWSRILPRGNLKGGINQAGIDYYNNLINELLSKGIKPFATMFHWDTPQALEDAYGGFRGAEIVNDFRDYADICFKNFGDRVKHWMTLNEPLTVVQQGYVAGVMAPGRCSKFTNPNCTDGNGATEPYIVGHNLILSHGAAVQVYREKYKASQQGQVGIALNAGWNLPYTESPKDRLAAARAMAFTFDYFMEPLVTGKYPVDMVNNVKGRLPIFTAQQSKMLKGSYDFIGINYYSSTYAKDVPCSTKDVTMFSDPCASVTGERDGVPIGPKAASDWLLIYPKGIRDLVLYAKYKFKDPVMYITENGRDEFSTNKIFLKDGDRIDYYARHLEMVQDAISVGANVKGFFAWSLLDNFEWAMGYTVRFGLVYVDFKDGCKRYPKKSAEWFRKLLNEKKND

SEQ ID NO: 5071 - protein, 355 aa, Arabidopsis thaliana
  peptide (1)..(355): Ceres Seq. ID no. 13576558
  misc_feature (1)..(355): NCBI GI NO: 15224879 NR Description: glycosyl hydrolase family 1 [Arabidopsis thaliana]
  misc_feature (1)..(355): NCBI GI NO: 15241543 NR Description: glycosyl hydrolase family 1 [Arabidopsis thaliana]
  misc_feature (1)..(355): NCBI GI NO: 15238331 NR Description: glycosyl hydrolase family 1 [Arabidopsis thaliana]
  misc_feature (1)..(355): NCBI GI NO: 30682835 NR Description: glycosyl hydrolase family 1 [Arabidopsis thaliana]
  misc_feature (1)..(349): NCBI GI NO: 15232261 NR Description: glycosyl hydrolase family 1 [Arabidopsis thaliana]
  misc_feature (1)..(233): NCBI GI NO: 25289508 NR Description: probable beta-glucosidase
  misc_feature (1)..(349): NCBI GI NO: 1155255 NR Description: beta-glucosidase
  misc_feature (1)..(349): NCBI GI NO: 15617209 NR Description: putative prunasin hydrolase isoform PH-L1 precursor
  misc_feature (1)..(351): NCBI GI NO: 16757966 NR Description: amygdalin hydrolase isoform AH I precursor
  misc_feature (1)..(351): NCBI GI NO: 7435445 NR Description: beta-glucosidase (EC 3
MFHWDTPQALEDAYGGFRGAEIVNDFRDYADICFKNFGDRVKHWMTLNEPLTVVQQGYVAGVMAPGRCSKFTNPNCTDGNGATEPYIVGHNLILSHGAAVQVYREKYKASQQGQVGIALNAGWNLPYTESPKDRLAAARAMAFTFDYFMEPLVTGKYPVDMVNNVKGRLPIFTAQQSKMLKGSYDFIGINYYSSTYAKDVPCSTKDVTMFSDPCASVTGERDGVPIGPKAASDWLLIYPKGIRDLVLYAKYKFKDPVMYITENGRDEFSTNKIFLKDGDRIDYYARHLEMVQDAISVGANVKGFFAWSLLDNFEWAMGYTVRFGLVYVDFKDGCKRYPKKSAEWFRKLLNEKKND

SEQ ID NO: 5072 - protein, 311 aa, Arabidopsis thaliana
  peptide (1)..(311): Ceres Seq. ID no. 13576559
  misc_feature (1)..(311): NCBI GI NO: 15224879 NR Description: glycosyl hydrolase family 1 [Arabidopsis thaliana]
  misc_feature (1)..(311): NCBI GI NO: 15241543 NR Description: glycosyl hydrolase family 1 [Arabidopsis thaliana]
  misc_feature (1)..(311): NCBI GI NO: 15238331 NR Description: glycosyl hydrolase family 1 [Arabidopsis thaliana]
  misc_feature (1)..(311): NCBI GI NO: 30682835 NR Description: glycosyl hydrolase family 1 [Arabidopsis thaliana]
  misc_feature (1)..(305): NCBI GI NO: 15232261 NR Description: glycosyl hydrolase family 1 [Arabidopsis thaliana]
  misc_feature (1)..(189): NCBI GI NO: 25289508 NR Description: probable beta-glucosidase
  misc_feature (1)..(305): NCBI GI NO: 1155255 NR Description: beta-glucosidase
  misc_feature (1)..(305): NCBI GI NO: 15617209 NR Description: putative prunasin hydrolase isoform PH-L1 precursor
  misc_feature (1)..(307): NCBI GI NO: 16757966 NR Description: amygdalin hydrolase isoform AH I precursor
  misc_feature (1)..(307): NCBI GI NO: 7435445 NR Description: beta-glucosidase (EC 3
MTLNEPLTVVQQGYVAGVMAPGRCSKFTNPNCTDGNGATEPYIVGHNLILSHGAAVQVYREKYKASQQGQVGIALNAGWNLPYTESPKDRLAAARAMAFTFDYFMEPLVTGKYPVDMVNNVKGRLPIFTAQQSKMLKGSYDFIGINYYSSTYAKDVPCSTKDVTMFSDPCASVTGERDGVPIGPKAASDWLLIYPKGIRDLVLYAKYKFKDPVMYITENGRDEFSTNKIFLKDGDRIDYYARHLEMVQDAISVGANVKGFFAWSLLDNFEWAMGYTVRFGLVYVDFKDGCKRYPKKSAEWFRKLLNEKKND

SEQ ID NO: 5073 - DNA, 1006 bp, Arabidopsis thaliana
  misc_feature (1)..(1006): Ceres Seq. ID no. 12371342
aagattccacaaaaactctgtattgtctctttctctctcactatctctctctcttttgtgagctcagatctgaccagagagaaagaaacaaccggagaagaagaagatgactgaccgagtcttcccagcttccaaaccaccaaccgccactaatggagctccaccagttggttccataccacctcctccagctccggcgactgtaaccagcaacggaacaacaaacggaatggctaatcagaaacctcaagtctacattccagctaaccgtccggtttaccgtccacagccttacagtcgccgtcatcaccaccaatctcgaccaagctgccgacgaatttgctgttgttgctgtttctggtcgattctgataattctgatcttagctctcatgactgcaatcgccgccaccgcgatgtacgtgatctaccaccctcgtccgccgtcgttctccgtcccgtcaataagaatcagccgcgtgaacctaacaacctcctctaattcctccgtctctcatctctcttccttcttcaacttcactctaatctcagagaatccaaaccaacacctctctttctcttacgatcctttcaccgtcatcgttaaattcagctaaatccggtacgatgctcggtaacggaactgttcctgctttcttcagcgataacggtaacaaaacttcgtttcacggcgtgatcgctacgtctacagcggcgcgtgagttagatccggatgaagctaagcatctgagatcagatctgacgcgcgcgcgtgtaggatatgagatcgagatgagaactaaagtgaagatgataatggggaagctgaagagtgaaggagtagagatcaaagtgacatgtgaaggatttgaaggaactataccaaaaggtaaaactccaattgtagctacttctaaaaaaactaagtgtaagtctgatcttagtgtcaaggtctggaaatggagtttctagagggaattttgataatttcacaattgaaattttct

SEQ ID NO: 5074 - protein, 169 aa, Arabidopsis thaliana
  peptide (1)..(169): Ceres Seq. ID no. 12371343
  misc_feature (1)..(166): NCBI GI NO: 21536796 NR Description: unknown [Arabidopsis thaliana]
  misc_feature (1)..(166): NCBI GI NO: 15239804 NR Description: putative protein; protein id: At5g11890
  misc_feature (26)..(160): NCBI GI NO: 11762174 NR Description: At1g17620 [Arabidopsis thaliana]
  misc_feature (26)..(160): NCBI GI NO: 18394509 NR Description: expressed protein; protein id: At1g17620
  misc_feature (7)..(164): NCBI GI NO: 34903552 NR Description: P0001B06.28
  misc_feature (1)..(159): NCBI GI NO: 34914304 NR Description: B1151A10.19
  misc_feature (1)..(160): NCBI GI NO: 18401317 NR Description: expressed protein; protein id: At2g27080
  misc_feature (20)..(169): NCBI GI NO: 38344198 NR Description: OSJNBa0064G10.14
  misc_feature (7)..(160): NCBI GI NO: 34909192 NR Description: P0425G02.19
MTDRVFPASKPPTATNGAPPVGSIPPPPAPATVTSNGTTNGMANQKPQVYIPANRPVYRPQPYSRRHHHQSRPSCRRICCCCCFWSILIILILALMTAIAATAMYVIYHPRPPSFSVPSIRISRVNLTTSSNSSVSHLSSFFNFTLISENPNQHLSFSYDPFTVIVKFS

SEQ ID NO: 5075 - protein, 128 aa, Arabidopsis thaliana
  peptide (1)..(128): Ceres Seq. ID no. 12371344
  misc_feature (1)..(125): NCBI GI NO: 21536796 NR Description: unknown [Arabidopsis thaliana]
  misc_feature (1)..(125): NCBI GI NO: 15239804 NR Description: putative protein; protein id: At5g11890
  misc_feature (1)..(119): NCBI GI NO: 11762174 NR Description: At1g17620 [Arabidopsis thaliana]
  misc_feature (1)..(119): NCBI GI NO: 18394509 NR Description: expressed protein; protein id: At1g17620
  misc_feature (1)..(123): NCBI GI NO: 34903552 NR Description: P0001B06.28
  misc_feature (1)..(118): NCBI GI NO: 34914304 NR Description: B1151A10.19
  misc_feature (1)..(119): NCBI GI NO: 18401317 NR Description: expressed protein; protein id: At2g27080
  misc_feature (1)..(128): NCBI GI NO: 38344198 NR Description: OSJNBa0064G10.14
  misc_feature (1)..(119): NCBI GI NO: 34909192 NR Description: P0425G02.19
MANQKPQVYIPANRPVYRPQPYSRRHHHQSRPSCRRICCCCCFWSILIILILALMTAIAATAMYVIYHPRPPSFSVPSIRISRVNLTTSSNSSVSHLSSFFNFTLISENPNQHLSFSYDPFTVIVKFS

SEQ ID NO: 5076 - protein, 114 aa, Arabidopsis thaliana
  peptide (1)..(114): Ceres Seq. ID no. 12371345
  misc_feature (1)..(114): NCBI GI NO: 21536796 NR Description: unknown [Arabidopsis thaliana]
  misc_feature (1)..(114): NCBI GI NO: 15239804 NR Description: putative protein; protein id: At5g11890
  misc_feature (1)..(114): NCBI GI NO: 11762174 NR Description: At1g17620 [Arabidopsis thaliana]
  misc_feature (1)..(114): NCBI GI NO: 18394509 NR Description: expressed protein; protein id: At1g17620
MLGNGTVPAFFSDNGNKTSFHGVIATSTAARELDPDEAKHLRSDLTRARVGYEIEMRTKVKMIMGKLKSEGVEIKVTCEGFEGTIPKGKTPIVATSKKTKCKSDLSVKVWKWSF

SEQ ID NO: 5077 - DNA, 3323 bp, Arabidopsis thaliana; identical to SEQ ID NO: 1152
  misc_feature (1)..(3323): Ceres Seq. ID no. 13488061

SEQ ID NO: 5078 - protein, 440 aa, Arabidopsis thaliana; identical to SEQ ID NO: 1153
  peptide (1)..(440): Ceres Seq. ID no. 13488062
  misc_feature (45)..(424): Pfam Name: Pfam Description:  Peptidase family M20/M25/M40
  misc_feature (1)..(440): NCBI GI NO: 15218027 NR Description: IAA-Ala hydrolase (IAR3) [Arabidopsis thaliana]
  misc_feature (1)..(440): NCBI GI NO: 2181184 NR Description: JR3 protein [Arabidopsis thaliana]
  misc_feature (1)..(433): NCBI GI NO: 15218029 NR Description: auxin conjugate hydrolase
  misc_feature (15)..(440): NCBI GI NO: 27948556 NR Description: IAA-amino acid hydrolase
  misc_feature (7)..(440): NCBI GI NO: 902791 NR Description: ILL2
  misc_feature (34)..(423): NCBI GI NO: 3559811 NR Description: gr1-protein [Arabidopsis thaliana]
  misc_feature (34)..(423): NCBI GI NO: 15219390 NR Description: gr1 protein [Arabidopsis thaliana]
  misc_feature (9)..(425): NCBI GI NO: 21741848 NR Description: OSJNBa0019D11.19
  misc_feature (46)..(422): NCBI GI NO: 18976969 NR Description: iaa-amino acid hydrolase homolog 1 precursor
  misc_feature (51)..(423): NCBI GI NO: 22977510 NR Description: hypothetical protein [Ralstonia metallidurans]

SEQ ID NO: 5079 - protein, 406 aa, Arabidopsis thaliana; identical to SEQ ID NO: 1154
  peptide (1)..(406): Ceres Seq. ID no. 13488063
  misc_feature (160)..(271): Pfam Name: Pfam Description:  Arabidopsis protein of unknown function, DUF266
  misc_feature (8)..(406): NCBI GI NO: 15218028 NR Description: hypothetical protein [Arabidopsis thaliana]
  misc_feature (6)..(390): NCBI GI NO: 18402952 NR Description: expressed protein [Arabidopsis thaliana]
  misc_feature (8)..(390): NCBI GI NO: 21554566 NR Description: unknown [Arabidopsis thaliana]
  misc_feature (6)..(354): NCBI GI NO: 9280235 NR Description: gb|AAD40142
  misc_feature (84)..(390): NCBI GI NO: 15218485 NR Description: expressed protein [Arabidopsis thaliana]
  misc_feature (85)..(390): NCBI GI NO: 15221386 NR Description: hypothetical protein [Arabidopsis thaliana]
  misc_feature (92)..(405): NCBI GI NO: 34907318 NR Description: contains ESTs AU096118
  misc_feature (85)..(393): NCBI GI NO: 34895606 NR Description: OSJNBa0083M16.15
  misc_feature (92)..(393): NCBI GI NO: 34895612 NR Description: OSJNBa0083M16.18
  misc_feature (69)..(390): NCBI GI NO: 15219555 NR Description: expressed protein [Arabidopsis thaliana]

SEQ ID NO: 5080 - protein, 403 aa, Arabidopsis thaliana; identical to SEQ ID NO: 1155
  peptide (1)..(403): Ceres Seq. ID no. 13488064
  misc_feature (157)..(268): Pfam Name: Pfam Description:  Arabidopsis protein of unknown function, DUF266
  misc_feature (5)..(403): NCBI GI NO: 15218028 NR Description: hypothetical protein [Arabidopsis thaliana]
  misc_feature (3)..(387): NCBI GI NO: 18402952 NR Description: expressed protein [Arabidopsis thaliana]
  misc_feature (5)..(387): NCBI GI NO: 21554566 NR Description: unknown [Arabidopsis thaliana]
  misc_feature (3)..(351): NCBI GI NO: 9280235 NR Description: gb|AAD40142
  misc_feature (81)..(387): NCBI GI NO: 15218485 NR Description: expressed protein [Arabidopsis thaliana]
  misc_feature (82)..(387): NCBI GI NO: 15221386 NR Description: hypothetical protein [Arabidopsis thaliana]
  misc_feature (89)..(402): NCBI GI NO: 34907318 NR Description: contains ESTs AU096118
  misc_feature (82)..(390): NCBI GI NO: 34895606 NR Description: OSJNBa0083M16.15
  misc_feature (89)..(390): NCBI GI NO: 34895612 NR Description: OSJNBa0083M16.18
  misc_feature (66)..(387): NCBI GI NO: 15219555 NR Description: expressed protein [Arabidopsis thaliana]

SEQ ID NO: 5081 - DNA, 1457 bp, Arabidopsis thaliana
  misc_feature (1)..(1457): Ceres Seq. ID no. 13575056
ggcattgagctcgagagacagacacggaggatggcgaatcagagtacagagacgaatcaaccgtcgaatatgcagacttacggtgtaccgatttacgccgccgactggattccggaggtagatgtcagatccaaaatcataatggatccggagaaatctgaagatgatgatgagtcgtcttcttcttcttcttcttcccggagctgcatcgttttgtccggcggaggcggagagggacgaagtggaatctctaatgtcatattaatatgccgtgttgatctaaacaccaattctctctcggaacaacctctgggtaggcttgtggttggctctgatctgccttatcggatggctgttcatcctcgggaaggtggtcttatttgcgcgttgcctaacagttgcaaactgtttcattgggaagacattatgagccgagaggataatcaggctggtgagtcggaggaagtgattaaagagttaagagatgttggacaacagttggctctggcgtttaatccggaggggtctgttcttgctgctggtgcggaggatgggactttgagggtttttaaatggcctagcatgaatactttacttaatgagtcccaggctcattcttcagttaaatgccttactttcagcgaaagtggtcaatttcttgtatctcttggcggtccagtttgtcgagtttgggacgtgaatgcttctgctgctgttgccagtctatcaaaagagaaggacgagatgtttgcctcctgtagattctctgtagacagtgcaggcaatgaagttctttacattgctgcaaacactgaacgtggtgggagtattataacatgtgatacaaaattatggaaaagaaaatggtcgaagcctataaaaaagaactctatatcagcttttaatgtctcagctgatgggaagcttcttgcaataggaacccttgaaggagatgttttaatacttgaatcgacaagaatgcaaactatccaagtcgtcaagaaagcgcatcttggtttggtcacagcactgactttctctcctgattcaaggggattagtgtcggtatcttttgactcaagggcaaggctgaccatgattgaacaaaagggggacaaacctggagtaaggtggtggctactggttttattgatagtgttgctatacgtggttgcatactattatatgaaggcaaagggtatcataccttagaaaggcctttaagtgaccacacaggacgatacagcggaatggcttgtaaccaacatatcatacgattacgctttgagttagctttttatgtttgacatctaccagaaacttgcttgctttatatcaataaaacatgtaaactaacactaaaacagcaaaagttacaatttgtttcctctttttttttttgtagacatagtaaactagaaaactattatcatatgatggatcagtaagactctttc

SEQ ID NO: 5082 - protein, 403 aa, Arabidopsis thaliana
  peptide (1)..(403): Ceres Seq. ID no. 13575057
  misc_feature (11)..(403): NCBI GI NO: 15226281 NR Description: SEC12p protein / St12p protein
  misc_feature (11)..(403): NCBI GI NO: 11358859 NR Description: St12p protein [imported] - Arabidopsis thaliana
  misc_feature (11)..(377): NCBI GI NO: 322598 NR Description: St12p protein - Arabidopsis thaliana
  misc_feature (18)..(402): NCBI GI NO: 18423177 NR Description: St12p protein [Arabidopsis thaliana]
  misc_feature (11)..(284): NCBI GI NO: 17473926 NR Description: putative protein transport protein SEC12p
  misc_feature (18)..(373): NCBI GI NO: 8777388 NR Description: protein transport protein SEC12p-like
  misc_feature (79)..(394): NCBI GI NO: 34394605 NR Description: transducin / WD-40 repeat protein-like
  misc_feature (93)..(397): NCBI GI NO: 34897162 NR Description: putative membrane protein
  misc_feature (79)..(394): NCBI GI NO: 18409509 NR Description: transducin / WD-40 repeat protein family
  misc_feature (169)..(394): NCBI GI NO: 26450470 NR Description: unknown protein [Arabidopsis thaliana]
GIELERQTRRMANQSTETNQPSNMQTYGVPIYAADWIPEVDVRSKIIMDPEKSEDDDESSSSSSSSRSCIVLSGGGGEGRSGISNVILICRVDLNTNSLSEQPLGRLVVGSDLPYRMAVHPREGGLICALPNSCKLFHWEDIMSREDNQAGESEEVIKELRDVGQQLALAFNPEGSVLAAGAEDGTLRVFKWPSMNTLLNESQAHSSVKCLTFSESGQFLVSLGGPVCRVWDVNASAAVASLSKEKDEMFASCRFSVDSAGNEVLYIAANTERGGSIITCDTKLWKRKWSKPIKKNSISAFNVSADGKLLAIGTLEGDVLILESTRMQTIQVVKKAHLGLVTALTFSPDSRGLVSVSFDSRARLTMIEQKGDKPGVRWWLLVLLIVLLYVVAYYYMKAKGIIP

SEQ ID NO: 5083 - protein, 393 aa, Arabidopsis thaliana
  peptide (1)..(393): Ceres Seq. ID no. 13575058
  misc_feature (1)..(393): NCBI GI NO: 15226281 NR Description: SEC12p protein / St12p protein
  misc_feature (1)..(393): NCBI GI NO: 11358859 NR Description: St12p protein [imported] - Arabidopsis thaliana
  misc_feature (1)..(367): NCBI GI NO: 322598 NR Description: St12p protein - Arabidopsis thaliana
  misc_feature (8)..(392): NCBI GI NO: 18423177 NR Description: St12p protein [Arabidopsis thaliana]
  misc_feature (1)..(274): NCBI GI NO: 17473926 NR Description: putative protein transport protein SEC12p
  misc_feature (8)..(363): NCBI GI NO: 8777388 NR Description: protein transport protein SEC12p-like
  misc_feature (69)..(384): NCBI GI NO: 34394605 NR Description: transducin / WD-40 repeat protein-like
  misc_feature (83)..(387): NCBI GI NO: 34897162 NR Description: putative membrane protein
  misc_feature (69)..(384): NCBI GI NO: 18409509 NR Description: transducin / WD-40 repeat protein family
  misc_feature (159)..(384): NCBI GI NO: 26450470 NR Description: unknown protein [Arabidopsis thaliana]
MANQSTETNQPSNMQTYGVPIYAADWIPEVDVRSKIIMDPEKSEDDDESSSSSSSSRSCIVLSGGGGEGRSGISNVILICRVDLNTNSLSEQPLGRLVVGSDLPYRMAVHPREGGLICALPNSCKLFHWEDIMSREDNQAGESEEVIKELRDVGQQLALAFNPEGSVLAAGAEDGTLRVFKWPSMNTLLNESQAHSSVKCLTFSESGQFLVSLGGPVCRVWDVNASAAVASLSKEKDEMFASCRFSVDSAGNEVLYIAANTERGGSIITCDTKLWKRKWSKPIKKNSISAFNVSADGKLLAIGTLEGDVLILESTRMQTIQVVKKAHLGLVTALTFSPDSRGLVSVSFDSRARLTMIEQKGDKPGVRWWLLVLLIVLLYVVAYYYMKAKGIIP

SEQ ID NO: 5084 - protein, 380 aa, Arabidopsis thaliana
  peptide (1)..(380): Ceres Seq. ID no. 13575059
  misc_feature (1)..(380): NCBI GI NO: 15226281 NR Description: SEC12p protein / St12p protein
  misc_feature (1)..(380): NCBI GI NO: 11358859 NR Description: St12p protein [imported] - Arabidopsis thaliana
  misc_feature (1)..(354): NCBI GI NO: 322598 NR Description: St12p protein - Arabidopsis thaliana
  misc_feature (1)..(379): NCBI GI NO: 18423177 NR Description: St12p protein [Arabidopsis thaliana]
  misc_feature (1)..(261): NCBI GI NO: 17473926 NR Description: putative protein transport protein SEC12p
  misc_feature (1)..(350): NCBI GI NO: 8777388 NR Description: protein transport protein SEC12p-like
  misc_feature (56)..(371): NCBI GI NO: 34394605 NR Description: transducin / WD-40 repeat protein-like
  misc_feature (70)..(374): NCBI GI NO: 34897162 NR Description: putative membrane protein
  misc_feature (56)..(371): NCBI GI NO: 18409509 NR Description: transducin / WD-40 repeat protein family
  misc_feature (146)..(371): NCBI GI NO: 26450470 NR Description: unknown protein [Arabidopsis thaliana]
MQTYGVPIYAADWIPEVDVRSKIIMDPEKSEDDDESSSSSSSSRSCIVLSGGGGEGRSGISNVILICRVDLNTNSLSEQPLGRLVVGSDLPYRMAVHPREGGLICALPNSCKLFHWEDIMSREDNQAGESEEVIKELRDVGQQLALAFNPEGSVLAAGAEDGTLRVFKWPSMNTLLNESQAHSSVKCLTFSESGQFLVSLGGPVCRVWDVNASAAVASLSKEKDEMFASCRFSVDSAGNEVLYIAANTERGGSIITCDTKLWKRKWSKPIKKNSISAFNVSADGKLLAIGTLEGDVLILESTRMQTIQVVKKAHLGLVTALTFSPDSRGLVSVSFDSRARLTMIEQKGDKPGVRWWLLVLLIVLLYVVAYYYMKAKGIIP

SEQ ID NO: 5085 - DNA, 1597 bp, Arabidopsis thaliana
  misc_feature (1)..(1597): Ceres Seq. ID no. 12328282
aaaattctcgattttttttttcttctaaattctggagttttcttttccatatgtggcaaaatccgtgatcctcacgtttcaaaattacctaaaacccctaacaattctacaattcttcttctatgtcgattctatttagtaatctcgaagaatggttcgtggattgatgaaattcccaggaatctcaacgaagttattaaacataagcgttaattctctctgcaaatttcgaaacttggagagagcagaaacattactcatagacggaatcagattaggtgttcttcctgatgtgatcacttacaacactctaatcaaagggtacactcgtttcattggaatcgacgaagcttatgctgtaacacgtcgtatgagagaagctgggatcgaaccagatgttactacttacaattcattgatctcaggagctgctaaaaacttgatgttgaatcgtgtactccaactgttcgacgaaatgcttcactcaggtttgtctcctgatatgtggagttataatactttaatgtcttgttacttcaaattagggagacatggagaagcgtttaagattcttcatgaggatattcatttagctgggttggttcctgggattgatacttataacattctgcttgatgcgctttgtaaaagcggtcatacggataatgcgattgagttgtttaagcatctgaagagtcgggttaaacccgagcttatgacgtataatattctcatcaatggtctttgtaaatcgagaagggttggttctgtggattggatgatgagagagcttaagaaatcgggctatactccgaatgcggttacgtatacaacgatgcttaaaatgtattttaagactaagaggattgagaaaggtcttcagttgtttttgaagatgaagaaagaagggtatacgtttgacgggtttgcgaattgtgcggttgttagtgcgttgattaaaaccggaagagcagaggaggcgtatgagtgtatgcacgagcttgtgagaagtggtacaaggagtcaagacattgtttcgtacaatacattgttgaatttgtattttaaagatgggaacttggatgcagtagatgatctattggaggagattgagatgaaggggttgaaacctgatgactatactcatacgattatagtcaatggtttgttaaatataggcaatacgggaggagccgagaagcatttggcatgtatcggagagatggggatgcagccgagtgttgtcacttgtaactgtttgattgatgggttgtgcaaagcaggtcatgtagatcgtgcaatgaggttgtttgcgtcaatggaagttagagatgagttcacttacacttctgttgtgcataatctatgcaaagacggacggcttgtttgtgcttcgaagctgctcttgtcgtgttacaataaaggaatgaagattccgtcatcggctagacgagcagtgttgtccggcatacgggagacggtatcttaccaagcagcaaggaagacacatatcaaaatcaaagcagctattgagtgtaatacactaatgtacccttaagacattgaaaagtatctaatagaaaaattattgaattgc

SEQ ID NO: 5086 - protein, 468 aa, Arabidopsis thaliana
  peptide (1)..(468): Ceres Seq. ID no. 12328283
  misc_feature (119)..(153): Pfam Name: Pfam Description:  PPR repeat
  misc_feature (1)..(468): NCBI GI NO: 18422700 NR Description: putative protein; protein id: At5g46680
  misc_feature (6)..(468): NCBI GI NO: 21618238 NR Description: unknown [Arabidopsis thaliana]
  misc_feature (52)..(468): NCBI GI NO: 9758504 NR Description: gene_id:MZA15
  misc_feature (1)..(181): NCBI GI NO: 9758504 NR Description: gene_id:MZA15
  misc_feature (52)..(460): NCBI GI NO: 15236699 NR Description: putative protein; protein id: At4g17910.1
  misc_feature (1)..(181): NCBI GI NO: 15236699 NR Description: putative protein; protein id: At4g17910.1
  misc_feature (1)..(434): NCBI GI NO: 15218325 NR Description: hypothetical protein; protein id: At1g09900.1
  misc_feature (1)..(440): NCBI GI NO: 34896698 NR Description: putative pentatricopeptide repeat protein
  misc_feature (1)..(440): NCBI GI NO: 15221515 NR Description: putative membrane-associated salt-inducible protein
  misc_feature (1)..(440): NCBI GI NO: 22531122 NR Description: putative membrane-associated salt-inducible protein
MVRGLMKFPGISTKLLNISVNSLCKFRNLERAETLLIDGIRLGVLPDVITYNTLIKGYTRFIGIDEAYAVTRRMREAGIEPDVTTYNSLISGAAKNLMLNRVLQLFDEMLHSGLSPDMWSYNTLMSCYFKLGRHGEAFKILHEDIHLAGLVPGIDTYNILLDALCKSGHTDNAIELFKHLKSRVKPELMTYNILINGLCKSRRVGSVDWMMRELKKSGYTPNAVTYTTMLKMYFKTKRIEKGLQLFLKMKKEGYTFDGFANCAVVSALIKTGRAEEAYECMHELVRSGTRSQDIVSYNTLLNLYFKDGNLDAVDDLLEEIEMKGLKPDDYTHTIIVNGLLNIGNTGGAEKHLACIGEMGMQPSVVTCNCLIDGLCKAGHVDRAMRLFASMEVRDEFTYTSVVHNLCKDGRLVCASKLLLSCYNKGMKIPSSARRAVLSGIRETVSYQAARKTHIKIKAAIECNTLMYP

SEQ ID NO: 5087 - protein, 463 aa, Arabidopsis thaliana
  peptide (1)..(463): Ceres Seq. ID no. 12328284
  misc_feature (114)..(148): Pfam Name: Pfam Description:  PPR repeat
  misc_feature (1)..(463): NCBI GI NO: 18422700 NR Description: putative protein; protein id: At5g46680
  misc_feature (1)..(463): NCBI GI NO: 21618238 NR Description: unknown [Arabidopsis thaliana]
  misc_feature (47)..(463): NCBI GI NO: 9758504 NR Description: gene_id:MZA15
  misc_feature (1)..(176): NCBI GI NO: 9758504 NR Description: gene_id:MZA15
  misc_feature (47)..(455): NCBI GI NO: 15236699 NR Description: putative protein; protein id: At4g17910.1
  misc_feature (1)..(176): NCBI GI NO: 15236699 NR Description: putative protein; protein id: At4g17910.1
  misc_feature (1)..(429): NCBI GI NO: 15218325 NR Description: hypothetical protein; protein id: At1g09900.1
  misc_feature (1)..(435): NCBI GI NO: 34896698 NR Description: putative pentatricopeptide repeat protein
  misc_feature (1)..(435): NCBI GI NO: 15221515 NR Description: putative membrane-associated salt-inducible protein
  misc_feature (1)..(435): NCBI GI NO: 22531122 NR Description: putative membrane-associated salt-inducible protein
MKFPGISTKLLNISVNSLCKFRNLERAETLLIDGIRLGVLPDVITYNTLIKGYTRFIGIDEAYAVTRRMREAGIEPDVTTYNSLISGAAKNLMLNRVLQLFDEMLHSGLSPDMWSYNTLMSCYFKLGRHGEAFKILHEDIHLAGLVPGIDTYNILLDALCKSGHTDNAIELFKHLKSRVKPELMTYNILINGLCKSRRVGSVDWMMRELKKSGYTPNAVTYTTMLKMYFKTKRIEKGLQLFLKMKKEGYTFDGFANCAVVSALIKTGRAEEAYECMHELVRSGTRSQDIVSYNTLLNLYFKDGNLDAVDDLLEEIEMKGLKPDDYTHTIIVNGLLNIGNTGGAEKHLACIGEMGMQPSVVTCNCLIDGLCKAGHVDRAMRLFASMEVRDEFTYTSVVHNLCKDGRLVCASKLLLSCYNKGMKIPSSARRAVLSGIRETVSYQAARKTHIKIKAAIECNTLMYP

SEQ ID NO: 5088 - protein, 395 aa, Arabidopsis thaliana
  peptide (1)..(395): Ceres Seq. ID no. 12328285
  misc_feature (46)..(80): Pfam Name: Pfam Description:  PPR repeat
  misc_feature (1)..(395): NCBI GI NO: 18422700 NR Description: putative protein; protein id: At5g46680
  misc_feature (1)..(395): NCBI GI NO: 21618238 NR Description: unknown [Arabidopsis thaliana]
  misc_feature (1)..(395): NCBI GI NO: 9758504 NR Description: gene_id:MZA15
  misc_feature (1)..(108): NCBI GI NO: 9758504 NR Description: gene_id:MZA15
  misc_feature (1)..(387): NCBI GI NO: 15236699 NR Description: putative protein; protein id: At4g17910.1
  misc_feature (1)..(108): NCBI GI NO: 15236699 NR Description: putative protein; protein id: At4g17910.1
  misc_feature (1)..(361): NCBI GI NO: 15218325 NR Description: hypothetical protein; protein id: At1g09900.1
  misc_feature (1)..(367): NCBI GI NO: 34896698 NR Description: putative pentatricopeptide repeat protein
  misc_feature (1)..(367): NCBI GI NO: 15221515 NR Description: putative membrane-associated salt-inducible protein
  misc_feature (1)..(367): NCBI GI NO: 22531122 NR Description: putative membrane-associated salt-inducible protein
MREAGIEPDVTTYNSLISGAAKNLMLNRVLQLFDEMLHSGLSPDMWSYNTLMSCYFKLGRHGEAFKILHEDIHLAGLVPGIDTYNILLDALCKSGHTDNAIELFKHLKSRVKPELMTYNILINGLCKSRRVGSVDWMMRELKKSGYTPNAVTYTTMLKMYFKTKRIEKGLQLFLKMKKEGYTFDGFANCAVVSALIKTGRAEEAYECMHELVRSGTRSQDIVSYNTLLNLYFKDGNLDAVDDLLEEIEMKGLKPDDYTHTIIVNGLLNIGNTGGAEKHLACIGEMGMQPSVVTCNCLIDGLCKAGHVDRAMRLFASMEVRDEFTYTSVVHNLCKDGRLVCASKLLLSCYNKGMKIPSSARRAVLSGIRETVSYQAARKTHIKIKAAIECNTLMYP

SEQ ID NO: 5089 - DNA, 1910 bp, Arabidopsis thaliana; identical to SEQ ID NO: 1028
  misc_feature (1)..(1910): Ceres Seq. ID no. 13509014

SEQ ID NO: 5090 - protein, 510 aa, Arabidopsis thaliana; identical to SEQ ID NO: 1029
  peptide (1)..(510): Ceres Seq. ID no. 13509015
  misc_feature (120)..(508): Pfam Name: Pfam Description:  Eukaryotic aspartyl protease
  misc_feature (11)..(510): NCBI GI NO: 15229656 NR Description: chloroplast nucleoid DNA-binding protein -related
  misc_feature (11)..(510): NCBI GI NO: 19424106 NR Description: putative chloroplast nucleoid DNA-binding protein
  misc_feature (28)..(510): NCBI GI NO: 15222611 NR Description: expressed protein [Arabidopsis thaliana]
  misc_feature (14)..(510): NCBI GI NO: 34895664 NR Description: nucleoid DNA-binding protein cnd41-like protein
  misc_feature (53)..(510): NCBI GI NO: 28392860 NR Description: unknown protein [Arabidopsis thaliana]
  misc_feature (64)..(510): NCBI GI NO: 15223368 NR Description: chloroplast nucleoid DNA binding protein -related
  misc_feature (64)..(510): NCBI GI NO: 21594980 NR Description: chloroplast nucleoid DNA binding protein, putative
  misc_feature (116)..(510): NCBI GI NO: 15231010 NR Description: expressed protein [Arabidopsis thaliana]
  misc_feature (52)..(510): NCBI GI NO: 15228618 NR Description: expressed protein [Arabidopsis thaliana]
  misc_feature (86)..(510): NCBI GI NO: 15290061 NR Description: nucleoid DNA-binding protein cnd41-like protein

SEQ ID NO: 5091 - protein, 500 aa, Arabidopsis thaliana [sequence omitted]

SEQ ID NO: 5092 - protein, 326 aa, Arabidopsis thaliana; identical to SEQ ID NO: 1031
  peptide (1)..(326): Ceres Seq. ID no. 13509017
  misc_feature (1)..(324): Pfam Name: Pfam Description:  Eukaryotic aspartyl protease
  misc_feature (1)..(326): NCBI GI NO: 15229656 NR Description: chloroplast nucleoid DNA-binding protein -related
  misc_feature (1)..(326): NCBI GI NO: 19424106 NR Description: putative chloroplast nucleoid DNA-binding protein
  misc_feature (1)..(326): NCBI GI NO: 15222611 NR Description: expressed protein [Arabidopsis thaliana]
  misc_feature (1)..(326): NCBI GI NO: 34895664 NR Description: nucleoid DNA-binding protein cnd41-like protein
  misc_feature (1)..(326): NCBI GI NO: 28392860 NR Description: unknown protein [Arabidopsis thaliana]
  misc_feature (1)..(326): NCBI GI NO: 15223368 NR Description: chloroplast nucleoid DNA binding protein -related
  misc_feature (1)..(326): NCBI GI NO: 21594980 NR Description: chloroplast nucleoid DNA binding protein, putative
  misc_feature (1)..(326): NCBI GI NO: 15231010 NR Description: expressed protein [Arabidopsis thaliana]
  misc_feature (1)..(326): NCBI GI NO: 15228618 NR Description: expressed protein [Arabidopsis thaliana]
  misc_feature (1)..(326): NCBI GI NO: 15290061 NR Description: nucleoid DNA-binding protein cnd41-like protein

SEQ ID NO: 5093 - DNA, 1117 bp, Arabidopsis thaliana
  misc_feature (1)..(1117): Ceres Seq. ID no. 13489076
aaaactaatctgtatgatcgatcttgtgctgaagatatcgaaaagatgtcatctttgggtaggattttgtctgtttcctacccaccggatccgtacacttggcggttttcacagtataagctgtcttcttcactagggcgaaatcggagactcagatggcgattcacggcgttggatcctgaatcttcctcactcgactctgaatcctccgccgataaattcgcttccgggttttgtataatagaagggcctgaaacagtacaggactttgccaaaatgcaattacaagagattcaagataacattcgaagccgacgaaacaagatcttcttgcacatggaagaggtgcggaggctaagaatacaacaacggattaaaaacacagaacttggtatcattaacgaagaacaagaacatgaattacctaatttcccatcttttatcccattcttacctccattgactgctgccaatttgaaagtctattacgcaacttgtttctcactcatcgcggggattatcctattcggtggtctactagctcctactctagagctgaagttaggtataggaggtacatcgtatgcagatttcattcaaagccttcatctacctatgcaattgagtcaagtggacccgatagtagcgtcgttttctggaggagcggttggtgtgatttcggctttgatggtagtagaagttaacaacgtaaagcagcaagagcacaagagatgcaaatactgtctaggaactgggtatctagcatgtgctcgttgctctagcacaggtgctcttgttttaactgaaccagtctcagctattgctggtgggaatcattctctatcaccgcccaaaaccgaaagatgttcaaactgttcaggtgccggaaaggtgatgtgcccgacatgtctgtgcacaggaatggctatggccagtgagcatgatcctcgtatcgaccctttcgattgaattttgcaacacattctacttccttagaatctcattctgtcagtgtaactaaaaatggtatgtactgattaaataattagaaccgcatactttgatctgtatatacacacaattaaagttataatacaatgttagacatgtcttctcc

SEQ ID NO: 5094 - protein, 322 aa, Arabidopsis thaliana
  peptide (1)..(322): Ceres Seq. ID no. 13489077
  misc_feature (16)..(322): NCBI GI NO: 15240312 NR Description: expressed protein [Arabidopsis thaliana]
  misc_feature (70)..(322): NCBI GI NO: 22326624 NR Description: expressed protein [Arabidopsis thaliana]
  misc_feature (76)..(322): NCBI GI NO: 8978349 NR Description: gene_id:K16F4
  misc_feature (75)..(322): NCBI GI NO: 30681288 NR Description: expressed protein [Arabidopsis thaliana]
KTNLYDRSCAEDIEKMSSLGRILSVSYPPDPYTWRFSQYKLSSSLGRNRRLRWRFTALDPESSSLDSESSADKFASGFCIIEGPETVQDFAKMQLQEIQDNIRSRRNKIFLHMEEVRRLRIQQRIKNTELGIINEEQEHELPNFPSFIPFLPPLTAANLKVYYATCFSLIAGIILFGGLLAPTLELKLGIGGTSYADFIQSLHLPMQLSQVDPIVASFSGGAVGVISALMVVEVNNVKQQEHKRCKYCLGTGYLACARCSSTGALVLTEPVSAIAGGNHSLSPPKTERCSNCSGAGKVMCPTCLCTGMAMASEHDPRIDPFD

SEQ ID NO: 5095 - protein, 307 aa, Arabidopsis thaliana
  peptide (1)..(307): Ceres Seq. ID no. 13489078
  misc_feature (1)..(307): NCBI GI NO: 15240312 NR Description: expressed protein [Arabidopsis thaliana]
  misc_feature (55)..(307): NCBI GI NO: 22326624 NR Description: expressed protein [Arabidopsis thaliana]
  misc_feature (61)..(307): NCBI GI NO: 8978349 NR Description: gene_id:K16F4
  misc_feature (60)..(307): NCBI GI NO: 30681288 NR Description: expressed protein [Arabidopsis thaliana]
MSSLGRILSVSYPPDPYTWRFSQYKLSSSLGRNRRLRWRFTALDPESSSLDSESSADKFASGFCIIEGPETVQDFAKMQLQEIQDNIRSRRNKIFLHMEEVRRLRIQQRIKNTELGIINEEQEHELPNFPSFIPFLPPLTAANLKVYYATCFSLIAGIILFGGLLAPTLELKLGIGGTSYADFIQSLHLPMQLSQVDPIVASFSGGAVGVISALMVVEVNNVKQQEHKRCKYCLGTGYLACARCSSTGALVLTEPVSAIAGGNHSLSPPKTERCSNCSGAGKVMCPTCLCTGMAMASEHDPRIDPFD

SEQ ID NO: 5096 - protein, 230 aa, Arabidopsis thaliana
  peptide (1)..(230): Ceres Seq. ID no. 13489079
  misc_feature (1)..(230): NCBI GI NO: 15240312 NR Description: expressed protein [Arabidopsis thaliana]
  misc_feature (1)..(230): NCBI GI NO: 22326624 NR Description: expressed protein [Arabidopsis thaliana]
  misc_feature (1)..(230): NCBI GI NO: 8978349 NR Description: gene_id:K16F4
  misc_feature (1)..(230): NCBI GI NO: 30681288 NR Description: expressed protein [Arabidopsis thaliana]
MQLQEIQDNIRSRRNKIFLHMEEVRRLRIQQRIKNTELGIINEEQEHELPNFPSFIPFLPPLTAANLKVYYATCFSLIAGIILFGGLLAPTLELKLGIGGTSYADFIQSLHLPMQLSQVDPIVASFSGGAVGVISALMVVEVNNVKQQEHKRCKYCLGTGYLACARCSSTGALVLTEPVSAIAGGNHSLSPPKTERCSNCSGAGKVMCPTCLCTGMAMASEHDPRIDPFD

SEQ ID NO: 5097 - DNA, 1165 bp, Arabidopsis thaliana
  misc_feature (1)..(1165): Ceres Seq. ID no. 13496307
atgacccatattctcttgactcgtgaggttaaatgtaaatcactttaaaatataaaaacgtaccttgtcagttttgagactcaaaaggacttgaaatattgaaatccctattctttacgcgtactcgagatttttcgctcttgagagaatcacttcgacaatgtcggtaacggctgctttcattgattcggatcaaactcagcacaacattcttatggattcccaatcaactgtctccggtgtgaaaactgtcaagattagcaatgtttcactaattgtttctaagaaagatgtcaaagagttcttttctttctctggtgacattcaatacgtcgagatgcgaagtgagacacaagagagtcaggtcgcatatgttacttttaaggattcacaaggagctgaaactgcaatgctcttaacgggagctgtcattgcagatcttcgtgttagtataactcctgctgttaactatcagctaccaccagaagcccttgcacttgactcggaacattcgtttaatggtttttctgtcaagaaagctgaagatgtggtgaacatcatggtgggaagaggttatgctcttggaaaagacgccatggagaaagccaaagcatttgatgacagacacaacttgatctcaaacgcttctgcaaccattgcatcgcttgacgataagatgggtctgagcgaaaagctaagcataggaacaactgtggttaatgagaagttgagagatatcgatgagcgatatcaggtgagggagataacgaaatctgctttagcagctgctgaagagacagcaatcagtgcaagaacggctttaatggcaaacccttatgtatcaagtggagcttcgtggttttcaaacgcgtttggcgcagtgacaaaggcggttaaagagaaagttgagaatggaggagaaggaagaaaggagatcatcacacttgatccctcttcacccaaagttcctgctgtagttcctgttaagctcggttgatgcagatctcatcaaaccaatcggatctcgactaaattctttgataggtttgttgttcatatatatgctttcgtatgctaaagagaagataaaaagacataaaccatgaaaggtgttgttacattcaaccagcatttgttcctctcttgaaagagattattaagattc

SEQ ID NO: 5098 - protein, 278 aa, Arabidopsis thaliana
  peptide (1)..(278): Ceres Seq. ID no. 13496308
  misc_feature (31)..(98): Pfam Name: a.k.a. RRM, RBD, or RNP domain Pfam Description: RNA recognition motif.
  misc_feature (1)..(278): NCBI GI NO: 18408904 NR Description: RNA recognition motif (RRM)-containing protein
  misc_feature (1)..(278): NCBI GI NO: 30697598 NR Description: RNA recognition motif (RRM)-containing protein
  misc_feature (1)..(278): NCBI GI NO: 30697595 NR Description: RNA recognition motif (RRM)-containing protein
  misc_feature (1)..(248): NCBI GI NO: 26450623 NR Description: unknown protein [Arabidopsis thaliana]
  misc_feature (60)..(278): NCBI GI NO: 30697600 NR Description: RNA recognition motif (RRM)-containing protein
  misc_feature (60)..(278): NCBI GI NO: 25404689 NR Description: unknown protein, 64612-65506
  misc_feature (28)..(260): NCBI GI NO: 18071362 NR Description: putative splicing regulatory protein
  misc_feature (26)..(266): NCBI GI NO: 38347069 NR Description: OSJNBa0006A01.10
  misc_feature (28)..(263): NCBI GI NO: 38344181 NR Description: OSJNBa0053K19.20
  misc_feature (30)..(247): NCBI GI NO: 18414951 NR Description: RNA recognition motif (RRM)-containing protein
MSVTAAFIDSDQTQHNILMDSQSTVSGVKTVKISNVSLIVSKKDVKEFFSFSGDIQYVEMRSETQESQVAYVTFKDSQGAETAMLLTGAVIADLRVSITPAVNYQLPPEALALDSEHSFNGFSVKKAEDVVNIMVGRGYALGKDAMEKAKAFDDRHNLISNASATIASLDDKMGLSEKLSIGTTVVNEKLRDIDERYQVREITKSALAAAEETAISARTALMANPYVSSGASWFSNAFGAVTKAVKEKVENGGEGRKEIITLDPSSPKVPAVVPVKLG

SEQ ID NO: 5099 - protein, 260 aa, Arabidopsis thaliana
  peptide (1)..(260): Ceres Seq. ID no. 13496309
  misc_feature (13)..(80): Pfam Name: a.k.a. RRM, RBD, or RNP domain Pfam Description: RNA recognition motif.
  misc_feature (1)..(260): NCBI GI NO: 18408904 NR Description: RNA recognition motif (RRM)-containing protein
  misc_feature (1)..(260): NCBI GI NO: 30697598 NR Description: RNA recognition motif (RRM)-containing protein
  misc_feature (1)..(260): NCBI GI NO: 30697595 NR Description: RNA recognition motif (RRM)-containing protein
  misc_feature (1)..(230): NCBI GI NO: 26450623 NR Description: unknown protein [Arabidopsis thaliana]
  misc_feature (42)..(260): NCBI GI NO: 30697600 NR Description: RNA recognition motif (RRM)-containing protein
  misc_feature (42)..(260): NCBI GI NO: 25404689 NR Description: unknown protein, 64612-65506
  misc_feature (10)..(242): NCBI GI NO: 18071362 NR Description: putative splicing regulatory protein
  misc_feature (8)..(248): NCBI GI NO: 38347069 NR Description: OSJNBa0006A01.10
  misc_feature (10)..(245): NCBI GI NO: 38344181 NR Description: OSJNBa0053K19.20
  misc_feature (12)..(229): NCBI GI NO: 18414951 NR Description: RNA recognition motif (RRM)-containing protein
MDSQSTVSGVKTVKISNVSLIVSKKDVKEFFSFSGDIQYVEMRSETQESQVAYVTFKDSQGAETAMLLTGAVIADLRVSITPAVNYQLPPEALALDSEHSFNGFSVKKAEDVVNIMVGRGYALGKDAMEKAKAFDDRHNLISNASATIASLDDKMGLSEKLSIGTTVVNEKLRDIDERYQVREITKSALAAAEETAISARTALMANPYVSSGASWFSNAFGAVTKAVKEKVENGGEGRKEIITLDPSSPKVPAVVPVKLG

SEQ ID NO: 5100 - protein, 219 aa, Arabidopsis thaliana
  peptide (1)..(219): Ceres Seq. ID no. 13496310
  misc_feature (1)..(219): NCBI GI NO: 18408904 NR Description: RNA recognition motif (RRM)-containing protein
  misc_feature (1)..(219): NCBI GI NO: 30697598 NR Description: RNA recognition motif (RRM)-containing protein
  misc_feature (1)..(219): NCBI GI NO: 30697595 NR Description: RNA recognition motif (RRM)-containing protein
  misc_feature (1)..(189): NCBI GI NO: 26450623 NR Description: unknown protein [Arabidopsis thaliana]
  misc_feature (1)..(219): NCBI GI NO: 30697600 NR Description: RNA recognition motif (RRM)-containing protein
  misc_feature (1)..(219): NCBI GI NO: 25404689 NR Description: unknown protein, 64612-65506
  misc_feature (1)..(201): NCBI GI NO: 18071362 NR Description: putative splicing regulatory protein
  misc_feature (1)..(207): NCBI GI NO: 38347069 NR Description: OSJNBa0006A01.10
  misc_feature (1)..(204): NCBI GI NO: 38344181 NR Description: OSJNBa0053K19.20
  misc_feature (1)..(188): NCBI GI NO: 18414951 NR Description: RNA recognition motif (RRM)-containing protein
MRSETQESQVAYVTFKDSQGAETAMLLTGAVIADLRVSITPAVNYQLPPEALALDSEHSFNGFSVKKAEDVVNIMVGRGYALGKDAMEKAKAFDDRHNLISNASATIASLDDKMGLSEKLSIGTTVVNEKLRDIDERYQVREITKSALAAAEETAISARTALMANPYVSSGASWFSNAFGAVTKAVKEKVENGGEGRKEIITLDPSSPKVPAVVPVKLG

SEQ ID NO: 5101 - DNA, 1616 bp, Arabidopsis thaliana
  misc_feature (1)..(1616): Ceres Seq. ID no. 13489064
aaggagaatcattttcgtcttctacttagttttcttcaactcgatttctctgctccatcttcttcctcgtcttctcattctctctcgctctggcacagtagaaactgagctcacgaaagcaggtagtcagtgtttttgtttcgaactcttccaacatgcagaaggaaattgctggtgatgctccatcagcaccaaccactcgtgttcggcatcggaagcgaaacagcgatgttggtgcaggggcaggcaaaccaaatggaaaccatttacttgtcaatgacagcaaaaaatacaaatcgtttctcattcgagcatactccactttctggatgataggtggttttgctcttatagtttacctgggtcatctctacattacagccatggtggttgttattcagatattcatggcacgagaactttttaatttgctgagaaaaactcatgaagataaacagctccctggttttagattactgaattggcacttcttttttacagcaatgctctttgtatatggtcgaatacttagtcaacggctagtcaacactgtgactccagacaaagtcctatatcgactggtcacaagcctcatcaaataccacatggcaatctgttactccttgtatatttctggctttgtttggtttattctcacgctgaaaaagaagatgtacaaatatcagtttagccaatatgcatggacacatatgatattaattgtggtgtttactcagtcctcattcactgtcgccaacatctttgaaggaatcttctggtttcttcttcctgcatcacttatcgtcatcaatgacatatttgcatatatctgtggtttcttctttggaagaacaccgttgatcaagttatcaccaaagaaaacatgggagggtttcattggagcttctattaccacagtgatttctgcattcctgcttgcaaatataatgggtcgtttcctgtggctgacatgtcccagagaggatctatcgacaggctggctcctctgtgaccctggtccactgttcaagcaagagacacatgctttaccaggatggatttctgattggctcccttggaaggaaatttcgattctaccagtccagtggcatgctctatgtcttggattgttcgcctctataatagctccttttggtggcttctttgccagtggtttcaaaagagcattcaaaatcaaggactttggtgatagtattcccggacatggcggaattacagatagaatggattgtcagatggtgatggctgtttttgcctatatatatcatcaatcgtttgttgtacctgaagtcctctctgtggataagctcttagaccagataatcacaagcctgacattggaagaacaacaagcgctactcgtgaagcttggccaaatgttgcaggaaaaggttattggatcttagatcatcacaacccgtcattgtataccatattactctgcttccgtgttacgtctgaaaattattcaaaagaaagagaaaagaaaaaaaaaagtagatttataagtttttttgtttttctcattgtggaattcctctgtatagtactggtacatgctttatgaaagaaaagaagctcactacaattctctt

SEQ ID NO: 5102 - protein, 423 aa, Arabidopsis thaliana
  peptide (1)..(423): Ceres Seq. ID no. 13489065
  misc_feature (1)..(423): NCBI GI NO: 15235611 NR Description: phosphatidate cytidylyltransferase, putative
  misc_feature (1)..(420): NCBI GI NO: 30696710 NR Description: phosphatidate cytidylyltransferase (CDS)
  misc_feature (1)..(420): NCBI GI NO: 7484839 NR Description: CDP-diacylglycerol synthetase homolog F24O1
  misc_feature (1)..(422): NCBI GI NO: 3121837 NR Description: Phosphatidate cytidylyltransferase
  misc_feature (4)..(416): NCBI GI NO: 20303635 NR Description: putative CDP-diacylglycerol synthetase
  misc_feature (10)..(422): NCBI GI NO: 15236874 NR Description: phosphatidate cytidylyltransferase, putative
  misc_feature (44)..(416): NCBI GI NO: 40743157 NR Description: hypothetical protein AN5166.2
  misc_feature (4)..(132): NCBI GI NO: 37532798 NR Description: putative phosphatidate cytidylyltransferase
  misc_feature (277)..(367): NCBI GI NO: 37532798 NR Description: putative phosphatidate cytidylyltransferase
  misc_feature (43)..(421): NCBI GI NO: 22035624 NR Description: phosphatidate cytidylyltransferase 1
MQKEIAGDAPSAPTTRVRHRKRNSDVGAGAGKPNGNHLLVNDSKKYKSFLIRAYSTFWMIGGFALIVYLGHLYITAMVVVIQIFMARELFNLLRKTHEDKQLPGFRLLNWHFFFTAMLFVYGRILSQRLVNTVTPDKVLYRLVTSLIKYHMAICYSLYISGFVWFILTLKKKMYKYQFSQYAWTHMILIVVFTQSSFTVANIFEGIFWFLLPASLIVINDIFAYICGFFFGRTPLIKLSPKKTWEGFIGASITTVISAFLLANIMGRFLWLTCPREDLSTGWLLCDPGPLFKQETHALPGWISDWLPWKEISILPVQWHALCLGLFASIIAPFGGFFASGFKRAFKIKDFGDSIPGHGGITDRMDCQMVMAVFAYIYHQSFVVPEVLSVDKLLDQIITSLTLEEQQALLVKLGQMLQEKVIGS

SEQ ID NO: 5103 - protein, 365 aa, Arabidopsis thaliana
  peptide (1)..(365): Ceres Seq. ID no. 13489066
  misc_feature (1)..(365): NCBI GI NO: 15235611 NR Description: phosphatidate cytidylyltransferase, putative
  misc_feature (1)..(362): NCBI GI NO: 30696710 NR Description: phosphatidate cytidylyltransferase (CDS)
  misc_feature (1)..(362): NCBI GI NO: 7484839 NR Description: CDP-diacylglycerol synthetase homolog F24O1
  misc_feature (1)..(364): NCBI GI NO: 3121837 NR Description: Phosphatidate cytidylyltransferase
  misc_feature (1)..(358): NCBI GI NO: 20303635 NR Description: putative CDP-diacylglycerol synthetase
  misc_feature (1)..(364): NCBI GI NO: 15236874 NR Description: phosphatidate cytidylyltransferase, putative
  misc_feature (1)..(358): NCBI GI NO: 40743157 NR Description: hypothetical protein AN5166.2
  misc_feature (1)..(74): NCBI GI NO: 37532798 NR Description: putative phosphatidate cytidylyltransferase
  misc_feature (219)..(309): NCBI GI NO: 37532798 NR Description: putative phosphatidate cytidylyltransferase
  misc_feature (1)..(363): NCBI GI NO: 22035624 NR Description: phosphatidate cytidylyltransferase 1
MIGGFALIVYLGHLYITAMVVVIQIFMARELFNLLRKTHEDKQLPGFRLLNWHFFFTAMLFVYGRILSQRLVNTVTPDKVLYRLVTSLIKYHMAICYSLYISGFVWFILTLKKKMYKYQFSQYAWTHMILIVVFTQSSFTVANIFEGIFWFLLPASLIVINDIFAYICGFFFGRTPLIKLSPKKTWEGFIGASITTVISAFLLANIMGRFLWLTCPREDLSTGWLLCDPGPLFKQETHALPGWISDWLPWKEISILPVQWHALCLGLFASIIAPFGGFFASGFKRAFKIKDFGDSIPGHGGITDRMDCQMVMAVFAYIYHQSFVVPEVLSVDKLLDQIITSLTLEEQQALLVKLGQMLQEKVIGS

SEQ ID NO: 5104 - protein, 347 aa, Arabidopsis thaliana
  peptide (1)..(347): Ceres Seq. ID no. 13489067
  misc_feature (1)..(347): NCBI GI NO: 15235611 NR Description: phosphatidate cytidylyltransferase, putative
  misc_feature (1)..(344): NCBI GI NO: 30696710 NR Description: phosphatidate cytidylyltransferase (CDS)
  misc_feature (1)..(344): NCBI GI NO: 7484839 NR Description: CDP-diacylglycerol synthetase homolog F24O1
  misc_feature (1)..(346): NCBI GI NO: 3121837 NR Description: Phosphatidate cytidylyltransferase
  misc_feature (1)..(340): NCBI GI NO: 20303635 NR Description: putative CDP-diacylglycerol synthetase
  misc_feature (1)..(346): NCBI GI NO: 15236874 NR Description: phosphatidate cytidylyltransferase, putative
  misc_feature (1)..(340): NCBI GI NO: 40743157 NR Description: hypothetical protein AN5166.2
  misc_feature (1)..(56): NCBI GI NO: 37532798 NR Description: putative phosphatidate cytidylyltransferase
  misc_feature (201)..(291): NCBI GI NO: 37532798 NR Description: putative phosphatidate cytidylyltransferase
  misc_feature (1)..(345): NCBI GI NO: 22035624 NR Description: phosphatidate cytidylyltransferase 1
MVVVIQIFMARELFNLLRKTHEDKQLPGFRLLNWHFFFTAMLFVYGRILSQRLVNTVTPDKVLYRLVTSLIKYHMAICYSLYISGFVWFILTLKKKMYKYQFSQYAWTHMILIVVFTQSSFTVANIFEGIFWFLLPASLIVINDIFAYICGFFFGRTPLIKLSPKKTWEGFIGASITTVISAFLLANIMGRFLWLTCPREDLSTGWLLCDPGPLFKQETHALPGWISDWLPWKEISILPVQWHALCLGLFASIIAPFGGFFASGFKRAFKIKDFGDSIPGHGGITDRMDCQMVMAVFAYIYHQSFVVPEVLSVDKLLDQIITSLTLEEQQALLVKLGQMLQEKVIGS

SEQ ID NO: 5105 - DNA, 1265 bp, Arabidopsis thaliana
  misc_feature (1)..(1265): Ceres Seq. ID no. 13488746
attttaagataagaataaaactaaataaggaaaaagaaggataattaggtcatcttcaccttcctcgttgtctcctcacactgtaaaagacttgaagctcatataaaatctcaagcttctatctatttcttctttcatcatcatcatcatcactctctcttcttcttctctctattccatggctttagtacgtgaacgtcgtcagctaaatctccgtcttcctcttcctccaatctccgaccgccgcttctccacctcttcctcctcagccaccaccaccaccgtcgctggctgtaacggaatctccgcttgtgatctcgagaaactcaacgttctcggatgcggaaacggcgggattgtttacaaagtccgtcataaaaccacatcggagatctacgctttgaaaacagttaacggcgacatggatccgattttcacaagacagttgatgcgagagatggagattctccgccgtacagattcaccgtacgtcgttaagtgtcacggaatcttcgagaaacctgtcgtcggtgaagtatcgattctaatggagtatatggacggcggaaccctagaatcactacgcggcggtgtaacggagcaaaaactcgccggattcgctaaacagatcttaaaaggattaagctatttacacgctcttaagatcgttcatcgtgatatcaaaccggcgaatcttcttctcaattcgaaaaacgaagttaaaatcgctgatttcggagttagtaagatcttagtccgatcattagattcgtgtaattcgtatgttggtacttgtgcttatatgagtccggagaggtttgattcggaatcttccggtggaagctctgatatctacgccggagatatctggagtttcggattgatgatgcttgagcttctcgttggtcattttcctttgcttccgccgggacagagacctgattgggcgacgttgatgtgcgcggtgtgttttggagaaccgccgcgagcgccggaggggtgttctgaagagtttaggagcttcgttgagtgttgtctccgtaaagattcgagtaagcgatggacggcgccgcagcttcttgctcatccttttctccgggaagatctttgattcgattccttttgtaacagaatctggaatcttaaaagttggaatattagatttgaaattattttaatttttgtagagttttctggagatatttatgatcgtgatttttgtacatataatatactccagaatgttaggggaaaatcgttcttgt

SEQ ID NO: 5106 - protein, 310 aa, Arabidopsis thaliana
  peptide (1)..(310): Ceres Seq. ID no. 13488747
  misc_feature (47)..(306): Pfam Name: Pfam Description:  Protein kinase domain
  misc_feature (1)..(310): NCBI GI NO: 15219482 NR Description: mitogen-activated protein kinase kinase
  misc_feature (1)..(310): NCBI GI NO: 15221060 NR Description: mitogen-activated protein kinase kinase
  misc_feature (1)..(294): NCBI GI NO: 15230671 NR Description: mitogen-activated protein kinase kinase
  misc_feature (10)..(309): NCBI GI NO: 33563103 NR Description: mitogen-activated protein kinase kinase
  misc_feature (1)..(306): NCBI GI NO: 15232491 NR Description: mitogen-activated protein kinase kinase
  misc_feature (1)..(306): NCBI GI NO: 19698851 NR Description: MAP kinase kinase 5 [Arabidopsis thaliana]
  misc_feature (1)..(306): NCBI GI NO: 25287595 NR Description: mitogen-activated protein kinase kinase (EC 2
  misc_feature (10)..(309): NCBI GI NO: 12484128 NR Description: mitogen-activated protein kinase 2
  misc_feature (1)..(306): NCBI GI NO: 15528439 NR Description: MEK map kinase kinsae
  misc_feature (10)..(306): NCBI GI NO: 15217998 NR Description: mitogen-activated protein kinase kinase
MALVRERRQLNLRLPLPPISDRRFSTSSSSATTTTVAGCNGISACDLEKLNVLGCGNGGIVYKVRHKTTSEIYALKTVNGDMDPIFTRQLMREMEILRRTDSPYVVKCHGIFEKPVVGEVSILMEYMDGGTLESLRGGVTEQKLAGFAKQILKGLSYLHALKIVHRDIKPANLLLNSKNEVKIADFGVSKILVRSLDSCNSYVGTCAYMSPERFDSESSGGSSDIYAGDIWSFGLMMLELLVGHFPLLPPGQRPDWATLMCAVCFGEPPRAPEGCSEEFRSFVECCLRKDSSKRWTAPQLLAHPFLREDL

SEQ ID NO: 5107 - protein, 229 aa, Arabidopsis thaliana
  peptide (1)..(229): Ceres Seq. ID no. 13488748
  misc_feature (1)..(225): Pfam Name: Pfam Description:  Protein kinase domain
  misc_feature (1)..(229): NCBI GI NO: 15219482 NR Description: mitogen-activated protein kinase kinase
  misc_feature (1)..(229): NCBI GI NO: 15221060 NR Description: mitogen-activated protein kinase kinase
  misc_feature (1)..(213): NCBI GI NO: 15230671 NR Description: mitogen-activated protein kinase kinase
  misc_feature (1)..(228): NCBI GI NO: 33563103 NR Description: mitogen-activated protein kinase kinase
  misc_feature (1)..(225): NCBI GI NO: 15232491 NR Description: mitogen-activated protein kinase kinase
  misc_feature (1)..(225): NCBI GI NO: 19698851 NR Description: MAP kinase kinase 5 [Arabidopsis thaliana]
  misc_feature (1)..(225): NCBI GI NO: 25287595 NR Description: mitogen-activated protein kinase kinase (EC 2
  misc_feature (1)..(228): NCBI GI NO: 12484128 NR Description: mitogen-activated protein kinase 2
  misc_feature (1)..(225): NCBI GI NO: 15528439 NR Description: MEK map kinase kinsae
  misc_feature (1)..(225): NCBI GI NO: 15217998 NR Description: mitogen-activated protein kinase kinase
MDPIFTRQLMREMEILRRTDSPYVVKCHGIFEKPVVGEVSILMEYMDGGTLESLRGGVTEQKLAGFAKQILKGLSYLHALKIVHRDIKPANLLLNSKNEVKIADFGVSKILVRSLDSCNSYVGTCAYMSPERFDSESSGGSSDIYAGDIWSFGLMMLELLVGHFPLLPPGQRPDWATLMCAVCFGEPPRAPEGCSEEFRSFVECCLRKDSSKRWTAPQLLAHPFLREDL

SEQ ID NO: 5108 - protein, 220 aa, Arabidopsis thaliana
  peptide (1)..(220): Ceres Seq. ID no. 13488749
  misc_feature (1)..(216): Pfam Name: Pfam Description:  Protein kinase domain
  misc_feature (1)..(220): NCBI GI NO: 15219482 NR Description: mitogen-activated protein kinase kinase
  misc_feature (1)..(220): NCBI GI NO: 15221060 NR Description: mitogen-activated protein kinase kinase
  misc_feature (1)..(204): NCBI GI NO: 15230671 NR Description: mitogen-activated protein kinase kinase
  misc_feature (1)..(219): NCBI GI NO: 33563103 NR Description: mitogen-activated protein kinase kinase
  misc_feature (1)..(216): NCBI GI NO: 15232491 NR Description: mitogen-activated protein kinase kinase
  misc_feature (1)..(216): NCBI GI NO: 19698851 NR Description: MAP kinase kinase 5 [Arabidopsis thaliana]
  misc_feature (1)..(216): NCBI GI NO: 25287595 NR Description: mitogen-activated protein kinase kinase (EC 2
  misc_feature (1)..(219): NCBI GI NO: 12484128 NR Description: mitogen-activated protein kinase 2
  misc_feature (1)..(216): NCBI GI NO: 15528439 NR Description: MEK map kinase kinsae
  misc_feature (1)..(216): NCBI GI NO: 15217998 NR Description: mitogen-activated protein kinase kinase
MREMEILRRTDSPYVVKCHGIFEKPVVGEVSILMEYMDGGTLESLRGGVTEQKLAGFAKQILKGLSYLHALKIVHRDIKPANLLLNSKNEVKIADFGVSKILVRSLDSCNSYVGTCAYMSPERFDSESSGGSSDIYAGDIWSFGLMMLELLVGHFPLLPPGQRPDWATLMCAVCFGEPPRAPEGCSEEFRSFVECCLRKDSSKRWTAPQLLAHPFLREDL

SEQ ID NO: 5109 - DNA, 1521 bp, Arabidopsis thaliana
  misc_feature (1)..(1521): Ceres Seq. ID no. 13580369
ccaaacaacaaaagcatcataagaagaagaagaaactaatcatttttctgattctcccacgaagatgaaccacctcgttcgtaaaagctccgtcggttactccgccttgaggtccgtttcgtacctccgtcaatctgccgttacctctccacctccgattttctccgccgccgcttcaaccgttcgccagttcacttccgccggctatccttccaacagttttcaattgacgccgccgacgaattggggaatccggatagttccggagaggaaggcgtttgtgattgagcgattcggtaaatacgctacgacgttgccgtcggggattcatttcctcattccgttcgtggatcgtattgcttatgttcattctctcaaggaagaagctatcccgattccgaatcagactgcgattactaaagacaacgttagtatccacatcgatggtgttctctacgttaagattgtggatcctaagttagcttcttatggcgttgagagtcctatctatgctgttgtacagctggctcagaccacaatgcgtagtgagcttggtaagatcactcttgataagacctttgaggaacgagacactctcaacgagaagatagtggaagccatcaatgttgctgcaaaagactggggtcttcagtgccttcgttatgagataagggatattatgccccctcatggagtgcgagctgctatggaaatgcaagctgaagctgagcgtaaaaagagagcccagattcttgagtctgaaggagaaaggcaatcccatatcaacattgctgatggtaagaaaagttctgtaatcttggcatctgaagcagcaaagatggaccaggtgaatcgagcacaaggtgaggcagaagcaatactagctagagcacaagcaactgcgaaaggcctggtcttgttatctcagtccctcaaggaaactgggggagtagaggcggcgagtttgagagttgcagagcaatacattacagccttcggtaacattgccaaggagggtacgataatgttgcttccaagtggtgcttcaaatcctgctagcatgattgctcaagctttaacaatgtacaaaagccttgtcatcaatggtccaagcaaagatcaccaagaaacacaagcacttgatgaaacagatttggaagagttggaagacatgggtgagaaacatatatcagaaggctctaataaccgatcaggctcaatatcatttgacacagagaaaccaggtcacaccggtgaaccacgattttctcttcagaaccgcaacaaggatccgcagtaggcagccgaaccggggatgagataaattctttgggcttgagaaaactggaaaccatttttcatctttcaaatatgaggcagtaaccatcttttccgtttgaatagctagaatatcatcactttgcatatagaaacgaatctgaacatctgttctccgataagaattttcctactggatttgttatgaacatggtccttgtgttcttattcacctttattccc

SEQ ID NO: 5110 - protein, 411 aa, Arabidopsis thaliana
  peptide (1)..(411): Ceres Seq. ID no. 13580370
  misc_feature (1)..(411): NCBI GI NO: 18417021 NR Description: expressed protein [Arabidopsis thaliana]
  misc_feature (1)..(393): NCBI GI NO: 7487517 NR Description: hypothetical protein T29A15
  misc_feature (1)..(350): NCBI GI NO: 15239547 NR Description: expressed protein [Arabidopsis thaliana]
  misc_feature (1)..(350): NCBI GI NO: 21554125 NR Description: stomatin-like protein [Arabidopsis thaliana]
  misc_feature (19)..(372): NCBI GI NO: 7716464 NR Description: stomatin-like protein [Zea mays]
  misc_feature (41)..(344): NCBI GI NO: 23394406 NR Description: unknown [Phytophthora infestans]
  misc_feature (63)..(351): NCBI GI NO: 15604196 NR Description: unknown [Rickettsia prowazekii]
  misc_feature (63)..(344): NCBI GI NO: 15892375 NR Description: unknown [Rickettsia conorii]
  misc_feature (58)..(373): NCBI GI NO: 32766629 NR Description: Unknown (protein for MGC:63505) [Danio rerio]
  misc_feature (58)..(376): NCBI GI NO: 12963591 NR Description: stomatin-like protein 2 [Mus musculus]
MNHLVRKSSVGYSALRSVSYLRQSAVTSPPPIFSAAASTVRQFTSAGYPSNSFQLTPPTNWGIRIVPERKAFVIERFGKYATTLPSGIHFLIPFVDRIAYVHSLKEEAIPIPNQTAITKDNVSIHIDGVLYVKIVDPKLASYGVESPIYAVVQLAQTTMRSELGKITLDKTFEERDTLNEKIVEAINVAAKDWGLQCLRYEIRDIMPPHGVRAAMEMQAEAERKKRAQILESEGERQSHINIADGKKSSVILASEAAKMDQVNRAQGEAEAILARAQATAKGLVLLSQSLKETGGVEAASLRVAEQYITAFGNIAKEGTIMLLPSGASNPASMIAQALTMYKSLVINGPSKDHQETQALDETDLEELEDMGEKHISEGSNNRSGSISFDTEKPGHTGEPRFSLQNRNKDPQ

SEQ ID NO: 5111 - protein, 253 aa, Arabidopsis thaliana
  peptide (1)..(253): Ceres Seq. ID no. 13580371
  misc_feature (1)..(253): NCBI GI NO: 18417021 NR Description: expressed protein [Arabidopsis thaliana]
  misc_feature (1)..(235): NCBI GI NO: 7487517 NR Description: hypothetical protein T29A15
  misc_feature (1)..(192): NCBI GI NO: 15239547 NR Description: expressed protein [Arabidopsis thaliana]
  misc_feature (1)..(192): NCBI GI NO: 21554125 NR Description: stomatin-like protein [Arabidopsis thaliana]
  misc_feature (1)..(214): NCBI GI NO: 7716464 NR Description: stomatin-like protein [Zea mays]
  misc_feature (1)..(186): NCBI GI NO: 23394406 NR Description: unknown [Phytophthora infestans]
  misc_feature (1)..(193): NCBI GI NO: 15604196 NR Description: unknown [Rickettsia prowazekii]
  misc_feature (1)..(186): NCBI GI NO: 15892375 NR Description: unknown [Rickettsia conorii]
  misc_feature (1)..(215): NCBI GI NO: 32766629 NR Description: Unknown (protein for MGC:63505) [Danio rerio]
  misc_feature (1)..(218): NCBI GI NO: 12963591 NR Description: stomatin-like protein 2 [Mus musculus]
MRSELGKITLDKTFEERDTLNEKIVEAINVAAKDWGLQCLRYEIRDIMPPHGVRAAMEMQAEAERKKRAQILESEGERQSHINIADGKKSSVILASEAAKMDQVNRAQGEAEAILARAQATAKGLVLLSQSLKETGGVEAASLRVAEQYITAFGNIAKEGTIMLLPSGASNPASMIAQALTMYKSLVINGPSKDHQETQALDETDLEELEDMGEKHISEGSNNRSGSISFDTEKPGHTGEPRFSLQNRNKDPQ

SEQ ID NO: 5112 - protein, 206 aa, Arabidopsis thaliana
  peptide (1)..(206): Ceres Seq. ID no. 13580372
  misc_feature (1)..(206): NCBI GI NO: 18417021 NR Description: expressed protein [Arabidopsis thaliana]
  misc_feature (1)..(188): NCBI GI NO: 7487517 NR Description: hypothetical protein T29A15
  misc_feature (1)..(145): NCBI GI NO: 15239547 NR Description: expressed protein [Arabidopsis thaliana]
  misc_feature (1)..(145): NCBI GI NO: 21554125 NR Description: stomatin-like protein [Arabidopsis thaliana]
  misc_feature (1)..(167): NCBI GI NO: 7716464 NR Description: stomatin-like protein [Zea mays]
  misc_feature (1)..(139): NCBI GI NO: 23394406 NR Description: unknown [Phytophthora infestans]
  misc_feature (1)..(146): NCBI GI NO: 15604196 NR Description: unknown [Rickettsia prowazekii]
  misc_feature (1)..(139): NCBI GI NO: 15892375 NR Description: unknown [Rickettsia conorii]
  misc_feature (1)..(168): NCBI GI NO: 32766629 NR Description: Unknown (protein for MGC:63505) [Danio rerio]
  misc_feature (1)..(171): NCBI GI NO: 12963591 NR Description: stomatin-like protein 2 [Mus musculus]
MPPHGVRAAMEMQAEAERKKRAQILESEGERQSHINIADGKKSSVILASEAAKMDQVNRAQGEAEAILARAQATAKGLVLLSQSLKETGGVEAASLRVAEQYITAFGNIAKEGTIMLLPSGASNPASMIAQALTMYKSLVINGPSKDHQETQALDETDLEELEDMGEKHISEGSNNRSGSISFDTEKPGHTGEPRFSLQNRNKDPQ

SEQ ID NO: 5113 - DNA, 1285 bp, Arabidopsis thaliana
  misc_feature (1)..(1285): Ceres Seq. ID no. 12328796
aaaatcaaagaagttgacaacaacaacaaaaaatccaaagagaaaacgtatgagttgcttaaaccataaacctcaagctcaaaattttatcaaccttataaagtttcgttttctcgagattttgaatcttttcagctaaaaaagatcacagctttttgcgttttctggatgagtttgagataagagaagatgaagattcagtgtaacgtttgtgaggcggcggaagcgacggttctatgttgcgccgacgaggctgctctttgttgggcttgcgatgagaaaattcacgccgctaataaactcgccggaaaacatcagagagtccctctctctgcctctgcctcttccatacccaaatgtgacatttgtcaggaagcatctggattcttcttttgtctgcaagatagagctttgctatgtaggaaatgtgatgttgcaatccacactgtgaatcctcatgtttcagctcaccagagatttcttctcactggaatcaaagttggtcttgaatctatagacactggtccttctactaaatcctcacctaccaatgatgataaaaccatggagaccaaaccttttgttcaatctatacctgagcctcaaaagatggccttcgatcatcatcatcaccagcagcagcaggaacagcaggaaggagttataccgggaactaaagtcaatgatcagacatcgacaaagcttcctctcgtaagtagcggatcaactactggaagcattcctcagtggcaaatagaggagattttcgggctaaccgactttgatcagagctatgaatacatggagaataatggatcatctaaggcggatactagtagacgaggagattcagacagttcttcgatgatgagatctgcagaagaagatggagaagataacaataactgcttgggaggtgagacatcatgggcggttccacagattcagtctccacctacagcgtctggtctaaactggcctaagcattttcaccaccactctgtgtttgttccggacataacttcttcaactccttataccggttcatccccgaatcaaagggttgggaaacggcggcgacggttctagcatttgtaattatcttttagccgcttgagaaaagagattggcagctttctcagtagatgtaagatcacataaatgatttggaaacttgtaatgtagtgatctgtgagagtcggtgttctttgttagctgaaaaaacaaaaagatgtttatttggttgaagattataaggggttaaattactaagttatcaatttgg

SEQ ID NO: 5114 - protein, 299 aa, Arabidopsis thaliana
  peptide (1)..(299): Ceres Seq. ID no. 12328797
  misc_feature (52)..(99): Pfam Name: Pfam Description:  B-box zinc finger
  misc_feature (1)..(299): NCBI GI NO: 18412037 NR Description: CONSTANS B-box zinc finger family protein
  misc_feature (1)..(212): NCBI GI NO: 17433085 NR Description: Zinc finger protein constans-like 7
  misc_feature (193)..(299): NCBI GI NO: 17433085 NR Description: Zinc finger protein constans-like 7
  misc_feature (172)..(299): NCBI GI NO: 7489603 NR Description: zinc-finger protein R2931 [imported] - rice
  misc_feature (1)..(113): NCBI GI NO: 7489603 NR Description: zinc-finger protein R2931 [imported] - rice
  misc_feature (1)..(140): NCBI GI NO: 34903708 NR Description: putative zinc-finger protein
  misc_feature (178)..(298): NCBI GI NO: 34903708 NR Description: putative zinc-finger protein
  misc_feature (1)..(150): NCBI GI NO: 3618314 NR Description: zinc finger protein
  misc_feature (1)..(108): NCBI GI NO: 15221367 NR Description: salt-tolerance protein; protein id: At1g06040
  misc_feature (1)..(108): NCBI GI NO: 30679541 NR Description: salt-tolerance protein [Arabidopsis thaliana]
MKIQCNVCEAAEATVLCCADEAALCWACDEKIHAANKLAGKHQRVPLSASASSIPKCDICQEASGFFFCLQDRALLCRKCDVAIHTVNPHVSAHQRFLLTGIKVGLESIDTGPSTKSSPTNDDKTMETKPFVQSIPEPQKMAFDHHHHQQQQEQQEGVIPGTKVNDQTSTKLPLVSSGSTTGSIPQWQIEEIFGLTDFDQSYEYMENNGSSKADTSRRGDSDSSSMMRSAEEDGEDNNNCLGGETSWAVPQIQSPPTASGLNWPKHFHHHSVFVPDITSSTPYTGSSPNQRVGKRRRRF

SEQ ID NO: 5115 - protein, 174 aa, Arabidopsis thaliana
  peptide (1)..(174): Ceres Seq. ID no. 12328798
  misc_feature (1)..(174): NCBI GI NO: 18412037 NR Description: CONSTANS B-box zinc finger family protein
  misc_feature (1)..(87): NCBI GI NO: 17433085 NR Description: Zinc finger protein constans-like 7
  misc_feature (68)..(174): NCBI GI NO: 17433085 NR Description: Zinc finger protein constans-like 7
  misc_feature (47)..(174): NCBI GI NO: 7489603 NR Description: zinc-finger protein R2931 [imported] - rice
  misc_feature (1)..(15): NCBI GI NO: 34903708 NR Description: putative zinc-finger protein
  misc_feature (53)..(173): NCBI GI NO: 34903708 NR Description: putative zinc-finger protein
  misc_feature (1)..(25): NCBI GI NO: 3618314 NR Description: zinc finger protein
  misc_feature (1)..(13): NCBI GI NO: 18402646 NR Description: salt tolerance-like protein; protein id: At2g31380
  misc_feature (1)..(13): NCBI GI NO: 25408150 NR Description: hypothetical protein At2g31380
  misc_feature (1)..(133): NCBI GI NO: 15222289 NR Description: CONSTANS B-box zinc finger family protein
METKPFVQSIPEPQKMAFDHHHHQQQQEQQEGVIPGTKVNDQTSTKLPLVSSGSTTGSIPQWQIEEIFGLTDFDQSYEYMENNGSSKADTSRRGDSDSSSMMRSAEEDGEDNNNCLGGETSWAVPQIQSPPTASGLNWPKHFHHHSVFVPDITSSTPYTGSSPNQRVGKRRRRF

SEQ ID NO: 5116 - protein, 159 aa, Arabidopsis thaliana
  peptide (1)..(159): Ceres Seq. ID no. 12328799
  misc_feature (1)..(159): NCBI GI NO: 18412037 NR Description: CONSTANS B-box zinc finger family protein
  misc_feature (1)..(72): NCBI GI NO: 17433085 NR Description: Zinc finger protein constans-like 7
  misc_feature (53)..(159): NCBI GI NO: 17433085 NR Description: Zinc finger protein constans-like 7
  misc_feature (32)..(159): NCBI GI NO: 7489603 NR Description: zinc-finger protein R2931 [imported] - rice
  misc_feature (38)..(158): NCBI GI NO: 34903708 NR Description: putative zinc-finger protein
  misc_feature (1)..(118): NCBI GI NO: 15222289 NR Description: CONSTANS B-box zinc finger family protein
  misc_feature (1)..(18): NCBI GI NO: 22854952 NR Description: COL1 protein [Brassica nigra]
MAFDHHHHQQQQEQQEGVIPGTKVNDQTSTKLPLVSSGSTTGSIPQWQIEEIFGLTDFDQSYEYMENNGSSKADTSRRGDSDSSSMMRSAEEDGEDNNNCLGGETSWAVPQIQSPPTASGLNWPKHFHHHSVFVPDITSSTPYTGSSPNQRVGKRRRRF

SEQ ID NO: 5117 - DNA, 1801 bp, Arabidopsis thaliana
  misc_feature (1)..(1801): Ceres Seq. ID no. 12579671
aaagctggattctaaggaaagttatcaaaagttttgagagctttggatagtgaagctcaaagaactaaacaatgggcttcagagtttgtgttattgtcgtcttcttgggttgtcttcttctagtccctgagaaaacaatggctcaagaaatgaaacgtgcatcgatcgttatccaaggagctcgacgagtttgtgagaccgatgagaactttgtctgtgcgacattggactggtggcctcatgacaagtgcaactatgaccaatgtccttggggttactcttcagttatcaatatggatttaacgcgtccccttcttactaaagctattaaagctttcaagccgttgaggataagaattggtggttcgctgcaagatcaagttatttacgacgtaggaaatctcaaaactccttgccgtccattccaaaaaatgaacagcggtttgtttggattctctaaaggatgcttgcacatgaaacgatgggacgagctcaacagtttcctaaccgcaaccggagcggtagtgacattcggtttaaacgctttgcgtgggagacacaaactccgcggaaaggcgtggggtggtgcatgggatcacataaacactcaagatttcttaaactacacagtctcgaagggttacgttattgattcttgggaattcggaaacgagctgagtggaagcggagttggtgcgagcgtgagcgcagagctttacgggaaagacttgattgtacttaaagatgtaatcaacaaagtttataaaaattcttggttacacaagcctatacttggctcctggagggttctatgaacaacaatggtacaccaaacttcttgaaatttccggtcctagtgttgtcgacgttgtgactcatcatatatacaatcttggttcaggaaatgatcccgcgctggtgaagaagataatggatccgagttatttaagccaggtatcaaaaacattcaaggacgtgaaccagacgattcaagaacatggaccgtgggcttctccttgggttggagaatctggtggagcttacaatagtggtggccgtcatgtttctgacacattcatagatagcttctggtatctagatcagcttggaatgtcagcgagacacaacactaaagtttactgcagacagactttggttggagggttttacggcttgctcgaaaagggaacgtttgttccaaatcctgattactatagcgcgctgctttggcatcgtttaatgggaaaaggggttcttgcggtgcagacagatggaccgccacagctacgggtttacgcacattgttcaaaaggaagagccggtgtgacattgctactgataaatctaagcaatcaatcggattttacggttagtgtcagcaatggcataaacgtggttttgaatgcggaatcaaggaagaagaagtcattgttggatactttaaaaagaccattttcttggattggaagcaaagcttctgatggatatttgaatagagaagagtatcatctgacaccagaaaacggtgtgttgcgcagcaaaacaatgttcttgaatggtaaatcgttaaaaccgacggcaacaggagatatcccgagccttgaaccggtcctccgtagtgtgaactctccgcttaatgtcttgccattgtcgatgtcgttcattgtgttacctaattttgatgcttctgcttgttcatgatgttaatggggtctctctttgcttattgggaaaaaataaataaaaataaagaatagttgtaatttttttggtaattgtatctaatgctggtgataaatgt

SEQ ID NO: 5118 - protein, 256 aa, Arabidopsis thaliana
  peptide (1)..(256): Ceres Seq. ID no. 12579672
  misc_feature (1)..(60): Pfam Name: Pfam Description:  Glycosyl hydrolase family 79, N-terminal domain
  misc_feature (1)..(256): NCBI GI NO: 10176717 NR Description: contains similarity to heparanase~gene_id:MXM12.7
  misc_feature (1)..(256): NCBI GI NO: 15240869 NR Description: glycosyl hydrolase family 79
  misc_feature (1)..(256): NCBI GI NO: 22327999 NR Description: glycosyl hydrolase family 79
  misc_feature (1)..(256): NCBI GI NO: 9757846 NR Description: contains similarity to heparanase~gene_id:MFB13.2
  misc_feature (1)..(255): NCBI GI NO: 38174813 NR Description: putative heparanase
  misc_feature (1)..(152): NCBI GI NO: 34393590 NR Description: putative beta-glucuronidase precursor
  misc_feature (189)..(256): NCBI GI NO: 34393590 NR Description: putative beta-glucuronidase precursor
  misc_feature (1)..(256): NCBI GI NO: 24413987 NR Description: contains ESTs AU097236
  misc_feature (1)..(256): NCBI GI NO: 30692670 NR Description: expressed protein [Arabidopsis thaliana]
  misc_feature (1)..(256): NCBI GI NO: 10177640 NR Description: contains similarity to heparanase~gene_id:MGG23.2
MDPSYLSQVSKTFKDVNQTIQEHGPWASPWVGESGGAYNSGGRHVSDTFIDSFWYLDQLGMSARHNTKVYCRQTLVGGFYGLLEKGTFVPNPDYYSALLWHRLMGKGVLAVQTDGPPQLRVYAHCSKGRAGVTLLLINLSNQSDFTVSVSNGINVVLNAESRKKKSLLDTLKRPFSWIGSKASDGYLNREEYHLTPENGVLRSKTMFLNGKSLKPTATGDIPSLEPVLRSVNSPLNVLPLSMSFIVLPNFDASACS

SEQ ID NO: 5119 - protein, 247 aa, Arabidopsis thaliana
  peptide (1)..(247): Ceres Seq. ID no. 12579673
  misc_feature (27)..(241): Pfam Name: Pfam Description:  Glycosyl hydrolase family 79, N-terminal domain
  misc_feature (1)..(241): NCBI GI NO: 10176717 NR Description: contains similarity to heparanase~gene_id:MXM12.7
  misc_feature (23)..(241): NCBI GI NO: 15240869 NR Description: glycosyl hydrolase family 79
  misc_feature (1)..(241): NCBI GI NO: 22327999 NR Description: glycosyl hydrolase family 79
  misc_feature (27)..(241): NCBI GI NO: 9757846 NR Description: contains similarity to heparanase~gene_id:MFB13.2
  misc_feature (4)..(241): NCBI GI NO: 38174813 NR Description: putative heparanase
  misc_feature (7)..(231): NCBI GI NO: 34393590 NR Description: putative beta-glucuronidase precursor
  misc_feature (76)..(241): NCBI GI NO: 24413987 NR Description: contains ESTs AU097236
  misc_feature (11)..(75): NCBI GI NO: 24413987 NR Description: contains ESTs AU097236
  misc_feature (1)..(233): NCBI GI NO: 30692670 NR Description: expressed protein [Arabidopsis thaliana]
  misc_feature (1)..(233): NCBI GI NO: 10177640 NR Description: contains similarity to heparanase~gene_id:MGG23.2
MGFRVCVIVVFLGCLLLVPEKTMAQEMKRASIVIQGARRVCETDENFVCATLDWWPHDKCNYDQCPWGYSSVINMDLTRPLLTKAIKAFKPLRIRIGGSLQDQVIYDVGNLKTPCRPFQKMNSGLFGFSKGCLHMKRWDELNSFLTATGAVVTFGLNALRGRHKLRGKAWGGAWDHINTQDFLNYTVSKGYVIDSWEFGNELSGSGVGASVSAELYGKDLIVLKDVINKVYKNSWLHKPILGSWRVL

SEQ ID NO: 5120 - protein, 225 aa, Arabidopsis thaliana
  peptide (1)..(225): Ceres Seq. ID no. 12579674
  misc_feature (5)..(219): Pfam Name: Pfam Description:  Glycosyl hydrolase family 79, N-terminal domain
  misc_feature (1)..(219): NCBI GI NO: 10176717 NR Description: contains similarity to heparanase~gene_id:MXM12.7
  misc_feature (1)..(219): NCBI GI NO: 15240869 NR Description: glycosyl hydrolase family 79
  misc_feature (1)..(219): NCBI GI NO: 22327999 NR Description: glycosyl hydrolase family 79
  misc_feature (5)..(219): NCBI GI NO: 9757846 NR Description: contains similarity to heparanase~gene_id:MFB13.2
  misc_feature (1)..(219): NCBI GI NO: 38174813 NR Description: putative heparanase
  misc_feature (1)..(209): NCBI GI NO: 34393590 NR Description: putative beta-glucuronidase precursor
  misc_feature (54)..(219): NCBI GI NO: 24413987 NR Description: contains ESTs AU097236
  misc_feature (1)..(53): NCBI GI NO: 24413987 NR Description: contains ESTs AU097236
  misc_feature (1)..(211): NCBI GI NO: 30692670 NR Description: expressed protein [Arabidopsis thaliana]
  misc_feature (1)..(211): NCBI GI NO: 10177640 NR Description: contains similarity to heparanase~gene_id:MGG23.2
MAQEMKRASIVIQGARRVCETDENFVCATLDWWPHDKCNYDQCPWGYSSVINMDLTRPLLTKAIKAFKPLRIRIGGSLQDQVIYDVGNLKTPCRPFQKMNSGLFGFSKGCLHMKRWDELNSFLTATGAVVTFGLNALRGRHKLRGKAWGGAWDHINTQDFLNYTVSKGYVIDSWEFGNELSGSGVGASVSAELYGKDLIVLKDVINKVYKNSWLHKPILGSWRVL

SEQ ID NO: 5121 - DNA, 1253 bp, Arabidopsis thaliana
  misc_feature (1)..(1253): Ceres Seq. ID no. 12395394
attatcactacccacatctgtcttaccttctccgatctctctctctatttgtccacctcacacacaaccctataaacaagacaagacctcgcaaagctcaaaccttttccttctttttttctatcaagttcctcacttctcggatccgggtcctaaatctgggtcaaccctttttacgatcatcggaaatggaccctccactagtgaacgattcctccttctctgcagctaatccttcttcttacactctctccgagatttggcctttccctgtaaacgacgccgttcgctctggtctccgtttagctgttaactccggtcgagtctttactcgctctgaacattccggcaataaagacgtctccgcggctgaggaatctacagtcaccgatctaactgctggctggggaagtagaaagactagagatttgaactctgaggatgattcttcaaagatggtttcttccagcagcagtggtaatgaattgaaagaatcaggggataagaaaagaaaactgtgtggatctgaaagtggaaatggagatggttcgatgagacctgaaggcgaaacaagttcgggtggtggtggaagcaaagcaacggaacagaagaacaaacctgagccaccaaaggattatattcatgtgagagcaagaagaggacaagctactgaccggcatagtttagcagagcgagctagaagagaaaagatcagtgagaagatgacagctcttcaagatataattccaggatgtaataagataatcggaaaagcccttgtgctcgatgagattatcaattatattcagtcattgcagcggcaagttgagtttctatcaatgaagctagaagttgttaactcgggtgcaagtactggtccgacaataggagtttttccttccggtgatctcgggactttaccgattgacgttcatcgaacaatatacgagcaacaagaagctaatgaaacccgagtatctcaaccggagtggctccatatgcaggttgatgggaactttaaccgaaccacataaaaaagagtctttctctgattgatggatgtgttttgtaggcagtaaaaatgaatgcaaccctttattttttatcctatgcgtgtgtatcattttgctgttatatcataagatagaatatgagagtgaccagagagattaacactttataaaacattgttgtattgtcctattatataacttgtaacaattgattcagtaacatatgttggtcttaaatcc

SEQ ID NO: 5122 - protein, 343 aa, Arabidopsis thaliana
  peptide (1)..(343): Ceres Seq. ID no. 12395395
  misc_feature (222)..(272): Pfam Name: Pfam Description:  Helix-loop-helix DNA-binding domain
  misc_feature (63)..(343): NCBI GI NO: 15241896 NR Description: putative protein; protein id: At5g62610
  misc_feature (71)..(343): NCBI GI NO: 33339703 NR Description: MYC1 [Catharanthus roseus]
  misc_feature (134)..(343): NCBI GI NO: 29150361 NR Description: hypothetical protein
  misc_feature (81)..(343): NCBI GI NO: 18406408 NR Description: bHLH protein; protein id: At1g59640
  misc_feature (81)..(343): NCBI GI NO: 21592490 NR Description: unknown [Arabidopsis thaliana]
  misc_feature (81)..(308): NCBI GI NO: 25404871 NR Description: protein T30E16.21
  misc_feature (81)..(308): NCBI GI NO: 25453562 NR Description: helix-loop-helix protein homolog
  misc_feature (81)..(308): NCBI GI NO: 30696324 NR Description: bHLH protein [Arabidopsis thaliana]
  misc_feature (50)..(286): NCBI GI NO: 20127085 NR Description: putative bHLH transcription factor
  misc_feature (124)..(295): NCBI GI NO: 29647487 NR Description: OJ1191_A10.7
YHYPHLSYLLRSLSLFVHLTHNPINKTRPRKAQTFSFFFSIKFLTSRIRVLNLGQPFLRSSEMDPPLVNDSSFSAANPSSYTLSEIWPFPVNDAVRSGLRLAVNSGRVFTRSEHSGNKDVSAAEESTVTDLTAGWGSRKTRDLNSEDDSSKMVSSSSSGNELKESGDKKRKLCGSESGNGDGSMRPEGETSSGGGGSKATEQKNKPEPPKDYIHVRARRGQATDRHSLAERARREKISEKMTALQDIIPGCNKIIGKALVLDEIINYIQSLQRQVEFLSMKLEVVNSGASTGPTIGVFPSGDLGTLPIDVHRTIYEQQEANETRVSQPEWLHMQVDGNFNRTT

SEQ ID NO: 5123 - protein, 281 aa, Arabidopsis thaliana
  peptide (1)..(281): Ceres Seq. ID no. 12395396
  misc_feature (160)..(210): Pfam Name: Pfam Description:  Helix-loop-helix DNA-binding domain
  misc_feature (1)..(281): NCBI GI NO: 15241896 NR Description: putative protein; protein id: At5g62610
  misc_feature (9)..(281): NCBI GI NO: 33339703 NR Description: MYC1 [Catharanthus roseus]
  misc_feature (72)..(281): NCBI GI NO: 29150361 NR Description: hypothetical protein
  misc_feature (19)..(281): NCBI GI NO: 18406408 NR Description: bHLH protein; protein id: At1g59640
  misc_feature (19)..(281): NCBI GI NO: 21592490 NR Description: unknown [Arabidopsis thaliana]
  misc_feature (19)..(246): NCBI GI NO: 25404871 NR Description: protein T30E16.21
  misc_feature (19)..(246): NCBI GI NO: 25453562 NR Description: helix-loop-helix protein homolog
  misc_feature (19)..(246): NCBI GI NO: 30696324 NR Description: bHLH protein [Arabidopsis thaliana]
  misc_feature (1)..(224): NCBI GI NO: 20127085 NR Description: putative bHLH transcription factor
  misc_feature (62)..(233): NCBI GI NO: 29647487 NR Description: OJ1191_A10.7
MDPPLVNDSSFSAANPSSYTLSEIWPFPVNDAVRSGLRLAVNSGRVFTRSEHSGNKDVSAAEESTVTDLTAGWGSRKTRDLNSEDDSSKMVSSSSSGNELKESGDKKRKLCGSESGNGDGSMRPEGETSSGGGGSKATEQKNKPEPPKDYIHVRARRGQATDRHSLAERARREKISEKMTALQDIIPGCNKIIGKALVLDEIINYIQSLQRQVEFLSMKLEVVNSGASTGPTIGVFPSGDLGTLPIDVHRTIYEQQEANETRVSQPEWLHMQVDGNFNRTT

SEQ ID NO: 5124 - protein, 192 aa, Arabidopsis thaliana
  peptide (1)..(192): Ceres Seq. ID no. 12395397
  misc_feature (71)..(121): Pfam Name: Pfam Description:  Helix-loop-helix DNA-binding domain
  misc_feature (1)..(192): NCBI GI NO: 15241896 NR Description: putative protein; protein id: At5g62610
  misc_feature (1)..(192): NCBI GI NO: 33339703 NR Description: MYC1 [Catharanthus roseus]
  misc_feature (1)..(192): NCBI GI NO: 29150361 NR Description: hypothetical protein
  misc_feature (1)..(192): NCBI GI NO: 18406408 NR Description: bHLH protein; protein id: At1g59640
  misc_feature (1)..(192): NCBI GI NO: 21592490 NR Description: unknown [Arabidopsis thaliana]
  misc_feature (1)..(157): NCBI GI NO: 25404871 NR Description: protein T30E16.21
  misc_feature (1)..(157): NCBI GI NO: 25453562 NR Description: helix-loop-helix protein homolog
  misc_feature (1)..(157): NCBI GI NO: 30696324 NR Description: bHLH protein [Arabidopsis thaliana]
  misc_feature (1)..(135): NCBI GI NO: 20127085 NR Description: putative bHLH transcription factor
  misc_feature (1)..(144): NCBI GI NO: 29647487 NR Description: OJ1191_A10.7
MVSSSSSGNELKESGDKKRKLCGSESGNGDGSMRPEGETSSGGGGSKATEQKNKPEPPKDYIHVRARRGQATDRHSLAERARREKISEKMTALQDIIPGCNKIIGKALVLDEIINYIQSLQRQVEFLSMKLEVVNSGASTGPTIGVFPSGDLGTLPIDVHRTIYEQQEANETRVSQPEWLHMQVDGNFNRTT

SEQ ID NO: 5125 - DNA, 1209 bp, Arabidopsis thaliana
  misc_feature (1)..(1209): Ceres Seq. ID no. 12324683
aaccccattaaccgtttcaaaaggaaattaaggagttgttcatagtttcgtttgtaaattgcaattgtaagtttgtaactgtaatagaattagattatttagggtttgcttgatcctcgatctgtgatcgattgatctcgcttcgcacccagcaggtttatttaatgagcgtgaaagatggctaagataatgcttggatctcactcggttaagagccatggatggaaggtggctcgtgaacatctttgtgactggctcatcctcgtagtcctcggtctcatcgacattgtactcaatgttatcgagccttttcatcgctatattggacctgacatgttaaccgatctcactttcccattttatgaagacaccatccctatgtgggctgtcccgattatttgtatattggttccgatatgcatcttcatagtgtactattactatcgaagagatgtttatgatcttcatcacgccattctcggtatcggattctcatgtcttgtgactggagtcaccactgattccatcaaagacgcggtcggtaggccacgccctaacttcttttaccgatgttttcccaatggtaaaccgaaatttcatccggatactaaggatgttgtgtgtcatggagttaaaaagataatcaaagaaggttacaagagtttccctagtggtcacacttcatggtcattcgctggtttaactttcctagcgtggtacttatcgggtaaaatcaaagtctttgacagaagaggtcacgtggcgaagctatgcctcgtgttcttaccgatactcatatcaattctcatcggaatatcacgcgtagacgactattggcaccattggaccgatgtcttcgccggagctatcatcggaatttttgtcgcttctttctcttacctccacttttttccttacccttacgacgaaaacggatgggctccacatgcgtattttagaatgttggcggagaggagcactggtcgagccacgacgatgactcgaaccggttctcgaggaatgttggacaacgacgttgagcctggcaactccgcgtcctcgccgcacgatcgccaccgtgaaagcactgattctgacttttgaaaatttcctccacaatgttttaaaaaaaagaagttaattatccgtgtaatttttaattgtatgattgttttcacttactgatatataatatgtatacttttcatt

SEQ ID NO: 5126 - protein, 308 aa, Arabidopsis thaliana
  peptide (1)..(308): Ceres Seq. ID no. 12324684
  misc_feature (73)..(249): Pfam Name: Pfam Description:  PAP2 superfamily
  misc_feature (1)..(308): NCBI GI NO: 21593222 NR Description: diacylglycerol pyrophosphate phosphatase, putative
  misc_feature (1)..(308): NCBI GI NO: 18401811 NR Description: diacylglycerol pyrophosphate phosphatase, putative
  misc_feature (1)..(308): NCBI GI NO: 9279656 NR Description: phosphatidic acid phosphatase-like protein
  misc_feature (1)..(265): NCBI GI NO: 15218051 NR Description: putative phosphatidic acid phosphatase
  misc_feature (1)..(269): NCBI GI NO: 10673973 NR Description: phosphatidic acid phosphatase beta
  misc_feature (1)..(298): NCBI GI NO: 38637528 NR Description: unknown protein
  misc_feature (3)..(297): NCBI GI NO: 9621903 NR Description: phosphatidic acid phosphatase alpha
  misc_feature (1)..(269): NCBI GI NO: 38637527 NR Description: putative phosphatidic acid phosphatase beta
  misc_feature (1)..(278): NCBI GI NO: 21554001 NR Description: putative phosphatidic acid phosphatase
  misc_feature (1)..(278): NCBI GI NO: 15724220 NR Description: At2g01180/F10A8.6 [Arabidopsis thaliana]
MAKIMLGSHSVKSHGWKVAREHLCDWLILVVLGLIDIVLNVIEPFHRYIGPDMLTDLTFPFYEDTIPMWAVPIICILVPICIFIVYYYYRRDVYDLHHAILGIGFSCLVTGVTTDSIKDAVGRPRPNFFYRCFPNGKPKFHPDTKDVVCHGVKKIIKEGYKSFPSGHTSWSFAGLTFLAWYLSGKIKVFDRRGHVAKLCLVFLPILISILIGISRVDDYWHHWTDVFAGAIIGIFVASFSYLHFFPYPYDENGWAPHAYFRMLAERSTGRATTMTRTGSRGMLDNDVEPGNSASSPHDRHRESTDSDF

SEQ ID NO: 5127 - protein, 304 aa, Arabidopsis thaliana
  peptide (1)..(304): Ceres Seq. ID no. 12324685
  misc_feature (69)..(245): Pfam Name: Pfam Description:  PAP2 superfamily
  misc_feature (1)..(304): NCBI GI NO: 21593222 NR Description: diacylglycerol pyrophosphate phosphatase, putative
  misc_feature (1)..(304): NCBI GI NO: 18401811 NR Description: diacylglycerol pyrophosphate phosphatase, putative
  misc_feature (1)..(304): NCBI GI NO: 9279656 NR Description: phosphatidic acid phosphatase-like protein
  misc_feature (1)..(261): NCBI GI NO: 15218051 NR Description: putative phosphatidic acid phosphatase
  misc_feature (1)..(265): NCBI GI NO: 10673973 NR Description: phosphatidic acid phosphatase beta
  misc_feature (1)..(294): NCBI GI NO: 38637528 NR Description: unknown protein
  misc_feature (1)..(293): NCBI GI NO: 9621903 NR Description: phosphatidic acid phosphatase alpha
  misc_feature (1)..(265): NCBI GI NO: 38637527 NR Description: putative phosphatidic acid phosphatase beta
  misc_feature (1)..(274): NCBI GI NO: 21554001 NR Description: putative phosphatidic acid phosphatase
  misc_feature (1)..(274): NCBI GI NO: 15724220 NR Description: At2g01180/F10A8.6 [Arabidopsis thaliana]
MLGSHSVKSHGWKVAREHLCDWLILVVLGLIDIVLNVIEPFHRYIGPDMLTDLTFPFYEDTIPMWAVPIICILVPICIFIVYYYYRRDVYDLHHAILGIGFSCLVTGVTTDSIKDAVGRPRPNFFYRCFPNGKPKFHPDTKDVVCHGVKKIIKEGYKSFPSGHTSWSFAGLTFLAWYLSGKIKVFDRRGHVAKLCLVFLPILISILIGISRVDDYWHHWTDVFAGAIIGIFVASFSYLHFFPYPYDENGWAPHAYFRMLAERSTGRATTMTRTGSRGMLDNDVEPGNSASSPHDRHRESTDSDF

SEQ ID NO: 5128 - protein, 256 aa, Arabidopsis thaliana
  peptide (1)..(256): Ceres Seq. ID no. 12324686
  misc_feature (21)..(197): Pfam Name: Pfam Description:  PAP2 superfamily
  misc_feature (1)..(256): NCBI GI NO: 21593222 NR Description: diacylglycerol pyrophosphate phosphatase, putative
  misc_feature (1)..(256): NCBI GI NO: 18401811 NR Description: diacylglycerol pyrophosphate phosphatase, putative
  misc_feature (1)..(256): NCBI GI NO: 9279656 NR Description: phosphatidic acid phosphatase-like protein
  misc_feature (1)..(213): NCBI GI NO: 15218051 NR Description: putative phosphatidic acid phosphatase
  misc_feature (1)..(217): NCBI GI NO: 10673973 NR Description: phosphatidic acid phosphatase beta
  misc_feature (1)..(246): NCBI GI NO: 38637528 NR Description: unknown protein
  misc_feature (1)..(245): NCBI GI NO: 9621903 NR Description: phosphatidic acid phosphatase alpha
  misc_feature (1)..(217): NCBI GI NO: 38637527 NR Description: putative phosphatidic acid phosphatase beta
  misc_feature (1)..(226): NCBI GI NO: 21554001 NR Description: putative phosphatidic acid phosphatase
  misc_feature (1)..(226): NCBI GI NO: 15724220 NR Description: At2g01180/F10A8.6 [Arabidopsis thaliana]
MLTDLTFPFYEDTIPMWAVPIICILVPICIFIVYYYYRRDVYDLHHAILGIGFSCLVTGVTTDSIKDAVGRPRPNFFYRCFPNGKPKFHPDTKDVVCHGVKKIIKEGYKSFPSGHTSWSFAGLTFLAWYLSGKIKVFDRRGHVAKLCLVFLPILISILIGISRVDDYWHHWTDVFAGAIIGIFVASFSYLHFFPYPYDENGWAPHAYFRMLAERSTGRATTMTRTGSRGMLDNDVEPGNSASSPHDRHRESTDSDF

SEQ ID NO: 5129 - DNA, 1617 bp, Arabidopsis thaliana
  misc_feature (1)..(1617): Ceres Seq. ID no. 13494093
ctagagttagaagtcgaaaaatctcgcttttagattcgttcaggcatttcgtcgagcaccttctctgcattactctcccctacttctctctattcattctttcaatgataagtcctaactaaactccgagagaacactaaaccctaaacccattttgcactctcaattacagatcatccacatttcgcgctttcgtcaaatctctttagatgttcgtcaaatcacaaagctttctcttttcggtgagtaagctgtttcaccagcatcaacaatggcgaggaatgggtgcaatgacaaaggtgagactgaagtgggtgaagaacaagaacctggatcacgtcattgatactgagaccgatctcaaagcagcttgtatcctcaaagacgccataaagcgatctcccactggtttcctcaccgcaaaatccgtcgccgattggcaaaaactccttggtctcaccgtccctgttctccgcttcttgcgcaggtatccgactctgtttcacgaatttcctcatgctcgttacgcaagcttaccatgtttcaagctaacggacacagcactaatgcttgactcacaagaagagattattcatcaaagccacgaggctgatacagtggagagactctgtagagttctgatgatgatgagatcaaaaactgtctctcttagatcactacattctctcaaattcgatctcggtttacccgataactacgaaaagacgctagtcatgaaataccctgatcatttctgcttcgtcaaggcttctaatggtaacccgtgtttaaagcttgtaaaatggcgtgatgagttcgcattctcggcgctgcagaagcgaaacgaggacaatgatgtttccggggaggagtctagataccgcgagttcaagagaggtcagtctacgttgacttttcctatgagtttccctagaggatatggagcacagaagaaggtcaaagcatggatggatgagtttcaaaaacttccctacatatctccttacgatgacccgagtaacattgatccggaaagcgatctcatggagaaacgagctgtggctgttttgcacgagctcttgagcttgactatccacaagaaaaccaagaggaactacttgagaagcatgagagcggagctcaacattccgcacaagttcactcgtctattcacgcgataccccggcattttctacctctcattgaagtgtaagacaacaactgtgatcctcaaagaagggtatcgccgaggaaaactagtggatccgcatcctctcactcgtcttcgagataagttttatcatgtgatgagaacagggtttctttatcgggcgagagggctaggcatggtctctaaagaggaacttttgcttgataggccagaggatgaccttgaggaagaaggctctgaagaagaagagattgtggaaggaagtgagcttgaagaagattctgaagctgaatagcaatagttgttgaatctaattgttgtatgttaattcacacagagcaacaatttatgtacctgcattttatctttttgaagtaacggaacggagtttaaacaatgtaagcacaaagtccttaaaatgatataaagagagattgtatttcacc

SEQ ID NO: 5130 - protein, 418 aa, Arabidopsis thaliana
  peptide (1)..(418): Ceres Seq. ID no. 13494094
  misc_feature (35)..(376): Pfam Name: DUF860 Pfam Description: Plant specific of unknown function
  misc_feature (1)..(418): NCBI GI NO: 18410975 NR Description: expressed protein [Arabidopsis thaliana]
  misc_feature (25)..(418): NCBI GI NO: 11282335 NR Description: hypothetical protein F14P22
  misc_feature (28)..(418): NCBI GI NO: 21536812 NR Description: unknown [Arabidopsis thaliana]
  misc_feature (28)..(405): NCBI GI NO: 15238875 NR Description: hypothetical protein [Arabidopsis thaliana]
  misc_feature (28)..(214): NCBI GI NO: 38346162 NR Description: OSJNBa0079A21.9
  misc_feature (310)..(418): NCBI GI NO: 38346162 NR Description: OSJNBa0079A21.9
  misc_feature (6)..(418): NCBI GI NO: 15217597 NR Description: hypothetical protein [Arabidopsis thaliana]
  misc_feature (6)..(418): NCBI GI NO: 3413424 NR Description: hypothetical protein [Arabidopsis thaliana]
  misc_feature (31)..(399): NCBI GI NO: 15225035 NR Description: hypothetical protein [Arabidopsis thaliana]
  misc_feature (11)..(367): NCBI GI NO: 15233788 NR Description: hypothetical protein [Arabidopsis thaliana]
MFVKSQSFLFSVSKLFHQHQQWRGMGAMTKVRLKWVKNKNLDHVIDTETDLKAACILKDAIKRSPTGFLTAKSVADWQKLLGLTVPVLRFLRRYPTLFHEFPHARYASLPCFKLTDTALMLDSQEEIIHQSHEADTVERLCRVLMMMRSKTVSLRSLHSLKFDLGLPDNYEKTLVMKYPDHFCFVKASNGNPCLKLVKWRDEFAFSALQKRNEDNDVSGEESRYREFKRGQSTLTFPMSFPRGYGAQKKVKAWMDEFQKLPYISPYDDPSNIDPESDLMEKRAVAVLHELLSLTIHKKTKRNYLRSMRAELNIPHKFTRLFTRYPGIFYLSLKCKTTTVILKEGYRRGKLVDPHPLTRLRDKFYHVMRTGFLYRARGLGMVSKEELLLDRPEDDLEEEGSEEEEIVEGSELEEDSEAE

SEQ ID NO: 5131 - protein, 394 aa, Arabidopsis thaliana
  peptide (1)..(394): Ceres Seq. ID no. 13494095
  misc_feature (11)..(352): Pfam Name: DUF860 Pfam Description: Plant specific of unknown function
  misc_feature (1)..(394): NCBI GI NO: 18410975 NR Description: expressed protein [Arabidopsis thaliana]
  misc_feature (1)..(394): NCBI GI NO: 11282335 NR Description: hypothetical protein F14P22
  misc_feature (4)..(394): NCBI GI NO: 21536812 NR Description: unknown [Arabidopsis thaliana]
  misc_feature (4)..(381): NCBI GI NO: 15238875 NR Description: hypothetical protein [Arabidopsis thaliana]
  misc_feature (4)..(190): NCBI GI NO: 38346162 NR Description: OSJNBa0079A21.9
  misc_feature (286)..(394): NCBI GI NO: 38346162 NR Description: OSJNBa0079A21.9
  misc_feature (1)..(394): NCBI GI NO: 15217597 NR Description: hypothetical protein [Arabidopsis thaliana]
  misc_feature (1)..(394): NCBI GI NO: 3413424 NR Description: hypothetical protein [Arabidopsis thaliana]
  misc_feature (7)..(375): NCBI GI NO: 15225035 NR Description: hypothetical protein [Arabidopsis thaliana]
  misc_feature (1)..(343): NCBI GI NO: 15233788 NR Description: hypothetical protein [Arabidopsis thaliana]
MGAMTKVRLKWVKNKNLDHVIDTETDLKAACILKDAIKRSPTGFLTAKSVADWQKLLGLTVPVLRFLRRYPTLFHEFPHARYASLPCFKLTDTALMLDSQEEIIHQSHEADTVERLCRVLMMMRSKTVSLRSLHSLKFDLGLPDNYEKTLVMKYPDHFCFVKASNGNPCLKLVKWRDEFAFSALQKRNEDNDVSGEESRYREFKRGQSTLTFPMSFPRGYGAQKKVKAWMDEFQKLPYISPYDDPSNIDPESDLMEKRAVAVLHELLSLTIHKKTKRNYLRSMRAELNIPHKFTRLFTRYPGIFYLSLKCKTTTVILKEGYRRGKLVDPHPLTRLRDKFYHVMRTGFLYRARGLGMVSKEELLLDRPEDDLEEEGSEEEEIVEGSELEEDSEAE

SEQ ID NO: 5132 - protein, 391 aa, Arabidopsis thaliana
  peptide (1)..(391): Ceres Seq. ID no. 13494096
  misc_feature (8)..(349): Pfam Name: DUF860 Pfam Description: Plant specific of unknown function
  misc_feature (1)..(391): NCBI GI NO: 18410975 NR Description: expressed protein [Arabidopsis thaliana]
  misc_feature (1)..(391): NCBI GI NO: 11282335 NR Description: hypothetical protein F14P22
  misc_feature (1)..(391): NCBI GI NO: 21536812 NR Description: unknown [Arabidopsis thaliana]
  misc_feature (1)..(378): NCBI GI NO: 15238875 NR Description: hypothetical protein [Arabidopsis thaliana]
  misc_feature (1)..(187): NCBI GI NO: 38346162 NR Description: OSJNBa0079A21.9
  misc_feature (283)..(391): NCBI GI NO: 38346162 NR Description: OSJNBa0079A21.9
  misc_feature (1)..(391): NCBI GI NO: 15217597 NR Description: hypothetical protein [Arabidopsis thaliana]
  misc_feature (1)..(391): NCBI GI NO: 3413424 NR Description: hypothetical protein [Arabidopsis thaliana]
  misc_feature (4)..(372): NCBI GI NO: 15225035 NR Description: hypothetical protein [Arabidopsis thaliana]
  misc_feature (1)..(340): NCBI GI NO: 15233788 NR Description: hypothetical protein [Arabidopsis thaliana]
MTKVRLKWVKNKNLDHVIDTETDLKAACILKDAIKRSPTGFLTAKSVADWQKLLGLTVPVLRFLRRYPTLFHEFPHARYASLPCFKLTDTALMLDSQEEIIHQSHEADTVERLCRVLMMMRSKTVSLRSLHSLKFDLGLPDNYEKTLVMKYPDHFCFVKASNGNPCLKLVKWRDEFAFSALQKRNEDNDVSGEESRYREFKRGQSTLTFPMSFPRGYGAQKKVKAWMDEFQKLPYISPYDDPSNIDPESDLMEKRAVAVLHELLSLTIHKKTKRNYLRSMRAELNIPHKFTRLFTRYPGIFYLSLKCKTTTVILKEGYRRGKLVDPHPLTRLRDKFYHVMRTGFLYRARGLGMVSKEELLLDRPEDDLEEEGSEEEEIVEGSELEEDSEAE

SEQ ID NO: 5133 - DNA, 2211 bp, Arabidopsis thaliana
  misc_feature (1)..(2211): Ceres Seq. ID no. 12348668
accagccccattaataaaccaccgggctctgtttcaataaaaaaaatcccctccctctcatatttacctcccgaataaaaccggagggagagaaaaaacataaaaagcaaaaaaaaaggtaaaatcaaaaagggaaaaaatatataacaacaaaaaaaaaaagttagaaaaaatggcagtaggaaaggttgtggtatctgtggcatcactcctcctagtggtgggtgttgccataggagttatcacgttcgttaataaaggaggcggcgccaatggcgacagtaatggtcccataaactctcatcagaaagcggttcagacaatttgccagtcaaccacagaccaaggttcgtgcgcgaaaacactcgacccagtcaaaagtgatgatccaagcaagcttgtcaaagccttcctgatggctactaaagacgcgatcacaaaatcctcaaacttcacggcttcgaccgaaggaggtatgggtactaacatgaacgcgaccagcaaagccgttcttgattactgcaagagagtattgatgtacgctcttgaggatcttgagaccattgttgaagagatgggtgaggatcttcagcagagtggaactaagcttgaccagctcaaacaatggttaactggagttttcaactaccaaaccgattgtcttgacgacatcgaggaagttgagctaaagaagatcatgggtgaaggaatctctaactccaaggttttgaccagtaacgctatcgatatcttccattccgttgttaccgcgatggcccaaatgggtgtcaaagtcgacgatatgaagaacataaccatgggagccggagccggtggagctgcacgtcgccttcttgaagacaacgactctaagggactccccaaatggttttctggtaaagacaggaagcttatggctaaggccggacgtggcgctccagctggcggtgatgatggtatcggtgaaggcggtggtggtggcggtaagatcaaggcgactcatgtagtggctaaggatggaagtggacagtttaagaccatttctgaggcggttatggcttgcccggataaaaaccctggaaggtgcattatccatatcaaggctggtatctacaatgaacaagtcagaatccctaagaagaagaacaacattttcatgttcggtgatggtgctacacaaaccatcattacctttgacagaagtgttaaacttagcccaggaaccactacttcactcagtggcaccgttcaggtcgaatctgagggattcatggcgaaatggattgggtttaagaacactgctggtccattgggacaccaagcggtcgcactccgtgtgaacggagaccgtgcggtcatattcaactgtagattcgacggttaccaagacacactctacgtcaacaacggacgtcaattctacaggaacattgttgtatccggtacagtggatttcatcttcggaaaatccgcaactgtgatccaaaactctctcatcctcgtccgaaagggaagccccggacaatccaactacgttacggctgacggtaatgaaaagggtgcagcgatgaagatcggtatcgtcctccataactgccgtatcataccggacaaggagctcgaagctgacaagctaaccatcaaatcgtacctaggaaggccgtggaagaagtttgccacgactgtgattattggaactgagattggtgatttgattaaaccagaaggatggaccgaatggcaaggagaacaaaaccacaagactgctaaatacattgagttcaataaccgtggaccgggagctgccactactcagaggcctccttgggttaaggtggctaagtctgcggctgaggttgaaacttacaccgtggctaactgggttggtccagctaactggatccaagaagccaacgtgcccgtccaactaggattgtaagaggacaacacaaaaaagttaagaataaaacagtatgtgataatgttaaggtaacgatacgacgtcgtctctggggatcagaactcttttttggatactatatacaaagatagggttctagacgtgttgagatgatgtttgtataagattgctttcgtttcacgtgcaaaagaggaaaaaaaattgttttgttattttttttgtagtacaaataattaatttttttttatcacatgttgtatccttaagaaaattgatacacaaaatatttt

SEQ ID NO: 5134 - protein, 588 aa, Arabidopsis thaliana
  peptide (1)..(588): Ceres Seq. ID no. 12348669
  misc_feature (276)..(574): Pfam Name: Pfam Description:  Pectinesterase
  misc_feature (1)..(588): NCBI GI NO: 15228697 NR Description: pollen-specific pectin esterase, putative
  misc_feature (1)..(588): NCBI GI NO: 1172538 NR Description: Probable pectinesterase precursor
  misc_feature (14)..(588): NCBI GI NO: 6093741 NR Description: Pectinesterase (Pectin methylesterase) (PE)
  misc_feature (3)..(588): NCBI GI NO: 15226490 NR Description: pectinesterase family; protein id: At2g47040
  misc_feature (3)..(588): NCBI GI NO: 25313437 NR Description: pectinesterase (EC 3.1.1.11)
  misc_feature (3)..(588): NCBI GI NO: 15226482 NR Description: pectinesterase family; protein id: At2g47030
  misc_feature (3)..(588): NCBI GI NO: 25313439 NR Description: pectinesterase (EC 3
  misc_feature (3)..(470): NCBI GI NO: 23197964 NR Description: putative pectinesterase [Arabidopsis thaliana]
  misc_feature (1)..(252): NCBI GI NO: 7488527 NR Description: pectin esterase homolog, pollen-specific - turnip
  misc_feature (278)..(587): NCBI GI NO: 21740906 NR Description: OSJNBa0036B21.20
MAVGKVVVSVASLLLVVGVAIGVITFVNKGGGANGDSNGPINSHQKAVQTICQSTTDQGSCAKTLDPVKSDDPSKLVKAFLMATKDAITKSSNFTASTEGGMGTNMNATSKAVLDYCKRVLMYALEDLETIVEEMGEDLQQSGTKLDQLKQWLTGVFNYQTDCLDDIEEVELKKIMGEGISNSKVLTSNAIDIFHSVVTAMAQMGVKVDDMKNITMGAGAGGAARRLLEDNDSKGLPKWFSGKDRKLMAKAGRGAPAGGDDGIGEGGGGGGKIKATHVVAKDGSGQFKTISEAVMACPDKNPGRCIIHIKAGIYNEQVRIPKKKNNIFMFGDGATQTIITFDRSVKLSPGTTTSLSGTVQVESEGFMAKWIGFKNTAGPLGHQAVALRVNGDRAVIFNCRFDGYQDTLYVNNGRQFYRNIVVSGTVDFIFGKSATVIQNSLILVRKGSPGQSNYVTADGNEKGAAMKIGIVLHNCRIIPDKELEADKLTIKSYLGRPWKKFATTVIIGTEIGDLIKPEGWTEWQGEQNHKTAKYIEFNNRGPGAATTQRPPWVKVAKSAAEVETYTVANWVGPANWIQEANVPVQLGL

SEQ ID NO: 5135 - protein, 507 aa, Arabidopsis thaliana
  peptide (1)..(507): Ceres Seq. ID no. 12348670
  misc_feature (195)..(493): Pfam Name: Pfam Description:  Pectinesterase
  misc_feature (1)..(507): NCBI GI NO: 15228697 NR Description: pollen-specific pectin esterase, putative
  misc_feature (1)..(507): NCBI GI NO: 1172538 NR Description: Probable pectinesterase precursor
  misc_feature (1)..(507): NCBI GI NO: 6093741 NR Description: Pectinesterase (Pectin methylesterase) (PE)
  misc_feature (1)..(507): NCBI GI NO: 15226490 NR Description: pectinesterase family; protein id: At2g47040
  misc_feature (1)..(507): NCBI GI NO: 25313437 NR Description: pectinesterase (EC 3.1.1.11)
  misc_feature (1)..(507): NCBI GI NO: 15226482 NR Description: pectinesterase family; protein id: At2g47030
  misc_feature (1)..(507): NCBI GI NO: 25313439 NR Description: pectinesterase (EC 3
  misc_feature (1)..(389): NCBI GI NO: 23197964 NR Description: putative pectinesterase [Arabidopsis thaliana]
  misc_feature (1)..(171): NCBI GI NO: 7488527 NR Description: pectin esterase homolog, pollen-specific - turnip
  misc_feature (197)..(506): NCBI GI NO: 21740906 NR Description: OSJNBa0036B21.20
MATKDAITKSSNFTASTEGGMGTNMNATSKAVLDYCKRVLMYALEDLETIVEEMGEDLQQSGTKLDQLKQWLTGVFNYQTDCLDDIEEVELKKIMGEGISNSKVLTSNAIDIFHSVVTAMAQMGVKVDDMKNITMGAGAGGAARRLLEDNDSKGLPKWFSGKDRKLMAKAGRGAPAGGDDGIGEGGGGGGKIKATHVVAKDGSGQFKTISEAVMACPDKNPGRCIIHIKAGIYNEQVRIPKKKNNIFMFGDGATQTIITFDRSVKLSPGTTTSLSGTVQVESEGFMAKWIGFKNTAGPLGHQAVALRVNGDRAVIFNCRFDGYQDTLYVNNGRQFYRNIVVSGTVDFIFGKSATVIQNSLILVRKGSPGQSNYVTADGNEKGAAMKIGIVLHNCRIIPDKELEADKLTIKSYLGRPWKKFATTVIIGTEIGDLIKPEGWTEWQGEQNHKTAKYIEFNNRGPGAATTQRPPWVKVAKSAAEVETYTVANWVGPANWIQEANVPVQLGL

SEQ ID NO: 5136 - protein, 487 aa, Arabidopsis thaliana
  peptide (1)..(487): Ceres Seq. ID no. 12348671
  misc_feature (175)..(473): Pfam Name: Pfam Description:  Pectinesterase
  misc_feature (1)..(487): NCBI GI NO: 15228697 NR Description: pollen-specific pectin esterase, putative
  misc_feature (1)..(487): NCBI GI NO: 1172538 NR Description: Probable pectinesterase precursor
  misc_feature (1)..(487): NCBI GI NO: 6093741 NR Description: Pectinesterase (Pectin methylesterase) (PE)
  misc_feature (1)..(487): NCBI GI NO: 15226490 NR Description: pectinesterase family; protein id: At2g47040
  misc_feature (1)..(487): NCBI GI NO: 25313437 NR Description: pectinesterase (EC 3.1.1.11)
  misc_feature (1)..(487): NCBI GI NO: 15226482 NR Description: pectinesterase family; protein id: At2g47030
  misc_feature (1)..(487): NCBI GI NO: 25313439 NR Description: pectinesterase (EC 3
  misc_feature (1)..(369): NCBI GI NO: 23197964 NR Description: putative pectinesterase [Arabidopsis thaliana]
  misc_feature (1)..(151): NCBI GI NO: 7488527 NR Description: pectin esterase homolog, pollen-specific - turnip
  misc_feature (177)..(486): NCBI GI NO: 21740906 NR Description: OSJNBa0036B21.20
MGTNMNATSKAVLDYCKRVLMYALEDLETIVEEMGEDLQQSGTKLDQLKQWLTGVFNYQTDCLDDIEEVELKKIMGEGISNSKVLTSNAIDIFHSVVTAMAQMGVKVDDMKNITMGAGAGGAARRLLEDNDSKGLPKWFSGKDRKLMAKAGRGAPAGGDDGIGEGGGGGGKIKATHVVAKDGSGQFKTISEAVMACPDKNPGRCIIHIKAGIYNEQVRIPKKKNNIFMFGDGATQTIITFDRSVKLSPGTTTSLSGTVQVESEGFMAKWIGFKNTAGPLGHQAVALRVNGDRAVIFNCRFDGYQDTLYVNNGRQFYRNIVVSGTVDFIFGKSATVIQNSLILVRKGSPGQSNYVTADGNEKGAAMKIGIVLHNCRIIPDKELEADKLTIKSYLGRPWKKFATTVIIGTEIGDLIKPEGWTEWQGEQNHKTAKYIEFNNRGPGAATTQRPPWVKVAKSAAEVETYTVANWVGPANWIQEANVPVQLGL

SEQ ID NO: 5137 - DNA, 1891 bp, Arabidopsis thaliana
  misc_feature (1)..(1891): Ceres Seq. ID no. 13491514
aaaaaaaagcttccattgatttcgcatcagatcttgctctctcttctatctctgcgattcttctggatcttctcaaatccatgaaggaatcagatctaaccaccgaaccaatcgcacaaaatctaatcaagctaataagcaatgtctgtttctcagtcttcgttttcacagttctcatcttcacagtaatcgcagtaacttaccaaccaccagatccatggcttgaatctgctccagcactcaccaaactcctaaccgaaaccgaaaacgcaactttcaaaatcgacggttcgattctcaaaaccggcgaagatctcgcttcatctccgtcatcatcacctccgtcgaactccacagagcaagtcacggaggcgacgattgagaaatccgaggcgaaaatcggtaatatgactgtgaagaactctatagattgtgatgaggatttgaagattgtgaattgttctgatccgagagttttagttgctgttgagaggtttaatttgaaggtttttaaatctattgtgttcttagagtacgaaactccggttaacggatcgaaactagacgaatgcgatgtttcttggaggtttaggaataagaaggagaagtcatggaggagatacagagatttcaggaggtttaggtttggatttggtgagaattgtacttataaagtgtttcatactagtggttggcattctggtgttaatgctcgtaggcctaggattagtagaccgagctcgagtcgaggagctcgcggtggtgattcggagattaatgatacgattccgactcttggttcgcagacgagtttccggagagggaagtatttgtattattcgcggggtggtgattattgtaagggtatgaatcagtatatgtggagtttcttgtgtggtttaggtgaagcaatgtatttgaataggacttttgtgatggatttgagtttgtgtttgtcttcgagttatagttctaaggggaaagatgaggaaggtaaggattttcggtattattttgatttcgagcatcttaaggagacggcttcgattgttgaagagggtgagttcttgagagattggaagaaatggaatcggttgcataaacggaaagttcctgttaggaaggttaagacgcatagagtgtcgcctttgcagcttagtaaagataagagtacgattatatggaggcagtttgatactcctgagcctgaaaactattggtatagagtttgtgaagggcaagcatcgaagtatgttgagaggccgtggcatgcgttgtggaagtcgaagaggttgatgaatattgtctctgagattagtgggaaaatggactgggattttgatgctgttcatgtggttagaggcgagaaagcgaagaacaagaagctatggccacatttggatgcagacacatggcctgatgcgatattgaccaaacttaaaggattggttcaggtgtggaggaatttgtacgttgcaactaatgaaccgttttataattactttgacaagttgaggtctcagtacaaggttcacttgcttgatgactatagctacttgtggggaaataagagtgaatggtacaatgagactagtctcttgaacaatgggaaaccagttgagtttgatgggtacatgagagtagctgttgatacagaggtgttttatagaggaaagactcgcgtcgagacgttctataaccttaccacggactgcaaagacgggatcaatacatgctaaattgatcattcaggttgtgatatgttttcattgttttatttgtttgtgtatcaaattcagttatgcttgtgttgtttaccttgtgttctactagctattgaagagtgtacgtaacgtttacattttttgattcatatccttaattctgtaag

SEQ ID NO: 5138 - protein, 578 aa, Arabidopsis thaliana
  peptide (1)..(578): Ceres Seq. ID no. 13491515
  misc_feature (27)..(578): NCBI GI NO: 15236611 NR Description: expressed protein [Arabidopsis thaliana]
  misc_feature (28)..(578): NCBI GI NO: 34913308 NR Description: P0519E12.32
  misc_feature (35)..(578): NCBI GI NO: 18395698 NR Description: expressed protein [Arabidopsis thaliana]
  misc_feature (35)..(578): NCBI GI NO: 15235454 NR Description: expressed protein [Arabidopsis thaliana]
  misc_feature (258)..(578): NCBI GI NO: 37534994 NR Description: unknown protein
  misc_feature (139)..(451): NCBI GI NO: 34909040 NR Description: P0034E02.33
  misc_feature (343)..(562): NCBI GI NO: 34909040 NR Description: P0034E02.33
KKASIDFASDLALSSISAILLDLLKSMKESDLTTEPIAQNLIKLISNVCFSVFVFTVLIFTVIAVTYQPPDPWLESAPALTKLLTETENATFKIDGSILKTGEDLASSPSSSPPSNSTEQVTEATIEKSEAKIGNMTVKNSIDCDEDLKIVNCSDPRVLVAVERFNLKVFKSIVFLEYETPVNGSKLDECDVSWRFRNKKEKSWRRYRDFRRFRFGFGENCTYKVFHTSGWHSGVNARRPRISRPSSSRGARGGDSEINDTIPTLGSQTSFRRGKYLYYSRGGDYCKGMNQYMWSFLCGLGEAMYLNRTFVMDLSLCLSSSYSSKGKDEEGKDFRYYFDFEHLKETASIVEEGEFLRDWKKWNRLHKRKVPVRKVKTHRVSPLQLSKDKSTIIWRQFDTPEPENYWYRVCEGQASKYVERPWHALWKSKRLMNIVSEISGKMDWDFDAVHVVRGEKAKNKKLWPHLDADTWPDAILTKLKGLVQVWRNLYVATNEPFYNYFDKLRSQYKVHLLDDYSYLWGNKSEWYNETSLLNNGKPVEFDGYMRVAVDTEVFYRGKTRVETFYNLTTDCKDGINTC

SEQ ID NO: 5139 - protein, 552 aa, Arabidopsis thaliana
  peptide (1)..(552): Ceres Seq. ID no. 13491516
  misc_feature (1)..(552): NCBI GI NO: 15236611 NR Description: expressed protein [Arabidopsis thaliana]
  misc_feature (2)..(552): NCBI GI NO: 34913308 NR Description: P0519E12.32
  misc_feature (9)..(552): NCBI GI NO: 18395698 NR Description: expressed protein [Arabidopsis thaliana]
  misc_feature (9)..(552): NCBI GI NO: 15235454 NR Description: expressed protein [Arabidopsis thaliana]
  misc_feature (232)..(552): NCBI GI NO: 37534994 NR Description: unknown protein
  misc_feature (113)..(425): NCBI GI NO: 34909040 NR Description: P0034E02.33
  misc_feature (317)..(536): NCBI GI NO: 34909040 NR Description: P0034E02.33
MKESDLTTEPIAQNLIKLISNVCFSVFVFTVLIFTVIAVTYQPPDPWLESAPALTKLLTETENATFKIDGSILKTGEDLASSPSSSPPSNSTEQVTEATIEKSEAKIGNMTVKNSIDCDEDLKIVNCSDPRVLVAVERFNLKVFKSIVFLEYETPVNGSKLDECDVSWRFRNKKEKSWRRYRDFRRFRFGFGENCTYKVFHTSGWHSGVNARRPRISRPSSSRGARGGDSEINDTIPTLGSQTSFRRGKYLYYSRGGDYCKGMNQYMWSFLCGLGEAMYLNRTFVMDLSLCLSSSYSSKGKDEEGKDFRYYFDFEHLKETASIVEEGEFLRDWKKWNRLHKRKVPVRKVKTHRVSPLQLSKDKSTIIWRQFDTPEPENYWYRVCEGQASKYVERPWHALWKSKRLMNIVSEISGKMDWDFDAVHVVRGEKAKNKKLWPHLDADTWPDAILTKLKGLVQVWRNLYVATNEPFYNYFDKLRSQYKVHLLDDYSYLWGNKSEWYNETSLLNNGKPVEFDGYMRVAVDTEVFYRGKTRVETFYNLTTDCKDGINTC

SEQ ID NO: 5140 - protein, 443 aa, Arabidopsis thaliana
  peptide (1)..(443): Ceres Seq. ID no. 13491517
  misc_feature (1)..(443): NCBI GI NO: 15236611 NR Description: expressed protein [Arabidopsis thaliana]
  misc_feature (1)..(443): NCBI GI NO: 34913308 NR Description: P0519E12.32
  misc_feature (1)..(443): NCBI GI NO: 18395698 NR Description: expressed protein [Arabidopsis thaliana]
  misc_feature (1)..(443): NCBI GI NO: 15235454 NR Description: expressed protein [Arabidopsis thaliana]
  misc_feature (123)..(443): NCBI GI NO: 37534994 NR Description: unknown protein
  misc_feature (4)..(316): NCBI GI NO: 34909040 NR Description: P0034E02.33
  misc_feature (208)..(427): NCBI GI NO: 34909040 NR Description: P0034E02.33
MTVKNSIDCDEDLKIVNCSDPRVLVAVERFNLKVFKSIVFLEYETPVNGSKLDECDVSWRFRNKKEKSWRRYRDFRRFRFGFGENCTYKVFHTSGWHSGVNARRPRISRPSSSRGARGGDSEINDTIPTLGSQTSFRRGKYLYYSRGGDYCKGMNQYMWSFLCGLGEAMYLNRTFVMDLSLCLSSSYSSKGKDEEGKDFRYYFDFEHLKETASIVEEGEFLRDWKKWNRLHKRKVPVRKVKTHRVSPLQLSKDKSTIIWRQFDTPEPENYWYRVCEGQASKYVERPWHALWKSKRLMNIVSEISGKMDWDFDAVHVVRGEKAKNKKLWPHLDADTWPDAILTKLKGLVQVWRNLYVATNEPFYNYFDKLRSQYKVHLLDDYSYLWGNKSEWYNETSLLNNGKPVEFDGYMRVAVDTEVFYRGKTRVETFYNLTTDCKDGINTC

SEQ ID NO: 5141 - DNA, 1325 bp, Arabidopsis thaliana
  misc_feature (1)..(1325): Ceres Seq. ID no. 12330843
ttttctcttcttcctcgactgctctgctctgctctattctctggattgagaatttggactgagaacgacgacaaatggggaaacgagagaaaaaacctaatcgacgtcgccacaaaggtgaatattcgaatgatgctgaagatttctacgatcaacacccgccggctgttgcctccgtcgacgaagaagatgaagaaaactctgacgaagaagaagaagaaaatgatggaaacgaatcatcggatttgccttcaaagtttctcctttaccaacaatccgttcagtcaccaaaaggagacataagttacttgcagaagttctttttaatgtatgttggtggaagacaacctttccatttccaagaagatttctgcggcactgctcttttaagtgcggagtggctgaagactgacactagacggactgctatagggcttgattttgatcttgaggcgttagaatggtgtatggataacaacattagtaaacttggttctgacgtgtattcaagaatgtcgcttttccatgggaatgttttaactcctcttgaggctaagcaagtgaaatctaaatcccatgagctgatacaaaatatcagcttggatgatggtgatgataatgaagatttggctgatccgagtgttgtcgaatctttagagaaagatggacctgattcgttgccaaagagggatattgtgtgtgcttttaattttagttgttgttgtctccacaaacgctcggagttggtttcttacttcaagaatgcacgtgacgctttgtctaagaaaggtggtatcttcgtgatggatttatatggaggtgcttctgctgagggacagttgaagcttcaacggaaattccctaatttcacgtatacatgggagcaggctgagtttgatattttaagccgcaagacaaggatcagtctgcactatcaccttcagaagcagaacagaaagattcgccatgctttttcatatagctggagactgtggtcattgccggagataaaggattgtatggaggaagctgggtttagctcagtccatttctggctcagagaaatgccggacgcttctgaaatgcgtagaacagatgggtttggtgctggacgtgatatcaagtacgaacaagtcaagagctttcaacagtgtgattcttggaatgcttacattgttgcggtcagcctctagttatgctttctatcttttgatcaaaagacactagccctttaactcagatcctttgtcgattttacatctagtatttatttctgacacgcactggtttagtttcatgatttcaatattatttttttgtcgtcc

SEQ ID NO: 5142 - protein, 372 aa, Arabidopsis thaliana
  peptide (1)..(372): Ceres Seq. ID no. 12330844
  misc_feature (1)..(372): NCBI GI NO: 18401468 NR Description: expressed protein; protein id: At2g27590
  misc_feature (1)..(372): NCBI GI NO: 21536815 NR Description: unknown [Arabidopsis thaliana]
  misc_feature (1)..(372): NCBI GI NO: 25370730 NR Description: hypothetical protein At2g27590
  misc_feature (1)..(371): NCBI GI NO: 34908450 NR Description: P0683F02.16
MGKREKKPNRRRHKGEYSNDAEDFYDQHPPAVASVDEEDEENSDEEEEENDGNESSDLPSKFLLYQQSVQSPKGDISYLQKFFLMYVGGRQPFHFQEDFCGTALLSAEWLKTDTRRTAIGLDFDLEALEWCMDNNISKLGSDVYSRMSLFHGNVLTPLEAKQVKSKSHELIQNISLDDGDDNEDLADPSVVESLEKDGPDSLPKRDIVCAFNFSCCCLHKRSELVSYFKNARDALSKKGGIFVMDLYGGASAEGQLKLQRKFPNFTYTWEQAEFDILSRKTRISLHYHLQKQNRKIRHAFSYSWRLWSLPEIKDCMEEAGFSSVHFWLREMPDASEMRRTDGFGAGRDIKYEQVKSFQQCDSWNAYIVAVSL

SEQ ID NO: 5143 - protein, 288 aa, Arabidopsis thaliana
  peptide (1)..(288): Ceres Seq. ID no. 12330845
  misc_feature (1)..(288): NCBI GI NO: 18401468 NR Description: expressed protein; protein id: At2g27590
  misc_feature (1)..(288): NCBI GI NO: 21536815 NR Description: unknown [Arabidopsis thaliana]
  misc_feature (1)..(288): NCBI GI NO: 25370730 NR Description: hypothetical protein At2g27590
  misc_feature (1)..(287): NCBI GI NO: 34908450 NR Description: P0683F02.16
MYVGGRQPFHFQEDFCGTALLSAEWLKTDTRRTAIGLDFDLEALEWCMDNNISKLGSDVYSRMSLFHGNVLTPLEAKQVKSKSHELIQNISLDDGDDNEDLADPSVVESLEKDGPDSLPKRDIVCAFNFSCCCLHKRSELVSYFKNARDALSKKGGIFVMDLYGGASAEGQLKLQRKFPNFTYTWEQAEFDILSRKTRISLHYHLQKQNRKIRHAFSYSWRLWSLPEIKDCMEEAGFSSVHFWLREMPDASEMRRTDGFGAGRDIKYEQVKSFQQCDSWNAYIVAVSL

SEQ ID NO: 5144 - protein, 241 aa, Arabidopsis thaliana
  peptide (1)..(241): Ceres Seq. ID no. 12330846
  misc_feature (1)..(241): NCBI GI NO: 18401468 NR Description: expressed protein; protein id: At2g27590
  misc_feature (1)..(241): NCBI GI NO: 21536815 NR Description: unknown [Arabidopsis thaliana]
  misc_feature (1)..(241): NCBI GI NO: 25370730 NR Description: hypothetical protein At2g27590
  misc_feature (1)..(240): NCBI GI NO: 34908450 NR Description: P0683F02.16
MDNNISKLGSDVYSRMSLFHGNVLTPLEAKQVKSKSHELIQNISLDDGDDNEDLADPSVVESLEKDGPDSLPKRDIVCAFNFSCCCLHKRSELVSYFKNARDALSKKGGIFVMDLYGGASAEGQLKLQRKFPNFTYTWEQAEFDILSRKTRISLHYHLQKQNRKIRHAFSYSWRLWSLPEIKDCMEEAGFSSVHFWLREMPDASEMRRTDGFGAGRDIKYEQVKSFQQCDSWNAYIVAVSL

SEQ ID NO: 5145 - DNA, 730 bp, Arabidopsis thaliana
  misc_feature (1)..(730): Ceres Seq. ID no. 12325691
aaacttcgaagattttgatattgtaacgatccgccatggaagagaagaagacagaatccgcgactaagaacgttaaaaaggttaacttgttagaccacatcgcaatcaaacacctccttgatgaatccgtctccgatatcgttacgagcagagggtacaaggaggatgtgagattaagcaacgtcaaatttctgttaggagggattataatcgtggttgctcttgttgctcaattctacaacaagaagtttcctgagaacagagactttttgatctgctgcatcggattgtatgtggtgttgactgcggtaatgcagctgattctgtacattaaggagaagaacgctatcttgttcacctatcctcttgagggatcattcaccagcactggtttggtggtatcttccaagttacctagattctctgatcagtacactctaaccatcgacagtgctgatccgcaatcaatctcagctgggaagtcggttcagttcaccaaaagtgtcactcaatggctcacaaaagatggagttcttgtcgagggtttattctggaaagatgttgaagccctagtcaaagagtacacagaagcaggagaaccaaagaagaagagatgatcatctataatgggaaaagtatgttggtccttattagttctaaatgttacattttttttatgactaaaatcgatggtgacttggtttaaaagacgacagagtttttgcctccc

SEQ ID NO: 5146 - protein, 193 aa, Arabidopsis thaliana
  peptide (1)..(193): Ceres Seq. ID no. 12325692
  misc_feature (1)..(193): NCBI GI NO: 34365647 NR Description: At4g04200 [Arabidopsis thaliana]
  misc_feature (1)..(193): NCBI GI NO: 30688096 NR Description: expressed protein [Arabidopsis thaliana]
  misc_feature (1)..(107): NCBI GI NO: 25408649 NR Description: hypothetical protein At2g39960
  misc_feature (109)..(193): NCBI GI NO: 15233420 NR Description: hypothetical protein; protein id: At4g04200.1
  misc_feature (1)..(44): NCBI GI NO: 15233420 NR Description: hypothetical protein; protein id: At4g04200.1
  misc_feature (9)..(185): NCBI GI NO: 38344552 NR Description: OSJNBa0027P08.20
  misc_feature (15)..(192): NCBI GI NO: 28195697 NR Description: signal peptidase 25 kDA subunit
  misc_feature (1)..(180): NCBI GI NO: 31240525 NR Description: ENSANGP00000021231 [Anopheles gambiae]
MEEKKTESATKNVKKVNLLDHIAIKHLLDESVSDIVTSRGYKEDVRLSNVKFLLGGIIIVVALVAQFYNKKFPENRDFLICCIGLYVVLTAVMQLILYIKEKNAILFTYPLEGSFTSTGLVVSSKLPRFSDQYTLTIDSADPQSISAGKSVQFTKSVTQWLTKDGVLVEGLFWKDVEALVKEYTEAGEPKKKR

SEQ ID NO: 5147 - protein, 101 aa, Arabidopsis thaliana
  peptide (1)..(101): Ceres Seq. ID no. 12325693
  misc_feature (1)..(101): NCBI GI NO: 34365647 NR Description: At4g04200 [Arabidopsis thaliana]
  misc_feature (1)..(101): NCBI GI NO: 30688096 NR Description: expressed protein [Arabidopsis thaliana]
  misc_feature (1)..(15): NCBI GI NO: 25408649 NR Description: hypothetical protein At2g39960
  misc_feature (17)..(101): NCBI GI NO: 15233420 NR Description: hypothetical protein; protein id: At4g04200.1
  misc_feature (1)..(93): NCBI GI NO: 38344552 NR Description: OSJNBa0027P08.20
  misc_feature (1)..(100): NCBI GI NO: 28195697 NR Description: signal peptidase 25 kDA subunit
  misc_feature (1)..(88): NCBI GI NO: 31240525 NR Description: ENSANGP00000021231 [Anopheles gambiae]
MQLILYIKEKNAILFTYPLEGSFTSTGLVVSSKLPRFSDQYTLTIDSADPQSISAGKSVQFTKSVTQWLTKDGVLVEGLFWKDVEALVKEYTEAGEPKKKR

SEQ ID NO: 5148 - DNA, 6117 bp, Arabidopsis thaliana
  misc_feature (1)..(6117): Ceres Seq. ID no. 12639310
cattcacgaaacagtgttctacggccaatttctctcgctcgctccacactcccaaaacaatattcttcttcttcgatttctcactctctgtttgtcgctaccgatcttatttcccgctatttttgttccggcgccgttctccttaaagtcgctattgtcttcgttgaaggtgatgagtatagttcaaaagcaagaagagatgaatggatgtggtctcaatgttgacaaagtagaagcctttacagtgtcacctcaggaaaaaggaaggaaaaacaagagaaagttagctgatccttctcaaccaaatgcttcttccctcactgaattccctccatatgagttaccttcgttgaaacctcagaaccatttgagcggaaatggatcggttggggaagtttctaatcagctgcaagttgaagtgtctgaatctgtcgaatgggatgacccatttgcctgtcatcttgaagaattgttgtcgtcaaatttgctcacgctcttccttgatacaatgaagcagcttattgatttaggctacaccgatgacgaagttctgaaagctgtatcacgctgtaggctgtactgtggaggcaataatcttttgtcaaacattgtcaataacaccttgagtgctctcaagactggagacgaaggtgctggttcaggagactatgtgtttgaggatttacaacagcttgtttcctatacgttggtagaaatgataagtcttattaaggaggtcaggccgtccctatcaacagttgaagctatgtggaggcttttgatgtgcgacttgaatgtcttgcaagcctttgaagctgaaggcgatggattggtgagttcaagtaaattatctgattcggaatctcttggtgctgaatctaatcctccaaaatctagtgacccagataacccaaagcctccccaatccgatcctcaaagcaatcggaatgagccactcaaatttggaaacttcccaaatacaccgaactccaaaaaaactcagtctagtggaacaacaccaggaaaagaagtatgctcgggtagcactgtttcttgtcaaggcatgagaagtacatcatttactctagtctctgatgaaaaattggtatcttgtcgaaaaggccgtactaaaaaagagatagcaatgcttcggcaaaaatcatgtgtggaaaaaattaggacttacagcaaaggcagtggctataaggcggcaaagtttgcatcagttggcagcttccttttagagaaaagagtcaaatcatcttctgaatttgtgccaagaaattcttcatcaaagataacagcagagattggagtgaaagtttcattagctgaggatagcggctgttttgtaagaaagaacagtaagttggattcacctgtggtagtggtagatgcaaagggctatataactgccttacctgctaggtcggtaaaatctgcttcaaaaaaaaagactggttctgagtctgtaactctgataccatcagcttcagaaaagaagtctgattcttcgataccatcaacttcagaaaagaagtctggttctgagtctgaagagaaggcatctgtgtctgcaaagctagcaccagattactatgctgggatcccatatgatgcagctctgggtatatatgttccccgggataagaaagatgaattgattctaaagcttgttcctcgagtgaatgatctgcagaatgaactgcaggtctggactgactgggctaatcagaaagtaaaagaggcaactggtagactacttaaggaccaaccagagcttaaggcactaaggaaagagagggaagaggcagaacagtataaaaaagagaagcagttattggaagaaaacactaggaaaaggctatctgagatggattttgcgttgaaaaatgcgaccagccagttggaaaaagcattcaatactgctcacaggctcgagctggaacaatctatactgaagaaagagatggaagctgctaagataaaagccgtcgagtctgctgagagctttagagaagcaaaagagagaggggaaagatcactgaaggatattcactcgtgggaagggcaaaaaattatgttgcaggaagagctcaagggtcaaagggaaaaggtgacagtgctacagaaagaagttaccaaagcaaaaaatcgccagaatcaaatcgaggctgctttgaagcaagaaagaacagccaaagggaaactcagtgctcaggcttcattgataaggaaagaaacaaaggaacttgaagcgcttggaaaagtggaagaagagcggatcaaagggaaagcagaaaccgacgtgaaatattacatagataacatcaagagacttgaaagagagatctcagagctgaaacttaaatcagactactcgagaatcattgcactgaagaaaggcagcagtgagtcaaaggcaacaaaaagagagagtcttgggatgccgaaagtgaaaagagaaagagaatgtgtgatgtgtttatctgaagagatgagtgtgattttcttgccttgtgctcaccaagttctttgctttaaatgcaatcagcttcacgagaaagaaggaatgatggattgtccgtcttgtcgtggaacaatccataggaggattcaagctcgtttcgctcgctccggcgtcggcgagatgaagcttcaggtccgagtcgtggaagcgaggaatctaccggctatggatctcaatgggtttagcgacccttacgttagattgcagctgggaaagcaaaggtcacggaccaaagtagtgaagaagaacttgaaccccaaatggactgaagatttcagttttggcgtcgacgatttgaacgacgaactcgtcgtctctgttcttgatgaagataaatacttcaacgatgacttcgttgggcaggttagagtttctgtttcccttgttttcgatgcagagaatcaatctcttggcactgtttggtatcctcttaatccaaagaagaaaggttccaaaaaggattgtggtgagatacttttgaagatatgtttcagtcagaagaactcggttcttgatttgacttctagtggggatcaaacctctgcttcgaggagtcctgacttgagactagaatcacctattgatccctctacttgtgcctctccttctagatcagatgatgcttcatctatcccccagacaacctttgcgggtcgattcactcagatttttcagaagaatgctatcaccgctacacctacacaatccagtagtaggagcattgatgcatctgacctatctgagatctccaaacctgtcttttcccttgagctgtctgaagatgaatcatcttctacttcctttgaggaattattgaaggcaatggagtcgaaagatcagggtagtgaacctcctagtaatctatcaggaggtgtcgttgtggaccagttatttatgatttccccatcagatcttaacattgtgcttttcgcatcggattcaagtttctatgcatcattgactgaactgcaagggaccacggaagttcaaattggaccatggaaagcagaaaatgatggcgagagtgttaagcgtgttgtaagttacctcaaggctgcaaccaaacttattaaggctgtcaaaggcacagaggagcagacatatctcaaagcggacggagaggtttacgcagttttagcaagtgttgccactccagatgtcccattcggaggtaccttcaaagttgaagtgctttactgcatctctcctgggcctgagctgccatctggtgagcagtgttcacgtttggtagtttcatggagattgaattttcttcagagcaccatgatgagaggtttgatagagaatggagctcgacaaggtctaaaagacaacttcgaacagtatgccaatttgttggctcaaagtgtaaagcctgtagattctaaggatattgggctgaacaaggagcaagctctctcttccttgcaagctgagcctcaatcagactggaaattggctgtacagtattttgccaatttcaccgtgttatccactttcttgattggtatttatgtatttgtccacattgtgtttgccatacccagtgcaatccaagggcttgagtttaatggccttgatttaccggattcaattggggagtttgttgttagtggggttctcgttcttcaatgtgaaagagtattgcaactgatttcccgtttcatgcaggcaagaaaacagaaaggcagtgatcatggcatcaaagcgcatggagatggttggttgctaactgttgctctaattgagggggtcgatctagcagctgtagatccaagcgggcattgtgatccgtatattgtatttacttccaatgggaagacaagaaccagctccatcaagttccagaaatctaatcctcagtggaacgaaatatttgaattcgatgcaatggctgatcctccttctgtactgaatgttgaagtttttgatttcgatggaccttttgacgaggctgtttcattggggcatgctgaagtcaactttgtgagatctaatatatctgatttagcggatgtttgggttccacttcaagggaaactagctcaggcttgtcaatccaaacttcacttgaggattttcttggatcatacaggaggtggagatgttgtcagagactatttaaataagatggagaaagaggtgggcaagaagtgttgttgcgcgttcttatctgctgaatggaaatttcagattaatgtgcggtctcctcaaacaaattcagcttttcagaagctctttggtctcccacaagaagaatttctaatcaatgactttacatgtcacttaaagcggaaaatgcctttgcagggtcgtcttttcctgtctgcaagaattgttggcttttatgcaagcatttttggtaacaaaacaaaattctttttcctgtgggaagatatagaggaaattcaagtgcttcctcccactcttgcctcaatggggagtcccattgtcgtcatgactctcagaccaaatagaggactggacgcgaggataggtgcaaagacacatgatgaggaaggcaggcttaagttccatttccactcatttgtgtctttcaatgtggcacaaaagacaataatggctctgtggaaagcaaaatctttgactccagagcagaaagtgcaagctgttgaagaggaatcagagcagaaactccaaagtgaagagagtggtctgttcttgggtgttgatgatgtgcgattctctgaggttttctctttgactctccctgtcccggtaagtttctttatggagttgtttggtggaggtgaagtggatcgtaaggctatggagagagcgggttgccagagctattcatgcagtccatgggagtcagagaaggatgatgtgtatgagaggcagacatactacagagataagcggatatcacgttacagaggagaagtaacaagtacacagcaaaagtccctagtgccagagaagaatgggtggcttgtcgaagaggtcatgaccctccatggagttccactgggtgactattttaatctccatctaagataccaaatggaagaatcaacttcaaaaccaaagacgacatatgtgcgagtatactttgggattgaatggctaaagagcactagacatcagaaaagggtgacgaaaaacatcctagtaaatctgcaagatcgtctgaagatgacatttggattcttggaaaaggaatatagcagcagacaacagcaacaacaagtaacataatatacatacatacatagcctttggtctaaaaatggagggctcgaagcaactcgttccagcttgaaaaacggaggtttgctcttgtatggatgcacacaagtagtcatgtgaagacgagagagtgtgaatggaggtttgctctgctagagcaactttgttgattctttatttttatctgcattcactgcttctttattgcatgatttgtctgtagtgaaaggagcagagttttgtgattatgataatatgctctgctactgcctaaaactcttatagaaactgatgatgctctctagcattcttataaaattgctagatgagagacattggttttgttgatgaaagaaactacttgttttagattt

SEQ ID NO: 5149 - protein, 1916 aa, Arabidopsis thaliana
  peptide (1)..(1916): Ceres Seq. ID no. 12639311
  misc_feature (1420)..(1502): Pfam Name: Pfam Description:  C2 domain
  misc_feature (884)..(1905): NCBI GI NO: 15240629 NR Description: putative protein; protein id: At5g50170
  misc_feature (884)..(1896): NCBI GI NO: 38344486 NR Description: OSJNBa0022H21.21
  misc_feature (60)..(811): NCBI GI NO: 15236231 NR Description: putative protein; protein id: At4g03000.1
  misc_feature (547)..(879): NCBI GI NO: 22531056 NR Description: unknown protein [Arabidopsis thaliana]
  misc_feature (154)..(290): NCBI GI NO: 22531056 NR Description: unknown protein [Arabidopsis thaliana]
  misc_feature (547)..(879): NCBI GI NO: 25408371 NR Description: hypothetical protein At2g35330
  misc_feature (547)..(879): NCBI GI NO: 30686389 NR Description: expressed protein [Arabidopsis thaliana]
  misc_feature (154)..(290): NCBI GI NO: 25408371 NR Description: hypothetical protein At2g35330
  misc_feature (154)..(290): NCBI GI NO: 30686389 NR Description: expressed protein [Arabidopsis thaliana]
  misc_feature (438)..(873): NCBI GI NO: 15223228 NR Description: unknown protein; protein id: At1g32530
IHETVFYGQFLSLAPHSQNNILLLRFLTLCLSLPILFPAIFVPAPFSLKSLLSSLKVMSIVQKQEEMNGCGLNVDKVEAFTVSPQEKGRKNKRKLADPSQPNASSLTEFPPYELPSLKPQNHLSGNGSVGEVSNQLQVEVSESVEWDDPFACHLEELLSSNLLTLFLDTMKQLIDLGYTDDEVLKAVSRCRLYCGGNNLLSNIVNNTLSALKTGDEGAGSGDYVFEDLQQLVSYTLVEMISLIKEVRPSLSTVEAMWRLLMCDLNVLQAFEAEGDGLVSSSKLSDSESLGAESNPPKSSDPDNPKPPQSDPQSNRNEPLKFGNFPNTPNSKKTQSSGTTPGKEVCSGSTVSCQGMRSTSFTLVSDEKLVSCRKGRTKKEIAMLRQKSCVEKIRTYSKGSGYKAAKFASVGSFLLEKRVKSSSEFVPRNSSSKITAEIGVKVSLAEDSGCFVRKNSKLDSPVVVVDAKGYITALPARSVKSASKKKTGSESVTLIPSASEKKSDSSIPSTSEKKSGSESEEKASVSAKLAPDYYAGIPYDAALGIYVPRDKKDELILKLVPRVNDLQNELQVWTDWANQKVKEATGRLLKDQPELKALRKEREEAEQYKKEKQLLEENTRKRLSEMDFALKNATSQLEKAFNTAHRLELEQSILKKEMEAAKIKAVESAESFREAKERGERSLKDIHSWEGQKIMLQEELKGQREKVTVLQKEVTKAKNRQNQIEAALKQERTAKGKLSAQASLIRKETKELEALGKVEEERIKGKAETDVKYYIDNIKRLEREISELKLKSDYSRIIALKKGSSESKATKRESLGMPKVKRERECVMCLSEEMSVIFLPCAHQVLCFKCNQLHEKEGMMDCPSCRGTIHRRIQARFARSGVGEMKLQVRVVEARNLPAMDLNGFSDPYVRLQLGKQRSRTKVVKKNLNPKWTEDFSFGVDDLNDELVVSVLDEDKYFNDDFVGQVRVSVSLVFDAENQSLGTVWYPLNPKKKGSKKDCGEILLKICFSQKNSVLDLTSSGDQTSASRSPDLRLESPIDPSTCASPSRSDDASSIPQTTFAGRFTQIFQKNAITATPTQSSSRSIDASDLSEISKPVFSLELSEDESSSTSFEELLKAMESKDQGSEPPSNLSGGVVVDQLFMISPSDLNIVLFASDSSFYASLTELQGTTEVQIGPWKAENDGESVKRVVSYLKAATKLIKAVKGTEEQTYLKADGEVYAVLASVATPDVPFGGTFKVEVLYCISPGPELPSGEQCSRLVVSWRLNFLQSTMMRGLIENGARQGLKDNFEQYANLLAQSVKPVDSKDIGLNKEQALSSLQAEPQSDWKLAVQYFANFTVLSTFLIGIYVFVHIVFAIPSAIQGLEFNGLDLPDSIGEFVVSGVLVLQCERVLQLISRFMQARKQKGSDHGIKAHGDGWLLTVALIEGVDLAAVDPSGHCDPYIVFTSNGKTRTSSIKFQKSNPQWNEIFEFDAMADPPSVLNVEVFDFDGPFDEAVSLGHAEVNFVRSNISDLADVWVPLQGKLAQACQSKLHLRIFLDHTGGGDVVRDYLNKMEKEVGKKCCCAFLSAEWKFQINVRSPQTNSAFQKLFGLPQEEFLINDFTCHLKRKMPLQGRLFLSARIVGFYASIFGNKTKFFFLWEDIEEIQVLPPTLASMGSPIVVMTLRPNRGLDARIGAKTHDEEGRLKFHFHSFVSFNVAQKTIMALWKAKSLTPEQKVQAVEEESEQKLQSEESGLFLGVDDVRFSEVFSLTLPVPVSFFMELFGGGEVDRKAMERAGCQSYSCSPWESEKDDVYERQTYYRDKRISRYRGEVTSTQQKSLVPEKNGWLVEEVMTLHGVPLGDYFNLHLRYQMEESTSKPKTTYVRVYFGIEWLKSTRHQKRVTKNILVNLQDRLKMTFGFLEKEYSSRQQQQQVT

SEQ ID NO: 5150 - protein, 1859 aa, Arabidopsis thaliana
  peptide (1)..(1859): Ceres Seq. ID no. 12639312
  misc_feature (1363)..(1445): Pfam Name: Pfam Description:  C2 domain
  misc_feature (827)..(1848): NCBI GI NO: 15240629 NR Description: putative protein; protein id: At5g50170
  misc_feature (827)..(1839): NCBI GI NO: 38344486 NR Description: OSJNBa0022H21.21
  misc_feature (3)..(754): NCBI GI NO: 15236231 NR Description: putative protein; protein id: At4g03000.1
  misc_feature (490)..(822): NCBI GI NO: 22531056 NR Description: unknown protein [Arabidopsis thaliana]
  misc_feature (97)..(233): NCBI GI NO: 22531056 NR Description: unknown protein [Arabidopsis thaliana]
  misc_feature (490)..(822): NCBI GI NO: 25408371 NR Description: hypothetical protein At2g35330
  misc_feature (490)..(822): NCBI GI NO: 30686389 NR Description: expressed protein [Arabidopsis thaliana]
  misc_feature (97)..(233): NCBI GI NO: 25408371 NR Description: hypothetical protein At2g35330
  misc_feature (97)..(233): NCBI GI NO: 30686389 NR Description: expressed protein [Arabidopsis thaliana]
  misc_feature (381)..(816): NCBI GI NO: 15223228 NR Description: unknown protein; protein id: At1g32530
MSIVQKQEEMNGCGLNVDKVEAFTVSPQEKGRKNKRKLADPSQPNASSLTEFPPYELPSLKPQNHLSGNGSVGEVSNQLQVEVSESVEWDDPFACHLEELLSSNLLTLFLDTMKQLIDLGYTDDEVLKAVSRCRLYCGGNNLLSNIVNNTLSALKTGDEGAGSGDYVFEDLQQLVSYTLVEMISLIKEVRPSLSTVEAMWRLLMCDLNVLQAFEAEGDGLVSSSKLSDSESLGAESNPPKSSDPDNPKPPQSDPQSNRNEPLKFGNFPNTPNSKKTQSSGTTPGKEVCSGSTVSCQGMRSTSFTLVSDEKLVSCRKGRTKKEIAMLRQKSCVEKIRTYSKGSGYKAAKFASVGSFLLEKRVKSSSEFVPRNSSSKITAEIGVKVSLAEDSGCFVRKNSKLDSPVVVVDAKGYITALPARSVKSASKKKTGSESVTLIPSASEKKSDSSIPSTSEKKSGSESEEKASVSAKLAPDYYAGIPYDAALGIYVPRDKKDELILKLVPRVNDLQNELQVWTDWANQKVKEATGRLLKDQPELKALRKEREEAEQYKKEKQLLEENTRKRLSEMDFALKNATSQLEKAFNTAHRLELEQSILKKEMEAAKIKAVESAESFREAKERGERSLKDIHSWEGQKIMLQEELKGQREKVTVLQKEVTKAKNRQNQIEAALKQERTAKGKLSAQASLIRKETKELEALGKVEEERIKGKAETDVKYYIDNIKRLEREISELKLKSDYSRIIALKKGSSESKATKRESLGMPKVKRERECVMCLSEEMSVIFLPCAHQVLCFKCNQLHEKEGMMDCPSCRGTIHRRIQARFARSGVGEMKLQVRVVEARNLPAMDLNGFSDPYVRLQLGKQRSRTKVVKKNLNPKWTEDFSFGVDDLNDELVVSVLDEDKYFNDDFVGQVRVSVSLVFDAENQSLGTVWYPLNPKKKGSKKDCGEILLKICFSQKNSVLDLTSSGDQTSASRSPDLRLESPIDPSTCASPSRSDDASSIPQTTFAGRFTQIFQKNAITATPTQSSSRSIDASDLSEISKPVFSLELSEDESSSTSFEELLKAMESKDQGSEPPSNLSGGVVVDQLFMISPSDLNIVLFASDSSFYASLTELQGTTEVQIGPWKAENDGESVKRVVSYLKAATKLIKAVKGTEEQTYLKADGEVYAVLASVATPDVPFGGTFKVEVLYCISPGPELPSGEQCSRLVVSWRLNFLQSTMMRGLIENGARQGLKDNFEQYANLLAQSVKPVDSKDIGLNKEQALSSLQAEPQSDWKLAVQYFANFTVLSTFLIGIYVFVHIVFAIPSAIQGLEFNGLDLPDSIGEFVVSGVLVLQCERVLQLISRFMQARKQKGSDHGIKAHGDGWLLTVALIEGVDLAAVDPSGHCDPYIVFTSNGKTRTSSIKFQKSNPQWNEIFEFDAMADPPSVLNVEVFDFDGPFDEAVSLGHAEVNFVRSNISDLADVWVPLQGKLAQACQSKLHLRIFLDHTGGGDVVRDYLNKMEKEVGKKCCCAFLSAEWKFQINVRSPQTNSAFQKLFGLPQEEFLINDFTCHLKRKMPLQGRLFLSARIVGFYASIFGNKTKFFFLWEDIEEIQVLPPTLASMGSPIVVMTLRPNRGLDARIGAKTHDEEGRLKFHFHSFVSFNVAQKTIMALWKAKSLTPEQKVQAVEEESEQKLQSEESGLFLGVDDVRFSEVFSLTLPVPVSFFMELFGGGEVDRKAMERAGCQSYSCSPWESEKDDVYERQTYYRDKRISRYRGEVTSTQQKSLVPEKNGWLVEEVMTLHGVPLGDYFNLHLRYQMEESTSKPKTTYVRVYFGIEWLKSTRHQKRVTKNILVNLQDRLKMTFGFLEKEYSSRQQQQQVT

SEQ ID NO: 5151 - protein, 1850 aa, Arabidopsis thaliana
  peptide (1)..(1850): Ceres Seq. ID no. 12639313
  misc_feature (1354)..(1436): Pfam Name: Pfam Description:  C2 domain
  misc_feature (818)..(1839): NCBI GI NO: 15240629 NR Description: putative protein; protein id: At5g50170
  misc_feature (818)..(1830): NCBI GI NO: 38344486 NR Description: OSJNBa0022H21.21
  misc_feature (1)..(745): NCBI GI NO: 15236231 NR Description: putative protein; protein id: At4g03000.1
  misc_feature (481)..(813): NCBI GI NO: 22531056 NR Description: unknown protein [Arabidopsis thaliana]
  misc_feature (88)..(224): NCBI GI NO: 22531056 NR Description: unknown protein [Arabidopsis thaliana]
  misc_feature (481)..(813): NCBI GI NO: 25408371 NR Description: hypothetical protein At2g35330
  misc_feature (481)..(813): NCBI GI NO: 30686389 NR Description: expressed protein [Arabidopsis thaliana]
  misc_feature (88)..(224): NCBI GI NO: 25408371 NR Description: hypothetical protein At2g35330
  misc_feature (88)..(224): NCBI GI NO: 30686389 NR Description: expressed protein [Arabidopsis thaliana]
  misc_feature (372)..(807): NCBI GI NO: 15223228 NR Description: unknown protein; protein id: At1g32530
MNGCGLNVDKVEAFTVSPQEKGRKNKRKLADPSQPNASSLTEFPPYELPSLKPQNHLSGNGSVGEVSNQLQVEVSESVEWDDPFACHLEELLSSNLLTLFLDTMKQLIDLGYTDDEVLKAVSRCRLYCGGNNLLSNIVNNTLSALKTGDEGAGSGDYVFEDLQQLVSYTLVEMISLIKEVRPSLSTVEAMWRLLMCDLNVLQAFEAEGDGLVSSSKLSDSESLGAESNPPKSSDPDNPKPPQSDPQSNRNEPLKFGNFPNTPNSKKTQSSGTTPGKEVCSGSTVSCQGMRSTSFTLVSDEKLVSCRKGRTKKEIAMLRQKSCVEKIRTYSKGSGYKAAKFASVGSFLLEKRVKSSSEFVPRNSSSKITAEIGVKVSLAEDSGCFVRKNSKLDSPVVVVDAKGYITALPARSVKSASKKKTGSESVTLIPSASEKKSDSSIPSTSEKKSGSESEEKASVSAKLAPDYYAGIPYDAALGIYVPRDKKDELILKLVPRVNDLQNELQVWTDWANQKVKEATGRLLKDQPELKALRKEREEAEQYKKEKQLLEENTRKRLSEMDFALKNATSQLEKAFNTAHRLELEQSILKKEMEAAKIKAVESAESFREAKERGERSLKDIHSWEGQKIMLQEELKGQREKVTVLQKEVTKAKNRQNQIEAALKQERTAKGKLSAQASLIRKETKELEALGKVEEERIKGKAETDVKYYIDNIKRLEREISELKLKSDYSRIIALKKGSSESKATKRESLGMPKVKRERECVMCLSEEMSVIFLPCAHQVLCFKCNQLHEKEGMMDCPSCRGTIHRRIQARFARSGVGEMKLQVRVVEARNLPAMDLNGFSDPYVRLQLGKQRSRTKVVKKNLNPKWTEDFSFGVDDLNDELVVSVLDEDKYFNDDFVGQVRVSVSLVFDAENQSLGTVWYPLNPKKKGSKKDCGEILLKICFSQKNSVLDLTSSGDQTSASRSPDLRLESPIDPSTCASPSRSDDASSIPQTTFAGRFTQIFQKNAITATPTQSSSRSIDASDLSEISKPVFSLELSEDESSSTSFEELLKAMESKDQGSEPPSNLSGGVVVDQLFMISPSDLNIVLFASDSSFYASLTELQGTTEVQIGPWKAENDGESVKRVVSYLKAATKLIKAVKGTEEQTYLKADGEVYAVLASVATPDVPFGGTFKVEVLYCISPGPELPSGEQCSRLVVSWRLNFLQSTMMRGLIENGARQGLKDNFEQYANLLAQSVKPVDSKDIGLNKEQALSSLQAEPQSDWKLAVQYFANFTVLSTFLIGIYVFVHIVFAIPSAIQGLEFNGLDLPDSIGEFVVSGVLVLQCERVLQLISRFMQARKQKGSDHGIKAHGDGWLLTVALIEGVDLAAVDPSGHCDPYIVFTSNGKTRTSSIKFQKSNPQWNEIFEFDAMADPPSVLNVEVFDFDGPFDEAVSLGHAEVNFVRSNISDLADVWVPLQGKLAQACQSKLHLRIFLDHTGGGDVVRDYLNKMEKEVGKKCCCAFLSAEWKFQINVRSPQTNSAFQKLFGLPQEEFLINDFTCHLKRKMPLQGRLFLSARIVGFYASIFGNKTKFFFLWEDIEEIQVLPPTLASMGSPIVVMTLRPNRGLDARIGAKTHDEEGRLKFHFHSFVSFNVAQKTIMALWKAKSLTPEQKVQAVEEESEQKLQSEESGLFLGVDDVRFSEVFSLTLPVPVSFFMELFGGGEVDRKAMERAGCQSYSCSPWESEKDDVYERQTYYRDKRISRYRGEVTSTQQKSLVPEKNGWLVEEVMTLHGVPLGDYFNLHLRYQMEESTSKPKTTYVRVYFGIEWLKSTRHQKRVTKNILVNLQDRLKMTFGFLEKEYSSRQQQQQVT

SEQ ID NO: 5152 - DNA, 1329 bp, Arabidopsis thaliana
  misc_feature (1)..(1329): Ceres Seq. ID no. 12579722
caaaataatccttttgctaaatgggatacaagtaagagtagtattgatgctccgcagctaatgggagcaaaagcgtttacttttgaggagctgaagaaatgcactgacaacttttcagaggcaaatgatgttggcggtggaggttacggcaaggtttatagagggattcttcctaatgggcaactcatagcaatcaaaagggctcaacaaggatctttgcaaggagggttggagttcaaaactgagattgagcttctctcaagggtccatcataagaatgttgtcagactcttgggcttctgctttgaccggaatgaacaaatgctcgtatatgagtacatttcaaacgggtctcttaaagacagtctgtcagggaagagtgggattcgattggattggaccagaaggcttaaaatagcacttggttcaggcaagggcttggcttatcttcatgaacttgctgatcctccaattatacatagagacatcaaatcaaataacatattacttgatgaaaatctaaccgcaaaggttgccgacttcggtctctccaaacttgtgggagaccctgagaaaactcatgtcacaacacaagtcaaaggaaccatgggctacttggatccagagtactacatgacgaatcaattaacggagaagagcgatgtgtatgggtttggtgtggttttactcgagctattaaccggtagaagtccgatagagagaggcaaatatgtggtgagagaggtgaagacaaagatgaataaatctcggagtttgtatgacctgcaggagttgttggacacaacgatcatagcaagcagtgggaatctaaaagggttcgagaagtatgtagacttggctttgagatgtgtggaggaggaaggagttaataggccatcaatgggtgaggttgtgaaagagattgagaacataatgcagcttgcgggattaaatcctaactcagattcagcaacgagttcaagaacgtatgaggacgcaatcaaaggatctggtgatccttatggcagtgaatcgtttcagtacagtgggaattttccagcttcaaagcttgagccccaatgattgattatgtttctttttgttattttgttatttcgtaagtgacttcatacttgaaatgccttgtgaatgtggagtagcatgattctgtttgatatgtggtcgctgattataaagcagatgaatgaagagccaaacgcagaatcaaaaaccaccagatctttggcaatgtcgacaccagttttcaaacataagaaaagtaatcaagctcaatgtatgatgaataattgaatatattaattcttgttg

SEQ ID NO: 5153 - protein, 360 aa, Arabidopsis thaliana
  peptide (1)..(360): Ceres Seq. ID no. 12579723
  misc_feature (38)..(238): Pfam Name: Pfam Description:  Protein kinase domain
  misc_feature (1)..(339): NCBI GI NO: 8978273 NR Description: receptor protein kinase-like
  misc_feature (1)..(360): NCBI GI NO: 30695748 NR Description: receptor protein kinase-related
  misc_feature (1)..(356): NCBI GI NO: 15240547 NR Description: leucine-rich repeat transmembrane protein kinase
  misc_feature (1)..(360): NCBI GI NO: 15240549 NR Description: leucine-rich repeat transmembrane protein kinase
  misc_feature (2)..(360): NCBI GI NO: 30699436 NR Description: leucine-rich repeat transmembrane protein kinase
  misc_feature (3)..(360): NCBI GI NO: 34909240 NR Description: putative receptor protein kinase
  misc_feature (8)..(360): NCBI GI NO: 7715608 NR Description: F20B17.5 [Arabidopsis thaliana]
  misc_feature (10)..(329): NCBI GI NO: 15222211 NR Description: leucine-rich repeat transmembrane protein kinase
  misc_feature (24)..(357): NCBI GI NO: 15240244 NR Description: leucine-rich repeat transmembrane protein kinase
  misc_feature (24)..(357): NCBI GI NO: 10177784 NR Description: receptor protein kinase-like protein
QNNPFAKWDTSKSSIDAPQLMGAKAFTFEELKKCTDNFSEANDVGGGGYGKVYRGILPNGQLIAIKRAQQGSLQGGLEFKTEIELLSRVHHKNVVRLLGFCFDRNEQMLVYEYISNGSLKDSLSGKSGIRLDWTRRLKIALGSGKGLAYLHELADPPIIHRDIKSNNILLDENLTAKVADFGLSKLVGDPEKTHVTTQVKGTMGYLDPEYYMTNQLTEKSDVYGFGVVLLELLTGRSPIERGKYVVREVKTKMNKSRSLYDLQELLDTTIIASSGNLKGFEKYVDLALRCVEEEGVNRPSMGEVVKEIENIMQLAGLNPNSDSATSSRTYEDAIKGSGDPYGSESFQYSGNFPASKLEPQ

SEQ ID NO: 5154 - protein, 340 aa, Arabidopsis thaliana
  peptide (1)..(340): Ceres Seq. ID no. 12579724
  misc_feature (18)..(218): Pfam Name: Pfam Description:  Protein kinase domain
  misc_feature (1)..(319): NCBI GI NO: 8978273 NR Description: receptor protein kinase-like
  misc_feature (1)..(340): NCBI GI NO: 30695748 NR Description: receptor protein kinase-related
  misc_feature (1)..(336): NCBI GI NO: 15240547 NR Description: leucine-rich repeat transmembrane protein kinase
  misc_feature (1)..(340): NCBI GI NO: 15240549 NR Description: leucine-rich repeat transmembrane protein kinase
  misc_feature (1)..(340): NCBI GI NO: 30699436 NR Description: leucine-rich repeat transmembrane protein kinase
  misc_feature (1)..(340): NCBI GI NO: 34909240 NR Description: putative receptor protein kinase
  misc_feature (1)..(340): NCBI GI NO: 7715608 NR Description: F20B17.5 [Arabidopsis thaliana]
  misc_feature (1)..(309): NCBI GI NO: 15222211 NR Description: leucine-rich repeat transmembrane protein kinase
  misc_feature (4)..(337): NCBI GI NO: 15240244 NR Description: leucine-rich repeat transmembrane protein kinase
  misc_feature (4)..(337): NCBI GI NO: 10177784 NR Description: receptor protein kinase-like protein
MGAKAFTFEELKKCTDNFSEANDVGGGGYGKVYRGILPNGQLIAIKRAQQGSLQGGLEFKTEIELLSRVHHKNVVRLLGFCFDRNEQMLVYEYISNGSLKDSLSGKSGIRLDWTRRLKIALGSGKGLAYLHELADPPIIHRDIKSNNILLDENLTAKVADFGLSKLVGDPEKTHVTTQVKGTMGYLDPEYYMTNQLTEKSDVYGFGVVLLELLTGRSPIERGKYVVREVKTKMNKSRSLYDLQELLDTTIIASSGNLKGFEKYVDLALRCVEEEGVNRPSMGEVVKEIENIMQLAGLNPNSDSATSSRTYEDAIKGSGDPYGSESFQYSGNFPASKLEPQ

SEQ ID NO: 5155 - protein, 253 aa, Arabidopsis thaliana
  peptide (1)..(253): Ceres Seq. ID no. 12579725
  misc_feature (1)..(131): Pfam Name: Pfam Description:  Protein kinase domain
  misc_feature (1)..(232): NCBI GI NO: 8978273 NR Description: receptor protein kinase-like
  misc_feature (1)..(253): NCBI GI NO: 30695748 NR Description: receptor protein kinase-related
  misc_feature (1)..(249): NCBI GI NO: 15240547 NR Description: leucine-rich repeat transmembrane protein kinase
  misc_feature (1)..(253): NCBI GI NO: 15240549 NR Description: leucine-rich repeat transmembrane protein kinase
  misc_feature (1)..(253): NCBI GI NO: 30699436 NR Description: leucine-rich repeat transmembrane protein kinase
  misc_feature (1)..(253): NCBI GI NO: 34909240 NR Description: putative receptor protein kinase
  misc_feature (1)..(253): NCBI GI NO: 7715608 NR Description: F20B17.5 [Arabidopsis thaliana]
  misc_feature (1)..(222): NCBI GI NO: 15222211 NR Description: leucine-rich repeat transmembrane protein kinase
  misc_feature (1)..(250): NCBI GI NO: 15240244 NR Description: leucine-rich repeat transmembrane protein kinase
  misc_feature (1)..(250): NCBI GI NO: 10177784 NR Description: receptor protein kinase-like protein
MLVYEYISNGSLKDSLSGKSGIRLDWTRRLKIALGSGKGLAYLHELADPPIIHRDIKSNNILLDENLTAKVADFGLSKLVGDPEKTHVTTQVKGTMGYLDPEYYMTNQLTEKSDVYGFGVVLLELLTGRSPIERGKYVVREVKTKMNKSRSLYDLQELLDTTIIASSGNLKGFEKYVDLALRCVEEEGVNRPSMGEVVKEIENIMQLAGLNPNSDSATSSRTYEDAIKGSGDPYGSESFQYSGNFPASKLEPQ

SEQ ID NO: 5156 - DNA, 1711 bp, Arabidopsis thaliana
  misc_feature (1)..(1711): Ceres Seq. ID no. 13575064
aacaaatttgacgtttttgttcttcgaaattcaaattcacccagaaaaaatctcaatccgcgatggttgaagaatcagcttctgcgtcggaagcttcggtgatacaaaccctaaccgagccggcgacggagattgcgcaaaccctagaacctaacctagcctcaatcgaagccaccgtcgaatcggttgttcagggaggcactgaatcgacttgtaacaacgacgctaataacaacaacgccgctgacagtgctgctactgaggtttgtgatgaggagcgtgagaagacgcttgagttcgctgaggaattgacggagaaaggctctgtgtttttgaaagagaacgatttcgctgaagccgtcgattgcttcagccgtgctctcgaaatcagggttgcacattatggtgaacttgatgctgagtgtataaacgcatactatcgatatggattagctctcctggcaaaggctcaagctgaagctgatccacttgggaacatgcctaagaaagaaggtgaagttcagcaagagtccagcaatggtgaatcgctggctccttctgttgtttcaggtgacccagagagacaagggagttcaagtgggcaagaaggttctggtggtaaagaccaaggagaggatggtgaagattgtcaagatgatgacctatctgatgctgatggtgatgctgatgaagatgagtctgatttggatatggcctggaaaatgctggacattgctagggttattactgacaaacagtctactgagacaatggaaaaagtggatatactctgttcgcttgctgaagtgtccttggaaagagaggacattgagtcttccctgtctgactacaagaatgcattatccatcttagagagactggttgagcccgacagtcgacgcacagctgaattaaacttccgcatctgcatttgtcttgagactggatgtcagcctaaggaagcaataccatattgtcaaaaagctttgttaatatgcaaagctcggatggagaggctcagtaatgaaatcaaaggtgcatctggttcagcaacttcctcaaccgtctctgaaatagatgaaggcatccaacaatcatccaatgttccttacattgataaatctgcttcagacaaagaagttgagatcggagacttagctggtctcgctgaagatctagaaaagaagcttgaggatttaaaacaacaagcagagaacccaaagcaggttcttgctgagctaatgggcatggtatcagctaagccaaatgccagtgacaaggttgttcctgctgctgctgaaatgagctcttctaggatgggaactgtgaacaccaatttcgggaaagatttagagtcgcctacagtctcaaccgctcataccggtgcagcaggaggaggagcagcatcaggtgttactcacttgggtgttgttggaagaggagtgaagagagttttgatgaatacaacctcgattgaatcaagtgcatcaaagaaaccagctctagagttttcagacaaagcagatggcaactcctcttgaaaccggaaaaaggtataaaaattcctgttactagtgaagtatctaacctaagaaaactgagaaaaacatttggtatcttcctcatgaatcttccaagactagattttcaggttcatgttttgtaatggagtccgtacttgctacttttttaaatcgctgagatatttttt

SEQ ID NO: 5157 - protein, 492 aa, Arabidopsis thaliana
  peptide (1)..(492): Ceres Seq. ID no. 13575065
  misc_feature (282)..(315): Pfam Name: Pfam Description:  TPR Domain
  misc_feature (1)..(492): NCBI GI NO: 18419996 NR Description: tetratricopeptide repeat (TPR)-containing protein
  misc_feature (1)..(379): NCBI GI NO: 25407799 NR Description: hypothetical protein AT4g37210
  misc_feature (53)..(492): NCBI GI NO: 38175649 NR Description: tetratricopeptide repeat-containing protein-like
  misc_feature (80)..(340): NCBI GI NO: 4104353 NR Description: nuclear autoantigenic sperm protein autosomal variant
  misc_feature (80)..(401): NCBI GI NO: 13435642 NR Description: Nasp protein [Mus musculus]
  misc_feature (80)..(369): NCBI GI NO: 27262630 NR Description: nuclear autoantigenic sperm protein isoform 3
  misc_feature (80)..(369): NCBI GI NO: 30584691 NR Description: Homo sapiens nuclear autoantigenic sperm protein
  misc_feature (60)..(142): NCBI GI NO: 18129310 NR Description: hypothetical protein [Pinus pinaster]
  misc_feature (80)..(401): NCBI GI NO: 34880630 NR Description: similar to Nasp protein [Rattus norvegicus]
  misc_feature (59)..(413): NCBI GI NO: 19112105 NR Description: hypothetical coiled-coil protein
MVEESASASEASVIQTLTEPATEIAQTLEPNLASIEATVESVVQGGTESTCNNDANNNNAADSAATEVCDEEREKTLEFAEELTEKGSVFLKENDFAEAVDCFSRALEIRVAHYGELDAECINAYYRYGLALLAKAQAEADPLGNMPKKEGEVQQESSNGESLAPSVVSGDPERQGSSSGQEGSGGKDQGEDGEDCQDDDLSDADGDADEDESDLDMAWKMLDIARVITDKQSTETMEKVDILCSLAEVSLEREDIESSLSDYKNALSILERLVEPDSRRTAELNFRICICLETGCQPKEAIPYCQKALLICKARMERLSNEIKGASGSATSSTVSEIDEGIQQSSNVPYIDKSASDKEVEIGDLAGLAEDLEKKLEDLKQQAENPKQVLAELMGMVSAKPNASDKVVPAAAEMSSSRMGTVNTNFGKDLESPTVSTAHTGAAGGGAASGVTHLGVVGRGVKRVLMNTTSIESSASKKPALEFSDKADGNSS

SEQ ID NO: 5158 - protein, 347 aa, Arabidopsis thaliana
  peptide (1)..(347): Ceres Seq. ID no. 13575066
  misc_feature (137)..(170): Pfam Name: Pfam Description:  TPR Domain
  misc_feature (1)..(347): NCBI GI NO: 18419996 NR Description: tetratricopeptide repeat (TPR)-containing protein
  misc_feature (1)..(234): NCBI GI NO: 25407799 NR Description: hypothetical protein AT4g37210
  misc_feature (1)..(347): NCBI GI NO: 38175649 NR Description: tetratricopeptide repeat-containing protein-like
  misc_feature (1)..(195): NCBI GI NO: 4104353 NR Description: nuclear autoantigenic sperm protein autosomal variant
  misc_feature (1)..(256): NCBI GI NO: 13435642 NR Description: Nasp protein [Mus musculus]
  misc_feature (1)..(224): NCBI GI NO: 27262630 NR Description: nuclear autoantigenic sperm protein isoform 3
  misc_feature (1)..(224): NCBI GI NO: 30584691 NR Description: Homo sapiens nuclear autoantigenic sperm protein
  misc_feature (1)..(256): NCBI GI NO: 34880630 NR Description: similar to Nasp protein [Rattus norvegicus]
  misc_feature (1)..(268): NCBI GI NO: 19112105 NR Description: hypothetical coiled-coil protein
  misc_feature (1)..(214): NCBI GI NO: 39597341 NR Description: Hypothetical protein CBG02966
MPKKEGEVQQESSNGESLAPSVVSGDPERQGSSSGQEGSGGKDQGEDGEDCQDDDLSDADGDADEDESDLDMAWKMLDIARVITDKQSTETMEKVDILCSLAEVSLEREDIESSLSDYKNALSILERLVEPDSRRTAELNFRICICLETGCQPKEAIPYCQKALLICKARMERLSNEIKGASGSATSSTVSEIDEGIQQSSNVPYIDKSASDKEVEIGDLAGLAEDLEKKLEDLKQQAENPKQVLAELMGMVSAKPNASDKVVPAAAEMSSSRMGTVNTNFGKDLESPTVSTAHTGAAGGGAASGVTHLGVVGRGVKRVLMNTTSIESSASKKPALEFSDKADGNSS

SEQ ID NO: 5159 - protein, 276 aa, Arabidopsis thaliana
  peptide (1)..(276): Ceres Seq. ID no. 13575067
  misc_feature (66)..(99): Pfam Name: Pfam Description:  TPR Domain
  misc_feature (1)..(276): NCBI GI NO: 18419996 NR Description: tetratricopeptide repeat (TPR)-containing protein
  misc_feature (1)..(163): NCBI GI NO: 25407799 NR Description: hypothetical protein AT4g37210
  misc_feature (1)..(276): NCBI GI NO: 38175649 NR Description: tetratricopeptide repeat-containing protein-like
  misc_feature (1)..(124): NCBI GI NO: 4104353 NR Description: nuclear autoantigenic sperm protein autosomal variant
  misc_feature (1)..(185): NCBI GI NO: 13435642 NR Description: Nasp protein [Mus musculus]
  misc_feature (1)..(153): NCBI GI NO: 27262630 NR Description: nuclear autoantigenic sperm protein isoform 3
  misc_feature (1)..(153): NCBI GI NO: 30584691 NR Description: Homo sapiens nuclear autoantigenic sperm protein
  misc_feature (1)..(185): NCBI GI NO: 34880630 NR Description: similar to Nasp protein [Rattus norvegicus]
  misc_feature (1)..(197): NCBI GI NO: 19112105 NR Description: hypothetical coiled-coil protein
  misc_feature (1)..(143): NCBI GI NO: 39597341 NR Description: Hypothetical protein CBG02966
MAWKMLDIARVITDKQSTETMEKVDILCSLAEVSLEREDIESSLSDYKNALSILERLVEPDSRRTAELNFRICICLETGCQPKEAIPYCQKALLICKARMERLSNEIKGASGSATSSTVSEIDEGIQQSSNVPYIDKSASDKEVEIGDLAGLAEDLEKKLEDLKQQAENPKQVLAELMGMVSAKPNASDKVVPAAAEMSSSRMGTVNTNFGKDLESPTVSTAHTGAAGGGAASGVTHLGVVGRGVKRVLMNTTSIESSASKKPALEFSDKADGNSS

SEQ ID NO: 5160 - DNA, 1369 bp, Arabidopsis thaliana; identical to SEQ ID NO: 2627
  misc_feature (1)..(1369): Ceres Seq. ID no. 12489536

SEQ ID NO: 5161 - protein, 383 aa, Arabidopsis thaliana; identical to SEQ ID NO: 2628
  peptide (1)..(383): Ceres Seq. ID no. 12489537
  misc_feature (145)..(215): Pfam Name: a.k.a. RRM, RBD, or RNP domain Pfam Description: RNA recognition motif.
  misc_feature (24)..(383): NCBI GI NO: 15217975 NR Description: RRM-containing RNA-binding protein, putative
  misc_feature (24)..(376): NCBI GI NO: 25456498 NR Description: RNA binding protein
  misc_feature (27)..(269): NCBI GI NO: 7487039 NR Description: hypothetical protein T15N24
  misc_feature (27)..(269): NCBI GI NO: 18416794 NR Description: heterogeneous nuclear ribonucleoprotein
  misc_feature (24)..(269): NCBI GI NO: 9758187 NR Description: RNA-binding protein-like [Arabidopsis thaliana]
  misc_feature (24)..(269): NCBI GI NO: 22531168 NR Description: RNA-binding protein-like [Arabidopsis thaliana]
  misc_feature (24)..(269): NCBI GI NO: 30696616 NR Description: RNA recognition motif (RRM)-containing protein
  misc_feature (24)..(269): NCBI GI NO: 18423760 NR Description: heterogeneous nuclear ribonucleoprotein
  misc_feature (24)..(266): NCBI GI NO: 38175737 NR Description: putative heterogeneous nuclear ribonucleoprotein A1
  misc_feature (24)..(333): NCBI GI NO: 15292697 NR Description: putative RNA-binding protein

SEQ ID NO: 5162 - protein, 360 aa, Arabidopsis thaliana; identical to SEQ ID NO: 2629
  peptide (1)..(360): Ceres Seq. ID no. 12489538
  misc_feature (122)..(192): Pfam Name: a.k.a. RRM, RBD, or RNP domain Pfam Description: RNA recognition motif.
  misc_feature (1)..(360): NCBI GI NO: 15217975 NR Description: RRM-containing RNA-binding protein, putative
  misc_feature (1)..(353): NCBI GI NO: 25456498 NR Description: RNA binding protein
  misc_feature (4)..(246): NCBI GI NO: 7487039 NR Description: hypothetical protein T15N24
  misc_feature (4)..(246): NCBI GI NO: 18416794 NR Description: heterogeneous nuclear ribonucleoprotein
  misc_feature (1)..(246): NCBI GI NO: 9758187 NR Description: RNA-binding protein-like [Arabidopsis thaliana]
  misc_feature (1)..(246): NCBI GI NO: 30696616 NR Description: RNA recognition motif (RRM)-containing protein
  misc_feature (1)..(246): NCBI GI NO: 22531168 NR Description: RNA-binding protein-like [Arabidopsis thaliana]
  misc_feature (1)..(246): NCBI GI NO: 18423760 NR Description: heterogeneous nuclear ribonucleoprotein
  misc_feature (1)..(243): NCBI GI NO: 38175737 NR Description: putative heterogeneous nuclear ribonucleoprotein A1
  misc_feature (1)..(310): NCBI GI NO: 15292697 NR Description: putative RNA-binding protein

SEQ ID NO: 5163 - protein, 268 aa, Arabidopsis thaliana; identical to SEQ ID NO: 2630
  peptide (1)..(268): Ceres Seq. ID no. 12489539
  misc_feature (30)..(100): Pfam Name: a.k.a. RRM, RBD, or RNP domain Pfam Description: RNA recognition motif.
  misc_feature (1)..(268): NCBI GI NO: 15217975 NR Description: RRM-containing RNA-binding protein, putative
  misc_feature (1)..(261): NCBI GI NO: 25456498 NR Description: RNA binding protein
  misc_feature (1)..(154): NCBI GI NO: 7487039 NR Description: hypothetical protein T15N24
  misc_feature (1)..(154): NCBI GI NO: 18416794 NR Description: heterogeneous nuclear ribonucleoprotein
  misc_feature (1)..(154): NCBI GI NO: 9758187 NR Description: RNA-binding protein-like [Arabidopsis thaliana]
  misc_feature (1)..(154): NCBI GI NO: 30696616 NR Description: RNA recognition motif (RRM)-containing protein
  misc_feature (1)..(154): NCBI GI NO: 22531168 NR Description: RNA-binding protein-like [Arabidopsis thaliana]
  misc_feature (1)..(154): NCBI GI NO: 18423760 NR Description: heterogeneous nuclear ribonucleoprotein
  misc_feature (1)..(151): NCBI GI NO: 38175737 NR Description: putative heterogeneous nuclear ribonucleoprotein A1
  misc_feature (1)..(218): NCBI GI NO: 15292697 NR Description: putative RNA-binding protein

SEQ ID NO: 5164 - DNA, 1881 bp, Arabidopsis thaliana
  misc_feature (1)..(1881): Ceres Seq. ID no. 12330774
aactgcattagggtttctagaaggaattatattctcatggatcctcataaaaaggttgcactggagactgagttctttacagaatacggtgaagctagccgataccaaatccaagaagttatagggaaaggaagttacggtgttgtggcatctgcaatcgacacacattcaggcgaaaaggttgccattaagaaaatcaatgatgtgtttgagcacgtctctgatgcaacgcggattctaagagagatcaagcttctcaggttgctccgccatcctgatatagtggagataaagcatgtaatgcttcctccttcacgccgtgagttcagagacatttatgttgttttcgagttgatggaatcagatcttcaccaagttatcaaggcgaacgatgatcttacacctgagcactaccagtttttcctctaccagcttcttcgtggtctgaagttcatacacacagctaatgtgtttcatcgtgatttgaagcctaaaaatattctagccaactctgattgcaagttgaagatttgcgactttgggcttgctcgagtgtcctttaatgatgcaccttcggctatattctggactgactatgttgctacaagatggtaccgtgcgccagaactttgtggctctttcttctccaaatatactcctgccattgatatatggagcataggatgcatatttgcagaaatgctcactgggaagccattgtttcctgggaagaatggtgcaccaattggatattatgactgatttgcttggtactcctcctcccgaagctattgcaaggattcgtaatgaaaaggcgaggagatatctcggcaatatgaggagaaaaccgccagttccattcactcacaaatttcctcatgtagacccattggcccttcgcttactgcaccgtcttcttgcatttgatcccaaagaccgtccctcagctgaagaggcactggcagatccttacttctatggtctggcaaacgttgatcgggaaccatctactcaaccgattccgaaactcgagtttgagtttgaaagaaggaagataacaaaagaagatgtgagagaattgatctacagagagatattagagtatcatcctcagatgctgcaagaatatcttcgaggtggagaacagactagcttcatgtacccaagtggtgttgatcgctttaagagacaatttgctcatcttgaggaaaattacggtaagggtgagaaaggctcacctcttcaacgccaacacgcttccttgcctagagagcgagtccctgctcctaagaaagagaatggatcacataatcacgatatcgagaacagatccatagcgtctttagtcacgaccctcgaaagccctccaacgtcacaacacgaggggtcagactacaggaatgggacgagccagacgggttacagcgctcgcagcttgctgaaaagtgccagcatcagtgcatctaaatgcattggcatgaaaccaagaaacaagtccgagtacggggaatcaaacaatgatacggttgatgctctgtctcaaaaggtcgcggctctccacacttgacttgtttcagagattgaggattgaaacttgttgctaacagtagacggctgattctacaagtcttgtacacatctctcagagaagacgaagaagaagtctgatcttgatagagatattgagagacatgactcatgagctatgaacaaaacaacttaaccttcattggtcttcaatttgtccatcaagtcgagttgtattaaaaatggatggagaatataattaaagaagaattgtgttaacccctggatttatgcctgacaagtatttgactttatcagacattataaattatagttaaagtgtgtgttttctcc

SEQ ID NO: 5165 - protein, 277 aa, Arabidopsis thaliana
  peptide (1)..(277): Ceres Seq. ID no. 12330775
  misc_feature (1)..(81): Pfam Name: Pfam Description:  Protein kinase domain
  misc_feature (1)..(277): NCBI GI NO: 9294059 NR Description: MAP kinase [Arabidopsis thaliana]
  misc_feature (1)..(277): NCBI GI NO: 18401750 NR Description: putative MAP kinase; protein id: At3g18040
  misc_feature (1)..(277): NCBI GI NO: 7106544 NR Description: ATMPK9 [Arabidopsis thaliana]
  misc_feature (1)..(276): NCBI GI NO: 15220976 NR Description: mitogen-activated protein kinase, putative
  misc_feature (1)..(276): NCBI GI NO: 25406284 NR Description: probable MAP kinase F25P22.9
  misc_feature (1)..(277): NCBI GI NO: 5815410 NR Description: blast and wounding induced mitogen-activated protein kinase
  misc_feature (1)..(277): NCBI GI NO: 6689924 NR Description: MAP kinase homolog [Oryza sativa]
  misc_feature (1)..(276): NCBI GI NO: 38174819 NR Description: putative MAP kinase
  misc_feature (1)..(276): NCBI GI NO: 8671782 NR Description: T10O22.12 [Arabidopsis thaliana]
  misc_feature (1)..(217): NCBI GI NO: 7106542 NR Description: ATMPK8 [Arabidopsis thaliana]
MVHQLDIMTDLLGTPPPEAIARIRNEKARRYLGNMRRKPPVPFTHKFPHVDPLALRLLHRLLAFDPKDRPSAEEALADPYFYGLANVDREPSTQPIPKLEFEFERRKITKEDVRELIYREILEYHPQMLQEYLRGGEQTSFMYPSGVDRFKRQFAHLEENYGKGEKGSPLQRQHASLPRERVPAPKKENGSHNHDIENRSIASLVTTLESPPTSQHEGSDYRNGTSQTGYSARSLLKSASISASKCIGMKPRNKSEYGESNNDTVDALSQKVAALHT

SEQ ID NO: 5166 - protein, 270 aa, Arabidopsis thaliana
  peptide (1)..(270): Ceres Seq. ID no. 12330776
  misc_feature (1)..(74): Pfam Name: Pfam Description:  Protein kinase domain
  misc_feature (1)..(270): NCBI GI NO: 9294059 NR Description: MAP kinase [Arabidopsis thaliana]
  misc_feature (1)..(270): NCBI GI NO: 18401750 NR Description: putative MAP kinase; protein id: At3g18040
  misc_feature (1)..(270): NCBI GI NO: 7106544 NR Description: ATMPK9 [Arabidopsis thaliana]
  misc_feature (1)..(269): NCBI GI NO: 15220976 NR Description: mitogen-activated protein kinase, putative
  misc_feature (1)..(269): NCBI GI NO: 25406284 NR Description: probable MAP kinase F25P22.9
  misc_feature (1)..(270): NCBI GI NO: 5815410 NR Description: blast and wounding induced mitogen-activated protein kinase
  misc_feature (1)..(270): NCBI GI NO: 6689924 NR Description: MAP kinase homolog [Oryza sativa]
  misc_feature (1)..(269): NCBI GI NO: 38174819 NR Description: putative MAP kinase
  misc_feature (1)..(269): NCBI GI NO: 8671782 NR Description: T10O22.12 [Arabidopsis thaliana]
  misc_feature (1)..(210): NCBI GI NO: 7106542 NR Description: ATMPK8 [Arabidopsis thaliana]
MTDLLGTPPPEAIARIRNEKARRYLGNMRRKPPVPFTHKFPHVDPLALRLLHRLLAFDPKDRPSAEEALADPYFYGLANVDREPSTQPIPKLEFEFERRKITKEDVRELIYREILEYHPQMLQEYLRGGEQTSFMYPSGVDRFKRQFAHLEENYGKGEKGSPLQRQHASLPRERVPAPKKENGSHNHDIENRSIASLVTTLESPPTSQHEGSDYRNGTSQTGYSARSLLKSASISASKCIGMKPRNKSEYGESNNDTVDALSQKVAALHT

SEQ ID NO: 5167 - protein, 253 aa, Arabidopsis thaliana
  peptide (1)..(253): Ceres Seq. ID no. 12330777
  misc_feature (35)..(245): Pfam Name: Pfam Description:  Protein kinase domain
  misc_feature (1)..(245): NCBI GI NO: 9294059 NR Description: MAP kinase [Arabidopsis thaliana]
  misc_feature (13)..(245): NCBI GI NO: 18401750 NR Description: putative MAP kinase; protein id: At3g18040
  misc_feature (13)..(245): NCBI GI NO: 7106544 NR Description: ATMPK9 [Arabidopsis thaliana]
  misc_feature (3)..(245): NCBI GI NO: 15220976 NR Description: mitogen-activated protein kinase, putative
  misc_feature (3)..(245): NCBI GI NO: 25406284 NR Description: probable MAP kinase F25P22.9
  misc_feature (24)..(245): NCBI GI NO: 5815410 NR Description: blast and wounding induced mitogen-activated protein kinase
  misc_feature (24)..(245): NCBI GI NO: 6689924 NR Description: MAP kinase homolog [Oryza sativa]
  misc_feature (3)..(245): NCBI GI NO: 38174819 NR Description: putative MAP kinase
  misc_feature (3)..(245): NCBI GI NO: 8671782 NR Description: T10O22.12 [Arabidopsis thaliana]
  misc_feature (3)..(245): NCBI GI NO: 7106542 NR Description: ATMPK8 [Arabidopsis thaliana]
NCIRVSRRNYILMDPHKKVALETEFFTEYGEASRYQIQEVIGKGSYGVVASAIDTHSGEKVAIKKINDVFEHVSDATRILREIKLLRLLRHPDIVEIKHVMLPPSRREFRDIYVVFELMESDLHQVIKANDDLTPEHYQFFLYQLLRGLKFIHTANVFHRDLKPKNILANSDCKLKICDFGLARVSFNDAPSAIFWTDYVATRWYRAPELCGSFFSKYTPAIDIWSIGCIFAEMLTGKPLFPGKNGAPIGYYD

SEQ ID NO: 5168 - DNA, 1489 bp, Arabidopsis thaliana
  misc_feature (1)..(1489): Ceres Seq. ID no. 13494078
ccccctttttcactctcttcatttattcttcccctcatcatcatcatcatcttcttctttaaccaaaaacacaacttacaagaaaactgttgaatctttgtatttatttacatctcctttgacctttaataagaatctgagtggttggtctctgatttgatgagatgactgttgagctgatgatgagcagctacagcggcggcggaggaggaggtgatggttttcctgcaatcgccgcggcggcgaaaatggaagataccgctttgagagaagctgcttctgcagggattcacggtgtggaggagtttcttaaactgatcggtcaaagtcaacaaccaacggagaagagtcagacggagataaccgcggtgactgacgtcgccgttaacagcttcaagaaggtcatttctctactcggtagatctagaaccggacacgctagattcagacgagctcccgcgtcaacgcaaacgccgtttaagcaaacgccggtggttgaggaggaggtggaggtggaggagaagaagccagaaacaagctccgtgttaacaaaacagaaaacagagcaatatcacggtggtggatctgcgtttagagtttattgtccaacaccaattcatcgtcgtcctcctctatcacacaataacaacaacaatcagaatcaaacaaagaacggttcgtcttcttcatctcctccgatgctcgcaaacggagcaccgtcaacgataaactttgcgccgtcaccaccagtctcagcgacgaactcattcatgtcttctcatagatgtgacaccgatagtactcacatgtcatcaggattcgagttcactaacccatctcagctctctggttcgagaggtaaacctcctttatcatcagcttcgttgaagagaagatgtaattcatctccctcaagccgttgccattgctccaagaaaaggaaatcaagagtaaaaagagtgattagagttccagcagtaagtagcaaaatggctgatataccatcagatgagttttcatggagaaaatatggtcaaaaaccaatcaaaggctctcctcatcctcggggatattacaagtgcagcagtgtaagaggttgtccggcgcgtaagcatgtggagcgtgcactagatgatgcgatgatgctaatcgtgacgtacgaaggagaccacaaccatgctttggttctcgagacgacgacgatgaatcatgacaaaactctttagtttctcgagtttgaggggaactgtctgtgtgtgaccactatccagattagtcaacgacagagtgggcccgcactgcacttttttattcttttctttttgaaaagcttttgctttatctttctttttgattggaggaaatagagggaggggagataaagacgagagaggaacgttgtggatcttgatggaagttgaatcatgtgaatgtccttttctgtttatttatttctaggatattatatatttagtgcactatttttgtc

SEQ ID NO: 5169 - protein, 353 aa, Arabidopsis thaliana
  peptide (1)..(353): Ceres Seq. ID no. 13494079
  misc_feature (280)..(340): Pfam Name: Pfam Description:  WRKY DNA -binding domain
  misc_feature (1)..(353): NCBI GI NO: 15233752 NR Description: WRKY family transcription factor
  misc_feature (1)..(339): NCBI GI NO: 10798760 NR Description: WRKY transcription factor Nt-SubD48
  misc_feature (27)..(349): NCBI GI NO: 7488950 NR Description: DNA-binding protein WRKY3 - parsley
  misc_feature (27)..(324): NCBI GI NO: 4680251 NR Description: transcription factor
  misc_feature (177)..(340): NCBI GI NO: 15227812 NR Description: WRKY family transcription factor
  misc_feature (1)..(104): NCBI GI NO: 15227812 NR Description: WRKY family transcription factor
  misc_feature (27)..(340): NCBI GI NO: 4760596 NR Description: DNA-binding protein NtWRKY3 [Nicotiana tabacum]
  misc_feature (29)..(344): NCBI GI NO: 18396971 NR Description: WRKY family transcription factor
  misc_feature (49)..(338): NCBI GI NO: 4894963 NR Description: DNA-binding protein WRKY3 [Avena sativa]
  misc_feature (148)..(338): NCBI GI NO: 18400580 NR Description: WRKY family transcription factor
MTVELMMSSYSGGGGGGDGFPAIAAAAKMEDTALREAASAGIHGVEEFLKLIGQSQQPTEKSQTEITAVTDVAVNSFKKVISLLGRSRTGHARFRRAPASTQTPFKQTPVVEEEVEVEEKKPETSSVLTKQKTEQYHGGGSAFRVYCPTPIHRRPPLSHNNNNNQNQTKNGSSSSSPPMLANGAPSTINFAPSPPVSATNSFMSSHRCDTDSTHMSSGFEFTNPSQLSGSRGKPPLSSASLKRRCNSSPSSRCHCSKKRKSRVKRVIRVPAVSSKMADIPSDEFSWRKYGQKPIKGSPHPRGYYKCSSVRGCPARKHVERALDDAMMLIVTYEGDHNHALVLETTTMNHDKTL

SEQ ID NO: 5170 - protein, 348 aa, Arabidopsis thaliana
  peptide (1)..(348): Ceres Seq. ID no. 13494080
  misc_feature (275)..(335): Pfam Name: Pfam Description:  WRKY DNA -binding domain
  misc_feature (1)..(348): NCBI GI NO: 15233752 NR Description: WRKY family transcription factor
  misc_feature (1)..(334): NCBI GI NO: 10798760 NR Description: WRKY transcription factor Nt-SubD48
  misc_feature (22)..(344): NCBI GI NO: 7488950 NR Description: DNA-binding protein WRKY3 - parsley
  misc_feature (22)..(319): NCBI GI NO: 4680251 NR Description: transcription factor
  misc_feature (172)..(335): NCBI GI NO: 15227812 NR Description: WRKY family transcription factor
  misc_feature (1)..(99): NCBI GI NO: 15227812 NR Description: WRKY family transcription factor
  misc_feature (22)..(335): NCBI GI NO: 4760596 NR Description: DNA-binding protein NtWRKY3 [Nicotiana tabacum]
  misc_feature (24)..(339): NCBI GI NO: 18396971 NR Description: WRKY family transcription factor
  misc_feature (44)..(333): NCBI GI NO: 4894963 NR Description: DNA-binding protein WRKY3 [Avena sativa]
  misc_feature (143)..(333): NCBI GI NO: 18400580 NR Description: WRKY family transcription factor
MMSSYSGGGGGGDGFPAIAAAAKMEDTALREAASAGIHGVEEFLKLIGQSQQPTEKSQTEITAVTDVAVNSFKKVISLLGRSRTGHARFRRAPASTQTPFKQTPVVEEEVEVEEKKPETSSVLTKQKTEQYHGGGSAFRVYCPTPIHRRPPLSHNNNNNQNQTKNGSSSSSPPMLANGAPSTINFAPSPPVSATNSFMSSHRCDTDSTHMSSGFEFTNPSQLSGSRGKPPLSSASLKRRCNSSPSSRCHCSKKRKSRVKRVIRVPAVSSKMADIPSDEFSWRKYGQKPIKGSPHPRGYYKCSSVRGCPARKHVERALDDAMMLIVTYEGDHNHALVLETTTMNHDKTL

SEQ ID NO: 5171 - protein, 347 aa, Arabidopsis thaliana
  peptide (1)..(347): Ceres Seq. ID no. 13494081
  misc_feature (274)..(334): Pfam Name: Pfam Description:  WRKY DNA -binding domain
  misc_feature (1)..(347): NCBI GI NO: 15233752 NR Description: WRKY family transcription factor
  misc_feature (1)..(333): NCBI GI NO: 10798760 NR Description: WRKY transcription factor Nt-SubD48
  misc_feature (21)..(343): NCBI GI NO: 7488950 NR Description: DNA-binding protein WRKY3 - parsley
  misc_feature (21)..(318): NCBI GI NO: 4680251 NR Description: transcription factor
  misc_feature (171)..(334): NCBI GI NO: 15227812 NR Description: WRKY family transcription factor
  misc_feature (1)..(98): NCBI GI NO: 15227812 NR Description: WRKY family transcription factor
  misc_feature (21)..(334): NCBI GI NO: 4760596 NR Description: DNA-binding protein NtWRKY3 [Nicotiana tabacum]
  misc_feature (23)..(338): NCBI GI NO: 18396971 NR Description: WRKY family transcription factor
  misc_feature (43)..(332): NCBI GI NO: 4894963 NR Description: DNA-binding protein WRKY3 [Avena sativa]
  misc_feature (142)..(332): NCBI GI NO: 18400580 NR Description: WRKY family transcription factor
MSSYSGGGGGGDGFPAIAAAAKMEDTALREAASAGIHGVEEFLKLIGQSQQPTEKSQTEITAVTDVAVNSFKKVISLLGRSRTGHARFRRAPASTQTPFKQTPVVEEEVEVEEKKPETSSVLTKQKTEQYHGGGSAFRVYCPTPIHRRPPLSHNNNNNQNQTKNGSSSSSPPMLANGAPSTINFAPSPPVSATNSFMSSHRCDTDSTHMSSGFEFTNPSQLSGSRGKPPLSSASLKRRCNSSPSSRCHCSKKRKSRVKRVIRVPAVSSKMADIPSDEFSWRKYGQKPIKGSPHPRGYYKCSSVRGCPARKHVERALDDAMMLIVTYEGDHNHALVLETTTMNHDKTL

SEQ ID NO: 5172 - DNA, 1428 bp, Arabidopsis thaliana
  misc_feature (1)..(1428): Ceres Seq. ID no. 13575068
ctaaattgctcaattctctcggccacaggtaagcttcttcgacttcactctttgacccaatactactttcctcaccccctgtggtttcctttgttaaacccttcaaatctctttctcaatttgataaaccctagttctgctatagacctagacaaggatggtgactaaagcagaaaaacaattcgccaaaaatttcaacatagacgatctccctgacgtccctgccggacttcctccacatctcaaagcccagcaaactcgtgtcgtctctaaaaacaacgctcctgctcatactgcgagtgccatttactcgggtacctatgtttcttctacggaagaggacgacaatgtgaagctaggaaacttctatgataacttcaaagttgatgtggttagtctcacaaagacagatatggaatttgatatgattggtattgatgcagcgtttgccaatgcattccgaaggatccttatagctgaggttccttcaatggctattgaaaaagtgttgatagcgtacaacacatcggttattatagacgaagttcttgctcacaggatgggtcttattccaattgccgcagatccaagactttttgaatatttatccgaacatgatcaggcgaatgaaaagaacaccattgtattcaaactccatgtgaaatgtccgaaaaatagaccacgtcttaaagttttaacgagtgatttaaaatggttaccaaatggaagtgagcttctgagagaatcggaaaataaaacctcaaagccaaaaacttacacttcattcagttgcagccaagattcattacctgaatttgctaataatcctatcactccatgcgacctcgatatcttgatagcaaaactcgcccctggtcaggaaatcgagctcgaagctcatgcggttaagggcattggtaaaacacatgcaaagtggtctccagtagggactgcttggtatagaatgcatcctgaggtggttctacgtggggaagttgaggatgaacttgctgaacgacttgtaaacgtctgcccacagaatgttttcgacattgaagacatgggaaaaggtaagaaaagggcaacagtagcgcagccacgtaagtgcacattgtgtaaggaatgcgtaagagacgatgatttggtagaccatgtggatcttggcagtgttaagaaccattttatatttaacattgagtccaccggatcactgcctccagaggttctcttcactgaagctgtgaagatattggaagctaaatgtgaagctataaccgacttttgagttctggtttagttcaattttgaattgtctgtctatcaatgtttctcctcctattgataaattaccaacaaacaacattgacatatttatttatacggttgttgttcaatttggattttcattagccttctgagttctgattc

SEQ ID NO: 5173 - protein, 375 aa, Arabidopsis thaliana
  peptide (1)..(375): Ceres Seq. ID no. 13575069
  misc_feature (117)..(261): Pfam Name: Pfam Description:  RNA polymerase Rpb3/RpoA insert domain
  misc_feature (1)..(375): NCBI GI NO: 15219820 NR Description: RNA polymerase subunit [Arabidopsis thaliana]
  misc_feature (1)..(375): NCBI GI NO: 514322 NR Description: RNA polymerase subunit
  misc_feature (1)..(375): NCBI GI NO: 21592304 NR Description: RNA polymerase subunit [Arabidopsis thaliana]
  misc_feature (1)..(372): NCBI GI NO: 15219773 NR Description: RNA polymerase subunit [Arabidopsis thaliana]
  misc_feature (29)..(374): NCBI GI NO: 3914807 NR Description: DNA-directed RNA polymerase I 40 kDa polypeptide
  misc_feature (45)..(374): NCBI GI NO: 14198113 NR Description: Unknown (protein for IMAGE:3448039) [Homo sapiens]
  misc_feature (45)..(370): NCBI GI NO: 34193909 NR Description: RNA polymerase 1-1 [Danio rerio]
  misc_feature (29)..(374): NCBI GI NO: 34874462 NR Description: similar to DNA-directed RNA polymerase I 40 kDa polypeptide
  misc_feature (29)..(374): NCBI GI NO: 6677787 NR Description: RNA polymerase 1-1; RNA polymerase 1-1
  misc_feature (29)..(374): NCBI GI NO: 18266895 NR Description: DNA-directed RNA polymerase I 40 kDa polypeptide
MVTKAEKQFAKNFNIDDLPDVPAGLPPHLKAQQTRVVSKNNAPAHTASAIYSGTYVSSTEEDDNVKLGNFYDNFKVDVVSLTKTDMEFDMIGIDAAFANAFRRILIAEVPSMAIEKVLIAYNTSVIIDEVLAHRMGLIPIAADPRLFEYLSEHDQANEKNTIVFKLHVKCPKNRPRLKVLTSDLKWLPNGSELLRESENKTSKPKTYTSFSCSQDSLPEFANNPITPCDLDILIAKLAPGQEIELEAHAVKGIGKTHAKWSPVGTAWYRMHPEVVLRGEVEDELAERLVNVCPQNVFDIEDMGKGKKRATVAQPRKCTLCKECVRDDDLVDHVDLGSVKNHFIFNIESTGSLPPEVLFTEAVKILEAKCEAITDF

SEQ ID NO: 5174 - protein, 290 aa, Arabidopsis thaliana
  peptide (1)..(290): Ceres Seq. ID no. 13575070
  misc_feature (32)..(176): Pfam Name: Pfam Description:  RNA polymerase Rpb3/RpoA insert domain
  misc_feature (1)..(290): NCBI GI NO: 15219820 NR Description: RNA polymerase subunit [Arabidopsis thaliana]
  misc_feature (1)..(290): NCBI GI NO: 514322 NR Description: RNA polymerase subunit
  misc_feature (1)..(290): NCBI GI NO: 21592304 NR Description: RNA polymerase subunit [Arabidopsis thaliana]
  misc_feature (1)..(287): NCBI GI NO: 15219773 NR Description: RNA polymerase subunit [Arabidopsis thaliana]
  misc_feature (1)..(289): NCBI GI NO: 3914807 NR Description: DNA-directed RNA polymerase I 40 kDa polypeptide
  misc_feature (1)..(289): NCBI GI NO: 14198113 NR Description: Unknown (protein for IMAGE:3448039) [Homo sapiens]
  misc_feature (1)..(285): NCBI GI NO: 34193909 NR Description: RNA polymerase 1-1 [Danio rerio]
  misc_feature (1)..(289): NCBI GI NO: 34874462 NR Description: similar to DNA-directed RNA polymerase I 40 kDa polypeptide
  misc_feature (1)..(289): NCBI GI NO: 6677787 NR Description: RNA polymerase 1-1; RNA polymerase 1-1
  misc_feature (1)..(289): NCBI GI NO: 18266895 NR Description: DNA-directed RNA polymerase I 40 kDa polypeptide
MEFDMIGIDAAFANAFRRILIAEVPSMAIEKVLIAYNTSVIIDEVLAHRMGLIPIAADPRLFEYLSEHDQANEKNTIVFKLHVKCPKNRPRLKVLTSDLKWLPNGSELLRESENKTSKPKTYTSFSCSQDSLPEFANNPITPCDLDILIAKLAPGQEIELEAHAVKGIGKTHAKWSPVGTAWYRMHPEVVLRGEVEDELAERLVNVCPQNVFDIEDMGKGKKRATVAQPRKCTLCKECVRDDDLVDHVDLGSVKNHFIFNIESTGSLPPEVLFTEAVKILEAKCEAITDF

SEQ ID NO: 5175 - protein, 286 aa, Arabidopsis thaliana
  peptide (1)..(286): Ceres Seq. ID no. 13575071
  misc_feature (28)..(172): Pfam Name: Pfam Description:  RNA polymerase Rpb3/RpoA insert domain
  misc_feature (1)..(286): NCBI GI NO: 15219820 NR Description: RNA polymerase subunit [Arabidopsis thaliana]
  misc_feature (1)..(286): NCBI GI NO: 514322 NR Description: RNA polymerase subunit
  misc_feature (1)..(286): NCBI GI NO: 21592304 NR Description: RNA polymerase subunit [Arabidopsis thaliana]
  misc_feature (1)..(283): NCBI GI NO: 15219773 NR Description: RNA polymerase subunit [Arabidopsis thaliana]
  misc_feature (1)..(285): NCBI GI NO: 3914807 NR Description: DNA-directed RNA polymerase I 40 kDa polypeptide
  misc_feature (1)..(285): NCBI GI NO: 14198113 NR Description: Unknown (protein for IMAGE:3448039) [Homo sapiens]
  misc_feature (1)..(281): NCBI GI NO: 34193909 NR Description: RNA polymerase 1-1 [Danio rerio]
  misc_feature (1)..(285): NCBI GI NO: 34874462 NR Description: similar to DNA-directed RNA polymerase I 40 kDa polypeptide
  misc_feature (1)..(285): NCBI GI NO: 6677787 NR Description: RNA polymerase 1-1; RNA polymerase 1-1
  misc_feature (1)..(285): NCBI GI NO: 18266895 NR Description: DNA-directed RNA polymerase I 40 kDa polypeptide
MIGIDAAFANAFRRILIAEVPSMAIEKVLIAYNTSVIIDEVLAHRMGLIPIAADPRLFEYLSEHDQANEKNTIVFKLHVKCPKNRPRLKVLTSDLKWLPNGSELLRESENKTSKPKTYTSFSCSQDSLPEFANNPITPCDLDILIAKLAPGQEIELEAHAVKGIGKTHAKWSPVGTAWYRMHPEVVLRGEVEDELAERLVNVCPQNVFDIEDMGKGKKRATVAQPRKCTLCKECVRDDDLVDHVDLGSVKNHFIFNIESTGSLPPEVLFTEAVKILEAKCEAITDF

SEQ ID NO: 5176 - DNA, 2054 bp, Arabidopsis thaliana
  misc_feature (1)..(2054): Ceres Seq. ID no. 13509092
tggttcctctcctctctctctctcttcccgttttcacttttgttcgttctctggcggccgatcccgtcgctcgctaccttttaagatattttttttatctaatgaacctgaaattgtaattaggcatataattggggattatttgctgaaattctcatttctagatcgaaaaaagcgaataattcgttttcatttgattcttgcctaatcttagggtgtctttatttatctaccaaaagaatgtctaattatcgaggagatgatgctgagtacatggaagacgtagatgatgagatggaagatgttgaagatgatatggatgaggagtttcgtggtgatgatcttggtgcttcagattctgacgttgaagaatttgactattcgaacaataaagtagctgataccacggctgagcaagctcggaaagggaaagatatccaggggattccgtgggacagacttaatatttctagagagaaatacagacaaactagattagaacagtataagaattatgaaaatgtccctaattctggagaatcatcagaaaaggtttgcaaggtcacacagaaaggaggactattttatgacttctggcggaattcacgatctattaagtctactatactacatttccagctgagaaatttggtatgggcaacttctaagcacgacgtgtatcttatgtcaaattttctggttacacattattcttctctaacgtctggaaagcatgaagttctcaatgtccgtggtcatgttgcgccatctgagaaacatcctggaagtttacttgaaggatttacgcagactcaagtaagtacacttgcagtaaaagatgactttctggttgctggcgggtttcaaggagaacttatttgcaagcatcttgatagaccgggtgtcagcttttgctctcgtatgacttatgatgataatgctataaccaatgctattgagatctacaacaaacccagtggtgcacttcattttactgcgtcaaataatgactgtggagttagagactttgacatggagagataccagcttgttaagcatttccgttttccttggccagtgaatcacgcatctttgagtcctgatggtaaattactggctattgttggagacaacccggagggccttattgtagaccccaacacaggaaagacgttggaaacactatcaggacacttggacttttcctttgcctctgcgtggcatccggatggagtcactttctctacaggaaaccaagataagacttgtcgtgtatgggacatccgtaacctatctcagtctgttactgtcttgaagggtaacctgggagcaatccggtcaatccgctacacatcagatggaaaatacatggccatggctgaaccggctgactttgtccatgtctatgatgtctcaaacgggtatgaaacagagcaggaaatcgacttctttggggaaatctctggaatatctttcagccctgacacagaggcgctatttattggggtatgggaccgcacttatggtagcctccttgagtttggtcggcgcaggaactattcctaccttgactcgtatctttaagctagaagagaagtatacacaaccctgtccaatgaagaaaagagagctcattcagcaaccagtgaacatgacagaagcaaagcatagatatatggatatctcaaagatgtaaatgatgtgttgtgcaaatgctagttagttagtgtcttttgtttccttctccggctggtgtgttattttccttatgtctggttatgtctggtctcaaaaggttcaagatgtgtacagaaagggctggttcagtggtggcacagactggattaggacttgagggtggctccgcagcgggttctggattcaaagtcgggaggatcattgttgttgtgtttggtggcttgtgatcttttctttttgttccttgtacttgtggttgttgtaggaactcgagtgtttagatcctgttctgagtttagaatttggagatacttaactaaattaaaataaattaataatagtcctttgttcgttat

SEQ ID NO: 5177 - protein, 447 aa, Arabidopsis thaliana
  peptide (1)..(447): Ceres Seq. ID no. 13509093
  misc_feature (1)..(447): NCBI GI NO: 18399975 NR Description: WD-40 repeat protein family [Arabidopsis thaliana]
  misc_feature (1)..(447): NCBI GI NO: 18405485 NR Description: WD-40 repeat protein family [Arabidopsis thaliana]
  misc_feature (1)..(447): NCBI GI NO: 18423837 NR Description: WD-40 repeat protein family [Arabidopsis thaliana]
  misc_feature (1)..(447): NCBI GI NO: 21536732 NR Description: WD-repeat protein-like [Arabidopsis thaliana]
  misc_feature (1)..(447): NCBI GI NO: 9758639 NR Description: WD-repeat protein-like [Arabidopsis thaliana]
  misc_feature (7)..(447): NCBI GI NO: 30696707 NR Description: WD-40 repeat protein family [Arabidopsis thaliana]
  misc_feature (1)..(447): NCBI GI NO: 25405994 NR Description: protein F20N2.10 [imported] - Arabidopsis thaliana
  misc_feature (30)..(447): NCBI GI NO: 9294540 NR Description: WD domain protein-like [Arabidopsis thaliana]
  misc_feature (1)..(445): NCBI GI NO: 13937195 NR Description: At1g78070/F28K19_28 [Arabidopsis thaliana]
  misc_feature (69)..(447): NCBI GI NO: 27948448 NR Description: GAMYB-binding protein
MSNYRGDDAEYMEDVDDEMEDVEDDMDEEFRGDDLGASDSDVEEFDYSNNKVADTTAEQARKGKDIQGIPWDRLNISREKYRQTRLEQYKNYENVPNSGESSEKVCKVTQKGGLFYDFWRNSRSIKSTILHFQLRNLVWATSKHDVYLMSNFLVTHYSSLTSGKHEVLNVRGHVAPSEKHPGSLLEGFTQTQVSTLAVKDDFLVAGGFQGELICKHLDRPGVSFCSRMTYDDNAITNAIEIYNKPSGALHFTASNNDCGVRDFDMERYQLVKHFRFPWPVNHASLSPDGKLLAIVGDNPEGLIVDPNTGKTLETLSGHLDFSFASAWHPDGVTFSTGNQDKTCRVWDIRNLSQSVTVLKGNLGAIRSIRYTSDGKYMAMAEPADFVHVYDVSNGYETEQEIDFFGEISGISFSPDTEALFIGVWDRTYGSLLEFGRRRNYSYLDSYL

SEQ ID NO: 5178 - protein, 436 aa, Arabidopsis thaliana
  peptide (1)..(436): Ceres Seq. ID no. 13509094
  misc_feature (1)..(436): NCBI GI NO: 18399975 NR Description: WD-40 repeat protein family [Arabidopsis thaliana]
  misc_feature (1)..(436): NCBI GI NO: 18405485 NR Description: WD-40 repeat protein family [Arabidopsis thaliana]
  misc_feature (1)..(436): NCBI GI NO: 18423837 NR Description: WD-40 repeat protein family [Arabidopsis thaliana]
  misc_feature (1)..(436): NCBI GI NO: 21536732 NR Description: WD-repeat protein-like [Arabidopsis thaliana]
  misc_feature (1)..(436): NCBI GI NO: 9758639 NR Description: WD-repeat protein-like [Arabidopsis thaliana]
  misc_feature (1)..(436): NCBI GI NO: 30696707 NR Description: WD-40 repeat protein family [Arabidopsis thaliana]
  misc_feature (1)..(436): NCBI GI NO: 25405994 NR Description: protein F20N2.10 [imported] - Arabidopsis thaliana
  misc_feature (19)..(436): NCBI GI NO: 9294540 NR Description: WD domain protein-like [Arabidopsis thaliana]
  misc_feature (1)..(434): NCBI GI NO: 13937195 NR Description: At1g78070/F28K19_28 [Arabidopsis thaliana]
  misc_feature (58)..(436): NCBI GI NO: 27948448 NR Description: GAMYB-binding protein
MEDVDDEMEDVEDDMDEEFRGDDLGASDSDVEEFDYSNNKVADTTAEQARKGKDIQGIPWDRLNISREKYRQTRLEQYKNYENVPNSGESSEKVCKVTQKGGLFYDFWRNSRSIKSTILHFQLRNLVWATSKHDVYLMSNFLVTHYSSLTSGKHEVLNVRGHVAPSEKHPGSLLEGFTQTQVSTLAVKDDFLVAGGFQGELICKHLDRPGVSFCSRMTYDDNAITNAIEIYNKPSGALHFTASNNDCGVRDFDMERYQLVKHFRFPWPVNHASLSPDGKLLAIVGDNPEGLIVDPNTGKTLETLSGHLDFSFASAWHPDGVTFSTGNQDKTCRVWDIRNLSQSVTVLKGNLGAIRSIRYTSDGKYMAMAEPADFVHVYDVSNGYETEQEIDFFGEISGISFSPDTEALFIGVWDRTYGSLLEFGRRRNYSYLDSYL

SEQ ID NO: 5179 - protein, 429 aa, Arabidopsis thaliana
  peptide (1)..(429): Ceres Seq. ID no. 13509095
  misc_feature (1)..(429): NCBI GI NO: 18399975 NR Description: WD-40 repeat protein family [Arabidopsis thaliana]
  misc_feature (1)..(429): NCBI GI NO: 18405485 NR Description: WD-40 repeat protein family [Arabidopsis thaliana]
  misc_feature (1)..(429): NCBI GI NO: 18423837 NR Description: WD-40 repeat protein family [Arabidopsis thaliana]
  misc_feature (1)..(429): NCBI GI NO: 21536732 NR Description: WD-repeat protein-like [Arabidopsis thaliana]
  misc_feature (1)..(429): NCBI GI NO: 9758639 NR Description: WD-repeat protein-like [Arabidopsis thaliana]
  misc_feature (1)..(429): NCBI GI NO: 30696707 NR Description: WD-40 repeat protein family [Arabidopsis thaliana]
  misc_feature (1)..(429): NCBI GI NO: 25405994 NR Description: protein F20N2.10 [imported] - Arabidopsis thaliana
  misc_feature (12)..(429): NCBI GI NO: 9294540 NR Description: WD domain protein-like [Arabidopsis thaliana]
  misc_feature (1)..(427): NCBI GI NO: 13937195 NR Description: At1g78070/F28K19_28 [Arabidopsis thaliana]
  misc_feature (51)..(429): NCBI GI NO: 27948448 NR Description: GAMYB-binding protein
MEDVEDDMDEEFRGDDLGASDSDVEEFDYSNNKVADTTAEQARKGKDIQGIPWDRLNISREKYRQTRLEQYKNYENVPNSGESSEKVCKVTQKGGLFYDFWRNSRSIKSTILHFQLRNLVWATSKHDVYLMSNFLVTHYSSLTSGKHEVLNVRGHVAPSEKHPGSLLEGFTQTQVSTLAVKDDFLVAGGFQGELICKHLDRPGVSFCSRMTYDDNAITNAIEIYNKPSGALHFTASNNDCGVRDFDMERYQLVKHFRFPWPVNHASLSPDGKLLAIVGDNPEGLIVDPNTGKTLETLSGHLDFSFASAWHPDGVTFSTGNQDKTCRVWDIRNLSQSVTVLKGNLGAIRSIRYTSDGKYMAMAEPADFVHVYDVSNGYETEQEIDFFGEISGISFSPDTEALFIGVWDRTYGSLLEFGRRRNYSYLDSYL

SEQ ID NO: 5180 - DNA, 1200 bp, Arabidopsis thaliana
  misc_feature (1)..(1200): Ceres Seq. ID no. 13488977
aagaagaggagccaagtaccaaactttttccttcagggttttcctctcaaaatcccaacttggcctctgtttttgctttcttttatgttctcttcttctctaaaaaccatctcatacttccaagaatttctctcacaaagaccaagaactcaaaatgtatcaagattctggattaatgctccgttacatgcaaaactgtcccccagatattcaacaattcgaagacctcttcaaatcatacaaactctccgatgaaatgaacaacacttttgttgagtcatcaaacatatctgagtatgatattggagaagaaagtgatctttttagagctcctgatccaattcttgaagaaccaatcttaaccgttgatccactctctgctgctttgactatgatctcttgtggtgaagacacttcacaaggtctttgtgagcttcctgatcttggttcattgcagagtggtcaacagcttcttgacaaagctttttatgaatgtgagcaagatcttatgatgaaatcagctatggagtctccattctctgatgttttagacatcaagaacatctctgttgtgacgacaatcaatgagaaccaggatatgcaaaagagtgttagctcggggaatttgagctctatggattggtcacatgcacaacaagagactgtaatgattcagaattttcctgatttcgattttggttatggaatgcgaagagcctttagtgaaggcgacatacagaaacttggggcaggtcttgttcaatctccactagataggattattgtgagctgcacttcagaagatcgccgtgagaagctttctcgatacaagaacaagaagagcaggcgaaatttcgggcgtaagattaagtatgcttgcaggaaagctcttgcagatagccaaccgagagtccgaggaaggtttgcgaaaacagaggagaggaaatagaatggttcaagaaaagggctcaaaggaaggagactaagcaaaaggaagaaacatgaagaataaggagataaagcccatctcattagaaactagttttgttttatatatctatgtataaactttaaaatcttataagcatccaattagttttttgtatataaagggtttctctaaataagctttaagtaaagaaattgtagctaaagaaagtttgtattattgtagtttaaagaagtaatgtatcagtgggt

SEQ ID NO: 5181 - protein, 264 aa, Arabidopsis thaliana
  peptide (1)..(264): Ceres Seq. ID no. 13488978
  misc_feature (223)..(262): Pfam Name: Pfam Description:  CCT motif
  misc_feature (1)..(264): NCBI GI NO: 18423511 NR Description: expressed protein [Arabidopsis thaliana]
  misc_feature (1)..(264): NCBI GI NO: 8843771 NR Description: gene_id:MYN8
  misc_feature (35)..(264): NCBI GI NO: 21536819 NR Description: unknown [Arabidopsis thaliana]
  misc_feature (1)..(262): NCBI GI NO: 15234310 NR Description: expressed protein [Arabidopsis thaliana]
  misc_feature (35)..(262): NCBI GI NO: 21593708 NR Description: unknown [Arabidopsis thaliana]
  misc_feature (145)..(262): NCBI GI NO: 15238589 NR Description: hypothetical protein [Arabidopsis thaliana]
  misc_feature (32)..(262): NCBI GI NO: 15238070 NR Description: hypothetical protein [Arabidopsis thaliana]
  misc_feature (214)..(262): NCBI GI NO: 26451419 NR Description: unknown protein [Arabidopsis thaliana]
  misc_feature (200)..(262): NCBI GI NO: 15225838 NR Description: hypothetical protein [Arabidopsis thaliana]
  misc_feature (116)..(262): NCBI GI NO: 15222540 NR Description: hypothetical protein [Arabidopsis thaliana]
MYQDSGLMLRYMQNCPPDIQQFEDLFKSYKLSDEMNNTFVESSNISEYDIGEESDLFRAPDPILEEPILTVDPLSAALTMISCGEDTSQGLCELPDLGSLQSGQQLLDKAFYECEQDLMMKSAMESPFSDVLDIKNISVVTTINENQDMQKSVSSGNLSSMDWSHAQQETVMIQNFPDFDFGYGMRRAFSEGDIQKLGAGLVQSPLDRIIVSCTSEDRREKLSRYKNKKSRRNFGRKIKYACRKALADSQPRVRGRFAKTEERK

SEQ ID NO: 5182 - protein, 257 aa, Arabidopsis thaliana
  peptide (1)..(257): Ceres Seq. ID no. 13488979
  misc_feature (216)..(255): Pfam Name: Pfam Description:  CCT motif
  misc_feature (1)..(257): NCBI GI NO: 18423511 NR Description: expressed protein [Arabidopsis thaliana]
  misc_feature (1)..(257): NCBI GI NO: 8843771 NR Description: gene_id:MYN8
  misc_feature (28)..(257): NCBI GI NO: 21536819 NR Description: unknown [Arabidopsis thaliana]
  misc_feature (1)..(255): NCBI GI NO: 15234310 NR Description: expressed protein [Arabidopsis thaliana]
  misc_feature (28)..(255): NCBI GI NO: 21593708 NR Description: unknown [Arabidopsis thaliana]
  misc_feature (138)..(255): NCBI GI NO: 15238589 NR Description: hypothetical protein [Arabidopsis thaliana]
  misc_feature (25)..(255): NCBI GI NO: 15238070 NR Description: hypothetical protein [Arabidopsis thaliana]
  misc_feature (207)..(255): NCBI GI NO: 26451419 NR Description: unknown protein [Arabidopsis thaliana]
  misc_feature (193)..(255): NCBI GI NO: 15225838 NR Description: hypothetical protein [Arabidopsis thaliana]
  misc_feature (109)..(255): NCBI GI NO: 15222540 NR Description: hypothetical protein [Arabidopsis thaliana]
MLRYMQNCPPDIQQFEDLFKSYKLSDEMNNTFVESSNISEYDIGEESDLFRAPDPILEEPILTVDPLSAALTMISCGEDTSQGLCELPDLGSLQSGQQLLDKAFYECEQDLMMKSAMESPFSDVLDIKNISVVTTINENQDMQKSVSSGNLSSMDWSHAQQETVMIQNFPDFDFGYGMRRAFSEGDIQKLGAGLVQSPLDRIIVSCTSEDRREKLSRYKNKKSRRNFGRKIKYACRKALADSQPRVRGRFAKTEERK

SEQ ID NO: 5183 - protein, 253 aa, Arabidopsis thaliana
  peptide (1)..(253): Ceres Seq. ID no. 13488980
  misc_feature (212)..(251): Pfam Name: Pfam Description:  CCT motif
  misc_feature (1)..(253): NCBI GI NO: 18423511 NR Description: expressed protein [Arabidopsis thaliana]
  misc_feature (1)..(253): NCBI GI NO: 8843771 NR Description: gene_id:MYN8
  misc_feature (24)..(253): NCBI GI NO: 21536819 NR Description: unknown [Arabidopsis thaliana]
  misc_feature (1)..(251): NCBI GI NO: 15234310 NR Description: expressed protein [Arabidopsis thaliana]
  misc_feature (24)..(251): NCBI GI NO: 21593708 NR Description: unknown [Arabidopsis thaliana]
  misc_feature (134)..(251): NCBI GI NO: 15238589 NR Description: hypothetical protein [Arabidopsis thaliana]
  misc_feature (21)..(251): NCBI GI NO: 15238070 NR Description: hypothetical protein [Arabidopsis thaliana]
  misc_feature (203)..(251): NCBI GI NO: 26451419 NR Description: unknown protein [Arabidopsis thaliana]
  misc_feature (189)..(251): NCBI GI NO: 15225838 NR Description: hypothetical protein [Arabidopsis thaliana]
  misc_feature (105)..(251): NCBI GI NO: 15222540 NR Description: hypothetical protein [Arabidopsis thaliana]
MQNCPPDIQQFEDLFKSYKLSDEMNNTFVESSNISEYDIGEESDLFRAPDPILEEPILTVDPLSAALTMISCGEDTSQGLCELPDLGSLQSGQQLLDKAFYECEQDLMMKSAMESPFSDVLDIKNISVVTTINENQDMQKSVSSGNLSSMDWSHAQQETVMIQNFPDFDFGYGMRRAFSEGDIQKLGAGLVQSPLDRIIVSCTSEDRREKLSRYKNKKSRRNFGRKIKYACRKALADSQPRVRGRFAKTEERK

SEQ ID NO: 5184 - DNA, 1248 bp, Arabidopsis thaliana
  misc_feature (1)..(1248): Ceres Seq. ID no. 13575740
accatccatccaacttgtaactctctttctctatttcttctccattctgtttgctctgcaacatcttttagggtttattattgttggtttcttcattttctttctctaaaatatttgcagaggaagagagagagagagagagagatcatgggaatatatggagtgatgacagggaaaaaaggaaagagtgggtttggatctgcttctactgctgaagatgttactcaagccattgatgccagtcatctcactgccatcatcacaggtggaacaagtgggattggattggaggcagctagagtgttagcaatgagaggagctcatgtcatcattgccgcaagaaacccaaaagctgctaatgagtctaaagagatgattcttcagatgaaccctaatgctcgcgtcgactatctccagatcgatgtctcttccatcaaatcagtcagatccttcgttgatcagtttcttgcccttaatgttcctctcaacattctcataaacaatgcaggtgttatgttttgtcctttcaagctcaccgaagatgggattgaatcacaattcgcaacaaaccacattggtcattttctgttgacgaatctgcttctggacaaaatgaaaagtaccgcaaggagaaagtggagtccaaggaaggattgtgaatctgtcatctattgctcatacttatacttactctgaaggtatcaagttccaaggcatcaatgaccctgctggatattcggagagaagggcttatggacagtccaaactctcaaacttggttgcactccaatgcactctctcgtagactacaggaagaaggtgtgaacatcactataaattcggtgcaccctggtcttgtcaccactaatctctttcgctactccggttttagcatgaaggtcttcagggctatgactttcctcttttggaaaaatatacctcagggagcagcaacaacatgctacgttgcacttcatccagatctcgaaggcgtcaccggaaagtatttcggcgactgtaacatcgttgctccgagcaaatttgctaccaacaattctctcgccgataaactttgggatttcagtgtctttctcatcgattctatctctaaataatctatcatcatcaagacaaattcttagacattcaaaatttatttatccttcttgatattgttacattaatgccatatctttttcaccaccacatatttctttatggaataccataatttagaaatcattattc

SEQ ID NO: 5185 - protein, 231 aa, Arabidopsis thaliana
  peptide (1)..(231): Ceres Seq. ID no. 13575741
  misc_feature (50)..(210): NCBI GI NO: 15224306 NR Description: short-chain dehydrogenase/reductase family protein
  misc_feature (50)..(210): NCBI GI NO: 629592 NR Description: hypothetical protein - rape
  misc_feature (50)..(210): NCBI GI NO: 18413950 NR Description: short-chain dehydrogenase/reductase family protein
  misc_feature (50)..(210): NCBI GI NO: 21554820 NR Description: putativepod-specific dehydrogenase SAC25
  misc_feature (50)..(210): NCBI GI NO: 20260302 NR Description: putative protein [Arabidopsis thaliana]
  misc_feature (50)..(210): NCBI GI NO: 34895876 NR Description: P0009G03.18
  misc_feature (50)..(177): NCBI GI NO: 11250521 NR Description: hypothetical protein T22P11
  misc_feature (58)..(210): NCBI GI NO: 23297050 NR Description: unknown protein [Arabidopsis thaliana]
  misc_feature (58)..(210): NCBI GI NO: 30686197 NR Description: short-chain dehydrogenase/reductase family protein
  misc_feature (58)..(210): NCBI GI NO: 18416145 NR Description: short-chain dehydrogenase/reductase family protein
TIHPTCNSLSLFLLHSVCSATSFRVYYCWFLHFLSLKYLQRKREREREIMGIYGVMTGKKGKSGFGSASTAEDVTQAIDASHLTAIITGGTSGIGLEAARVLAMRGAHVIIAARNPKAANESKEMILQMNPNARVDYLQIDVSSIKSVRSFVDQFLALNVPLNILINNAGVMFCPFKLTEDGIESQFATNHIGHFLLTNLLLDKMKSTARRKWSPRKDCESVIYCSYLYLL

SEQ ID NO: 5186 - protein, 182 aa, Arabidopsis thaliana
  peptide (1)..(182): Ceres Seq. ID no. 13575742
  misc_feature (1)..(161): NCBI GI NO: 15224306 NR Description: short-chain dehydrogenase/reductase family protein
  misc_feature (1)..(161): NCBI GI NO: 629592 NR Description: hypothetical protein - rape
  misc_feature (1)..(161): NCBI GI NO: 18413950 NR Description: short-chain dehydrogenase/reductase family protein
  misc_feature (1)..(161): NCBI GI NO: 21554820 NR Description: putativepod-specific dehydrogenase SAC25
  misc_feature (1)..(161): NCBI GI NO: 20260302 NR Description: putative protein [Arabidopsis thaliana]
  misc_feature (1)..(161): NCBI GI NO: 34895876 NR Description: P0009G03.18
  misc_feature (1)..(128): NCBI GI NO: 11250521 NR Description: hypothetical protein T22P11
  misc_feature (9)..(161): NCBI GI NO: 23297050 NR Description: unknown protein [Arabidopsis thaliana]
  misc_feature (9)..(161): NCBI GI NO: 30686197 NR Description: short-chain dehydrogenase/reductase family protein
  misc_feature (9)..(161): NCBI GI NO: 18416145 NR Description: short-chain dehydrogenase/reductase family protein
MGIYGVMTGKKGKSGFGSASTAEDVTQAIDASHLTAIITGGTSGIGLEAARVLAMRGAHVIIAARNPKAANESKEMILQMNPNARVDYLQIDVSSIKSVRSFVDQFLALNVPLNILINNAGVMFCPFKLTEDGIESQFATNHIGHFLLTNLLLDKMKSTARRKWSPRKDCESVIYCSYLYLL

SEQ ID NO: 5187 - protein, 176 aa, Arabidopsis thaliana
  peptide (1)..(176): Ceres Seq. ID no. 13575743
  misc_feature (1)..(155): NCBI GI NO: 15224306 NR Description: short-chain dehydrogenase/reductase family protein
  misc_feature (1)..(155): NCBI GI NO: 629592 NR Description: hypothetical protein - rape
  misc_feature (1)..(155): NCBI GI NO: 18413950 NR Description: short-chain dehydrogenase/reductase family protein
  misc_feature (1)..(155): NCBI GI NO: 21554820 NR Description: putativepod-specific dehydrogenase SAC25
  misc_feature (1)..(155): NCBI GI NO: 20260302 NR Description: putative protein [Arabidopsis thaliana]
  misc_feature (1)..(155): NCBI GI NO: 34895876 NR Description: P0009G03.18
  misc_feature (1)..(122): NCBI GI NO: 11250521 NR Description: hypothetical protein T22P11
  misc_feature (3)..(155): NCBI GI NO: 23297050 NR Description: unknown protein [Arabidopsis thaliana]
  misc_feature (3)..(155): NCBI GI NO: 30686197 NR Description: short-chain dehydrogenase/reductase family protein
  misc_feature (3)..(155): NCBI GI NO: 18416145 NR Description: short-chain dehydrogenase/reductase family protein
MTGKKGKSGFGSASTAEDVTQAIDASHLTAIITGGTSGIGLEAARVLAMRGAHVIIAARNPKAANESKEMILQMNPNARVDYLQIDVSSIKSVRSFVDQFLALNVPLNILINNAGVMFCPFKLTEDGIESQFATNHIGHFLLTNLLLDKMKSTARRKWSPRKDCESVIYCSYLYLL

SEQ ID NO: 5188 - DNA, 1361 bp, Arabidopsis thaliana
  misc_feature (1)..(1361): Ceres Seq. ID no. 13490993
tttcatcatcatctcagtctctctcgaagtttcaagttcgcgactatggcagcagcgatgtcttcttcttgttgcgcttcctcgcttcgtttaatcccattcaaacggaccttgttttcttcaatccattatccggccaaaacccttcttctacgaccactaaaaccgtcggaagttccttcctttcgccggacgatcatcactttccagaaaatttcaaccgggattgttcctccaccatcggcttcatcatctccgtcgagctatggagaccttcaaccaatcgaagagcttccaccgaagctacaagagatcgtcaagcttttccaatcggtacaagagccaaaggctaaatacgagcagcttatgttctacgggaagaatctgacacctctcgattctcaattcaagacgagggagaataaagtagaaggatgtgtttctcaggtttgggttagggctttctttgatgaggaacgtaatgttgtgtatgaagctgattctgattcggttctcactaaagggttagctgctctattagtcaagggtttatctggaagacctgtccctgagattttgaggataacacctgatttcgctgttcttctcgggttgcagcagagtctgtctccttctagaaacaatggattacttaatatgcttaagctgatgcagaaaaaggctcttcatttggaagtcaaaggtgaggaagattcaagttctggagagagttcagaatccagctttgtgtctattcctgagactaaggacgaagctaatgttccggaggtggatttggagtctaaacctgatctagttgaggatttgggaacagaaaagattgatgattctgagagtgggtcaaatgttgttgctttagggagtagagggatgaggataagagagaaattggagaaggagctagatcctgttgagttagaagttgaagatgtttcttaccagcacgcaggacatgccgctgttagaggtagtgctggtgatgatggggaaacacatttcaacttgcgaatcgtttcggatgctttccaaggtaaaagcttggtcaagagacataggctgatatatgacttgttgcaagatgagttgaagagcgggttacatgctctctctattgtggcaaagactcctgctgaggtttgagggtgtaacattggaagaagtcaggtcctgattcttttacttcttttggtccatttgctttggatattgttctctggaccttctaataatgttaagagctcgatcaggattgtgttaaatgagagatagatattgaaggatataaataatgttttcgccaatcgccacatgattcaccattttcaaactgatttcccttt

SEQ ID NO: 5189 - protein, 386 aa, Arabidopsis thaliana
  peptide (1)..(386): Ceres Seq. ID no. 13490994
  misc_feature (105)..(229): Pfam Name: Pfam Description:  Fe-S metabolism associated domain
  misc_feature (16)..(386): NCBI GI NO: 15236742 NR Description: expressed protein [Arabidopsis thaliana]
  misc_feature (16)..(386): NCBI GI NO: 28393578 NR Description: unknown protein [Arabidopsis thaliana]
  misc_feature (98)..(233): NCBI GI NO: 16332088 NR Description: hypothetical protein [Synechocystis sp. PCC 6803]
  misc_feature (95)..(234): NCBI GI NO: 17231005 NR Description: hypothetical protein [Nostoc sp. PCC 7120]
  misc_feature (95)..(233): NCBI GI NO: 23124053 NR Description: hypothetical protein [Nostoc punctiforme]
  misc_feature (285)..(385): NCBI GI NO: 18405543 NR Description: expressed protein [Arabidopsis thaliana]
  misc_feature (286)..(385): NCBI GI NO: 27764549 NR Description: unknown [Glycine max]
  misc_feature (96)..(260): NCBI GI NO: 22298633 NR Description: ORF_ID:tll1089~hypothetical protein
  misc_feature (98)..(228): NCBI GI NO: 23040025 NR Description: hypothetical protein
  misc_feature (96)..(228): NCBI GI NO: 33861608 NR Description: conserved hypothetical protein
FHHHLSLSRSFKFATMAAAMSSSCCASSLRLIPFKRTLFSSIHYPAKTLLLRPLKPSEVPSFRRTIITFQKISTGIVPPPSASSSPSSYGDLQPIEELPPKLQEIVKLFQSVQEPKAKYEQLMFYGKNLTPLDSQFKTRENKVEGCVSQVWVRAFFDEERNVVYEADSDSVLTKGLAALLVKGLSGRPVPEILRITPDFAVLLGLQQSLSPSRNNGLLNMLKLMQKKALHLEVKGEEDSSSGESSESSFVSIPETKDEANVPEVDLESKPDLVEDLGTEKIDDSESGSNVVALGSRGMRIREKLEKELDPVELEVEDVSYQHAGHAAVRGSAGDDGETHFNLRIVSDAFQGKSLVKRHRLIYDLLQDELKSGLHALSIVAKTPAEV

SEQ ID NO: 5190 - protein, 371 aa, Arabidopsis thaliana
  peptide (1)..(371): Ceres Seq. ID no. 13490995
  misc_feature (90)..(214): Pfam Name: Pfam Description:  Fe-S metabolism associated domain
  misc_feature (1)..(371): NCBI GI NO: 15236742 NR Description: expressed protein [Arabidopsis thaliana]
  misc_feature (1)..(371): NCBI GI NO: 28393578 NR Description: unknown protein [Arabidopsis thaliana]
  misc_feature (83)..(218): NCBI GI NO: 16332088 NR Description: hypothetical protein [Synechocystis sp. PCC 6803]
  misc_feature (80)..(219): NCBI GI NO: 17231005 NR Description: hypothetical protein [Nostoc sp. PCC 7120]
  misc_feature (80)..(218): NCBI GI NO: 23124053 NR Description: hypothetical protein [Nostoc punctiforme]
  misc_feature (270)..(370): NCBI GI NO: 18405543 NR Description: expressed protein [Arabidopsis thaliana]
  misc_feature (271)..(370): NCBI GI NO: 27764549 NR Description: unknown [Glycine max]
  misc_feature (81)..(245): NCBI GI NO: 22298633 NR Description: ORF_ID:tll1089~hypothetical protein
  misc_feature (83)..(213): NCBI GI NO: 23040025 NR Description: hypothetical protein
  misc_feature (81)..(213): NCBI GI NO: 33861608 NR Description: conserved hypothetical protein
MAAAMSSSCCASSLRLIPFKRTLFSSIHYPAKTLLLRPLKPSEVPSFRRTIITFQKISTGIVPPPSASSSPSSYGDLQPIEELPPKLQEIVKLFQSVQEPKAKYEQLMFYGKNLTPLDSQFKTRENKVEGCVSQVWVRAFFDEERNVVYEADSDSVLTKGLAALLVKGLSGRPVPEILRITPDFAVLLGLQQSLSPSRNNGLLNMLKLMQKKALHLEVKGEEDSSSGESSESSFVSIPETKDEANVPEVDLESKPDLVEDLGTEKIDDSESGSNVVALGSRGMRIREKLEKELDPVELEVEDVSYQHAGHAAVRGSAGDDGETHFNLRIVSDAFQGKSLVKRHRLIYDLLQDELKSGLHALSIVAKTPAEV

SEQ ID NO: 5191 - protein, 367 aa, Arabidopsis thaliana
  peptide (1)..(367): Ceres Seq. ID no. 13490996
  misc_feature (86)..(210): Pfam Name: Pfam Description:  Fe-S metabolism associated domain
  misc_feature (1)..(367): NCBI GI NO: 15236742 NR Description: expressed protein [Arabidopsis thaliana]
  misc_feature (1)..(367): NCBI GI NO: 28393578 NR Description: unknown protein [Arabidopsis thaliana]
  misc_feature (79)..(214): NCBI GI NO: 16332088 NR Description: hypothetical protein [Synechocystis sp. PCC 6803]
  misc_feature (76)..(215): NCBI GI NO: 17231005 NR Description: hypothetical protein [Nostoc sp. PCC 7120]
  misc_feature (76)..(214): NCBI GI NO: 23124053 NR Description: hypothetical protein [Nostoc punctiforme]
  misc_feature (266)..(366): NCBI GI NO: 18405543 NR Description: expressed protein [Arabidopsis thaliana]
  misc_feature (267)..(366): NCBI GI NO: 27764549 NR Description: unknown [Glycine max]
  misc_feature (77)..(241): NCBI GI NO: 22298633 NR Description: ORF_ID:tll1089~hypothetical protein
  misc_feature (79)..(209): NCBI GI NO: 23040025 NR Description: hypothetical protein
  misc_feature (77)..(209): NCBI GI NO: 33861608 NR Description: conserved hypothetical protein
MSSSCCASSLRLIPFKRTLFSSIHYPAKTLLLRPLKPSEVPSFRRTIITFQKISTGIVPPPSASSSPSSYGDLQPIEELPPKLQEIVKLFQSVQEPKAKYEQLMFYGKNLTPLDSQFKTRENKVEGCVSQVWVRAFFDEERNVVYEADSDSVLTKGLAALLVKGLSGRPVPEILRITPDFAVLLGLQQSLSPSRNNGLLNMLKLMQKKALHLEVKGEEDSSSGESSESSFVSIPETKDEANVPEVDLESKPDLVEDLGTEKIDDSESGSNVVALGSRGMRIREKLEKELDPVELEVEDVSYQHAGHAAVRGSAGDDGETHFNLRIVSDAFQGKSLVKRHRLIYDLLQDELKSGLHALSIVAKTPAEV

SEQ ID NO: 5192 - DNA, 870 bp, Arabidopsis thaliana
  misc_feature (1)..(870): Ceres Seq. ID no. 12323255
attatttcgtcagaacaacattgaaaagttaccgttaaacactctaagcgctcttcttcatcttcttatacacttctcttccaacaagaatctcaccaagaaacttcttcacttttacaaagttaaaaccatatggcgaacatgaacgctcttcaacaaatgatcttcccagacgagaacgctccaattcatcgcaaaaagtctgtcactgctgcttctgtgaaatccaaagggactgtacttggtcagaagaaacctgtaggagctcgtaaggctctgaatgatattacaaacaagtctgggattcatgcgaaagctgctgcttcttcaaagaacaagcaaattgcttctgctgctgtgaaagatgagattgatatagctggggaaaggtttttacatgatcacagcaaatgcatcaaagaacagcaaaatctttgggatgatcactactctgctgatctcatgctacttcatcatggttccagcatcaaggagaagcatctcaattgggacattgaaaagatggatgctaaggacgatctgacttacgaagaaccagaagagatggcatcgcccaagttttctgattggctgaagaactcgactccatggcgctctccaatccgtcatggctctatgatgccttccactcctctggcttggcggttcgattcatgcgaattcacacttaaagaagactctgacgacctcttctgagtttctgtttcttaatgtcttcaaaattcatccttcagatgaagtagtaatagtagtagtggcgtttatcttttgttcagctcttcatgaatcactctgtgtctatcactttgtaactggtttcaggaaataaagttggtatcttttcaagtg

SEQ ID NO: 5193 - protein, 194 aa, Arabidopsis thaliana
  peptide (1)..(194): Ceres Seq. ID no. 12323256
  misc_feature (1)..(194): NCBI GI NO: 21536825 NR Description: unknown [Arabidopsis thaliana]
  misc_feature (1)..(194): NCBI GI NO: 18400304 NR Description: expressed protein; protein id: At3g14190
  misc_feature (1)..(194): NCBI GI NO: 27808526 NR Description: At3g14190 [Arabidopsis thaliana]
  misc_feature (1)..(191): NCBI GI NO: 18416846 NR Description: putative protein; protein id: At5g12360.1
MANMNALQQMIFPDENAPIHRKKSVTAASVKSKGTVLGQKKPVGARKALNDITNKSGIHAKAAASSKNKQIASAAVKDEIDIAGERFLHDHSKCIKEQQNLWDDHYSADLMLLHHGSSIKEKHLNWDIEKMDAKDDLTYEEPEEMASPKFSDWLKNSTPWRSPIRHGSMMPSTPLAWRFDSCEFTLKEDSDDLF

SEQ ID NO: 5194 - protein, 191 aa, Arabidopsis thaliana
  peptide (1)..(191): Ceres Seq. ID no. 12323257
  misc_feature (1)..(191): NCBI GI NO: 21536825 NR Description: unknown [Arabidopsis thaliana]
  misc_feature (1)..(191): NCBI GI NO: 18400304 NR Description: expressed protein; protein id: At3g14190
  misc_feature (1)..(191): NCBI GI NO: 27808526 NR Description: At3g14190 [Arabidopsis thaliana]
  misc_feature (1)..(188): NCBI GI NO: 18416846 NR Description: putative protein; protein id: At5g12360.1
MNALQQMIFPDENAPIHRKKSVTAASVKSKGTVLGQKKPVGARKALNDITNKSGIHAKAAASSKNKQIASAAVKDEIDIAGERFLHDHSKCIKEQQNLWDDHYSADLMLLHHGSSIKEKHLNWDIEKMDAKDDLTYEEPEEMASPKFSDWLKNSTPWRSPIRHGSMMPSTPLAWRFDSCEFTLKEDSDDLF

SEQ ID NO: 5195 - protein, 185 aa, Arabidopsis thaliana
  peptide (1)..(185): Ceres Seq. ID no. 12323258
  misc_feature (1)..(185): NCBI GI NO: 21536825 NR Description: unknown [Arabidopsis thaliana]
  misc_feature (1)..(185): NCBI GI NO: 18400304 NR Description: expressed protein; protein id: At3g14190
  misc_feature (1)..(185): NCBI GI NO: 27808526 NR Description: At3g14190 [Arabidopsis thaliana]
  misc_feature (1)..(182): NCBI GI NO: 18416846 NR Description: putative protein; protein id: At5g12360.1
MIFPDENAPIHRKKSVTAASVKSKGTVLGQKKPVGARKALNDITNKSGIHAKAAASSKNKQIASAAVKDEIDIAGERFLHDHSKCIKEQQNLWDDHYSADLMLLHHGSSIKEKHLNWDIEKMDAKDDLTYEEPEEMASPKFSDWLKNSTPWRSPIRHGSMMPSTPLAWRFDSCEFTLKEDSDDLF

SEQ ID NO: 5196 - DNA, 1213 bp, Arabidopsis thaliana
  misc_feature (1)..(1213): Ceres Seq. ID no. 12481792
aaaaaatgtctgtatctgtagcagcagagcatgattacataggtttgtcagagtttccaaccatggaagcaacaacaatgtctgacaaaaccaaaaccagagacaataacaacggtctcaatttcaaggctaccgagttaagactcggtttacccggttctgagtcgccggagcgagtcgactcaagattcttggctctcaacaagagtagctgtcccgtgtcaggtgccaaaagggtgttctccgacgctattaacgactctaacaaatgggtcttctctcctggatccactactgctactggtgatgtcggctcgggttctggtccccgtacctccgtcgttaaagatggaaagtcgacaactttcactaaaccggctgttccggttaaggagaagaagagctctgctacagctccagcttcaaaagcacaagtggtgggatggccaccaataagatcattcaggaagaactcaatggcttcttctcaatctcagaaacctggtaataactcagagactgaagaagcagaagctaagtctggaccagaacaaccttgcttgtatgtcaaagtgagtatggaaggtgctccttacttgaggaaaatcgatctcaagacttacaaaagctaccttgagctctcttctgctcttgagaagatgttcagttgcttcaccattggtcagtttggttctcatggagggtgtggcagagatgggttaaacgagagtcgcttgactgatctcttgcgtggttctgagtatgttgtaacctatgaagataaagacagtgactggatgctggtcggagatgtcccttgggaaatgtttatatgctcctgcaagaagctgagaatcatgaagagctctgaggctatcggcttagctccaagggtgatggagaagtgcagaagcaggaactaggaaaagcccttttatgtgataatatatgatttgaaaaaatatgtttttaagaaattgaatagccattttgttttgaagtattcttgtgtgtttgtgtgctaggagtgatgtttgatctttcttaaaccagcctctactaagctctaataaggcctcttcctcttacttctttctctaatcaatctaatgaaacatatgggtttgtgtatgtgtgtttgccaaggaagacttcataattcatatgtataaaagttttggtagtgtgtaaaccggatgtggttttcattgtt

SEQ ID NO: 5197 - protein, 306 aa, Arabidopsis thaliana
  peptide (1)..(306): Ceres Seq. ID no. 12481793
  misc_feature (39)..(298): Pfam Name: Pfam Description:  AUX/IAA family
  misc_feature (2)..(306): NCBI GI NO: 15235556 NR Description: phytochrome-associated protein PAP2
  misc_feature (5)..(306): NCBI GI NO: 25989504 NR Description: Aux/IAA protein [Solanum tuberosum]
  misc_feature (9)..(306): NCBI GI NO: 16610193 NR Description: IAA9 protein [Nicotiana tabacum]
  misc_feature (73)..(306): NCBI GI NO: 6136832 NR Description: CS-IAA2 [Cucumis sativus]
  misc_feature (9)..(102): NCBI GI NO: 6136832 NR Description: CS-IAA2 [Cucumis sativus]
  misc_feature (73)..(306): NCBI GI NO: 20269051 NR Description: aux/IAA protein
  misc_feature (9)..(58): NCBI GI NO: 20269051 NR Description: aux/IAA protein
  misc_feature (64)..(306): NCBI GI NO: 7442237 NR Description: GH1 protein - soybean (fragment)
  misc_feature (9)..(63): NCBI GI NO: 7442237 NR Description: GH1 protein - soybean (fragment)
  misc_feature (67)..(306): NCBI GI NO: 20257219 NR Description: auxin-regulated protein [Zinnia elegans]
KMSVSVAAEHDYIGLSEFPTMEATTMSDKTKTRDNNNGLNFKATELRLGLPGSESPERVDSRFLALNKSSCPVSGAKRVFSDAINDSNKWVFSPGSTTATGDVGSGSGPRTSVVKDGKSTTFTKPAVPVKEKKSSATAPASKAQVVGWPPIRSFRKNSMASSQSQKPGNNSETEEAEAKSGPEQPCLYVKVSMEGAPYLRKIDLKTYKSYLELSSALEKMFSCFTIGQFGSHGGCGRDGLNESRLTDLLRGSEYVVTYEDKDSDWMLVGDVPWEMFICSCKKLRIMKSSEAIGLAPRVMEKCRSRN

SEQ ID NO: 5198 - protein, 305 aa, Arabidopsis thaliana
  peptide (1)..(305): Ceres Seq. ID no. 12481794
  misc_feature (38)..(297): Pfam Name: Pfam Description:  AUX/IAA family
  misc_feature (1)..(305): NCBI GI NO: 15235556 NR Description: phytochrome-associated protein PAP2
  misc_feature (4)..(305): NCBI GI NO: 25989504 NR Description: Aux/IAA protein [Solanum tuberosum]
  misc_feature (8)..(305): NCBI GI NO: 16610193 NR Description: IAA9 protein [Nicotiana tabacum]
  misc_feature (72)..(305): NCBI GI NO: 6136832 NR Description: CS-IAA2 [Cucumis sativus]
  misc_feature (8)..(101): NCBI GI NO: 6136832 NR Description: CS-IAA2 [Cucumis sativus]
  misc_feature (72)..(305): NCBI GI NO: 20269051 NR Description: aux/IAA protein
  misc_feature (8)..(57): NCBI GI NO: 20269051 NR Description: aux/IAA protein
  misc_feature (63)..(305): NCBI GI NO: 7442237 NR Description: GH1 protein - soybean (fragment)
  misc_feature (8)..(62): NCBI GI NO: 7442237 NR Description: GH1 protein - soybean (fragment)
  misc_feature (66)..(305): NCBI GI NO: 20257219 NR Description: auxin-regulated protein [Zinnia elegans]
MSVSVAAEHDYIGLSEFPTMEATTMSDKTKTRDNNNGLNFKATELRLGLPGSESPERVDSRFLALNKSSCPVSGAKRVFSDAINDSNKWVFSPGSTTATGDVGSGSGPRTSVVKDGKSTTFTKPAVPVKEKKSSATAPASKAQVVGWPPIRSFRKNSMASSQSQKPGNNSETEEAEAKSGPEQPCLYVKVSMEGAPYLRKIDLKTYKSYLELSSALEKMFSCFTIGQFGSHGGCGRDGLNESRLTDLLRGSEYVVTYEDKDSDWMLVGDVPWEMFICSCKKLRIMKSSEAIGLAPRVMEKCRSRN

SEQ ID NO: 5199 - protein, 286 aa, Arabidopsis thaliana
  peptide (1)..(286): Ceres Seq. ID no. 12481795
  misc_feature (19)..(278): Pfam Name: Pfam Description:  AUX/IAA family
  misc_feature (1)..(286): NCBI GI NO: 15235556 NR Description: phytochrome-associated protein PAP2
  misc_feature (1)..(286): NCBI GI NO: 25989504 NR Description: Aux/IAA protein [Solanum tuberosum]
  misc_feature (1)..(286): NCBI GI NO: 16610193 NR Description: IAA9 protein [Nicotiana tabacum]
  misc_feature (53)..(286): NCBI GI NO: 6136832 NR Description: CS-IAA2 [Cucumis sativus]
  misc_feature (1)..(82): NCBI GI NO: 6136832 NR Description: CS-IAA2 [Cucumis sativus]
  misc_feature (53)..(286): NCBI GI NO: 20269051 NR Description: aux/IAA protein
  misc_feature (1)..(38): NCBI GI NO: 20269051 NR Description: aux/IAA protein
  misc_feature (44)..(286): NCBI GI NO: 7442237 NR Description: GH1 protein - soybean (fragment)
  misc_feature (1)..(43): NCBI GI NO: 7442237 NR Description: GH1 protein - soybean (fragment)
  misc_feature (47)..(286): NCBI GI NO: 20257219 NR Description: auxin-regulated protein [Zinnia elegans]
MEATTMSDKTKTRDNNNGLNFKATELRLGLPGSESPERVDSRFLALNKSSCPVSGAKRVFSDAINDSNKWVFSPGSTTATGDVGSGSGPRTSVVKDGKSTTFTKPAVPVKEKKSSATAPASKAQVVGWPPIRSFRKNSMASSQSQKPGNNSETEEAEAKSGPEQPCLYVKVSMEGAPYLRKIDLKTYKSYLELSSALEKMFSCFTIGQFGSHGGCGRDGLNESRLTDLLRGSEYVVTYEDKDSDWMLVGDVPWEMFICSCKKLRIMKSSEAIGLAPRVMEKCRSRN

SEQ ID NO: 5200 - DNA, 854 bp, Arabidopsis thaliana
  misc_feature (1)..(854): Ceres Seq. ID no. 13497569
  misc_feature (825)..(825): n is a, c, t, g, unknown, or other
  misc_feature (790)..(790): n is a, c, t, g, unknown, or other
tcgattggccaaatcggccctcgagttaattaaattaatccccccccccccccgatcttcttgtctctctctcatttcttgttattatccacgaacgaagaaaaacctagaaaacagttgaagaaagaaaatcacaagagaagccatggccggaattggaccgattactcaggattgggaaccagttgtgatccgcaagagagctcctaacgctgcagctaagcgcgacgagaagactgtcaacgccgctcgtcgaagcggcgccgatattgagaccgttcgaaaattcaatgctggatcgaacaaggctgcatcaagcggcacctccttgaacacaaagaagctagatgatgatactgagaacttatctcatgatcgtgtgcccactgaattgaagaaagccatcatgcaagctagaggggagaagaagctgactcagtcccaacttgcccatctgatcaatgagaagccacaagtgatccaagaatacgagtctgggaaagcaattccgaatcaacagatcctttcaaagctggagagggcacttggtgctaaactccgtggaaagaagtagaagtgtagaacaaagctcttaaaggtaacaacaaaagctgatcgcagtttctctccagtccacatgctttaccatatcctaaaaactatatctatgtatggtttggtttaatggcgtagtagtttgttgcgaggaatctttcatgatgtaagaaaaacaaagctgtttggaaccttttgtcattataaataatctcttctctttctttttcgtcangtctcgtaaactttatctgccacggatgtatgttnttaaagaaattgaagattgaaattggtcc

SEQ ID NO: 5201 - protein, 142 aa, Arabidopsis thaliana
  peptide (1)..(142): Ceres Seq. ID no. 13497570
  misc_feature (87)..(141): Pfam Name: Pfam Description:  Helix-turn-helix
  misc_feature (1)..(142): NCBI GI NO: 15231105 NR Description: transcriptional coactivator - like protein
  misc_feature (1)..(142): NCBI GI NO: 18406032 NR Description: expressed protein [Arabidopsis thaliana]
  misc_feature (1)..(142): NCBI GI NO: 7488897 NR Description: hypothetical protein - castor bean
  misc_feature (1)..(142): NCBI GI NO: 38637102 NR Description: putative ethylene-responsive transcriptional coactivator
  misc_feature (7)..(142): NCBI GI NO: 8895787 NR Description: multiprotein bridging factor 1 [Solanum tuberosum]
  misc_feature (5)..(142): NCBI GI NO: 20086364 NR Description: putative multiprotein bridging factor 1
  misc_feature (5)..(141): NCBI GI NO: 15230125 NR Description: ethylene-responsive transcriptional coactivator -related
  misc_feature (7)..(141): NCBI GI NO: 21553721 NR Description: ethylene-responsive transcriptional coactivator
  misc_feature (5)..(141): NCBI GI NO: 19225065 NR Description: ethylene-responsive transciptional coactivator-like
  misc_feature (10)..(141): NCBI GI NO: 4503453 NR Description: endothelial differentiation-related factor 1 isoform alpha
MAGIGPITQDWEPVVIRKRAPNAAAKRDEKTVNAARRSGADIETVRKFNAGSNKAASSGTSLNTKKLDDDTENLSHDRVPTELKKAIMQARGEKKLTQSQLAHLINEKPQVIQEYESGKAIPNQQILSKLERALGAKLRGKK

SEQ ID NO: 5202 - DNA, 1612 bp, Arabidopsis thaliana; identical to SEQ ID NO: 3041
  misc_feature (1)..(1612): Ceres Seq. ID no. 12329884

SEQ ID NO: 5203 - protein, 498 aa, Arabidopsis thaliana; identical to SEQ ID NO: 3042
  peptide (1)..(498): Ceres Seq. ID no. 12329885
  misc_feature (27)..(390): Pfam Name: Pfam Description:  3-beta hydroxysteroid dehydrogenase/ isomerase family
  misc_feature (19)..(498): NCBI GI NO: 15226138 NR Description: putative steroid dehydrogenase
  misc_feature (33)..(402): NCBI GI NO: 21553311 NR Description: NAD(P) dependent steroid dehydrogenase-like
  misc_feature (31)..(418): NCBI GI NO: 21311981 NR Description: RIKEN cDNA 4632417N05 [Mus musculus]
  misc_feature (31)..(288): NCBI GI NO: 34851797 NR Description: similar to RIKEN cDNA 4632417N05
  misc_feature (33)..(393): NCBI GI NO: 18401656 NR Description: 3-beta-hydroxysteroid dehydrogenase, putative
  misc_feature (33)..(393): NCBI GI NO: 30694041 NR Description: 3-beta hydroxysteroid dehydrogenase/ isomerase family
  misc_feature (33)..(393): NCBI GI NO: 21553411 NR Description: 3-beta-hydroxysteroid dehydrogenase, putative
  misc_feature (33)..(386): NCBI GI NO: 15608246 NR Description: hypothetical protein Rv1106c
  misc_feature (33)..(398): NCBI GI NO: 15225272 NR Description: 3-beta-hydroxysteroid dehydrogenase
  misc_feature (33)..(312): NCBI GI NO: 477637 NR Description: cholesterol dehydrogenase (EC 1

SEQ ID NO: 5204 - protein, 480 aa, Arabidopsis thaliana; identical to SEQ ID NO: 3043
  peptide (1)..(480): Ceres Seq. ID no. 12329886
  misc_feature (9)..(372): Pfam Name: Pfam Description:  3-beta hydroxysteroid dehydrogenase/ isomerase family
  misc_feature (1)..(480): NCBI GI NO: 15226138 NR Description: putative steroid dehydrogenase
  misc_feature (15)..(384): NCBI GI NO: 21553311 NR Description: NAD(P) dependent steroid dehydrogenase-like
  misc_feature (13)..(400): NCBI GI NO: 21311981 NR Description: RIKEN cDNA 4632417N05 [Mus musculus]
  misc_feature (13)..(270): NCBI GI NO: 34851797 NR Description: similar to RIKEN cDNA 4632417N05
  misc_feature (15)..(375): NCBI GI NO: 18401656 NR Description: 3-beta-hydroxysteroid dehydrogenase, putative
  misc_feature (15)..(375): NCBI GI NO: 30694041 NR Description: 3-beta hydroxysteroid dehydrogenase/ isomerase family
  misc_feature (15)..(375): NCBI GI NO: 21553411 NR Description: 3-beta-hydroxysteroid dehydrogenase, putative
  misc_feature (15)..(368): NCBI GI NO: 15608246 NR Description: hypothetical protein Rv1106c
  misc_feature (15)..(380): NCBI GI NO: 15225272 NR Description: 3-beta-hydroxysteroid dehydrogenase
  misc_feature (15)..(294): NCBI GI NO: 477637 NR Description: cholesterol dehydrogenase (EC 1

SEQ ID NO: 5205 - protein, 391 aa, Arabidopsis thaliana; identical to SEQ ID NO: 3044
  peptide (1)..(391): Ceres Seq. ID no. 12329887
  misc_feature (1)..(283): Pfam Name: Pfam Description:  3-beta hydroxysteroid dehydrogenase/ isomerase family
  misc_feature (1)..(391): NCBI GI NO: 15226138 NR Description: putative steroid dehydrogenase
  misc_feature (1)..(295): NCBI GI NO: 21553311 NR Description: NAD(P) dependent steroid dehydrogenase-like
  misc_feature (1)..(311): NCBI GI NO: 21311981 NR Description: RIKEN cDNA 4632417N05 [Mus musculus]
  misc_feature (1)..(181): NCBI GI NO: 34851797 NR Description: similar to RIKEN cDNA 4632417N05
  misc_feature (1)..(286): NCBI GI NO: 18401656 NR Description: 3-beta-hydroxysteroid dehydrogenase, putative
  misc_feature (1)..(286): NCBI GI NO: 30694041 NR Description: 3-beta hydroxysteroid dehydrogenase/ isomerase family
  misc_feature (1)..(286): NCBI GI NO: 21553411 NR Description: 3-beta-hydroxysteroid dehydrogenase, putative
  misc_feature (1)..(279): NCBI GI NO: 15608246 NR Description: hypothetical protein Rv1106c
  misc_feature (1)..(291): NCBI GI NO: 15225272 NR Description: 3-beta-hydroxysteroid dehydrogenase
  misc_feature (1)..(205): NCBI GI NO: 477637 NR Description: cholesterol dehydrogenase (EC 1

SEQ ID NO: 5206 - DNA, 1127 bp, Arabidopsis thaliana
  misc_feature (1)..(1127): Ceres Seq. ID no. 13499960
ggaattcggcacgaggatgaggtcgtttgtctcgttgatttctcttctccttcttctctcattttcttcatctgttctctcaaccaaaaagtcatcatttcaaaaacttccggtgccaggaaacagaacaggccctgaagctttcgcttttgattccaccggaaaaggatttctacccggagtcaccggcggtaaaatcctcaaatatcttccaaagaaaggttatgtcgactttgcccagatcacaaactcttcgaagtcttcgttgtgcgacggagcacttggaaccactaacgtcgaaaaatgtggtcgaccagccggaatagccttcaacacgaaaacaggtgatctttacgtcgcagatgctgcattgggtctccacgtcatccctcgccgtgggggtttggctaagaagatcgccgacagtgtcggcggcaagccctttttgtttcttgacgggcttgacgtagatcccaataccggcgtcgtctatttcacttccttcagctcaacatttggccctagggatgtgttgaaagcagtggcaacaaaagactcgaccggtaagttcttcaaatacgatccatcaaaaaaggtcgtgactgtattgatggacggtcttagcggctcagccggatgtgccgttagctcagatggttcattcgtgctggttggtcagttcacaaaaagtaacatcaagaggtattggatcaaaggatccaaagctggtacttctgaagacttcaccaactcggtctcgaaccctgacaacatcaagaggatcggttctactggaaacttttgggttgcttcggtcgtgaactcagccaccggaccgacaaacccttcggcggttaaagtcagttctgccggtaaagtgcttcagaccattcccctaaaagacaagtttggggatactttggttagtgaagttaacgatcaaaggacagctttatatcggagctctttttgggcctttcgccggaattccttaagctttaaagtgaacatggtattagtatgggttagaattaaagtgattgaatcgaaataaatatggttacaaagtcttgacggatcaatgtacgctcatgttgattctgttcaaataaatatgaatttttttt

SEQ ID NO: 5207 - protein, 350 aa, Arabidopsis thaliana
  peptide (1)..(350): Ceres Seq. ID no. 13499961
  misc_feature (7)..(319): Pfam Name: Pfam Description:  Strictosidine synthase
  misc_feature (6)..(350): NCBI GI NO: 1754987 NR Description: strictosidine synthase
  misc_feature (6)..(319): NCBI GI NO: 21431845 NR Description: Strictosidine synthase 3 precursor (SS-3)
  misc_feature (6)..(319): NCBI GI NO: 30698979 NR Description: strictosidine synthase family
  misc_feature (6)..(319): NCBI GI NO: 15221106 NR Description: strictosidine synthase family
  misc_feature (6)..(319): NCBI GI NO: 1754983 NR Description: strictosidine synthase
  misc_feature (6)..(319): NCBI GI NO: 15221105 NR Description: strictosidine synthase family
  misc_feature (10)..(319): NCBI GI NO: 135005 NR Description: Strictosidine synthase precursor
  misc_feature (10)..(319): NCBI GI NO: 478818 NR Description: strictosidine synthase (EC 4
  misc_feature (10)..(324): NCBI GI NO: 267045 NR Description: Strictosidine synthase precursor
  misc_feature (10)..(322): NCBI GI NO: 18222 NR Description: strictosidine synthase precursor
EFGTRMRSFVSLISLLLLLSFSSSVLSTKKSSFQKLPVPGNRTGPEAFAFDSTGKGFLPGVTGGKILKYLPKKGYVDFAQITNSSKSSLCDGALGTTNVEKCGRPAGIAFNTKTGDLYVADAALGLHVIPRRGGLAKKIADSVGGKPFLFLDGLDVDPNTGVVYFTSFSSTFGPRDVLKAVATKDSTGKFFKYDPSKKVVTVLMDGLSGSAGCAVSSDGSFVLVGQFTKSNIKRYWIKGSKAGTSEDFTNSVSNPDNIKRIGSTGNFWVASVVNSATGPTNPSAVKVSSAGKVLQTIPLKDKFGDTLVSEVNDQRTALYRSSFWAFRRNSLSFKVNMVLVWVRIKVIESK

SEQ ID NO: 5208 - protein, 345 aa, Arabidopsis thaliana
  peptide (1)..(345): Ceres Seq. ID no. 13499962
  misc_feature (2)..(314): Pfam Name: Pfam Description:  Strictosidine synthase
  misc_feature (1)..(345): NCBI GI NO: 1754987 NR Description: strictosidine synthase
  misc_feature (1)..(314): NCBI GI NO: 21431845 NR Description: Strictosidine synthase 3 precursor (SS-3)
  misc_feature (1)..(314): NCBI GI NO: 30698979 NR Description: strictosidine synthase family
  misc_feature (1)..(314): NCBI GI NO: 15221106 NR Description: strictosidine synthase family
  misc_feature (1)..(314): NCBI GI NO: 1754983 NR Description: strictosidine synthase
  misc_feature (1)..(314): NCBI GI NO: 15221105 NR Description: strictosidine synthase family
  misc_feature (5)..(314): NCBI GI NO: 135005 NR Description: Strictosidine synthase precursor
  misc_feature (5)..(314): NCBI GI NO: 478818 NR Description: strictosidine synthase (EC 4
  misc_feature (5)..(319): NCBI GI NO: 267045 NR Description: Strictosidine synthase precursor
  misc_feature (5)..(317): NCBI GI NO: 18222 NR Description: strictosidine synthase precursor
MRSFVSLISLLLLLSFSSSVLSTKKSSFQKLPVPGNRTGPEAFAFDSTGKGFLPGVTGGKILKYLPKKGYVDFAQITNSSKSSLCDGALGTTNVEKCGRPAGIAFNTKTGDLYVADAALGLHVIPRRGGLAKKIADSVGGKPFLFLDGLDVDPNTGVVYFTSFSSTFGPRDVLKAVATKDSTGKFFKYDPSKKVVTVLMDGLSGSAGCAVSSDGSFVLVGQFTKSNIKRYWIKGSKAGTSEDFTNSVSNPDNIKRIGSTGNFWVASVVNSATGPTNPSAVKVSSAGKVLQTIPLKDKFGDTLVSEVNDQRTALYRSSFWAFRRNSLSFKVNMVLVWVRIKVIESK

SEQ ID NO: 5209 - DNA, 1407 bp, Arabidopsis thaliana
  misc_feature (1)..(1407): Ceres Seq. ID no. 12389097
tctttcaattactataatgttgaatttgggtttcatctactaactaagatgaagtttcttgtctctttctgtctccctctttcttaattcctctctacttttcggttaattgctcctcttcagctaactttggggctttaaagtgataggatggctcgcttcagttttccttgttttccaaattttgggggttttaatcagcacaggatgagagaggcacagctaggcggtcacactctgaggtcccatggaatgactgttgcaaggactcacatgcatgattggatcattctcgtgttacttgttattctcgagtgtgtactccttataatccacccattttatcgctttgttggtaaagatatgatgactgatctaagttacccgttaaagagtaacaccgtaccaatttggtctgtcccggtatatgcgatgctgttacctttggtaatcttcatctttatctacttccgtcgaagagatgtttatgatcttcatcacgcggtgctaggtctcttatactctgttctggtgacagcagtacttaccgatgcaataaagaatgcagttggtcgaccacgtcctgacttcttctggcgttgttttccagatggcaaagctctttatgatagccttggagatgttatatgccatggtgataaaagcgtcataagggaaggtcacaaaagctttccaagtggacacacgtcatggtctttttcgggtctcggatttctttcgctttacttatcgggaaagattcaagcatttgacggtaaaggccacgttgcaaagctatgcatagtcatactccctttgctatttgcagctcttgtcggcatttcccgtgttgatgactattggcatcattggcaagacgtctttgcaggaggcttgctaggtcttgcgatctctacaatctgttatcttcaatttttcccgccaccatatcacaccgaaggttggggaccatatgcttacttccaagtgttggaggctgcgagagtgcaaggagcagcgaatggagcagtgcaacagccgccgccccaagttaacaacggtgaagaagaagacggtgggtttatgggtttacatttggtggataatccgactatgaggagagaagaggatgtagaaactggtagaggctgagatgaagaaactctgaagctggtttggttacttgttaggacactttctcttgttcttttgattctttgttggacaactttagtagatttctctaagataactaatagagtcgtttggttttggttttggtttaaatggatgaccggttttatggttccggtattggtggttaaagtttatgtttttcaaaaaagttcactggataaatgtagctttattttcaatattttaaggattgaaatcggatttgaactt

SEQ ID NO: 5210 - DNA, 1292 bp, Glycine max
  misc_feature (1)..(1292): Ceres Seq. ID no. 15171109
acatattattttctgtggtttgtattttttgttctatctattttgtttcctcttgtgtgagcacatgtttgaaaatcaaatcaaaggcattcacttgaaccgttgttttcttttgacaaatttgtctgcacacttcattgggctcgcttaaagtgattcgtggttcatacttgttcacataaaaaagctacaagagaaagacgagcgctttcatatttgttgtaatcttaaaatcagacaaatggatgttgaagtagtagggcctatagtaggattttttcaaacttagttttctttcatctaccaaaatcttcgcattcacatttcacacactgtctggcatcccctaacaatattcattcatttattcattaccatttatgatgggattaatgcttaggtggcaaaagagagagccctaccagttggaccagaggaaggtggttttggaatgtcatatgatcttctgtatggacgagctggattcttatggggtgcattgttcgtgaacaagcacctaggagaagatgcagtgcccaaagacattttgatgcttattattgatgcggtgttggctggtggtagagcaggagcatctgatattaaagactgcccattgatgtatagatggcatggaacaaggtacttgggtgcagcaaatggccttgctggtatccttcatgtgctgctacattttccacttccaagtgaggatgctgaggatgtcaagggaactttgtggtacctcatgagtaagcgtttccctcacagtggaaactatccctccagtgaaggtaatccaagggataagttagtgcaatggggtcatggggcgactggcatggccatcacgttgtccaaagcagcagaggtatttcctaatgacagagaactaagagatgctgcaatagaagcaggtgaagttgtatggaagagtggattggtgaagaaggtgggacttgcagatggggtatctgggaatgcctatgccttcctttccctctacagactcactaaagagagtatatacgaagagagagcaaaatcattcgcttccttcttgtatgataatgcaaaatctctggctgctgccaatggctattcacttttccaaggacttgctgggacagcatgcctctggtttgatctgcttgcacccgacaactctaggttcccaggttatgaattatagatggttaaagtagagatggtgcttattctacaagcagaaggaacgtggcatggatggaaaatgttaggtagaacaccaatcataagtgatatgatctgat

SEQ ID NO: 5211 - protein, 246 aa, Glycine max
  peptide (1)..(246): Ceres Seq. ID no. 15171110
  misc_feature (1)..(246): Pfam Name: Pfam Description:  Lanthionine synthetase C-like protein
  misc_feature (1)..(246): NCBI GI NO: 8489877 NR Description: putative 7-transmembrane G-protein-coupled receptor
  misc_feature (1)..(246): NCBI GI NO: 15238395 NR Description: G protein-coupled receptor-related protein
  misc_feature (1)..(246): NCBI GI NO: 15451140 NR Description: G protein-coupled receptor-like protein
  misc_feature (1)..(246): NCBI GI NO: 15219126 NR Description: G protein-coupled receptor -related
  misc_feature (4)..(246): NCBI GI NO: 37535720 NR Description: putative lanthionine synthetase
  misc_feature (4)..(246): NCBI GI NO: 21742091 NR Description: OSJNBa0074L08.13
  misc_feature (4)..(246): NCBI GI NO: 25411993 NR Description: hypothetical protein At2g20770
  misc_feature (4)..(246): NCBI GI NO: 30681129 NR Description: expressed protein [Arabidopsis thaliana]
  misc_feature (4)..(246): NCBI GI NO: 19526936 NR Description: RIKEN cDNA 1700003F10 [Mus musculus]
  misc_feature (4)..(246): NCBI GI NO: 8923911 NR Description: LanC lantibiotic synthetase component C-like 2
MSYDLLYGRAGFLWGALFVNKHLGEDAVPKDILMLIIDAVLAGGRAGASDIKDCPLMYRWHGTRYLGAANGLAGILHVLLHFPLPSEDAEDVKGTLWYLMSKRFPHSGNYPSSEGNPRDKLVQWGHGATGMAITLSKAAEVFPNDRELRDAAIEAGEVVWKSGLVKKVGLADGVSGNAYAFLSLYRLTKESIYEERAKSFASFLYDNAKSLAAANGYSLFQGLAGTACLWFDLLAPDNSRFPGYEL

SEQ ID NO: 5212 - protein, 213 aa, Glycine max
  peptide (1)..(213): Ceres Seq. ID no. 15171111
  misc_feature (1)..(213): Pfam Name: Pfam Description:  Lanthionine synthetase C-like protein
  misc_feature (1)..(213): NCBI GI NO: 8489877 NR Description: putative 7-transmembrane G-protein-coupled receptor
  misc_feature (1)..(213): NCBI GI NO: 15238395 NR Description: G protein-coupled receptor-related protein
  misc_feature (1)..(213): NCBI GI NO: 15451140 NR Description: G protein-coupled receptor-like protein
  misc_feature (1)..(213): NCBI GI NO: 15219126 NR Description: G protein-coupled receptor -related
  misc_feature (1)..(213): NCBI GI NO: 37535720 NR Description: putative lanthionine synthetase
  misc_feature (1)..(213): NCBI GI NO: 21742091 NR Description: OSJNBa0074L08.13
  misc_feature (1)..(213): NCBI GI NO: 25411993 NR Description: hypothetical protein At2g20770
  misc_feature (1)..(213): NCBI GI NO: 30681129 NR Description: expressed protein [Arabidopsis thaliana]
  misc_feature (1)..(213): NCBI GI NO: 19526936 NR Description: RIKEN cDNA 1700003F10 [Mus musculus]
  misc_feature (1)..(213): NCBI GI NO: 8923911 NR Description: LanC lantibiotic synthetase component C-like 2
MLIIDAVLAGGRAGASDIKDCPLMYRWHGTRYLGAANGLAGILHVLLHFPLPSEDAEDVKGTLWYLMSKRFPHSGNYPSSEGNPRDKLVQWGHGATGMAITLSKAAEVFPNDRELRDAAIEAGEVVWKSGLVKKVGLADGVSGNAYAFLSLYRLTKESIYEERAKSFASFLYDNAKSLAAANGYSLFQGLAGTACLWFDLLAPDNSRFPGYEL

SEQ ID NO: 5213 - protein, 190 aa, Glycine max
  peptide (1)..(190): Ceres Seq. ID no. 15171112
  misc_feature (1)..(190): Pfam Name: Pfam Description:  Lanthionine synthetase C-like protein
  misc_feature (1)..(190): NCBI GI NO: 8489877 NR Description: putative 7-transmembrane G-protein-coupled receptor
  misc_feature (1)..(190): NCBI GI NO: 15238395 NR Description: G protein-coupled receptor-related protein
  misc_feature (1)..(190): NCBI GI NO: 15451140 NR Description: G protein-coupled receptor-like protein
  misc_feature (1)..(190): NCBI GI NO: 15219126 NR Description: G protein-coupled receptor -related
  misc_feature (1)..(190): NCBI GI NO: 37535720 NR Description: putative lanthionine synthetase
  misc_feature (1)..(190): NCBI GI NO: 21742091 NR Description: OSJNBa0074L08.13
  misc_feature (1)..(190): NCBI GI NO: 25411993 NR Description: hypothetical protein At2g20770
  misc_feature (1)..(190): NCBI GI NO: 30681129 NR Description: expressed protein [Arabidopsis thaliana]
  misc_feature (1)..(190): NCBI GI NO: 19526936 NR Description: RIKEN cDNA 1700003F10 [Mus musculus]
  misc_feature (1)..(190): NCBI GI NO: 8923911 NR Description: LanC lantibiotic synthetase component C-like 2
MYRWHGTRYLGAANGLAGILHVLLHFPLPSEDAEDVKGTLWYLMSKRFPHSGNYPSSEGNPRDKLVQWGHGATGMAITLSKAAEVFPNDRELRDAAIEAGEVVWKSGLVKKVGLADGVSGNAYAFLSLYRLTKESIYEERAKSFASFLYDNAKSLAAANGYSLFQGLAGTACLWFDLLAPDNSRFPGYEL

SEQ ID NO: 5214 - DNA, 1491 bp, Glycine max
  misc_feature (1)..(1491): Ceres Seq. ID no. 15171594
agagatgcagccttgtgtatctaatgtcttcccaaatagatttcctattaaaaagaacattgctgcaaagcttgacaagtgcaggaaacaaataaaatatgctaagaaatcgttggacaatgggataccctattatggaattgatgcatgtaatgaggttttgaatggctatagccatattattgggcctgcactgaaacatgaatgcttgtgtactcgtgctgcactattggtcaagaggaagtggaaaaacgatgctcatatggctataagagactgctatgctgctaggataattgataattcctcttacaaagcactatactatatgtcagaagcattgtcacagttgggtagacatgaagatgctttggagtttgctgttgcttcccattctttggccccatccaaatctgaagttgcagaaagagtagcgaatgtgaagagggacattgctttagctgaagctgaaaaaaatagtcagaccaatgatggggcatcaaggtttgatagtaggggtggaagaatattatcattaagcgacatactctattgtcctgagtctaatagtgatgatccacatgatggttcaagatcagagagggatgattctgattacgatgacgaattggagttggactttgaaacatcaatatctggtgatgagggacatgatcttgaatcaaatattcttcatggaaatttaaatcttagaattcatgggagaggtgactccagagacaatgctgatgcaagtggctcatgtgaatcaccttcatcatcgtcacagaacagtagaacttcttatcagcctgaaccagctgttgatatgaaacagagatttgttggccactgcaatattgggactgacataaaacaagccagttttcttggtcaaagaggtgaatatgttgctagtggaagtgatgatggcagatggtttatttgggaaaagtgtacgggcagactaataaaaatgctgagtggtgatgaatctgttgtaaattgtgtacaatgccatccatttgattttgttgttgcaaccagtgggattgatagcacaataaagatctggactccaactgctcctgttccatcttctgtagctggtggttcagcaggaccagaaactggtgatgtgttggttgctatggagagcaatcaacaaaaactatcccgtagccataattctatcttgcccttattggaatcatttaggaggcaggattttcctgaagggtcgttacgcttgcatccatttgaatgtgctcaaagctaaaggtttgctaattgtcttctggtgggtgctctattcggttgtgcatatgaatctggactgattagtgatgacattgatggggaggagccactatcgatgggtatgaggtatatgagctttttcactatggaaggcattgggacgcgcagaataatttggagcggtgaaaataaaatcctgggtgttatcctggatttctttccaggattgac

SEQ ID NO: 5215 - protein, 425 aa, Glycine max
  peptide (1)..(425): Ceres Seq. ID no. 15171595
  misc_feature (276)..(317): Pfam Name: Pfam Description:  WD domain, G-beta repeat
  misc_feature (1)..(425): NCBI GI NO: 11358295 NR Description: hypothetical protein T30N20_210 - Arabidopsisthaliana
  misc_feature (1)..(425): NCBI GI NO: 18416416 NR Description: transducin / WD-40 repeat protein family
  misc_feature (274)..(391): NCBI GI NO: 16076860 NR Description: SD07783p [Drosophila melanogaster]
  misc_feature (38)..(123): NCBI GI NO: 16076860 NR Description: SD07783p [Drosophila melanogaster]
  misc_feature (213)..(406): NCBI GI NO: 10435814 NR Description: unnamed protein product [Homo sapiens]
  misc_feature (73)..(125): NCBI GI NO: 10435814 NR Description: unnamed protein product [Homo sapiens]
  misc_feature (274)..(391): NCBI GI NO: 24654819 NR Description: CG5124-PA [Drosophila melanogaster]
  misc_feature (11)..(123): NCBI GI NO: 24654819 NR Description: CG5124-PA [Drosophila melanogaster]
  misc_feature (264)..(368): NCBI GI NO: 31210559 NR Description: ENSANGP00000000953 [Anopheles gambiae]
  misc_feature (52)..(123): NCBI GI NO: 31210559 NR Description: ENSANGP00000000953 [Anopheles gambiae]
EMQPCVSNVFPNRFPIKKNIAAKLDKCRKQIKYAKKSLDNGIPYYGIDACNEVLNGYSHIIGPALKHECLCTRAALLVKRKWKNDAHMAIRDCYAARIIDNSSYKALYYMSEALSQLGRHEDALEFAVASHSLAPSKSEVAERVANVKRDIALAEAEKNSQTNDGASRFDSRGGRILSLSDILYCPESNSDDPHDGSRSERDDSDYDDELELDFETSISGDEGHDLESNILHGNLNLRIHGRGDSRDNADASGSCESPSSSSQNSRTSYQPEPAVDMKQRFVGHCNIGTDIKQASFLGQRGEYVASGSDDGRWFIWEKCTGRLIKMLSGDESVVNCVQCHPFDFVVATSGIDSTIKIWTPTAPVPSSVAGGSAGPETGDVLVAMESNQQKLSRSHNSILPLLESFRRQDFPEGSLRLHPFECAQS

SEQ ID NO: 5216 - protein, 424 aa, Glycine max
  peptide (1)..(424): Ceres Seq. ID no. 15171596
  misc_feature (275)..(316): Pfam Name: Pfam Description:  WD domain, G-beta repeat
  misc_feature (1)..(424): NCBI GI NO: 11358295 NR Description: hypothetical protein T30N20_210 - Arabidopsisthaliana
  misc_feature (1)..(424): NCBI GI NO: 18416416 NR Description: transducin / WD-40 repeat protein family
  misc_feature (273)..(390): NCBI GI NO: 16076860 NR Description: SD07783p [Drosophila melanogaster]
  misc_feature (37)..(122): NCBI GI NO: 16076860 NR Description: SD07783p [Drosophila melanogaster]
  misc_feature (212)..(405): NCBI GI NO: 10435814 NR Description: unnamed protein product [Homo sapiens]
  misc_feature (72)..(124): NCBI GI NO: 10435814 NR Description: unnamed protein product [Homo sapiens]
  misc_feature (273)..(390): NCBI GI NO: 24654819 NR Description: CG5124-PA [Drosophila melanogaster]
  misc_feature (10)..(122): NCBI GI NO: 24654819 NR Description: CG5124-PA [Drosophila melanogaster]
  misc_feature (263)..(367): NCBI GI NO: 31210559 NR Description: ENSANGP00000000953 [Anopheles gambiae]
  misc_feature (51)..(122): NCBI GI NO: 31210559 NR Description: ENSANGP00000000953 [Anopheles gambiae]
MQPCVSNVFPNRFPIKKNIAAKLDKCRKQIKYAKKSLDNGIPYYGIDACNEVLNGYSHIIGPALKHECLCTRAALLVKRKWKNDAHMAIRDCYAARIIDNSSYKALYYMSEALSQLGRHEDALEFAVASHSLAPSKSEVAERVANVKRDIALAEAEKNSQTNDGASRFDSRGGRILSLSDILYCPESNSDDPHDGSRSERDDSDYDDELELDFETSISGDEGHDLESNILHGNLNLRIHGRGDSRDNADASGSCESPSSSSQNSRTSYQPEPAVDMKQRFVGHCNIGTDIKQASFLGQRGEYVASGSDDGRWFIWEKCTGRLIKMLSGDESVVNCVQCHPFDFVVATSGIDSTIKIWTPTAPVPSSVAGGSAGPETGDVLVAMESNQQKLSRSHNSILPLLESFRRQDFPEGSLRLHPFECAQS

SEQ ID NO: 5217 - protein, 338 aa, Glycine max
  peptide (1)..(338): Ceres Seq. ID no. 15171597
  misc_feature (189)..(230): Pfam Name: Pfam Description:  WD domain, G-beta repeat
  misc_feature (1)..(338): NCBI GI NO: 11358295 NR Description: hypothetical protein T30N20_210 - Arabidopsisthaliana
  misc_feature (1)..(338): NCBI GI NO: 18416416 NR Description: transducin / WD-40 repeat protein family
  misc_feature (187)..(304): NCBI GI NO: 16076860 NR Description: SD07783p [Drosophila melanogaster]
  misc_feature (1)..(36): NCBI GI NO: 16076860 NR Description: SD07783p [Drosophila melanogaster]
  misc_feature (126)..(319): NCBI GI NO: 10435814 NR Description: unnamed protein product [Homo sapiens]
  misc_feature (1)..(38): NCBI GI NO: 10435814 NR Description: unnamed protein product [Homo sapiens]
  misc_feature (187)..(304): NCBI GI NO: 24654819 NR Description: CG5124-PA [Drosophila melanogaster]
  misc_feature (1)..(36): NCBI GI NO: 24654819 NR Description: CG5124-PA [Drosophila melanogaster]
  misc_feature (177)..(281): NCBI GI NO: 31210559 NR Description: ENSANGP00000000953 [Anopheles gambiae]
  misc_feature (1)..(36): NCBI GI NO: 31210559 NR Description: ENSANGP00000000953 [Anopheles gambiae]
MAIRDCYAARIIDNSSYKALYYMSEALSQLGRHEDALEFAVASHSLAPSKSEVAERVANVKRDIALAEAEKNSQTNDGASRFDSRGGRILSLSDILYCPESNSDDPHDGSRSERDDSDYDDELELDFETSISGDEGHDLESNILHGNLNLRIHGRGDSRDNADASGSCESPSSSSQNSRTSYQPEPAVDMKQRFVGHCNIGTDIKQASFLGQRGEYVASGSDDGRWFIWEKCTGRLIKMLSGDESVVNCVQCHPFDFVVATSGIDSTIKIWTPTAPVPSSVAGGSAGPETGDVLVAMESNQQKLSRSHNSILPLLESFRRQDFPEGSLRLHPFECAQS

SEQ ID NO: 5218 - DNA, 1135 bp, Glycine max
  misc_feature (1)..(1135): Ceres Seq. ID no. 14304848
ggaaacgcggctttctactgccacgtcttctctcgctccttaaccttaaaccctaaccctctgctcctcgtttccccgtttcggaaacccgaaacgtttcgcctcgcttcacccgtttcgtgcttatcctcctcctcaatggcggtgcctccgtcttcgctggagaagcaattcgatgactttagggttcagctggaagaatctggaaccttgcgcgaacgaattcgaagcgtcgtttcggagattgagtcctccactaggctcatctatgccacacttcttctcgttcaccagtctcgtcccactcccgagcttttagagaaggccaagtctcatgttaatgtgttaaagaagcagtataagcaacttgctgaagttgttggaggatgccctgggcaatactataggtaccatggtgattggaagagtgagacacagtctgtagtttcaatgcttacatttatgcactggcttgaaacaggaagccttctcgagcacaaagaggctgaggaaaaacttgggttgaatagttcagaatttggcctagacgttgaagattacttaataggtgtctgttttatgtctaatgaattgccaaggtatgtggtgaatcaagtgacagctggggactatgattgtccaaggaaggtcttaaagttcttaacagatctccatgctgcattccgcatgcttaatctacgaaatgattttttgcgaaagaagtttgatggcatgaagtatgacttaagaaaagtcgaagaagtttactatgatgttaagattcggggtttgacaccgaatggtgagccagttggagacttggagatcaaggaatcgcaggacaatcttaatcttaagttgtgatacctgtagacccaaagtacatggagctttactagcttcttaacaaactatggaccttaaaaattgataggcttagctttttgttagctgtaacgggagttctatttctaatggttgatgaaagcaagattcatgagtaaggaaatacaattgccagtatgtgctgctgactttcaaccatcgtgagaactaagaaccctgtactcaatgcttgtgggttgaacggggattttcaattcaatccacagcggacaatttgaagtttttcttt

SEQ ID NO: 5219 - protein, 287 aa, Glycine max
  peptide (1)..(287): Ceres Seq. ID no. 14304849
  misc_feature (71)..(264): Pfam Name: Pfam Description:  Translin family
  misc_feature (53)..(272): NCBI GI NO: 18404301 NR Description: translin-related protein [Arabidopsis thaliana]
  misc_feature (53)..(196): NCBI GI NO: 25408524 NR Description: translin-like protein
  misc_feature (182)..(272): NCBI GI NO: 25408524 NR Description: translin-like protein
  misc_feature (11)..(269): NCBI GI NO: 37534782 NR Description: translin-like protein
  misc_feature (41)..(264): NCBI GI NO: 31213187 NR Description: ENSANGP00000021806 [Anopheles gambiae]
  misc_feature (58)..(265): NCBI GI NO: 20129859 NR Description: CG11761-PA [Drosophila melanogaster]
  misc_feature (53)..(270): NCBI GI NO: 7648677 NR Description: translin [Xenopus laevis]
  misc_feature (53)..(272): NCBI GI NO: 6136058 NR Description: Translin
  misc_feature (53)..(263): NCBI GI NO: 6755899 NR Description: translin; testis/brain-RNA-binding protein
  misc_feature (53)..(263): NCBI GI NO: 21730459 NR Description: Chain A
GNAAFYCHVFSRSLTLNPNPLLLVSPFRKPETFRLASPVSCLSSSSMAVPPSSLEKQFDDFRVQLEESGTLRERIRSVVSEIESSTRLIYATLLLVHQSRPTPELLEKAKSHVNVLKKQYKQLAEVVGGCPGQYYRYHGDWKSETQSVVSMLTFMHWLETGSLLEHKEAEEKLGLNSSEFGLDVEDYLIGVCFMSNELPRYVVNQVTAGDYDCPRKVLKFLTDLHAAFRMLNLRNDFLRKKFDGMKYDLRKVEEVYYDVKIRGLTPNGEPVGDLEIKESQDNLNLKL

SEQ ID NO: 5220 - protein, 241 aa, Glycine max
  peptide (1)..(241): Ceres Seq. ID no. 14304850
  misc_feature (25)..(218): Pfam Name: Pfam Description:  Translin family
  misc_feature (7)..(226): NCBI GI NO: 18404301 NR Description: translin-related protein [Arabidopsis thaliana]
  misc_feature (7)..(150): NCBI GI NO: 25408524 NR Description: translin-like protein
  misc_feature (136)..(226): NCBI GI NO: 25408524 NR Description: translin-like protein
  misc_feature (1)..(223): NCBI GI NO: 37534782 NR Description: translin-like protein
  misc_feature (1)..(218): NCBI GI NO: 31213187 NR Description: ENSANGP00000021806 [Anopheles gambiae]
  misc_feature (12)..(219): NCBI GI NO: 20129859 NR Description: CG11761-PA [Drosophila melanogaster]
  misc_feature (7)..(224): NCBI GI NO: 7648677 NR Description: translin [Xenopus laevis]
  misc_feature (7)..(226): NCBI GI NO: 6136058 NR Description: Translin
  misc_feature (7)..(217): NCBI GI NO: 6755899 NR Description: translin; testis/brain-RNA-binding protein
  misc_feature (7)..(217): NCBI GI NO: 21730459 NR Description: Chain A
MAVPPSSLEKQFDDFRVQLEESGTLRERIRSVVSEIESSTRLIYATLLLVHQSRPTPELLEKAKSHVNVLKKQYKQLAEVVGGCPGQYYRYHGDWKSETQSVVSMLTFMHWLETGSLLEHKEAEEKLGLNSSEFGLDVEDYLIGVCFMSNELPRYVVNQVTAGDYDCPRKVLKFLTDLHAAFRMLNLRNDFLRKKFDGMKYDLRKVEEVYYDVKIRGLTPNGEPVGDLEIKESQDNLNLKL

SEQ ID NO: 5221 - DNA, 862 bp, Glycine max
  misc_feature (1)..(862): Ceres Seq. ID no. 13593963
aatcccaattcccagggtctaagcagcacaacactagttcccaacgccgtcacccccgtttgtgcagtgaagaagaagaagatggccgtaaaatcgaagaaagagaaagaacacctgaatcttctcctaggttcccaccttactactatccatgaaaccctccaggttttggatcaaacaccgccatcttcttcttccgccaaagtcacctgggacgatgtcattaagatggctgaacaagtctcaaaacaagctaccacggtgggaatgctgtggactggagagaagccagatgccaaagcagttgaggaaaatatggcatcatatttcaacaccctgcaaggtttccttttactttcccatggcagtacagtaggtgcagggcctaccttgtcttctgctgttcatgcatccgtcaagcaagtcgttgattccagcttcagattgatgaaggaaactgtctctttatacgggtaccattctaaagacctgaaaatatcagtaccacaattggttggtgctgtctgggaagcctgttctgcccttaaaaagactccttccacaaatattacagcaattgggagaggaatgacacaggttgctgtttcagtgaaggacgttcttcgtgagatgaaagaattgaaacctgtttcatgtgatgatcaagttgacgaagctgctggtgagagttgtgcagaagcagcgtctgagccacatgatgataattcaagtgaaggtgatctagggaatgacctgtcacctgaagagatgaaagtggctgaaagagcaattgaggttgtctctaatacgctttcatttataagaatacttattcactccatcatacgcttgcttaagctgg

SEQ ID NO: 5222 - protein, 287 aa, Glycine max
  peptide (1)..(287): Ceres Seq. ID no. 13593964
  misc_feature (33)..(286): NCBI GI NO: 15219987 NR Description: expressed protein [Arabidopsis thaliana]
  misc_feature (32)..(286): NCBI GI NO: 15223962 NR Description: hypothetical protein [Arabidopsis thaliana]
  misc_feature (33)..(229): NCBI GI NO: 18395185 NR Description: hypothetical protein [Arabidopsis thaliana]
  misc_feature (88)..(229): NCBI GI NO: 25372690 NR Description: F19G10.7 protein - Arabidopsis thaliana
NPNSQGLSSTTLVPNAVTPVCAVKKKKMAVKSKKEKEHLNLLLGSHLTTIHETLQVLDQTPPSSSSAKVTWDDVIKMAEQVSKQATTVGMLWTGEKPDAKAVEENMASYFNTLQGFLLLSHGSTVGAGPTLSSAVHASVKQVVDSSFRLMKETVSLYGYHSKDLKISVPQLVGAVWEACSALKKTPSTNITAIGRGMTQVAVSVKDVLREMKELKPVSCDDQVDEAAGESCAEAASEPHDDNSSEGDLGNDLSPEEMKVAERAIEVVSNTLSFIRILIHSIIRLLKL

SEQ ID NO: 5223 - protein, 260 aa, Glycine max
  peptide (1)..(260): Ceres Seq. ID no. 13593965
  misc_feature (6)..(259): NCBI GI NO: 15219987 NR Description: expressed protein [Arabidopsis thaliana]
  misc_feature (5)..(259): NCBI GI NO: 15223962 NR Description: hypothetical protein [Arabidopsis thaliana]
  misc_feature (6)..(202): NCBI GI NO: 18395185 NR Description: hypothetical protein [Arabidopsis thaliana]
  misc_feature (61)..(202): NCBI GI NO: 25372690 NR Description: F19G10.7 protein - Arabidopsis thaliana
MAVKSKKEKEHLNLLLGSHLTTIHETLQVLDQTPPSSSSAKVTWDDVIKMAEQVSKQATTVGMLWTGEKPDAKAVEENMASYFNTLQGFLLLSHGSTVGAGPTLSSAVHASVKQVVDSSFRLMKETVSLYGYHSKDLKISVPQLVGAVWEACSALKKTPSTNITAIGRGMTQVAVSVKDVLREMKELKPVSCDDQVDEAAGESCAEAASEPHDDNSSEGDLGNDLSPEEMKVAERAIEVVSNTLSFIRILIHSIIRLLKL

SEQ ID NO: 5224 - protein, 211 aa, Glycine max
  peptide (1)..(211): Ceres Seq. ID no. 13593966
  misc_feature (1)..(210): NCBI GI NO: 15219987 NR Description: expressed protein [Arabidopsis thaliana]
  misc_feature (1)..(210): NCBI GI NO: 15223962 NR Description: hypothetical protein [Arabidopsis thaliana]
  misc_feature (1)..(153): NCBI GI NO: 18395185 NR Description: hypothetical protein [Arabidopsis thaliana]
  misc_feature (12)..(153): NCBI GI NO: 25372690 NR Description: F19G10.7 protein - Arabidopsis thaliana
MAEQVSKQATTVGMLWTGEKPDAKAVEENMASYFNTLQGFLLLSHGSTVGAGPTLSSAVHASVKQVVDSSFRLMKETVSLYGYHSKDLKISVPQLVGAVWEACSALKKTPSTNITAIGRGMTQVAVSVKDVLREMKELKPVSCDDQVDEAAGESCAEAASEPHDDNSSEGDLGNDLSPEEMKVAERAIEVVSNTLSFIRILIHSIIRLLKL

SEQ ID NO: 5225 - DNA, 1613 bp, Glycine max
  misc_feature (1)..(1613): Ceres Seq. ID no. 14313811
ggtcagccactgcaaccaagccaacggcatcatggaagacagtttcagagtacgagcagagagagcctttggttctcttccaatcccttcttcttctctcaacactctctggtctctcaccgaagacgaaatcaataactccccttccaatcgcacccccaaacctaaacccaaaccctacccctcttcaagctcccgggttcagctccagaagggcctccacgatctcgacgacgacgacgacgacgacgacgaagaagaagaagagcctcgtggagtctctaaaccccctgattacgacgatgaacagtggcagattagggctggtattggccgagattgcaccctcgattacgaggaagaggaggatcaatatgacaagcaggctataggcaaagagaattcgggtgatcgtgtgtatatgaaggatctaaacgacgatggagttgagattagttcttgcaatgttttccccacttcattcagagattttgtcagagacccgcgtgcaaatcatttggcggcaaggattaggctgaagcaggatgacgaagcagcagccaaaaaaattgatgctctgcatgtctctgagaaatctgcaccagacattggtggtggtagtggcagtgatgttattaaccccaagtcaatcttgaagagtaaggataatctttcggagcccagggatgttcgcaaacgtgttcggtttgattctgaatgtgatgatagtggtaacgatgatgatgggcttgaaggaagaaccagggatgttcgcatgaagacctcttcaatggaagaggctacagcttctgaccagttgtcaaagtcaaaagaatttgattcagctgttccagattacattcgtaatccttcaagatacacccgttacacttttgatgattctccaagtgacatggatgacaaatcaaataaggaagcatgcatgagcttccttttgcagttgaaggggtcaaatgctgccaagagaactggacctcaagaagatgaagctttggaagatcttccatcagtaacatttatatcgaagaagaaatctggtgatgccaatatgtgcgacagcgagatggtgtcaaagccgaagcttgatgctggcacggaggccatgaataaaagagccttccctgttggcatagctgccagtgactctgaaaacagtgacgcttgtgcaatggaggaagatgaaccagaagttaaagacattaaaaagagctcacagaaggtgaaccgccagtacaggaagaaagctcaggagaatttggaggagcctgtgtaatgtaatggcgcagttagttcctagacttgcataatttgacatgatcagacttgtaccttttccccccattgtttccctcagactaatgctcccttttcgtaaatttgtgaaactacatcatgtgccaagatctgcctatggccaagttcgttagtttctttctagaagtagaactgctataggtataagcttcaactcaagcataatgatcagagattcagagctaagatgagatgtgttaaaaatgtatttttcatcataaaatatcaaattgtgagcagttgcccataatagcaattttcacctggtttatatttcg

SEQ ID NO: 5226 - protein, 430 aa, Glycine max
  peptide (1)..(430): Ceres Seq. ID no. 14313812
  misc_feature (11)..(428): NCBI GI NO: 15240759 NR Description: expressed protein [Arabidopsis thaliana]
  misc_feature (119)..(425): NCBI GI NO: 38347160 NR Description: OSJNBa0039C07.6
  misc_feature (75)..(125): NCBI GI NO: 38347160 NR Description: OSJNBa0039C07.6
  misc_feature (165)..(309): NCBI GI NO: 15240598 NR Description: expressed protein [Arabidopsis thaliana]
  misc_feature (7)..(137): NCBI GI NO: 15240598 NR Description: expressed protein [Arabidopsis thaliana]
VSHCNQANGIMEDSFRVRAERAFGSLPIPSSSLNTLWSLTEDEINNSPSNRTPKPKPKPYPSSSSRVQLQKGLHDLDDDDDDDDEEEEEPRGVSKPPDYDDEQWQIRAGIGRDCTLDYEEEEDQYDKQAIGKENSGDRVYMKDLNDDGVEISSCNVFPTSFRDFVRDPRANHLAARIRLKQDDEAAAKKIDALHVSEKSAPDIGGGSGSDVINPKSILKSKDNLSEPRDVRKRVRFDSECDDSGNDDDGLEGRTRDVRMKTSSMEEATASDQLSKSKEFDSAVPDYIRNPSRYTRYTFDDSPSDMDDKSNKEACMSFLLQLKGSNAAKRTGPQEDEALEDLPSVTFISKKKSGDANMCDSEMVSKPKLDAGTEAMNKRAFPVGIAASDSENSDACAMEEDEPEVKDIKKSSQKVNRQYRKKAQENLEEPV

SEQ ID NO: 5227 - protein, 420 aa, Glycine max
  peptide (1)..(420): Ceres Seq. ID no. 14313813
  misc_feature (1)..(418): NCBI GI NO: 15240759 NR Description: expressed protein [Arabidopsis thaliana]
  misc_feature (109)..(415): NCBI GI NO: 38347160 NR Description: OSJNBa0039C07.6
  misc_feature (65)..(115): NCBI GI NO: 38347160 NR Description: OSJNBa0039C07.6
  misc_feature (155)..(299): NCBI GI NO: 15240598 NR Description: expressed protein [Arabidopsis thaliana]
  misc_feature (1)..(127): NCBI GI NO: 15240598 NR Description: expressed protein [Arabidopsis thaliana]
MEDSFRVRAERAFGSLPIPSSSLNTLWSLTEDEINNSPSNRTPKPKPKPYPSSSSRVQLQKGLHDLDDDDDDDDEEEEEPRGVSKPPDYDDEQWQIRAGIGRDCTLDYEEEEDQYDKQAIGKENSGDRVYMKDLNDDGVEISSCNVFPTSFRDFVRDPRANHLAARIRLKQDDEAAAKKIDALHVSEKSAPDIGGGSGSDVINPKSILKSKDNLSEPRDVRKRVRFDSECDDSGNDDDGLEGRTRDVRMKTSSMEEATASDQLSKSKEFDSAVPDYIRNPSRYTRYTFDDSPSDMDDKSNKEACMSFLLQLKGSNAAKRTGPQEDEALEDLPSVTFISKKKSGDANMCDSEMVSKPKLDAGTEAMNKRAFPVGIAASDSENSDACAMEEDEPEVKDIKKSSQKVNRQYRKKAQENLEEPV

SEQ ID NO: 5228 - protein, 290 aa, Glycine max
  peptide (1)..(290): Ceres Seq. ID no. 14313814
  misc_feature (1)..(288): NCBI GI NO: 15240759 NR Description: expressed protein [Arabidopsis thaliana]
  misc_feature (1)..(285): NCBI GI NO: 38347160 NR Description: OSJNBa0039C07.6
  misc_feature (25)..(169): NCBI GI NO: 15240598 NR Description: expressed protein [Arabidopsis thaliana]
MKDLNDDGVEISSCNVFPTSFRDFVRDPRANHLAARIRLKQDDEAAAKKIDALHVSEKSAPDIGGGSGSDVINPKSILKSKDNLSEPRDVRKRVRFDSECDDSGNDDDGLEGRTRDVRMKTSSMEEATASDQLSKSKEFDSAVPDYIRNPSRYTRYTFDDSPSDMDDKSNKEACMSFLLQLKGSNAAKRTGPQEDEALEDLPSVTFISKKKSGDANMCDSEMVSKPKLDAGTEAMNKRAFPVGIAASDSENSDACAMEEDEPEVKDIKKSSQKVNRQYRKKAQENLEEPV

SEQ ID NO: 5229 - DNA, 1302 bp, Glycine max
  misc_feature (1)..(1302): Ceres Seq. ID no. 14310358
aggggactatcaaacattttggcccccttccgtgcccaactttctctcagacccgaaaatgaaagacatcttctaatggcagaagaagcacagaacagcaactccatgaatgccttgccaaaggttctcgttctgggtccccctacgtgcttcataaccctccaacctctctactctcacaagttccatttcctcaacccccacacctcaagcctttcactgcaacacttcctccaccaccaccaccaccaccacccttcctccatctccgccgttctctgcggtgcatcctactccgtcaccgccaacgtcctctgcctcctgcccgcgctccgcctcatcgtcaccaccagcgccggaaccgaccacatcgacctcgccgagtgccgccgccgcggaatccaggtcgccggcgccggagagctgttctccgaggacgtcgccgatatggccgtcgccctgctcgctgacgttatgaggaaaatttcggcggcggatcggtatttgaggactcagcagaatcacgacactacgccttgggattttttcacattcggctccaagttagcaggtaagcgagttgagattattggactgggaagcattggcatggaagtggccaagaggttggagtcttttggttgcattatcttatacaactctaagcataaaaaagcttcagtttcgtatcctttctattctagcatggtggatcttgcaactacttgcgacgctcttgtgttatgttgcgcactaaatgagcaaacaaagcacataattaacagggaagtcatgttggcattgggaaaacaaggatttattgtcaatgttggaagagggggtcttattgatgaaaaggaattggtcaagtgtttgatggaaggtgaaattggaggtgctggtttggatgtgtttgagaacgagcctcatgttcccaaagaactccttgcaatgaataatgtggttttatctccacattctgctgcttttactgtggaatctatgatgaatttgtgtgaacttatgggaggcaatttagaagccttcttcttaaataagcccctaattactcctgtaatgttgcctcaataacttgttcttttgataacctagtatcgtacgtgtggtacaattttatgacattcctgcaatgattctgattaagttttaaatgaatttgttctattccaaaaaccatctctgcaaagtgccttggcaagtgtatttcaaactctgttgtgccgttactctgtttgatcagtttttaagctcatttttatatggaaactctattgtgccgtt

SEQ ID NO: 5230 - protein, 363 aa, Glycine max
  peptide (1)..(363): Ceres Seq. ID no. 14310359
  misc_feature (147)..(326): Pfam Name: Pfam Description:  D-isomer specific 2-hydroxyacid dehydrogenase
  misc_feature (33)..(360): NCBI GI NO: 7485630 NR Description: probable glycerate dehydrogenase
  misc_feature (40)..(361): NCBI GI NO: 15222015 NR Description: oxidoreductase family [Arabidopsis thaliana]
  misc_feature (61)..(363): NCBI GI NO: 32488421 NR Description: OSJNBb0085F13.11
  misc_feature (59)..(359): NCBI GI NO: 32488422 NR Description: OSJNBb0085F13.12
  misc_feature (91)..(361): NCBI GI NO: 38345308 NR Description: OSJNBb0085F13.13
  misc_feature (86)..(362): NCBI GI NO: 38345306 NR Description: OSJNBb0085F13.6
  misc_feature (61)..(361): NCBI GI NO: 21636166 NR Description: unknown [Aegilops tauschii]
  misc_feature (85)..(360): NCBI GI NO: 15220005 NR Description: oxidoreductase family [Arabidopsis thaliana]
  misc_feature (85)..(360): NCBI GI NO: 34904262 NR Description: putative Caulobacter crescentus D-isomer specific2-hydroxyacid dehydrogenases family
  misc_feature (87)..(360): NCBI GI NO: 15890302 NR Description: AGR_L_379p [Agrobacterium tumefaciens]
RGLSNILAPFRAQLSLRPENERHLLMAEEAQNSNSMNALPKVLVLGPPTCFITLQPLYSHKFHFLNPHTSSLSLQHFLHHHHHHHPSSISAVLCGASYSVTANVLCLLPALRLIVTTSAGTDHIDLAECRRRGIQVAGAGELFSEDVADMAVALLADVMRKISAADRYLRTQQNHDTTPWDFFTFGSKLAGKRVEIIGLGSIGMEVAKRLESFGCIILYNSKHKKASVSYPFYSSMVDLATTCDALVLCCALNEQTKHIINREVMLALGKQGFIVNVGRGGLIDEKELVKCLMEGEIGGAGLDVFENEPHVPKELLAMNNVVLSPHSAAFTVESMMNLCELMGGNLEAFFLNKPLITPVMLPQ

SEQ ID NO: 5231 - protein, 338 aa, Glycine max
  peptide (1)..(338): Ceres Seq. ID no. 14310360
  misc_feature (122)..(301): Pfam Name: Pfam Description:  D-isomer specific 2-hydroxyacid dehydrogenase
  misc_feature (8)..(335): NCBI GI NO: 7485630 NR Description: probable glycerate dehydrogenase
  misc_feature (15)..(336): NCBI GI NO: 15222015 NR Description: oxidoreductase family [Arabidopsis thaliana]
  misc_feature (36)..(338): NCBI GI NO: 32488421 NR Description: OSJNBb0085F13.11
  misc_feature (34)..(334): NCBI GI NO: 32488422 NR Description: OSJNBb0085F13.12
  misc_feature (66)..(336): NCBI GI NO: 38345308 NR Description: OSJNBb0085F13.13
  misc_feature (61)..(337): NCBI GI NO: 38345306 NR Description: OSJNBb0085F13.6
  misc_feature (36)..(336): NCBI GI NO: 21636166 NR Description: unknown [Aegilops tauschii]
  misc_feature (60)..(335): NCBI GI NO: 15220005 NR Description: oxidoreductase family [Arabidopsis thaliana]
  misc_feature (60)..(335): NCBI GI NO: 34904262 NR Description: putative Caulobacter crescentus D-isomer specific2-hydroxyacid dehydrogenases family
  misc_feature (62)..(335): NCBI GI NO: 15890302 NR Description: AGR_L_379p [Agrobacterium tumefaciens]
MAEEAQNSNSMNALPKVLVLGPPTCFITLQPLYSHKFHFLNPHTSSLSLQHFLHHHHHHHPSSISAVLCGASYSVTANVLCLLPALRLIVTTSAGTDHIDLAECRRRGIQVAGAGELFSEDVADMAVALLADVMRKISAADRYLRTQQNHDTTPWDFFTFGSKLAGKRVEIIGLGSIGMEVAKRLESFGCIILYNSKHKKASVSYPFYSSMVDLATTCDALVLCCALNEQTKHIINREVMLALGKQGFIVNVGRGGLIDEKELVKCLMEGEIGGAGLDVFENEPHVPKELLAMNNVVLSPHSAAFTVESMMNLCELMGGNLEAFFLNKPLITPVMLPQ

SEQ ID NO: 5232 - protein, 328 aa, Glycine max
  peptide (1)..(328): Ceres Seq. ID no. 14310361
  misc_feature (112)..(291): Pfam Name: Pfam Description:  D-isomer specific 2-hydroxyacid dehydrogenase
  misc_feature (1)..(325): NCBI GI NO: 7485630 NR Description: probable glycerate dehydrogenase
  misc_feature (5)..(326): NCBI GI NO: 15222015 NR Description: oxidoreductase family [Arabidopsis thaliana]
  misc_feature (26)..(328): NCBI GI NO: 32488421 NR Description: OSJNBb0085F13.11
  misc_feature (24)..(324): NCBI GI NO: 32488422 NR Description: OSJNBb0085F13.12
  misc_feature (56)..(326): NCBI GI NO: 38345308 NR Description: OSJNBb0085F13.13
  misc_feature (51)..(327): NCBI GI NO: 38345306 NR Description: OSJNBb0085F13.6
  misc_feature (26)..(326): NCBI GI NO: 21636166 NR Description: unknown [Aegilops tauschii]
  misc_feature (50)..(325): NCBI GI NO: 15220005 NR Description: oxidoreductase family [Arabidopsis thaliana]
  misc_feature (50)..(325): NCBI GI NO: 34904262 NR Description: putative Caulobacter crescentus D-isomer specific2-hydroxyacid dehydrogenases family
  misc_feature (52)..(325): NCBI GI NO: 15890302 NR Description: AGR_L_379p [Agrobacterium tumefaciens]
MNALPKVLVLGPPTCFITLQPLYSHKFHFLNPHTSSLSLQHFLHHHHHHHPSSISAVLCGASYSVTANVLCLLPALRLIVTTSAGTDHIDLAECRRRGIQVAGAGELFSEDVADMAVALLADVMRKISAADRYLRTQQNHDTTPWDFFTFGSKLAGKRVEIIGLGSIGMEVAKRLESFGCIILYNSKHKKASVSYPFYSSMVDLATTCDALVLCCALNEQTKHIINREVMLALGKQGFIVNVGRGGLIDEKELVKCLMEGEIGGAGLDVFENEPHVPKELLAMNNVVLSPHSAAFTVESMMNLCELMGGNLEAFFLNKPLITPVMLPQ

SEQ ID NO: 5233 - DNA, 1232 bp, Glycine max
  misc_feature (1)..(1232): Ceres Seq. ID no. 14314172
gagccgaaaaccattcatataattcgtggttccgctgaagccccgtttcatagatacttttctcatttggtgtatctgctaagcctatataccttcaggagatttcactctgctccccaaccccctttcctcttctattgattactacttattttcaagggatcaatacaatataatggttcaaacatgctaacggtgtatgctcccagagcagttctaaagtgccatttacaccaggattcagcttcttctcaacaaccatattcatatccatgcaagatcaataataatgttcatttggtgaattgtaatcctaaaccttttggcactccttgtactaatatatcgtttcatagttcctccttctctgggaaatgtgataagctacaaaagagccttcatctattccatcatgttgccacacataaatggctgtgtggattacaggattccatttcatctgatgatgagtatcgttcttcacgcaacatagccatcagcttgttcaggcgatacaggaacttcattgatcgtggtggaggggacaatctaaaagagttcatcactgccggggtaaatgcatatgcgctaggatgcactgatgaaggattaaggaaagaacttgtggatatgaagaattctgggatcgaaattgatgtaatgcaaagttatggtggaagcacaagcttaaaatctaagatcatctcagaggaggttgatgaatgcattctctggctaagcattatattcatcaccatcttgtgtacaccccaaccaactattgttagatggtcatctacaactccagtctcagatgaagttagacttcagtggaaaggcttttgtgctcttatagcaaatgcatattttatgaagggaatggcttggcttcctgtaaagactcttcaattagaacagacggctgtgatgggtcaggctgagaaaccgtcagttgttgctagccgaatgcgtttagtctttagcacacttgaggtagtgagtccacagtggccaagagcatagaccatgggatcatgttaaaactggctctcaatcatttcacgttgagttgtattccatatttgctaacaaatgtagcaatatcatgccagagaggatattaaaaaggaaagaaaagaaaaaactggatttctattttgtatgttatcaaagtgagacattatatattgcaattttagtgctatactaagttagaggaaggctaattatcg

SEQ ID NO: 5234 - protein, 278 aa, Glycine max
  peptide (1)..(278): Ceres Seq. ID no. 14314173
  misc_feature (38)..(277): NCBI GI NO: 15220740 NR Description: expressed protein [Arabidopsis thaliana]
  misc_feature (1)..(277): NCBI GI NO: 30017575 NR Description: unknown protein
MLTVYAPRAVLKCHLHQDSASSQQPYSYPCKINNNVHLVNCNPKPFGTPCTNISFHSSSFSGKCDKLQKSLHLFHHVATHKWLCGLQDSISSDDEYRSSRNIAISLFRRYRNFIDRGGGDNLKEFITAGVNAYALGCTDEGLRKELVDMKNSGIEIDVMQSYGGSTSLKSKIISEEVDECILWLSIIFITILCTPQPTIVRWSSTTPVSDEVRLQWKGFCALIANAYFMKGMAWLPVKTLQLEQTAVMGQAEKPSVVASRMRLVFSTLEVVSPQWPRA

SEQ ID NO: 5235 - DNA, 1207 bp, Glycine max
  misc_feature (1)..(1207): Ceres Seq. ID no. 14307111
gcgccaaagcaaagatgaatgaagcggaggagcaactttgcgaggcggccagaaaaggtgacacggagaaagtgaggtctctcatagactccggcgctgacgtcagccacttcgacggcgagggcctcaatcctctgatgcacgccgcaaagcacggccatgcacccgtcctcaccctcctcctctccgccggcgctccctggaacgctctttccccctccaacctctccgccggcgactacgccatgcaagaaggccacaacgaagccttcgagcttctcgtcaacgccgggattcaagccgaactgatcctgggaacaattgcgaggaaggaaaacaagaacggcgattccggtcacgattacttggaagacagggtgagttttagcgaagacaagcttatggactctgaaagcaaggctgtgatgatggcgtgggagaatccgttgatggaggctcatgccaaagctgtttgttcgggaggtggccacgtactcaatattgggtttggaatggggctggtggattcggccattcagcgatatgcacctgcttcacacaccattgttgaggctcatcctgaggtttatgaacgcatgcttagctccggttggggtcagaaggaaagtgtcaagattgtttttggacgatggcaagatgttctgcctcagcttgaaacatatgatggaatattctttgacacctatggggagtactacgaagatctgagggagttccatcagcatctccccgcattgttgaagcctggtggtatctactcattcttcaacggtctttgtggcagtaatgcatttttccatgttgtttactgcaatttggtatcccttgagcttgagaatttggggtattccacacaattaattccattgccggttaaggattgtttgggagaacaagtttgggaaggtgtgaaacaaagatattggcagctcgatacgtactatcttcctgtctgtcaggccgtagaggaccctgagtgaggcaggaaatggatttcctgcagcttagaaagaactgcaccatgtgcagttaaaatttcaccgtccatgcaagttttttctcttctttatatattaaaattaaaggaataattgaaatctcatgcagttttttttttaactgtagagaatcttaatcccagtgatgtatgattttatttttaatcacatcgtcaaaatattctaac

SEQ ID NO: 5236 - protein, 332 aa, Glycine max
  peptide (1)..(332): Ceres Seq. ID no. 14307112
  misc_feature (41)..(72): Pfam Name: Pfam Description:  Ankyrin repeat
  misc_feature (5)..(326): NCBI GI NO: 15239183 NR Description: hypothetical protein [Arabidopsis thaliana]
  misc_feature (1)..(332): NCBI GI NO: 14488376 NR Description: putative methyltransferase
  misc_feature (12)..(324): NCBI GI NO: 12644401 NR Description: Hypothetical protein C26A3.17c in chromosome I
  misc_feature (12)..(324): NCBI GI NO: 25777560 NR Description: hypothetical protein SPAC26A3
  misc_feature (121)..(329): NCBI GI NO: 40738857 NR Description: hypothetical protein AN6072.2
  misc_feature (59)..(144): NCBI GI NO: 40738857 NR Description: hypothetical protein AN6072.2
  misc_feature (60)..(324): NCBI GI NO: 19115072 NR Description: hypothetical protein [Schizosaccharomyces pombe]
  misc_feature (121)..(323): NCBI GI NO: 6320673 NR Description: Protein Arginine Methyltransferase
  misc_feature (75)..(298): NCBI GI NO: 32416678 NR Description: hypothetical protein [Neurospora crassa]
  misc_feature (10)..(152): NCBI GI NO: 32416678 NR Description: hypothetical protein [Neurospora crassa]
AKAKMNEAEEQLCEAARKGDTEKVRSLIDSGADVSHFDGEGLNPLMHAAKHGHAPVLTLLLSAGAPWNALSPSNLSAGDYAMQEGHNEAFELLVNAGIQAELILGTIARKENKNGDSGHDYLEDRVSFSEDKLMDSESKAVMMAWENPLMEAHAKAVCSGGGHVLNIGFGMGLVDSAIQRYAPASHTIVEAHPEVYERMLSSGWGQKESVKIVFGRWQDVLPQLETYDGIFFDTYGEYYEDLREFHQHLPALLKPGGIYSFFNGLCGSNAFFHVVYCNLVSLELENLGYSTQLIPLPVKDCLGEQVWEGVKQRYWQLDTYYLPVCQAVEDPE

SEQ ID NO: 5237 - protein, 328 aa, Glycine max
  peptide (1)..(328): Ceres Seq. ID no. 14307113
  misc_feature (37)..(68): Pfam Name: Pfam Description:  Ankyrin repeat
  misc_feature (1)..(322): NCBI GI NO: 15239183 NR Description: hypothetical protein [Arabidopsis thaliana]
  misc_feature (1)..(328): NCBI GI NO: 14488376 NR Description: putative methyltransferase
  misc_feature (8)..(320): NCBI GI NO: 12644401 NR Description: Hypothetical protein C26A3.17c in chromosome I
  misc_feature (8)..(320): NCBI GI NO: 25777560 NR Description: hypothetical protein SPAC26A3
  misc_feature (117)..(325): NCBI GI NO: 40738857 NR Description: hypothetical protein AN6072.2
  misc_feature (55)..(140): NCBI GI NO: 40738857 NR Description: hypothetical protein AN6072.2
  misc_feature (56)..(320): NCBI GI NO: 19115072 NR Description: hypothetical protein [Schizosaccharomyces pombe]
  misc_feature (117)..(319): NCBI GI NO: 6320673 NR Description: Protein Arginine Methyltransferase
  misc_feature (71)..(294): NCBI GI NO: 32416678 NR Description: hypothetical protein [Neurospora crassa]
  misc_feature (6)..(148): NCBI GI NO: 32416678 NR Description: hypothetical protein [Neurospora crassa]
MNEAEEQLCEAARKGDTEKVRSLIDSGADVSHFDGEGLNPLMHAAKHGHAPVLTLLLSAGAPWNALSPSNLSAGDYAMQEGHNEAFELLVNAGIQAELILGTIARKENKNGDSGHDYLEDRVSFSEDKLMDSESKAVMMAWENPLMEAHAKAVCSGGGHVLNIGFGMGLVDSAIQRYAPASHTIVEAHPEVYERMLSSGWGQKESVKIVFGRWQDVLPQLETYDGIFFDTYGEYYEDLREFHQHLPALLKPGGIYSFFNGLCGSNAFFHVVYCNLVSLELENLGYSTQLIPLPVKDCLGEQVWEGVKQRYWQLDTYYLPVCQAVEDPE

SEQ ID NO: 5238 - protein, 287 aa, Glycine max
  peptide (1)..(287): Ceres Seq. ID no. 14307114
  misc_feature (1)..(27): Pfam Name: Pfam Description:  Ankyrin repeat
  misc_feature (1)..(281): NCBI GI NO: 15239183 NR Description: hypothetical protein [Arabidopsis thaliana]
  misc_feature (1)..(287): NCBI GI NO: 14488376 NR Description: putative methyltransferase
  misc_feature (1)..(279): NCBI GI NO: 12644401 NR Description: Hypothetical protein C26A3.17c in chromosome I
  misc_feature (1)..(279): NCBI GI NO: 25777560 NR Description: hypothetical protein SPAC26A3
  misc_feature (76)..(284): NCBI GI NO: 40738857 NR Description: hypothetical protein AN6072.2
  misc_feature (14)..(99): NCBI GI NO: 40738857 NR Description: hypothetical protein AN6072.2
  misc_feature (15)..(279): NCBI GI NO: 19115072 NR Description: hypothetical protein [Schizosaccharomyces pombe]
  misc_feature (76)..(278): NCBI GI NO: 6320673 NR Description: Protein Arginine Methyltransferase
  misc_feature (30)..(253): NCBI GI NO: 32416678 NR Description: hypothetical protein [Neurospora crassa]
  misc_feature (1)..(107): NCBI GI NO: 32416678 NR Description: hypothetical protein [Neurospora crassa]
MHAAKHGHAPVLTLLLSAGAPWNALSPSNLSAGDYAMQEGHNEAFELLVNAGIQAELILGTIARKENKNGDSGHDYLEDRVSFSEDKLMDSESKAVMMAWENPLMEAHAKAVCSGGGHVLNIGFGMGLVDSAIQRYAPASHTIVEAHPEVYERMLSSGWGQKESVKIVFGRWQDVLPQLETYDGIFFDTYGEYYEDLREFHQHLPALLKPGGIYSFFNGLCGSNAFFHVVYCNLVSLELENLGYSTQLIPLPVKDCLGEQVWEGVKQRYWQLDTYYLPVCQAVEDPE

SEQ ID NO: 5239 - DNA, 1299 bp, Glycine max
  misc_feature (1)..(1299): Ceres Seq. ID no. 14311032
gaaaagtacgtgtcccattcttgtcaacaaacgtggcgcgcttcttaacataagcacttgcaatggcggattcagagcgaatccaaaattcgtggatggcttcggatcaaactgcaattgaaatgagcggcgagggcacaggttccagggaatgctcttctctccctccgccgccgcaaaaaccattcaattctgatcaattgggaatcggagaacgagctttctccgccgccggcgccgccttcctctccgccatcattgtcaatcccctcgacgttgccaagacaaggttgcaagcacaagcggcaggggtcgcatattctcatccactcagtaatatgaccagtagaatggcttgttttgggccaaatatgatatttgctgatttaaaatgttctccatcatgccaccgggctggattccagggcacagtgtccatttgtcctcccgagtgttttcgctacaaaggaacactagatgttatctacaaaattataaaacaggagggaatttctaggctatggagaggcacaaatgctggcctggctcttgcagtaccaactgtgggaatataccttccttgctatgacatactccgcaattggttggaggaattcacagctaaaaaggcaccaaccacaactacttatgtacctctagtagctggttcattggcacgctctctagcttgcactacttgctaccctattgaacttgctaaaactcgtatgcaggcatttaaagagactcaaattggtaaaaagcctcctggagtgatccagactctgctaggtgttgtttcaaatgtcaagagcacaaacactccacagaacagcttgcaaggttatcgtgttttgtggactggcatgggagctcaacttgcccgtgatgtacccttctctgctatttgttggtcgacacttgaaccgactagaagaaaacttcttggtttgattggaggtgatgatgccaatgcattgagtgttcttggggcaaattttggagctgggtttgttgcaggaaccttagcagctggagccacatgtccgctagatgttgtaaaaactcgaaggcagatagagagggatcctgttagggcattgaaaatgactacaagacagacactgatggaggtgtggagagatggaggcttgaaaggattgtttacaggtgttggtccacgagttggtcgagcaggcccctctgttggaattgtgatttcattttatgaagttgtaaagtttgttctacatcatcagtacacataatcatgattttctgcacactttttttgctgcc

SEQ ID NO: 5240 - protein, 401 aa, Glycine max
  peptide (1)..(401): Ceres Seq. ID no. 14311033
  misc_feature (1)..(397): NCBI GI NO: 18417093 NR Description: mitochondrial carrier protein family
  misc_feature (23)..(400): NCBI GI NO: 40253478 NR Description: putative mitochondrial carrier protein
  misc_feature (37)..(399): NCBI GI NO: 30690323 NR Description: mitochondrial carrier protein family
  misc_feature (37)..(399): NCBI GI NO: 19310377 NR Description: At2g46320/F11C10.1 [Arabidopsis thaliana]
  misc_feature (37)..(399): NCBI GI NO: 25408981 NR Description: hypothetical protein At2g46320
  misc_feature (127)..(400): NCBI GI NO: 34904154 NR Description: P0417G05.20
  misc_feature (147)..(399): NCBI GI NO: 30690327 NR Description: mitochondrial carrier protein family
  misc_feature (88)..(340): NCBI GI NO: 7486963 NR Description: hypothetical protein T13J8
  misc_feature (20)..(150): NCBI GI NO: 7486963 NR Description: hypothetical protein T13J8
  misc_feature (44)..(395): NCBI GI NO: 6321696 NR Description: Hypothetical ORF; Ygr257cp
MADSERIQNSWMASDQTAIEMSGEGTGSRECSSLPPPPQKPFNSDQLGIGERAFSAAGAAFLSAIIVNPLDVAKTRLQAQAAGVAYSHPLSNMTSRMACFGPNMIFADLKCSPSCHRAGFQGTVSICPPECFRYKGTLDVIYKIIKQEGISRLWRGTNAGLALAVPTVGIYLPCYDILRNWLEEFTAKKAPTTTTYVPLVAGSLARSLACTTCYPIELAKTRMQAFKETQIGKKPPGVIQTLLGVVSNVKSTNTPQNSLQGYRVLWTGMGAQLARDVPFSAICWSTLEPTRRKLLGLIGGDDANALSVLGANFGAGFVAGTLAAGATCPLDVVKTRRQIERDPVRALKMTTRQTLMEVWRDGGLKGLFTGVGPRVGRAGPSVGIVISFYEVVKFVLHHQYT

SEQ ID NO: 5241 - protein, 390 aa, Glycine max
  peptide (1)..(390): Ceres Seq. ID no. 14311034
  misc_feature (1)..(386): NCBI GI NO: 18417093 NR Description: mitochondrial carrier protein family
  misc_feature (12)..(389): NCBI GI NO: 40253478 NR Description: putative mitochondrial carrier protein
  misc_feature (26)..(388): NCBI GI NO: 30690323 NR Description: mitochondrial carrier protein family
  misc_feature (26)..(388): NCBI GI NO: 19310377 NR Description: At2g46320/F11C10.1 [Arabidopsis thaliana]
  misc_feature (26)..(388): NCBI GI NO: 25408981 NR Description: hypothetical protein At2g46320
  misc_feature (116)..(389): NCBI GI NO: 34904154 NR Description: P0417G05.20
  misc_feature (136)..(388): NCBI GI NO: 30690327 NR Description: mitochondrial carrier protein family
  misc_feature (77)..(329): NCBI GI NO: 7486963 NR Description: hypothetical protein T13J8
  misc_feature (9)..(139): NCBI GI NO: 7486963 NR Description: hypothetical protein T13J8
  misc_feature (33)..(384): NCBI GI NO: 6321696 NR Description: Hypothetical ORF; Ygr257cp
MASDQTAIEMSGEGTGSRECSSLPPPPQKPFNSDQLGIGERAFSAAGAAFLSAIIVNPLDVAKTRLQAQAAGVAYSHPLSNMTSRMACFGPNMIFADLKCSPSCHRAGFQGTVSICPPECFRYKGTLDVIYKIIKQEGISRLWRGTNAGLALAVPTVGIYLPCYDILRNWLEEFTAKKAPTTTTYVPLVAGSLARSLACTTCYPIELAKTRMQAFKETQIGKKPPGVIQTLLGVVSNVKSTNTPQNSLQGYRVLWTGMGAQLARDVPFSAICWSTLEPTRRKLLGLIGGDDANALSVLGANFGAGFVAGTLAAGATCPLDVVKTRRQIERDPVRALKMTTRQTLMEVWRDGGLKGLFTGVGPRVGRAGPSVGIVISFYEVVKFVLHHQYT

SEQ ID NO: 5242 - protein, 381 aa, Glycine max
  peptide (1)..(381): Ceres Seq. ID no. 14311035
  misc_feature (1)..(377): NCBI GI NO: 18417093 NR Description: mitochondrial carrier protein family
  misc_feature (3)..(380): NCBI GI NO: 40253478 NR Description: putative mitochondrial carrier protein
  misc_feature (17)..(379): NCBI GI NO: 30690323 NR Description: mitochondrial carrier protein family
  misc_feature (17)..(379): NCBI GI NO: 19310377 NR Description: At2g46320/F11C10.1 [Arabidopsis thaliana]
  misc_feature (17)..(379): NCBI GI NO: 25408981 NR Description: hypothetical protein At2g46320
  misc_feature (107)..(380): NCBI GI NO: 34904154 NR Description: P0417G05.20
  misc_feature (127)..(379): NCBI GI NO: 30690327 NR Description: mitochondrial carrier protein family
  misc_feature (68)..(320): NCBI GI NO: 7486963 NR Description: hypothetical protein T13J8
  misc_feature (1)..(130): NCBI GI NO: 7486963 NR Description: hypothetical protein T13J8
  misc_feature (24)..(375): NCBI GI NO: 6321696 NR Description: Hypothetical ORF; Ygr257cp
MSGEGTGSRECSSLPPPPQKPFNSDQLGIGERAFSAAGAAFLSAIIVNPLDVAKTRLQAQAAGVAYSHPLSNMTSRMACFGPNMIFADLKCSPSCHRAGFQGTVSICPPECFRYKGTLDVIYKIIKQEGISRLWRGTNAGLALAVPTVGIYLPCYDILRNWLEEFTAKKAPTTTTYVPLVAGSLARSLACTTCYPIELAKTRMQAFKETQIGKKPPGVIQTLLGVVSNVKSTNTPQNSLQGYRVLWTGMGAQLARDVPFSAICWSTLEPTRRKLLGLIGGDDANALSVLGANFGAGFVAGTLAAGATCPLDVVKTRRQIERDPVRALKMTTRQTLMEVWRDGGLKGLFTGVGPRVGRAGPSVGIVISFYEVVKFVLHHQYT

SEQ ID NO: 5243 - DNA, 1836 bp, Glycine max
  misc_feature (1)..(1836): Ceres Seq. ID no. 15174547
agaatcagataagtgttggtttgtttttttgttgagaagagagaatggctgtggcgtcgtcatcatcccttatcacgttgaaggtgaaaccttgcattttcgggtctcctcggagatccgcggtggttcggaattgtgcgaagtcaacggcggggacaatatcgacgagttggagcctggacagctggagggcgaagaaggcgcttcagcttccggagtacccagatgcgaatgaattggacctagtcctccaaaccctctcttcttttcccccaatcgtcttcgccggcgaggcgaggaatctggaggagaagctcgctcaggctgccatggggaacgcttttctccttcagggcggtgattgcgccgagagcttcaaggaattcactgccaacaacatccgtgacaccttccgtgtcatccttcaaatgggtgtggtcctcatgttcggtggccaaatgcccgttatcaaggtggggagaatggcaggtcaatttgcaaagccgagatccgattcatttgaggagaagaatggagtgacgctcccgagttacaggggtgataatgtgaatggcgatgcatttgacgcggcatctagaatccccgatccacagaggatgataagagcctactgccaatctgtgtctactctgaaccttttgcgggcatttgccacgggaggttatgctgccatgcaaagggttaatcaatggaatcttgatttcatggagcatagtgaacagggagacaggtaccgtgaattagcccatagagtggatgaggctcttggcttcatgaatgttgctgggctcacagccgaccatcccatcatgagtacaacagacttttggacctcccatgagtgtttgcttctcccttatgagcaagcacttactagggaggattctactactgggcttcattatgattgctcagctcacatgctatgggttggggaacgtacccgccaacttgatggtgctcatgttgaattcttgagaggagttgctaatccacttggcatcaaggtgagtgataagatggttcccgatgaacttgttaagctgatagatattctgaaccctaaaaacaagcctggaagaattacagtcattgttagaatgggagctgagaatatgcgagtgaagcttccacatcttatcagggcagttcgcagagcaggtcaaattgtcacttgggttagtgaccccatgcatgggaacaccattaaagctccatctggacttaaaacccgctcttttgatgcaataagggctgagctgagggcattctttgatgtgcatgatcaagaaggaagctacccaggaggggttcatttagagatgacagggcagaacgtgacagaatgtgttggaggctcaaggactattacttatgatgacttgagctcacgctaccacacacattgtgatccaaggcttaatgcttctcaatctctcgagcttgcatttaatattgcggacaggttgcgcaagagaaggctcaattcaactcgatcacttggaatttagacaagagggggtctgtcttcctttgtacctggatcacaatactggtcaaacatgtgttgagttttcttgagcacagtgaacaaatactctactgggagccactctaccgagtttcataagaacttaaaatagtcggcacaattaatagttgtgctgtatgagtgttacaagacagttcaaaacactgcaggtgtatgtacttgcaagtttgcacttttaagtttggagatagtacgtgtgtagtatttatgctcgactcgagtaaatgagtaataaataaagtttcaaggtacaacttacatcg

SEQ ID NO: 5244 - protein, 495 aa, Glycine max
  peptide (1)..(495): Ceres Seq. ID no. 15174548
  misc_feature (43)..(479): Pfam Name: Pfam Description:  Class-II DAHP synthetase family
  misc_feature (33)..(489): NCBI GI NO: 15234217 NR Description: 2-dehydro-3-deoxyphosphoheptonate aldolase
  misc_feature (33)..(489): NCBI GI NO: 166690 NR Description: 3-deoxy-D-arabino-heptulosonate 7-phosphatesynthase
  misc_feature (33)..(489): NCBI GI NO: 21593248 NR Description: 2-dehydro-3-deoxyphosphoheptonate aldolase
  misc_feature (43)..(493): NCBI GI NO: 2398679 NR Description: 3-deoxy-D-arabino-heptulosonate 7-phosphatesynthase
  misc_feature (2)..(494): NCBI GI NO: 584778 NR Description: Phospho-2-dehydro-3-deoxyheptonate aldolase 2
  misc_feature (16)..(486): NCBI GI NO: 2398681 NR Description: 3-deoxy-D-arabino-heptulosonate 7-phosphatesynthase
  misc_feature (15)..(494): NCBI GI NO: 114193 NR Description: Phospho-2-dehydro-3-deoxyheptonate aldolase 1
  misc_feature (2)..(489): NCBI GI NO: 584777 NR Description: Phospho-2-dehydro-3-deoxyheptonate aldolase 1
  misc_feature (2)..(489): NCBI GI NO: 24745903 NR Description: 3-deoxy-D-arabino-heptulosonate 7-phosphatesynthase
  misc_feature (43)..(489): NCBI GI NO: 34906844 NR Description: putative phospho-2-dehydro-3-deoxyheptonatealdolase 1
MAVASSSSLITLKVKPCIFGSPRRSAVVRNCAKSTAGTISTSWSLDSWRAKKALQLPEYPDANELDLVLQTLSSFPPIVFAGEARNLEEKLAQAAMGNAFLLQGGDCAESFKEFTANNIRDTFRVILQMGVVLMFGGQMPVIKVGRMAGQFAKPRSDSFEEKNGVTLPSYRGDNVNGDAFDAASRIPDPQRMIRAYCQSVSTLNLLRAFATGGYAAMQRVNQWNLDFMEHSEQGDRYRELAHRVDEALGFMNVAGLTADHPIMSTTDFWTSHECLLLPYEQALTREDSTTGLHYDCSAHMLWVGERTRQLDGAHVEFLRGVANPLGIKVSDKMVPDELVKLIDILNPKNKPGRITVIVRMGAENMRVKLPHLIRAVRRAGQIVTWVSDPMHGNTIKAPSGLKTRSFDAIRAELRAFFDVHDQEGSYPGGVHLEMTGQNVTECVGGSRTITYDDLSSRYHTHCDPRLNASQSLELAFNIADRLRKRRLNSTRSLGI

SEQ ID NO: 5245 - protein, 400 aa, Glycine max
  peptide (1)..(400): Ceres Seq. ID no. 15174549
  misc_feature (1)..(384): Pfam Name: Pfam Description:  Class-II DAHP synthetase family
  misc_feature (1)..(394): NCBI GI NO: 15234217 NR Description: 2-dehydro-3-deoxyphosphoheptonate aldolase
  misc_feature (1)..(394): NCBI GI NO: 166690 NR Description: 3-deoxy-D-arabino-heptulosonate 7-phosphatesynthase
  misc_feature (1)..(394): NCBI GI NO: 21593248 NR Description: 2-dehydro-3-deoxyphosphoheptonate aldolase
  misc_feature (1)..(398): NCBI GI NO: 2398679 NR Description: 3-deoxy-D-arabino-heptulosonate 7-phosphatesynthase
  misc_feature (1)..(399): NCBI GI NO: 584778 NR Description: Phospho-2-dehydro-3-deoxyheptonate aldolase 2
  misc_feature (1)..(391): NCBI GI NO: 2398681 NR Description: 3-deoxy-D-arabino-heptulosonate 7-phosphatesynthase
  misc_feature (1)..(399): NCBI GI NO: 114193 NR Description: Phospho-2-dehydro-3-deoxyheptonate aldolase 1
  misc_feature (1)..(394): NCBI GI NO: 584777 NR Description: Phospho-2-dehydro-3-deoxyheptonate aldolase 1
  misc_feature (1)..(394): NCBI GI NO: 24745903 NR Description: 3-deoxy-D-arabino-heptulosonate 7-phosphatesynthase
  misc_feature (1)..(394): NCBI GI NO: 34906844 NR Description: putative phospho-2-dehydro-3-deoxyheptonatealdolase 1
MGNAFLLQGGDCAESFKEFTANNIRDTFRVILQMGVVLMFGGQMPVIKVGRMAGQFAKPRSDSFEEKNGVTLPSYRGDNVNGDAFDAASRIPDPQRMIRAYCQSVSTLNLLRAFATGGYAAMQRVNQWNLDFMEHSEQGDRYRELAHRVDEALGFMNVAGLTADHPIMSTTDFWTSHECLLLPYEQALTREDSTTGLHYDCSAHMLWVGERTRQLDGAHVEFLRGVANPLGIKVSDKMVPDELVKLIDILNPKNKPGRITVIVRMGAENMRVKLPHLIRAVRRAGQIVTWVSDPMHGNTIKAPSGLKTRSFDAIRAELRAFFDVHDQEGSYPGGVHLEMTGQNVTECVGGSRTITYDDLSSRYHTHCDPRLNASQSLELAFNIADRLRKRRLNSTRSLGI

SEQ ID NO: 5246 - protein, 367 aa, Glycine max
  peptide (1)..(367): Ceres Seq. ID no. 15174550
  misc_feature (1)..(351): Pfam Name: Pfam Description:  Class-II DAHP synthetase family
  misc_feature (1)..(361): NCBI GI NO: 15234217 NR Description: 2-dehydro-3-deoxyphosphoheptonate aldolase
  misc_feature (1)..(361): NCBI GI NO: 166690 NR Description: 3-deoxy-D-arabino-heptulosonate 7-phosphatesynthase
  misc_feature (1)..(361): NCBI GI NO: 21593248 NR Description: 2-dehydro-3-deoxyphosphoheptonate aldolase
  misc_feature (1)..(365): NCBI GI NO: 2398679 NR Description: 3-deoxy-D-arabino-heptulosonate 7-phosphatesynthase
  misc_feature (1)..(366): NCBI GI NO: 584778 NR Description: Phospho-2-dehydro-3-deoxyheptonate aldolase 2
  misc_feature (1)..(358): NCBI GI NO: 2398681 NR Description: 3-deoxy-D-arabino-heptulosonate 7-phosphatesynthase
  misc_feature (1)..(366): NCBI GI NO: 114193 NR Description: Phospho-2-dehydro-3-deoxyheptonate aldolase 1
  misc_feature (1)..(361): NCBI GI NO: 584777 NR Description: Phospho-2-dehydro-3-deoxyheptonate aldolase 1
  misc_feature (1)..(361): NCBI GI NO: 24745903 NR Description: 3-deoxy-D-arabino-heptulosonate 7-phosphatesynthase
  misc_feature (1)..(361): NCBI GI NO: 34906844 NR Description: putative phospho-2-dehydro-3-deoxyheptonatealdolase 1
MGVVLMFGGQMPVIKVGRMAGQFAKPRSDSFEEKNGVTLPSYRGDNVNGDAFDAASRIPDPQRMIRAYCQSVSTLNLLRAFATGGYAAMQRVNQWNLDFMEHSEQGDRYRELAHRVDEALGFMNVAGLTADHPIMSTTDFWTSHECLLLPYEQALTREDSTTGLHYDCSAHMLWVGERTRQLDGAHVEFLRGVANPLGIKVSDKMVPDELVKLIDILNPKNKPGRITVIVRMGAENMRVKLPHLIRAVRRAGQIVTWVSDPMHGNTIKAPSGLKTRSFDAIRAELRAFFDVHDQEGSYPGGVHLEMTGQNVTECVGGSRTITYDDLSSRYHTHCDPRLNASQSLELAFNIADRLRKRRLNSTRSLGI

SEQ ID NO: 5247 - DNA, 1219 bp, Glycine max
  misc_feature (1)..(1219): Ceres Seq. ID no. 14303955
gttcaacacgttacaataatggcccatttttctctctcccctctctcctgtgcaccttctcctctaccaccacgccgccgaatctttctctctcctcctcgagccgccgcatcttccgccaccgacgtcgtttccacttccacttccacttcattttctgcttcgaatttcgcgcccaaagtcgttgtcaccagagagcgcggcaagaacgccaagcttatcgctgctctggctaaacatgaaatcaattgtttggagcttccactcattgagcacatgcaaggacctgatttagataggcttccttctgtattaggtgacaatgcatttgattgggttgtgataacgtctcctgaggcaggctcagtctttctagaggcatggagagcttctgggatgcctcatgtcaaaataggtgttgttggggctggcactgcaagcattttcaaggaagctttgcagtcttccaaccgatcccttgatattgcctttgtgccatcaaaagcaacaggaaaggttttggctactgagcttcctaagattggaagtaaatgcacggttctctatcctgcttctgcaaaggctagtaatgagattgaggaaggactttcaaatcgtggatttgaggttactaggatgaatacatatacaacggtgccagttcaacatgttgaccatacggttctaaagatagcacttgctgcccctgttgttacagtagcttcaccatcttctattcgggcctggaagaatcttctttcagattcagagtggaacaattctgttgcgtgcattggtgagacaactgctacaatggcaagaagtttaggtttcacaaatgtgtacttcccaacacaaccaggcatcgaaggctgggtcgagagcattcttgaagcattagggttcctatgatgaattattgaggtaggtctcaggctctcagccctctgtagcaacctggagatgttttcaactttttctcatgctgcaagattaatataatgatttggcaccgtggatgtatatactttctctgttctgtagtatttttaaggataaatttagcttcaataaattaaggagagtgtagtgtatattaggaaataaagtgcacttatagtcattgattaaaatatcaatagttgagattgtaattaattcccaattttgttatacgggcacttgttttttaatcacaaactctaatcattaacttttt

SEQ ID NO: 5248 - protein, 303 aa, Glycine max
  peptide (1)..(303): Ceres Seq. ID no. 14303956
  misc_feature (68)..(295): Pfam Name: Pfam Description:  Uroporphyrinogen-III synthase HemD
  misc_feature (28)..(301): NCBI GI NO: 18401160 NR Description: expressed protein [Arabidopsis thaliana]
  misc_feature (28)..(301): NCBI GI NO: 18694346 NR Description: uroporphyrinogen III synthase
  misc_feature (28)..(301): NCBI GI NO: 21592861 NR Description: uroporphyrinogen III synthase
  misc_feature (124)..(301): NCBI GI NO: 22045244 NR Description: unknown protein [Arabidopsis thaliana]
  misc_feature (153)..(301): NCBI GI NO: 7487883 NR Description: hypothetical protein At2g26540
  misc_feature (68)..(300): NCBI GI NO: 15805812 NR Description: uroporphyrinogen-III synthase, putative
VQHVTIMAHFSLSPLSCAPSPLPPRRRIFLSPPRAAASSATDVVSTSTSTSFSASNFAPKVVVTRERGKNAKLIAALAKHEINCLELPLIEHMQGPDLDRLPSVLGDNAFDWVVITSPEAGSVFLEAWRASGMPHVKIGVVGAGTASIFKEALQSSNRSLDIAFVPSKATGKVLATELPKIGSKCTVLYPASAKASNEIEEGLSNRGFEVTRMNTYTTVPVQHVDHTVLKIALAAPVVTVASPSSIRAWKNLLSDSEWNNSVACIGETTATMARSLGFTNVYFPTQPGIEGWVESILEALGFL

SEQ ID NO: 5249 - protein, 297 aa, Glycine max
  peptide (1)..(297): Ceres Seq. ID no. 14303957
  misc_feature (62)..(289): Pfam Name: Pfam Description:  Uroporphyrinogen-III synthase HemD
  misc_feature (22)..(295): NCBI GI NO: 18401160 NR Description: expressed protein [Arabidopsis thaliana]
  misc_feature (22)..(295): NCBI GI NO: 18694346 NR Description: uroporphyrinogen III synthase
  misc_feature (22)..(295): NCBI GI NO: 21592861 NR Description: uroporphyrinogen III synthase
  misc_feature (118)..(295): NCBI GI NO: 22045244 NR Description: unknown protein [Arabidopsis thaliana]
  misc_feature (147)..(295): NCBI GI NO: 7487883 NR Description: hypothetical protein At2g26540
  misc_feature (62)..(294): NCBI GI NO: 15805812 NR Description: uroporphyrinogen-III synthase, putative
MAHFSLSPLSCAPSPLPPRRRIFLSPPRAAASSATDVVSTSTSTSFSASNFAPKVVVTRERGKNAKLIAALAKHEINCLELPLIEHMQGPDLDRLPSVLGDNAFDWVVITSPEAGSVFLEAWRASGMPHVKIGVVGAGTASIFKEALQSSNRSLDIAFVPSKATGKVLATELPKIGSKCTVLYPASAKASNEIEEGLSNRGFEVTRMNTYTTVPVQHVDHTVLKIALAAPVVTVASPSSIRAWKNLLSDSEWNNSVACIGETTATMARSLGFTNVYFPTQPGIEGWVESILEALGFL

SEQ ID NO: 5250 - protein, 211 aa, Glycine max
  peptide (1)..(211): Ceres Seq. ID no. 14303958
  misc_feature (1)..(203): Pfam Name: Pfam Description:  Uroporphyrinogen-III synthase HemD
  misc_feature (1)..(209): NCBI GI NO: 18401160 NR Description: expressed protein [Arabidopsis thaliana]
  misc_feature (1)..(209): NCBI GI NO: 18694346 NR Description: uroporphyrinogen III synthase
  misc_feature (1)..(209): NCBI GI NO: 21592861 NR Description: uroporphyrinogen III synthase
  misc_feature (32)..(209): NCBI GI NO: 22045244 NR Description: unknown protein [Arabidopsis thaliana]
  misc_feature (61)..(209): NCBI GI NO: 7487883 NR Description: hypothetical protein At2g26540
  misc_feature (1)..(208): NCBI GI NO: 15805812 NR Description: uroporphyrinogen-III synthase, putative
MQGPDLDRLPSVLGDNAFDWVVITSPEAGSVFLEAWRASGMPHVKIGVVGAGTASIFKEALQSSNRSLDIAFVPSKATGKVLATELPKIGSKCTVLYPASAKASNEIEEGLSNRGFEVTRMNTYTTVPVQHVDHTVLKIALAAPVVTVASPSSIRAWKNLLSDSEWNNSVACIGETTATMARSLGFTNVYFPTQPGIEGWVESILEALGFL

SEQ ID NO: 5251 - DNA, 1623 bp, Glycine max
  misc_feature (1)..(1623): Ceres Seq. ID no. 15170288
aataattaaatctttaatccgagcatttcattttgatatttcatcattcccatggctaaacatgatgattgcggtcgtatgattgacactaagggtggacaatccttcgaaattgaaatgaaaggaagccctgctactcctactcctgctgctacacaagatagtttcaaaggtggagtcaaaatccaacaatcttccaacgtacaagcttcctttactcttttcaaaagtttccttggtaccggagtcctagcactcccttatgcttataaaactgccggccttggtctctctttgattgttctcataatcgtttctgcaatgactactcgttgcttctctttacttctcgatgtagcagctcaaagaatcggaactggcaaaatctcactccagaaactcactcaagatgtcttgggaaccaagggaaaatatgcagtccaagcttcaatcatgatcatgcaattgggatgttgtattggtattttgatctttactagagatttcttgaaccatatcctttgtgaatttggtatcagctctctctgtaacaatacccttttcaatgtcctcttttgcttggctctgactgtccctttgactttgatcaacaatatgcattatttctacatcccaagtcttgctgccaacttctttatcttggtcggacttgccgctcaaatgttttacaacactcaagtcttacaagataaccctgaactcagatcaactttaggcactcatcttaaagaattcaactggaaagatttacctctcttctttggtattgctacatatgcctttgaaggtgttggtattatcttcagtatcagaagctcaatggaaaagccccaagactttaaattcctcttaaagaatcaaatgttgatccttactttgatctatgtcatcttccctactttctgctatattgctttggatgacagattaacagatattattttctttactctccctactgatgatcctttctaccttttaatccaaatcttttatgctatctctgctcttttatcattccccgttcagttcttccctgctattcgtatcatggaaaactccaaaattatgagatatagactctttaatgaaagaggaaaatgcaataataaacccctcagatatggaatgagaatggctgttattggtgtggtctttcttgttgcttataccgcgaccagtttccatcttttcttaaacttgctgggatcttgtgtattcacttttgttggatttatcttgccagtctggatctattctgtccatttcaagggaaagaccggcatcgcgaaaagacttatcaattatacaatgcttactgttgctgtcgtctttggagcagctggttttgttatgtcaatcatggaaatggttaacaaaagctctgaagatgttgcaactctctaaagtaaaattttttcttaactgactcattctatgaaaactctgtacttttttaactgtagtcaaagttgtaaattatatttgtgtaattgattgtatgtctttttaataaaaaacctctccttggatatgtctataatctgatccccgtatctaaataacttacaaaaataatgccatatcatttaaaatttactc

SEQ ID NO: 5252 - protein, 458 aa, Glycine max
  peptide (1)..(458): Ceres Seq. ID no. 15170289
  misc_feature (53)..(362): Pfam Name: Pfam Description:  Transmembrane amino acid transporter protein
  misc_feature (47)..(438): NCBI GI NO: 6322702 NR Description: related to the neuronal gamma -aminobutyric acid-glycine vesicular transporters
  misc_feature (53)..(431): NCBI GI NO: 40741630 NR Description: hypothetical protein AN4477.2
  misc_feature (48)..(415): NCBI GI NO: 40742375 NR Description: hypothetical protein AN7777.2
  misc_feature (29)..(436): NCBI GI NO: 32404942 NR Description: hypothetical protein
  misc_feature (43)..(362): NCBI GI NO: 18913080 NR Description: Tap1p [Tetrahymena thermophila]
  misc_feature (41)..(431): NCBI GI NO: 19114463 NR Description: putative amino acid transpoter
  misc_feature (48)..(449): NCBI GI NO: 31220680 NR Description: ENSANGP00000019274 [Anopheles gambiae]
  misc_feature (55)..(434): NCBI GI NO: 32410299 NR Description: hypothetical protein [Neurospora crassa]
  misc_feature (48)..(343): NCBI GI NO: 6324228 NR Description: related to the neuronal gamma -aminobutyric acid-glycine vesicular transporters
  misc_feature (8)..(450): NCBI GI NO: 24642715 NR Description: CG4991-PA [Drosophila melanogaster]
MAKHDDCGRMIDTKGGQSFEIEMKGSPATPTPAATQDSFKGGVKIQQSSNVQASFTLFKSFLGTGVLALPYAYKTAGLGLSLIVLIIVSAMTTRCFSLLLDVAAQRIGTGKISLQKLTQDVLGTKGKYAVQASIMIMQLGCCIGILIFTRDFLNHILCEFGISSLCNNTLFNVLFCLALTVPLTLINNMHYFYIPSLAANFFILVGLAAQMFYNTQVLQDNPELRSTLGTHLKEFNWKDLPLFFGIATYAFEGVGIIFSIRSSMEKPQDFKFLLKNQMLILTLIYVIFPTFCYIALDDRLTDIIFFTLPTDDPFYLLIQIFYAISALLSFPVQFFPAIRIMENSKIMRYRLFNERGKCNNKPLRYGMRMAVIGVVFLVAYTATSFHLFLNLLGSCVFTFVGFILPVWIYSVHFKGKTGIAKRLINYTMLTVAVVFGAAGFVMSIMEMVNKSSEDVATL

SEQ ID NO: 5253 - protein, 449 aa, Glycine max
  peptide (1)..(449): Ceres Seq. ID no. 15170290
  misc_feature (44)..(353): Pfam Name: Pfam Description:  Transmembrane amino acid transporter protein
  misc_feature (38)..(429): NCBI GI NO: 6322702 NR Description: related to the neuronal gamma -aminobutyric acid-glycine vesicular transporters
  misc_feature (44)..(422): NCBI GI NO: 40741630 NR Description: hypothetical protein AN4477.2
  misc_feature (39)..(406): NCBI GI NO: 40742375 NR Description: hypothetical protein AN7777.2
  misc_feature (20)..(427): NCBI GI NO: 32404942 NR Description: hypothetical protein
  misc_feature (34)..(353): NCBI GI NO: 18913080 NR Description: Tap1p [Tetrahymena thermophila]
  misc_feature (32)..(422): NCBI GI NO: 19114463 NR Description: putative amino acid transpoter
  misc_feature (39)..(440): NCBI GI NO: 31220680 NR Description: ENSANGP00000019274 [Anopheles gambiae]
  misc_feature (46)..(425): NCBI GI NO: 32410299 NR Description: hypothetical protein [Neurospora crassa]
  misc_feature (39)..(334): NCBI GI NO: 6324228 NR Description: related to the neuronal gamma -aminobutyric acid-glycine vesicular transporters
  misc_feature (1)..(441): NCBI GI NO: 24642715 NR Description: CG4991-PA [Drosophila melanogaster]
MIDTKGGQSFEIEMKGSPATPTPAATQDSFKGGVKIQQSSNVQASFTLFKSFLGTGVLALPYAYKTAGLGLSLIVLIIVSAMTTRCFSLLLDVAAQRIGTGKISLQKLTQDVLGTKGKYAVQASIMIMQLGCCIGILIFTRDFLNHILCEFGISSLCNNTLFNVLFCLALTVPLTLINNMHYFYIPSLAANFFILVGLAAQMFYNTQVLQDNPELRSTLGTHLKEFNWKDLPLFFGIATYAFEGVGIIFSIRSSMEKPQDFKFLLKNQMLILTLIYVIFPTFCYIALDDRLTDIIFFTLPTDDPFYLLIQIFYAISALLSFPVQFFPAIRIMENSKIMRYRLFNERGKCNNKPLRYGMRMAVIGVVFLVAYTATSFHLFLNLLGSCVFTFVGFILPVWIYSVHFKGKTGIAKRLINYTMLTVAVVFGAAGFVMSIMEMVNKSSEDVATL

SEQ ID NO: 5254 - protein, 436 aa, Glycine max
  peptide (1)..(436): Ceres Seq. ID no. 15170291
  misc_feature (31)..(340): Pfam Name: Pfam Description:  Transmembrane amino acid transporter protein
  misc_feature (25)..(416): NCBI GI NO: 6322702 NR Description: related to the neuronal gamma -aminobutyric acid-glycine vesicular transporters
  misc_feature (31)..(409): NCBI GI NO: 40741630 NR Description: hypothetical protein AN4477.2
  misc_feature (26)..(393): NCBI GI NO: 40742375 NR Description: hypothetical protein AN7777.2
  misc_feature (7)..(414): NCBI GI NO: 32404942 NR Description: hypothetical protein
  misc_feature (21)..(340): NCBI GI NO: 18913080 NR Description: Tap1p [Tetrahymena thermophila]
  misc_feature (19)..(409): NCBI GI NO: 19114463 NR Description: putative amino acid transpoter
  misc_feature (26)..(427): NCBI GI NO: 31220680 NR Description: ENSANGP00000019274 [Anopheles gambiae]
  misc_feature (33)..(412): NCBI GI NO: 32410299 NR Description: hypothetical protein [Neurospora crassa]
  misc_feature (26)..(321): NCBI GI NO: 6324228 NR Description: related to the neuronal gamma -aminobutyric acid-glycine vesicular transporters
  misc_feature (1)..(428): NCBI GI NO: 24642715 NR Description: CG4991-PA [Drosophila melanogaster]
MKGSPATPTPAATQDSFKGGVKIQQSSNVQASFTLFKSFLGTGVLALPYAYKTAGLGLSLIVLIIVSAMTTRCFSLLLDVAAQRIGTGKISLQKLTQDVLGTKGKYAVQASIMIMQLGCCIGILIFTRDFLNHILCEFGISSLCNNTLFNVLFCLALTVPLTLINNMHYFYIPSLAANFFILVGLAAQMFYNTQVLQDNPELRSTLGTHLKEFNWKDLPLFFGIATYAFEGVGIIFSIRSSMEKPQDFKFLLKNQMLILTLIYVIFPTFCYIALDDRLTDIIFFTLPTDDPFYLLIQIFYAISALLSFPVQFFPAIRIMENSKIMRYRLFNERGKCNNKPLRYGMRMAVIGVVFLVAYTATSFHLFLNLLGSCVFTFVGFILPVWIYSVHFKGKTGIAKRLINYTMLTVAVVFGAAGFVMSIMEMVNKSSEDVATL

SEQ ID NO: 5255 - DNA, 894 bp, Glycine max
  misc_feature (1)..(894): Ceres Seq. ID no. 12612051
tttcaattcgcagaaaatggcaaaaaccatagggaagctggctgaaaaaacaccagaagttggtgaaactgtcagtggtttgcttgtaaaaaaaggcttcacatatcagattatggcagctgatgatctccatgtcttttcacaactatcaacagcaaacattactcagaggattaccatcccttattcaggtgcctttaatgtcatacagcatagactcaaacagatatatgaaagtgtagctcagtcagtggatgaagaatctggagttcccacattgcaagtccatgagtgtgttactgtgaaacatgaatctgaaaagcatgtctccttgcattgggcctctgatcccatgagtgacatggtatctgattcaattgttgctctggttttaaatatcaaccgcgatgtcccaaaaatagtgaatgaatctgatgccattaagattgaggaagagaatgagaaaaaggcagagaaggttatgcaagccctcctcgtttcactctttggagatgtgaaggtaggtgaaaacggaaaattgataattaacattgatgggaatgtagcagagctaaacaaagaaagtggggaagttgagagtgaaaatgaaggtctcaaggaaagagtaagaacagcattccggcgcattcaaagttctgtgaagccaattcctgtttctgcgccatagtttttcatttccttacattttctttggaaaaggtgaaatgccaccgataaggaacaccagctcacatgtccccgctaacatgagacaattatcacaacatgttaccttcccttccctttaacatgatgagctttgtcacagcattctctgtttccttttgtttattcttcaaatatttggtcatttaatctaaacttattttcttc

SEQ ID NO: 5256 - protein, 228 aa, Glycine max
  peptide (1)..(228): Ceres Seq. ID no. 12612052
  misc_feature (1)..(227): NCBI GI NO: 15219848 NR Description: putative cleavage and polyadenylation specificityfactor
  misc_feature (1)..(227): NCBI GI NO: 18377654 NR Description: putative cleavage and polyadenylation specificityfactor
  misc_feature (1)..(225): NCBI GI NO: 27573349 NR Description: putative cleavage and polyadenylation specifityfactor protein
  misc_feature (1)..(223): NCBI GI NO: 12846103 NR Description: unnamed protein product [Mus musculus]
  misc_feature (1)..(223): NCBI GI NO: 7706427 NR Description: cleavage and polyadenylation specific factor 3
  misc_feature (1)..(223): NCBI GI NO: 15079675 NR Description: Similar to cleavage and polyadenylation specificfactor 3
  misc_feature (1)..(223): NCBI GI NO: 27805863 NR Description: cleavage and polyadenylation specific factor 3
  misc_feature (1)..(223): NCBI GI NO: 31980904 NR Description: cleavage and polyadenylation specificity factor 3
  misc_feature (1)..(223): NCBI GI NO: 18203388 NR Description: Cleavage and polyadenylation specificity factor
  misc_feature (1)..(222): NCBI GI NO: 19115175 NR Description: putative cleavage and polyadenylation specifityfactor
FNSQKMAKTIGKLAEKTPEVGETVSGLLVKKGFTYQIMAADDLHVFSQLSTANITQRITIPYSGAFNVIQHRLKQIYESVAQSVDEESGVPTLQVHECVTVKHESEKHVSLHWASDPMSDMVSDSIVALVLNINRDVPKIVNESDAIKIEEENEKKAEKVMQALLVSLFGDVKVGENGKLIINIDGNVAELNKESGEVESENEGLKERVRTAFRRIQSSVKPIPVSAP

SEQ ID NO: 5257 - protein, 223 aa, Glycine max
  peptide (1)..(223): Ceres Seq. ID no. 12612053
  misc_feature (1)..(222): NCBI GI NO: 15219848 NR Description: putative cleavage and polyadenylation specificityfactor
  misc_feature (1)..(222): NCBI GI NO: 18377654 NR Description: putative cleavage and polyadenylation specificityfactor
  misc_feature (1)..(220): NCBI GI NO: 27573349 NR Description: putative cleavage and polyadenylation specifityfactor protein
  misc_feature (1)..(218): NCBI GI NO: 12846103 NR Description: unnamed protein product [Mus musculus]
  misc_feature (1)..(218): NCBI GI NO: 7706427 NR Description: cleavage and polyadenylation specific factor 3
  misc_feature (1)..(218): NCBI GI NO: 15079675 NR Description: Similar to cleavage and polyadenylation specificfactor 3
  misc_feature (1)..(218): NCBI GI NO: 27805863 NR Description: cleavage and polyadenylation specific factor 3
  misc_feature (1)..(218): NCBI GI NO: 31980904 NR Description: cleavage and polyadenylation specificity factor 3
  misc_feature (1)..(218): NCBI GI NO: 18203388 NR Description: Cleavage and polyadenylation specificity factor
  misc_feature (1)..(217): NCBI GI NO: 19115175 NR Description: putative cleavage and polyadenylation specifityfactor
MAKTIGKLAEKTPEVGETVSGLLVKKGFTYQIMAADDLHVFSQLSTANITQRITIPYSGAFNVIQHRLKQIYESVAQSVDEESGVPTLQVHECVTVKHESEKHVSLHWASDPMSDMVSDSIVALVLNINRDVPKIVNESDAIKIEEENEKKAEKVMQALLVSLFGDVKVGENGKLIINIDGNVAELNKESGEVESENEGLKERVRTAFRRIQSSVKPIPVSAP

SEQ ID NO: 5258 - protein, 191 aa, Glycine max
  peptide (1)..(191): Ceres Seq. ID no. 12612054
  misc_feature (1)..(190): NCBI GI NO: 15219848 NR Description: putative cleavage and polyadenylation specificityfactor
  misc_feature (1)..(190): NCBI GI NO: 18377654 NR Description: putative cleavage and polyadenylation specificityfactor
  misc_feature (1)..(188): NCBI GI NO: 27573349 NR Description: putative cleavage and polyadenylation specifityfactor protein
  misc_feature (1)..(186): NCBI GI NO: 12846103 NR Description: unnamed protein product [Mus musculus]
  misc_feature (1)..(186): NCBI GI NO: 7706427 NR Description: cleavage and polyadenylation specific factor 3
  misc_feature (1)..(186): NCBI GI NO: 15079675 NR Description: Similar to cleavage and polyadenylation specificfactor 3
  misc_feature (1)..(186): NCBI GI NO: 27805863 NR Description: cleavage and polyadenylation specific factor 3
  misc_feature (1)..(186): NCBI GI NO: 31980904 NR Description: cleavage and polyadenylation specificity factor 3
  misc_feature (1)..(186): NCBI GI NO: 18203388 NR Description: Cleavage and polyadenylation specificity factor
  misc_feature (1)..(185): NCBI GI NO: 19115175 NR Description: putative cleavage and polyadenylation specifityfactor
MAADDLHVFSQLSTANITQRITIPYSGAFNVIQHRLKQIYESVAQSVDEESGVPTLQVHECVTVKHESEKHVSLHWASDPMSDMVSDSIVALVLNINRDVPKIVNESDAIKIEEENEKKAEKVMQALLVSLFGDVKVGENGKLIINIDGNVAELNKESGEVESENEGLKERVRTAFRRIQSSVKPIPVSAP

SEQ ID NO: 5259 - DNA, 1464 bp, Glycine max
  misc_feature (1)..(1464): Ceres Seq. ID no. 14313123
ttctctctcgcacacgcaaacacttgttccggtgtccctctctctttcgcttcatcttcaacattaggtcttctctgactctgtggttgtcactgttcaacgtctttgagagtttatgctgagtagttcggctttacctcaaaagtcctgatcaattgaattcagtttccattggtaggatttattgccgggccttgaggtaatcagcttaccaacatgggaacacaaccccagcaaacatttcgggaggaagaggaggaggagatgcaaggccatggaactacgatgtcaggtcaatcaatgtcaacaagcagaagtgtcgggtctccatccagccggagtgagcagacaatggcaacacctgctagtgatagcacttttcttaggttaaaccatcttgacatacatggtgatgatgctggatcacagggcaccgttgccaagaagaaaaagaggggccaacgggctgttggaggtgataagagtggaagaggtctccgtcaattcagtatgaaagtgtgtgagaaggtagaaagcaagggcagaacaacttacaatgaggtagctgatgaacttgtggccgaatttgctgatccaatcaatggtgtttcaactcctgatcagcaacaatatgatgagaaaaacattcgtcgaagggtgtatgatgctttgaatgttctcatggcaatggatattatttctaaggataaaaaggaaattcaatggaagggtctccctcgtactagtctaagcgatattgaagagctaaagtcggagcgtcttgggctaaggaatagaattgaaaagaaagcagcctatttgcaagagctggaggagcaatacataggtcttcagaaacttatacaacgaaatgagcaactatatagctcaggaaatgctcccaatggaggtgtatctttgcccttcattctggtgcagacacggccccatgcaactgttgaagtggaaatatcagaagatatgcagcttgtgcattttgatttcaatagcactccctttgagctgcatgatgataactatgttctcaaggcaatgaaattttgtgagagatctcagaatgataatacaacagataattctacagatggcggtgaaggttctagcatatatgcacaggttcctacttcagtttcaaaccctccaaataggcctccttcatctccaccactccctggaatattaaaggcaagagttaagaacgagcattgatatgcaattttgtactgcatcgccttatttaagcatgtttgtatatttttgtaaagtaatttgtcagtaattaattgtccttcataatagttaatcagtacagccaattcactcagtaggttagaagcgaaccagtgtgcttgagtctatattcttctgggttgattttggcaaattctttgctaaccatatccattatttactaccttaagaccttaactgatttttttcccc

SEQ ID NO: 5260 - protein, 337 aa, Glycine max
  peptide (1)..(337): Ceres Seq. ID no. 14313124
  misc_feature (93)..(326): Pfam Name: TDP Pfam Description: Transcription factor E2F/dimerisation partner
  misc_feature (21)..(337): NCBI GI NO: 32187097 NR Description: DP1 [Populus tremula x Populus tremuloides]
  misc_feature (21)..(326): NCBI GI NO: 21554147 NR Description: unknown [Arabidopsis thaliana]
  misc_feature (21)..(326): NCBI GI NO: 30680032 NR Description: DPB transcription factor [Arabidopsis thaliana]
  misc_feature (47)..(337): NCBI GI NO: 29371983 NR Description: E2F dimerization factor
  misc_feature (99)..(326): NCBI GI NO: 11358893 NR Description: transcription factor-like protein
  misc_feature (21)..(100): NCBI GI NO: 11358893 NR Description: transcription factor-like protein
  misc_feature (18)..(337): NCBI GI NO: 29367654 NR Description: DP TF [Oryza sativa (japonica cultivar-group)]
  misc_feature (18)..(241): NCBI GI NO: 37534748 NR Description: putative DP-like protein
  misc_feature (78)..(319): NCBI GI NO: 11357273 NR Description: DP-2 transcription factor-like
  misc_feature (78)..(319): NCBI GI NO: 22326573 NR Description: DPA transcription factor [Arabidopsis thaliana]
MGTQPQQTFREEEEEEMQGHGTTMSGQSMSTSRSVGSPSSRSEQTMATPASDSTFLRLNHLDIHGDDAGSQGTVAKKKKRGQRAVGGDKSGRGLRQFSMKVCEKVESKGRTTYNEVADELVAEFADPINGVSTPDQQQYDEKNIRRRVYDALNVLMAMDIISKDKKEIQWKGLPRTSLSDIEELKSERLGLRNRIEKKAAYLQELEEQYIGLQKLIQRNEQLYSSGNAPNGGVSLPFILVQTRPHATVEVEISEDMQLVHFDFNSTPFELHDDNYVLKAMKFCERSQNDNTTDNSTDGGEGSSIYAQVPTSVSNPPNRPPSSPPLPGILKARVKNEH

SEQ ID NO: 5261 - protein, 321 aa, Glycine max
  peptide (1)..(321): Ceres Seq. ID no. 14313125
  misc_feature (77)..(310): Pfam Name: TDP Pfam Description: Transcription factor E2F/dimerisation partner
  misc_feature (5)..(321): NCBI GI NO: 32187097 NR Description: DP1 [Populus tremula x Populus tremuloides]
  misc_feature (5)..(310): NCBI GI NO: 21554147 NR Description: unknown [Arabidopsis thaliana]
  misc_feature (5)..(310): NCBI GI NO: 30680032 NR Description: DPB transcription factor [Arabidopsis thaliana]
  misc_feature (31)..(321): NCBI GI NO: 29371983 NR Description: E2F dimerization factor
  misc_feature (83)..(310): NCBI GI NO: 11358893 NR Description: transcription factor-like protein
  misc_feature (5)..(84): NCBI GI NO: 11358893 NR Description: transcription factor-like protein
  misc_feature (2)..(321): NCBI GI NO: 29367654 NR Description: DP TF [Oryza sativa (japonica cultivar-group)]
  misc_feature (2)..(225): NCBI GI NO: 37534748 NR Description: putative DP-like protein
  misc_feature (62)..(303): NCBI GI NO: 11357273 NR Description: DP-2 transcription factor-like
  misc_feature (62)..(303): NCBI GI NO: 22326573 NR Description: DPA transcription factor [Arabidopsis thaliana]
MQGHGTTMSGQSMSTSRSVGSPSSRSEQTMATPASDSTFLRLNHLDIHGDDAGSQGTVAKKKKRGQRAVGGDKSGRGLRQFSMKVCEKVESKGRTTYNEVADELVAEFADPINGVSTPDQQQYDEKNIRRRVYDALNVLMAMDIISKDKKEIQWKGLPRTSLSDIEELKSERLGLRNRIEKKAAYLQELEEQYIGLQKLIQRNEQLYSSGNAPNGGVSLPFILVQTRPHATVEVEISEDMQLVHFDFNSTPFELHDDNYVLKAMKFCERSQNDNTTDNSTDGGEGSSIYAQVPTSVSNPPNRPPSSPPLPGILKARVKNEH

SEQ ID NO: 5262 - protein, 314 aa, Glycine max
  peptide (1)..(314): Ceres Seq. ID no. 14313126
  misc_feature (70)..(303): Pfam Name: TDP Pfam Description: Transcription factor E2F/dimerisation partner
  misc_feature (1)..(314): NCBI GI NO: 32187097 NR Description: DP1 [Populus tremula x Populus tremuloides]
  misc_feature (1)..(303): NCBI GI NO: 21554147 NR Description: unknown [Arabidopsis thaliana]
  misc_feature (1)..(303): NCBI GI NO: 30680032 NR Description: DPB transcription factor [Arabidopsis thaliana]
  misc_feature (24)..(314): NCBI GI NO: 29371983 NR Description: E2F dimerization factor
  misc_feature (76)..(303): NCBI GI NO: 11358893 NR Description: transcription factor-like protein
  misc_feature (1)..(77): NCBI GI NO: 11358893 NR Description: transcription factor-like protein
  misc_feature (1)..(314): NCBI GI NO: 29367654 NR Description: DP TF [Oryza sativa (japonica cultivar-group)]
  misc_feature (1)..(218): NCBI GI NO: 37534748 NR Description: putative DP-like protein
  misc_feature (55)..(296): NCBI GI NO: 11357273 NR Description: DP-2 transcription factor-like
  misc_feature (55)..(296): NCBI GI NO: 22326573 NR Description: DPA transcription factor [Arabidopsis thaliana]
MSGQSMSTSRSVGSPSSRSEQTMATPASDSTFLRLNHLDIHGDDAGSQGTVAKKKKRGQRAVGGDKSGRGLRQFSMKVCEKVESKGRTTYNEVADELVAEFADPINGVSTPDQQQYDEKNIRRRVYDALNVLMAMDIISKDKKEIQWKGLPRTSLSDIEELKSERLGLRNRIEKKAAYLQELEEQYIGLQKLIQRNEQLYSSGNAPNGGVSLPFILVQTRPHATVEVEISEDMQLVHFDFNSTPFELHDDNYVLKAMKFCERSQNDNTTDNSTDGGEGSSIYAQVPTSVSNPPNRPPSSPPLPGILKARVKNEH

SEQ ID NO: 5263 - DNA, 1014 bp, Glycine max
  misc_feature (1)..(1014): Ceres Seq. ID no. 14307654
gcatcgcagtgtatctgagtaatatcactgtccctttccctctccctttcatcagaaacacaaacaaaacaccgattcgctatattaccagatcggactcaattcctgaaccgatgaagttgaagccgcagtgaaccaaaccatcatcatcgcgttaccggaataatcgacccatcatcaattagatcgaaatgaaggatgaggacgggcttccgacgacgaccgcggttacaaagaaggaaaacttggattcgagtctgtttggaaaaggcaggtacaaattctgggcgttagcggccatcttgcttctggcgttctggtccatgttcaccggtaccgtctcgctccgctggtccggcactctcaattccctttccaacgacatcgacactcccatccacgacgacctagatgttcttgaaatggaggagagggagaaggttgtgaggcacatgtgggatgtgtacaccaacagtcgcagtgtgaggttgccgcggttctggcaagaggccttcgaggctgcctatgaggatttgacgagcgatgtcgctgaggtcagagacgctgccgtcgccgagatcgccaagatgtctgttcgctccattcattttgatccacctcctcttcaatccacgagtgcccgagaattcagcaagagccttaagcaagccgagaaaggaaaagatgcaacaacctcaaggcgtgcttaaaggttagtgtgtggagcattcaagcgtctgcggtgtacttgaaaaatgctcgagtggtaccggaagattgtgaagagatagtaatggacgaactcatactcggatttcatgtttccatcacagggataatgatgtattttaataggctgtggttcttgcaaattttgcagtcaaaattcgtagtcttcacgaagtgaggagtagtaaatcgaaacacgaacttttgaacagacaaattcaattgagcatgttctgtttagctttattccacaacatctaaattataaaactctcatgtttctac

SEQ ID NO: 5264 - protein, 172 aa, Glycine max
  peptide (1)..(172): Ceres Seq. ID no. 14307655
  misc_feature (1)..(170): NCBI GI NO: 18424975 NR Description: expressed protein [Arabidopsis thaliana]
  misc_feature (1)..(147): NCBI GI NO: 15234477 NR Description: expressed protein [Arabidopsis thaliana]
  misc_feature (1)..(148): NCBI GI NO: 9858772 NR Description: BAC19.4 [Lycopersicon esculentum]
  misc_feature (24)..(151): NCBI GI NO: 28209490 NR Description: unknown protein
  misc_feature (29)..(151): NCBI GI NO: 15222008 NR Description: expressed protein [Arabidopsis thaliana]
MKDEDGLPTTTAVTKKENLDSSLFGKGRYKFWALAAILLLAFWSMFTGTVSLRWSGTLNSLSNDIDTPIHDDLDVLEMEEREKVVRHMWDVYTNSRSVRLPRFWQEAFEAAYEDLTSDVAEVRDAAVAEIAKMSVRSIHFDPPPLQSTSAREFSKSLKQAEKGKDATTSRRA

SEQ ID NO: 5265 - protein, 128 aa, Glycine max
  peptide (1)..(128): Ceres Seq. ID no. 14307656
  misc_feature (1)..(126): NCBI GI NO: 18424975 NR Description: expressed protein [Arabidopsis thaliana]
  misc_feature (1)..(103): NCBI GI NO: 15234477 NR Description: expressed protein [Arabidopsis thaliana]
  misc_feature (1)..(104): NCBI GI NO: 9858772 NR Description: BAC19.4 [Lycopersicon esculentum]
  misc_feature (1)..(107): NCBI GI NO: 28209490 NR Description: unknown protein
  misc_feature (1)..(107): NCBI GI NO: 15222008 NR Description: expressed protein [Arabidopsis thaliana]
MFTGTVSLRWSGTLNSLSNDIDTPIHDDLDVLEMEEREKVVRHMWDVYTNSRSVRLPRFWQEAFEAAYEDLTSDVAEVRDAAVAEIAKMSVRSIHFDPPPLQSTSAREFSKSLKQAEKGKDATTSRRA

SEQ ID NO: 5266 - protein, 95 aa, Glycine max
  peptide (1)..(95): Ceres Seq. ID no. 14307657
  misc_feature (1)..(93): NCBI GI NO: 18424975 NR Description: expressed protein [Arabidopsis thaliana]
  misc_feature (1)..(70): NCBI GI NO: 15234477 NR Description: expressed protein [Arabidopsis thaliana]
  misc_feature (1)..(71): NCBI GI NO: 9858772 NR Description: BAC19.4 [Lycopersicon esculentum]
  misc_feature (1)..(74): NCBI GI NO: 28209490 NR Description: unknown protein
  misc_feature (1)..(74): NCBI GI NO: 15222008 NR Description: expressed protein [Arabidopsis thaliana]
MEEREKVVRHMWDVYTNSRSVRLPRFWQEAFEAAYEDLTSDVAEVRDAAVAEIAKMSVRSIHFDPPPLQSTSAREFSKSLKQAEKGKDATTSRRA

SEQ ID NO: 5267 - DNA, 1375 bp, Glycine max
  misc_feature (1)..(1375): Ceres Seq. ID no. 14307670
attcagtttcacacacatttcacatatcttctcaagttcttttcaattcaaaatcaagatatggaagaacccgtcatggaacaacaaccctccgctgctgcctctgggaacactgccagacccaggcttcagaagtacgcactccgatctgccaataagttgaaggaagagaagtcagaaactcccaattgctccattcctacttctgaaaccatgagggggagaagtgtaggtgcttcaagtgtaagtaaaagtgtgagtgttcttgatttttctggcaaggacaagtctggtagtgccaagccacccagaaggctctcaattcctgccaaaacaccagccacttcaagacccaagctgggtggcaacagtaccccaatcactgagactagaactgggaggagtgcttttggtcaaggcagaagcaaaacaccaatttcagacatttccaagacatcttcacgaaccaagttaaatctcctaacttcggcttcgtattggttaaaccagatcaagctctctgaatccgcggccaagcactcaatttcacttggcttcttcaaactagctttggaggcaggatgtgagcctctcgggccaatgcaagaagggctaaaatcatatgtgggcagacatcagcttgatggtcttgaagaaactgtgaaagcattgtttgagagctataacatctcagaaacaatggagcagtggcaggtgtctgagactatttcacatgtgccagaagagggaactcggtcttccgatgatgatgtgcgtagctcttcttctaccatggggactagaaaactgaaaccaaagtgcttaaacactgattctactcaactcacaccttcgacagagtcagcaaagaaggagacaagtcaaaagagtaatcctggatccaggttgagagggaatctcagcacaaacaccacaactccaaggcctgctctagacaacaggaataataggttggttaaaaaatctgagaagccaagcaagcaagaaccaaataaggaaaagggcatgataaagaggcagggaaagaaatctgatgttaaagaagttagcactccaaagggaggcaaagaaaatatggaagctcggaccactgaagaaaacagcgtgacagaagtggtgtaaacaatctcatgtgcttgtatttctgaaattctgattccccaactttgaagtttgcctagggggtgttctctgtgtggagcgtgcttttgtatattgtataggctgcatttctctttgcttggtcacttggcatattgtgtttgtgtccttttattatacaattgctaatcaaaccatactgtattgaatgttattgtttgtctataaatgattccatactatttgtgaaggc

SEQ ID NO: 5268 - protein, 380 aa, Glycine max
  peptide (1)..(380): Ceres Seq. ID no. 14307671
  misc_feature (23)..(380): NCBI GI NO: 15241865 NR Description: expressed protein [Arabidopsis thaliana]
IQFHTHFTYLLKFFSIQNQDMEEPVMEQQPSAAASGNTARPRLQKYALRSANKLKEEKSETPNCSIPTSETMRGRSVGASSVSKSVSVLDFSGKDKSGSAKPPRRLSIPAKTPATSRPKLGGNSTPITETRTGRSAFGQGRSKTPISDISKTSSRTKLNLLTSASYWLNQIKLSESAAKHSISLGFFKLALEAGCEPLGPMQEGLKSYVGRHQLDGLEETVKALFESYNISETMEQWQVSETISHVPEEGTRSSDDDVRSSSSTMGTRKLKPKCLNTDSTQLTPSTESAKKETSQKSNPGSRLRGNLSTNTTTPRPALDNRNNRLVKKSEKPSKQEPNKEKGMIKRQGKKSDVKEVSTPKGGKENMEARTTEENSVTEVV

SEQ ID NO: 5269 - protein, 360 aa, Glycine max
  peptide (1)..(360): Ceres Seq. ID no. 14307672
  misc_feature (3)..(360): NCBI GI NO: 15241865 NR Description: expressed protein [Arabidopsis thaliana]
MEEPVMEQQPSAAASGNTARPRLQKYALRSANKLKEEKSETPNCSIPTSETMRGRSVGASSVSKSVSVLDFSGKDKSGSAKPPRRLSIPAKTPATSRPKLGGNSTPITETRTGRSAFGQGRSKTPISDISKTSSRTKLNLLTSASYWLNQIKLSESAAKHSISLGFFKLALEAGCEPLGPMQEGLKSYVGRHQLDGLEETVKALFESYNISETMEQWQVSETISHVPEEGTRSSDDDVRSSSSTMGTRKLKPKCLNTDSTQLTPSTESAKKETSQKSNPGSRLRGNLSTNTTTPRPALDNRNNRLVKKSEKPSKQEPNKEKGMIKRQGKKSDVKEVSTPKGGKENMEARTTEENSVTEVV

SEQ ID NO: 5270 - protein, 355 aa, Glycine max
  peptide (1)..(355): Ceres Seq. ID no. 14307673
  misc_feature (1)..(355): NCBI GI NO: 15241865 NR Description: expressed protein [Arabidopsis thaliana]
MEQQPSAAASGNTARPRLQKYALRSANKLKEEKSETPNCSIPTSETMRGRSVGASSVSKSVSVLDFSGKDKSGSAKPPRRLSIPAKTPATSRPKLGGNSTPITETRTGRSAFGQGRSKTPISDISKTSSRTKLNLLTSASYWLNQIKLSESAAKHSISLGFFKLALEAGCEPLGPMQEGLKSYVGRHQLDGLEETVKALFESYNISETMEQWQVSETISHVPEEGTRSSDDDVRSSSSTMGTRKLKPKCLNTDSTQLTPSTESAKKETSQKSNPGSRLRGNLSTNTTTPRPALDNRNNRLVKKSEKPSKQEPNKEKGMIKRQGKKSDVKEVSTPKGGKENMEARTTEENSVTEVV

SEQ ID NO: 5271 - DNA, 1091 bp, Glycine max
  misc_feature (1)..(1091): Ceres Seq. ID no. 14307355
atcaattaattgtgcacgaaataccaattctgtcccaaatattatactaacatattagaagctgtccaattccaatggttccttgtgttaaagcaatggttgcgcttgtcctagcgtttctaatctctttgccttctatggttgcctatgctggcaacatgtaccaagatgttgatgtcacgtggggagatggcagaggcaagattctgaacaatggtcagcttcttactctgtctcttgacagagcctctggctctggctttcagtccaagaatcagtatctatttggcaaaattgacatgcaaatcaaacttgtgcctgcaaattccgctggcacggtcaccgctttttacttacgttcagaagggtcatcttgggatgagatagattttgagttcctgggaaatctgagtggtgatccttacatagttcatactaatgtgtacacacaaggcaagggtaatagggagcaacaattttatctttggtttgacccaactgcagattttcacacctattcctttctctggaatcctacacatgttgtattctatgttgatggaagaccaattagggagttcaagaacttggagggagtgggtgttgaatacccaaagaagcagcctatgaggttatatgccagtctatggaacgctgatgactgggcaacgagaggagggctagtgaagacagattggagtcaagcaccattcactgcttctttcaggaacttcaaagccaatggttgcgtttggtccaatggggtttcttcatgcaactccacctcctcttctgaaaaagcttggctatattctcaacggcttgattccacaaaccagaagaagctaaaatgggtgcacaagaattacatgatttatgattactgcacagaccttaagcgattccctcagggtctccctctcgaatgcacagtccgcaccaagtcataacaaaaatatatgcaaactgctattgtatttgcatgtgtgtgcattccattttcccattacactgcatcgcttctcaatctcattctttatgcaattaatttggatacaaagggcatcgtaatgtaacaattaatgtttatt

SEQ ID NO: 5272 - protein, 291 aa, Glycine max
  peptide (1)..(291): Ceres Seq. ID no. 14307356
  misc_feature (30)..(210): Pfam Name: Pfam Description:  Glycosyl hydrolases family 16
  misc_feature (9)..(289): NCBI GI NO: 29691676 NR Description: putative xyloglucan endotransglycosylase
  misc_feature (11)..(285): NCBI GI NO: 29500893 NR Description: putative xyloglucan endotransglycosylase
  misc_feature (22)..(285): NCBI GI NO: 19911573 NR Description: syringolide-induced protein 19-1-5 [Glycine max]
  misc_feature (5)..(291): NCBI GI NO: 3901012 NR Description: xyloglucan endotransglycosylase 1
  misc_feature (7)..(287): NCBI GI NO: 29500891 NR Description: putative xyloglucan endotransglycosylase
  misc_feature (9)..(286): NCBI GI NO: 22947852 NR Description: xyloglucan endotransglycosylase
  misc_feature (8)..(287): NCBI GI NO: 8886867 NR Description: xyloglucan endotransglycosylase XET2
  misc_feature (1)..(285): NCBI GI NO: 8886865 NR Description: xyloglucan endotransglycosylase XET1
  misc_feature (1)..(285): NCBI GI NO: 15235997 NR Description: xyloglucan endotransglycosylase (XTR-6)
  misc_feature (8)..(285): NCBI GI NO: 22327914 NR Description: xyloglucan endotransglycosylase (XTR3)
MVPCVKAMVALVLAFLISLPSMVAYAGNMYQDVDVTWGDGRGKILNNGQLLTLSLDRASGSGFQSKNQYLFGKIDMQIKLVPANSAGTVTAFYLRSEGSSWDEIDFEFLGNLSGDPYIVHTNVYTQGKGNREQQFYLWFDPTADFHTYSFLWNPTHVVFYVDGRPIREFKNLEGVGVEYPKKQPMRLYASLWNADDWATRGGLVKTDWSQAPFTASFRNFKANGCVWSNGVSSCNSTSSSEKAWLYSQRLDSTNQKKLKWVHKNYMIYDYCTDLKRFPQGLPLECTVRTKS

SEQ ID NO: 5273 - protein, 284 aa, Glycine max
  peptide (1)..(284): Ceres Seq. ID no. 14307357
  misc_feature (23)..(203): Pfam Name: Pfam Description:  Glycosyl hydrolases family 16
  misc_feature (2)..(282): NCBI GI NO: 29691676 NR Description: putative xyloglucan endotransglycosylase
  misc_feature (4)..(278): NCBI GI NO: 29500893 NR Description: putative xyloglucan endotransglycosylase
  misc_feature (15)..(278): NCBI GI NO: 19911573 NR Description: syringolide-induced protein 19-1-5 [Glycine max]
  misc_feature (1)..(284): NCBI GI NO: 3901012 NR Description: xyloglucan endotransglycosylase 1
  misc_feature (1)..(280): NCBI GI NO: 29500891 NR Description: putative xyloglucan endotransglycosylase
  misc_feature (2)..(279): NCBI GI NO: 22947852 NR Description: xyloglucan endotransglycosylase
  misc_feature (1)..(280): NCBI GI NO: 8886867 NR Description: xyloglucan endotransglycosylase XET2
  misc_feature (1)..(278): NCBI GI NO: 8886865 NR Description: xyloglucan endotransglycosylase XET1
  misc_feature (1)..(278): NCBI GI NO: 15235997 NR Description: xyloglucan endotransglycosylase (XTR-6)
  misc_feature (1)..(278): NCBI GI NO: 22327914 NR Description: xyloglucan endotransglycosylase (XTR3)
MVALVLAFLISLPSMVAYAGNMYQDVDVTWGDGRGKILNNGQLLTLSLDRASGSGFQSKNQYLFGKIDMQIKLVPANSAGTVTAFYLRSEGSSWDEIDFEFLGNLSGDPYIVHTNVYTQGKGNREQQFYLWFDPTADFHTYSFLWNPTHVVFYVDGRPIREFKNLEGVGVEYPKKQPMRLYASLWNADDWATRGGLVKTDWSQAPFTASFRNFKANGCVWSNGVSSCNSTSSSEKAWLYSQRLDSTNQKKLKWVHKNYMIYDYCTDLKRFPQGLPLECTVRTKS

SEQ ID NO: 5274 - protein, 270 aa, Glycine max
  peptide (1)..(270): Ceres Seq. ID no. 14307358
  misc_feature (9)..(189): Pfam Name: Pfam Description:  Glycosyl hydrolases family 16
  misc_feature (1)..(268): NCBI GI NO: 29691676 NR Description: putative xyloglucan endotransglycosylase
  misc_feature (1)..(264): NCBI GI NO: 29500893 NR Description: putative xyloglucan endotransglycosylase
  misc_feature (1)..(264): NCBI GI NO: 19911573 NR Description: syringolide-induced protein 19-1-5 [Glycine max]
  misc_feature (1)..(270): NCBI GI NO: 3901012 NR Description: xyloglucan endotransglycosylase 1
  misc_feature (1)..(266): NCBI GI NO: 29500891 NR Description: putative xyloglucan endotransglycosylase
  misc_feature (1)..(265): NCBI GI NO: 22947852 NR Description: xyloglucan endotransglycosylase
  misc_feature (1)..(266): NCBI GI NO: 8886867 NR Description: xyloglucan endotransglycosylase XET2
  misc_feature (1)..(264): NCBI GI NO: 8886865 NR Description: xyloglucan endotransglycosylase XET1
  misc_feature (1)..(264): NCBI GI NO: 15235997 NR Description: xyloglucan endotransglycosylase (XTR-6)
  misc_feature (1)..(264): NCBI GI NO: 22327914 NR Description: xyloglucan endotransglycosylase (XTR3)
MVAYAGNMYQDVDVTWGDGRGKILNNGQLLTLSLDRASGSGFQSKNQYLFGKIDMQIKLVPANSAGTVTAFYLRSEGSSWDEIDFEFLGNLSGDPYIVHTNVYTQGKGNREQQFYLWFDPTADFHTYSFLWNPTHVVFYVDGRPIREFKNLEGVGVEYPKKQPMRLYASLWNADDWATRGGLVKTDWSQAPFTASFRNFKANGCVWSNGVSSCNSTSSSEKAWLYSQRLDSTNQKKLKWVHKNYMIYDYCTDLKRFPQGLPLECTVRTKS

SEQ ID NO: 5275 - DNA, 1210 bp, Glycine max
  misc_feature (1)..(1210): Ceres Seq. ID no. 14303397
aaaaaataagaagatatacataaaaataaaacacaccctctacgtgtccacactctctgatcacaacacacccgcttaattaaatctctatatataaaccccttcaggcactccactatgacgggcaaagaaatttttcataagatgaaggaaaaagttttgggatcatctgatcccgattcaggtaaaggaaagagcaagatgaagaagcacataactcatggctttcacttggtaaagggaagatcaggtcatgccatggaagactatcttgttgctcaatttaagcaagttgacaacaaagagttgggtttatttgcaatatttgatggccactctggtcacagtgtacctgattacttgaagtctcatttgtttgataatatcttgaaagagcctaacttctggacagaacctgctgaggctgttaagagagcatatagtataactgattctactattttagacaaatcaggtgaattgggtagagggggttcaactgcggttacagcaatattgatcaactgttacaagctactagtggccaatattggggattcccgggctgtcttatgtaagaatggcgtagccaaacaactatcggtggatcatgaaccaagcatagaaagtgaagatataaaaaacagaggtggttttgtgtcaaacttcccaggggatgtgccacgtgtcgatggtcagttggcagtgtcaagggcatttggtgacaaaagcctgaagatacatttgagctcagaaccatatgtaactgtggagatgatagaagatgatgcagagtttcttatactagccagtgatgggttatggaaggtaatgtcaaatcaagaagcagttagtgctatcagagatgttaaggatgctagatctgcagcaaaggtgcttactgaagaagcaaagaacaggaaaagctcagatgatatctcttgcgttgttgtgaaatttcagtgatcagtaaactcacatagtatatttttatctacgaacttgaaagtgtaacatatactttagtgtaatgttgataccttttaggtgttattatgtcatgccattcagtgtgtgatatttaatcttctttaatttcatacaaatgaaactgctgagaacgtgttgtttgatgtaccaatgttcaaaaggatttagttttggattgtgtagaccaaaataattcgtatgaatgcaaggaagtttggtc

SEQ ID NO: 5276 - protein, 282 aa, Glycine max
  peptide (1)..(282): Ceres Seq. ID no. 14303398
  misc_feature (15)..(274): Pfam Name: Pfam Description:  Protein phosphatase 2C
  misc_feature (1)..(282): NCBI GI NO: 4336436 NR Description: protein phosphatase type 2C [Lotus japonicus]
  misc_feature (1)..(282): NCBI GI NO: 15232538 NR Description: protein phosphatase 2C (PP2C), putative
  misc_feature (1)..(282): NCBI GI NO: 21539551 NR Description: putative protein phosphatase type 2C
  misc_feature (1)..(281): NCBI GI NO: 23307574 NR Description: putative protein phosphatase 2C homolog
  misc_feature (1)..(281): NCBI GI NO: 18417190 NR Description: protein phosphatase 2C (PP2C), putative
  misc_feature (1)..(282): NCBI GI NO: 18399423 NR Description: protein phosphatase 2C (PP2C), putative
  misc_feature (1)..(282): NCBI GI NO: 25411985 NR Description: probable protein phosphatase 2C
  misc_feature (29)..(281): NCBI GI NO: 7488280 NR Description: protein phosphatase 2C homolog F20O9
  misc_feature (15)..(282): NCBI GI NO: 32488822 NR Description: OSJNBa0085I10.2
  misc_feature (7)..(282): NCBI GI NO: 18395099 NR Description: protein phosphatase 2C (PP2C), putative
MTGKEIFHKMKEKVLGSSDPDSGKGKSKMKKHITHGFHLVKGRSGHAMEDYLVAQFKQVDNKELGLFAIFDGHSGHSVPDYLKSHLFDNILKEPNFWTEPAEAVKRAYSITDSTILDKSGELGRGGSTAVTAILINCYKLLVANIGDSRAVLCKNGVAKQLSVDHEPSIESEDIKNRGGFVSNFPGDVPRVDGQLAVSRAFGDKSLKIHLSSEPYVTVEMIEDDAEFLILASDGLWKVMSNQEAVSAIRDVKDARSAAKVLTEEAKNRKSSDDISCVVVKFQ

SEQ ID NO: 5277 - protein, 273 aa, Glycine max
  peptide (1)..(273): Ceres Seq. ID no. 14303399
  misc_feature (6)..(265): Pfam Name: Pfam Description:  Protein phosphatase 2C
  misc_feature (1)..(273): NCBI GI NO: 4336436 NR Description: protein phosphatase type 2C [Lotus japonicus]
  misc_feature (1)..(273): NCBI GI NO: 15232538 NR Description: protein phosphatase 2C (PP2C), putative
  misc_feature (1)..(273): NCBI GI NO: 21539551 NR Description: putative protein phosphatase type 2C
  misc_feature (1)..(272): NCBI GI NO: 23307574 NR Description: putative protein phosphatase 2C homolog
  misc_feature (1)..(272): NCBI GI NO: 18417190 NR Description: protein phosphatase 2C (PP2C), putative
  misc_feature (1)..(273): NCBI GI NO: 18399423 NR Description: protein phosphatase 2C (PP2C), putative
  misc_feature (1)..(273): NCBI GI NO: 25411985 NR Description: probable protein phosphatase 2C
  misc_feature (20)..(272): NCBI GI NO: 7488280 NR Description: protein phosphatase 2C homolog F20O9
  misc_feature (6)..(273): NCBI GI NO: 32488822 NR Description: OSJNBa0085I10.2
  misc_feature (1)..(273): NCBI GI NO: 18395099 NR Description: protein phosphatase 2C (PP2C), putative
MKEKVLGSSDPDSGKGKSKMKKHITHGFHLVKGRSGHAMEDYLVAQFKQVDNKELGLFAIFDGHSGHSVPDYLKSHLFDNILKEPNFWTEPAEAVKRAYSITDSTILDKSGELGRGGSTAVTAILINCYKLLVANIGDSRAVLCKNGVAKQLSVDHEPSIESEDIKNRGGFVSNFPGDVPRVDGQLAVSRAFGDKSLKIHLSSEPYVTVEMIEDDAEFLILASDGLWKVMSNQEAVSAIRDVKDARSAAKVLTEEAKNRKSSDDISCVVVKFQ

SEQ ID NO: 5278 - protein, 254 aa, Glycine max
  peptide (1)..(254): Ceres Seq. ID no. 14303400
  misc_feature (1)..(246): Pfam Name: Pfam Description:  Protein phosphatase 2C
  misc_feature (1)..(254): NCBI GI NO: 4336436 NR Description: protein phosphatase type 2C [Lotus japonicus]
  misc_feature (1)..(254): NCBI GI NO: 15232538 NR Description: protein phosphatase 2C (PP2C), putative
  misc_feature (1)..(254): NCBI GI NO: 21539551 NR Description: putative protein phosphatase type 2C
  misc_feature (1)..(253): NCBI GI NO: 23307574 NR Description: putative protein phosphatase 2C homolog
  misc_feature (1)..(253): NCBI GI NO: 18417190 NR Description: protein phosphatase 2C (PP2C), putative
  misc_feature (1)..(254): NCBI GI NO: 18399423 NR Description: protein phosphatase 2C (PP2C), putative
  misc_feature (1)..(254): NCBI GI NO: 25411985 NR Description: probable protein phosphatase 2C
  misc_feature (1)..(253): NCBI GI NO: 7488280 NR Description: protein phosphatase 2C homolog F20O9
  misc_feature (1)..(254): NCBI GI NO: 32488822 NR Description: OSJNBa0085I10.2
  misc_feature (1)..(254): NCBI GI NO: 18395099 NR Description: protein phosphatase 2C (PP2C), putative
MKKHITHGFHLVKGRSGHAMEDYLVAQFKQVDNKELGLFAIFDGHSGHSVPDYLKSHLFDNILKEPNFWTEPAEAVKRAYSITDSTILDKSGELGRGGSTAVTAILINCYKLLVANIGDSRAVLCKNGVAKQLSVDHEPSIESEDIKNRGGFVSNFPGDVPRVDGQLAVSRAFGDKSLKIHLSSEPYVTVEMIEDDAEFLILASDGLWKVMSNQEAVSAIRDVKDARSAAKVLTEEAKNRKSSDDISCVVVKFQ

SEQ ID NO: 5279 - DNA, 1410 bp, Glycine max
  misc_feature (1)..(1410): Ceres Seq. ID no. 14313654
agagaaattccttgacataaccaaagatacattcgtggacatgatgctgctggacgccgtattcatcatggaacttatgttgagaaactgcgagttcaaatcacacaaagccaagcatgagcaaaaccacaagcgaaccgaatcctttagaattaaaaacaacaatgatctgatcatgacacactcatggcttagcaggaacatcgctggggacttgatccttatagagaaccaaatacccttttttgtgctgcagaaactctatgatgatgttgtccctcgtgaaagcaagaaggatgaacacactgcggggtttgttaagcttgctactgagtactttgctttctatgacacccaaatgtcttcttctggtgaaaccaagaaacactgttcctgttacatactccactgtctgaaggaaccttgtaagtcaaaaggaaaagataggagtgagatttcgaaacgtcctctaggaagcaattctgaagagaatccagaaggaccaaaacatttcactgatctgataaggtggcaattttaccttcccaccgagtgtgaagccggtcatgctcatcaggttctaagaactgcaacaaagttacaaggctcagggataagctttgagaaaggtgatgtgaacaagcggttactggaaatagccttcaagaagaccccaattctgagttcatttctttgctttggttgctttccattgtcgaagctcttcaaagcgcgtttgaggattccccaattgaaggtagaccacacaactgaacgtgtgttcaagaacctcgttgcttttgagcagtttcactatccagacaagccttacttttgcaactatgtttctttcattgactctctgatacacactcagcttgatgtggagttgctggttgagaaggaagtgattgtgcatgaacttgggagtgataaggaagtggcaactcttgttaatggtttatgcaaacatgttgtcacaaactcaacttgttaccatcacattataaataagctcaacgaccattacatgaacgattggaaccacactattgcggctttaaggttggtgtacttcagagatctttggagggcaagtggcactgtggtgggtattgctgtgctggtttttgctgtcttccaattcctccgtgtttgtcgttatctcttctagaatgaacaaaaatgtaactcagtttggattattattgcaaataacagctacaaccatggagtgcttattttcttcttgtttctaggggtttgatttgttgttgtttagatttcagattaggagttctgattctgtttttatataaatttaaaatatttaaaattatgttgttatacctacaaacaatggatgtatcagttatgttttgtgctctttatatatacagttgtttcaac

SEQ ID NO: 5280 - protein, 390 aa, Glycine max
  peptide (1)..(390): Ceres Seq. ID no. 14313655
  misc_feature (6)..(87): Pfam Name: Pfam Description:  Plant protein of unknown function
  misc_feature (246)..(379): NCBI GI NO: 7486946 NR Description: hypothetical protein At2g44930
  misc_feature (6)..(87): NCBI GI NO: 7486946 NR Description: hypothetical protein At2g44930
  misc_feature (246)..(379): NCBI GI NO: 18406666 NR Description: expressed protein [Arabidopsis thaliana]
  misc_feature (6)..(87): NCBI GI NO: 18406666 NR Description: expressed protein [Arabidopsis thaliana]
  misc_feature (246)..(381): NCBI GI NO: 15232337 NR Description: hypothetical protein [Arabidopsis thaliana]
  misc_feature (6)..(93): NCBI GI NO: 15232337 NR Description: hypothetical protein [Arabidopsis thaliana]
  misc_feature (246)..(390): NCBI GI NO: 15226899 NR Description: hypothetical protein [Arabidopsis thaliana]
  misc_feature (4)..(222): NCBI GI NO: 15229687 NR Description: hypothetical protein [Arabidopsis thaliana]
  misc_feature (246)..(388): NCBI GI NO: 15229687 NR Description: hypothetical protein [Arabidopsis thaliana]
  misc_feature (246)..(388): NCBI GI NO: 15229684 NR Description: hypothetical protein [Arabidopsis thaliana]
EKFLDITKDTFVDMMLLDAVFIMELMLRNCEFKSHKAKHEQNHKRTESFRIKNNNDLIMTHSWLSRNIAGDLILIENQIPFFVLQKLYDDVVPRESKKDEHTAGFVKLATEYFAFYDTQMSSSGETKKHCSCYILHCLKEPCKSKGKDRSEISKRPLGSNSEENPEGPKHFTDLIRWQFYLPTECEAGHAHQVLRTATKLQGSGISFEKGDVNKRLLEIAFKKTPILSSFLCFGCFPLSKLFKARLRIPQLKVDHTTERVFKNLVAFEQFHYPDKPYFCNYVSFIDSLIHTQLDVELLVEKEVIVHELGSDKEVATLVNGLCKHVVTNSTCYHHIINKLNDHYMNDWNHTIAALRLVYFRDLWRASGTVVGIAVLVFAVFQFLRVCRYLF

SEQ ID NO: 5281 - protein, 377 aa, Glycine max
  peptide (1)..(377): Ceres Seq. ID no. 14313656
  misc_feature (1)..(74): Pfam Name: Pfam Description:  Plant protein of unknown function
  misc_feature (233)..(366): NCBI GI NO: 7486946 NR Description: hypothetical protein At2g44930
  misc_feature (1)..(74): NCBI GI NO: 7486946 NR Description: hypothetical protein At2g44930
  misc_feature (233)..(366): NCBI GI NO: 18406666 NR Description: expressed protein [Arabidopsis thaliana]
  misc_feature (1)..(74): NCBI GI NO: 18406666 NR Description: expressed protein [Arabidopsis thaliana]
  misc_feature (233)..(368): NCBI GI NO: 15232337 NR Description: hypothetical protein [Arabidopsis thaliana]
  misc_feature (1)..(80): NCBI GI NO: 15232337 NR Description: hypothetical protein [Arabidopsis thaliana]
  misc_feature (233)..(377): NCBI GI NO: 15226899 NR Description: hypothetical protein [Arabidopsis thaliana]
  misc_feature (1)..(209): NCBI GI NO: 15229687 NR Description: hypothetical protein [Arabidopsis thaliana]
  misc_feature (233)..(375): NCBI GI NO: 15229687 NR Description: hypothetical protein [Arabidopsis thaliana]
  misc_feature (233)..(375): NCBI GI NO: 15229684 NR Description: hypothetical protein [Arabidopsis thaliana]
MMLLDAVFIMELMLRNCEFKSHKAKHEQNHKRTESFRIKNNNDLIMTHSWLSRNIAGDLILIENQIPFFVLQKLYDDVVPRESKKDEHTAGFVKLATEYFAFYDTQMSSSGETKKHCSCYILHCLKEPCKSKGKDRSEISKRPLGSNSEENPEGPKHFTDLIRWQFYLPTECEAGHAHQVLRTATKLQGSGISFEKGDVNKRLLEIAFKKTPILSSFLCFGCFPLSKLFKARLRIPQLKVDHTTERVFKNLVAFEQFHYPDKPYFCNYVSFIDSLIHTQLDVELLVEKEVIVHELGSDKEVATLVNGLCKHVVTNSTCYHHIINKLNDHYMNDWNHTIAALRLVYFRDLWRASGTVVGIAVLVFAVFQFLRVCRYLF

SEQ ID NO: 5282 - protein, 376 aa, Glycine max
  peptide (1)..(376): Ceres Seq. ID no. 14313657
  misc_feature (1)..(73): Pfam Name: Pfam Description:  Plant protein of unknown function
  misc_feature (232)..(365): NCBI GI NO: 7486946 NR Description: hypothetical protein At2g44930
  misc_feature (1)..(73): NCBI GI NO: 7486946 NR Description: hypothetical protein At2g44930
  misc_feature (232)..(365): NCBI GI NO: 18406666 NR Description: expressed protein [Arabidopsis thaliana]
  misc_feature (1)..(73): NCBI GI NO: 18406666 NR Description: expressed protein [Arabidopsis thaliana]
  misc_feature (232)..(367): NCBI GI NO: 15232337 NR Description: hypothetical protein [Arabidopsis thaliana]
  misc_feature (1)..(79): NCBI GI NO: 15232337 NR Description: hypothetical protein [Arabidopsis thaliana]
  misc_feature (232)..(376): NCBI GI NO: 15226899 NR Description: hypothetical protein [Arabidopsis thaliana]
  misc_feature (1)..(208): NCBI GI NO: 15229687 NR Description: hypothetical protein [Arabidopsis thaliana]
  misc_feature (232)..(374): NCBI GI NO: 15229687 NR Description: hypothetical protein [Arabidopsis thaliana]
  misc_feature (232)..(374): NCBI GI NO: 15229684 NR Description: hypothetical protein [Arabidopsis thaliana]
MLLDAVFIMELMLRNCEFKSHKAKHEQNHKRTESFRIKNNNDLIMTHSWLSRNIAGDLILIENQIPFFVLQKLYDDVVPRESKKDEHTAGFVKLATEYFAFYDTQMSSSGETKKHCSCYILHCLKEPCKSKGKDRSEISKRPLGSNSEENPEGPKHFTDLIRWQFYLPTECEAGHAHQVLRTATKLQGSGISFEKGDVNKRLLEIAFKKTPILSSFLCFGCFPLSKLFKARLRIPQLKVDHTTERVFKNLVAFEQFHYPDKPYFCNYVSFIDSLIHTQLDVELLVEKEVIVHELGSDKEVATLVNGLCKHVVTNSTCYHHIINKLNDHYMNDWNHTIAALRLVYFRDLWRASGTVVGIAVLVFAVFQFLRVCRYLF

SEQ ID NO: 5283 - DNA, 1424 bp, Glycine max
  misc_feature (1)..(1424): Ceres Seq. ID no. 14313666
gcagagagaaggtttcaaagaaatggccacatgggtgaatggttggggcaaattactaccatttctggggatgttgatggctatgctaactcaaagtggaagcatggtggtaatcaaatttgctatgactgatgggatgaacaagtatgttatggttgtatattcaatggcactctccagctccatacttctcccctttgtcttgtttctacatagcaggtcagagcttcctcttctcacagttcctgcacttggaagcttctttttgcttgcactctttgcgagttcagcacatataatggcttatgttggcatagaactcagctctcctactcttgcatcagctatacttaatgtcattccagctttcacttttgtacttgctctcattttcaggatggaagaagtacattggagatattttagcagccaagctaaagtcttgggaacaatagtgtcaattggtggagcatttgttgtgatactgtacaagggtccacccatctttaggacacattcatcatacacttcaaacaaacttcaattttcggcacaaccaaactggatcttgggagggatatttttggttgctgattctttccttagttccatgtggtacatatatcaggcttcggttgcaaagaaataccctgctgtaacagtcatagtattcttccaattcttattttcaaccattcagtgtggagtatttgccttaattgcagttagagatccaacggaatgggagctgaagttcgatagagggttgagtgtcattttatatcaggcaatagttgcaacaatgttacgttacaccctaaccacatggtgcgtccatagagcaggacctctgttttgtgctatgttcaagccagtgggaatcatcttcaccgtttctatgagtgcaatctttctgggggagaatttcggccttggaagtttgattggtgcggttataatcgtgataggattttatgctgtactatggggaaattccagagaggagaacaagattgagaatttggagtcatcgagccataatgctcctttattgcaagataggtcgtaacaggtaggttgaaatcatcgtaccataatttggcgtatcagaaacaggtgaatgaatcgtatcatgctaaccattgatatgcacttccttgttggatatattttccgtgagtggaatacttgtgtaaaaattttagtcactcatggcacccgtgaatagcttttgttggtgggattttaatccacaaattatagcttcttcttttgtaaatgataggcaaactatacctaattacaggtttaggtagtttacttttggttttgattcacagtttggcctctgtcccccatgtttgttttgtaatcttgcttcctttttttaatatattctggatgtgctgcttttcgtggttaag

SEQ ID NO: 5284 - protein, 355 aa, Glycine max
  peptide (1)..(355): Ceres Seq. ID no. 14313667
  misc_feature (33)..(161): Pfam Name: Pfam Description:  Integral membrane protein DUF6
  misc_feature (2)..(351): NCBI GI NO: 10177511 NR Description: nodulin-like protein [Arabidopsis thaliana]
  misc_feature (17)..(346): NCBI GI NO: 18405635 NR Description: nodulin MtN21 family protein
  misc_feature (8)..(351): NCBI GI NO: 11994130 NR Description: contains similarity to integral membrane proteinnodulin~gene_id:MMG15
  misc_feature (17)..(346): NCBI GI NO: 21594034 NR Description: nodulin MtN21-like protein [Arabidopsis thaliana]
  misc_feature (8)..(354): NCBI GI NO: 22331380 NR Description: nodulin MtN21 family protein
  misc_feature (7)..(351): NCBI GI NO: 15242612 NR Description: nodulin MtN21-related [Arabidopsis thaliana]
  misc_feature (30)..(336): NCBI GI NO: 19347832 NR Description: unknown protein [Arabidopsis thaliana]
  misc_feature (2)..(351): NCBI GI NO: 15242614 NR Description: nodulin MtN21 family protein
  misc_feature (8)..(351): NCBI GI NO: 21618226 NR Description: contains similarity to integral membrane proteinnodulin
  misc_feature (33)..(351): NCBI GI NO: 10177510 NR Description: nodulin-like protein [Arabidopsis thaliana]
QREGFKEMATWVNGWGKLLPFLGMLMAMLTQSGSMVVIKFAMTDGMNKYVMVVYSMALSSSILLPFVLFLHSRSELPLLTVPALGSFFLLALFASSAHIMAYVGIELSSPTLASAILNVIPAFTFVLALIFRMEEVHWRYFSSQAKVLGTIVSIGGAFVVILYKGPPIFRTHSSYTSNKLQFSAQPNWILGGIFLVADSFLSSMWYIYQASVAKKYPAVTVIVFFQFLFSTIQCGVFALIAVRDPTEWELKFDRGLSVILYQAIVATMLRYTLTTWCVHRAGPLFCAMFKPVGIIFTVSMSAIFLGENFGLGSLIGAVIIVIGFYAVLWGNSREENKIENLESSSHNAPLLQDRS

SEQ ID NO: 5285 - protein, 348 aa, Glycine max
  peptide (1)..(348): Ceres Seq. ID no. 14313668
  misc_feature (26)..(154): Pfam Name: Pfam Description:  Integral membrane protein DUF6
  misc_feature (1)..(344): NCBI GI NO: 10177511 NR Description: nodulin-like protein [Arabidopsis thaliana]
  misc_feature (10)..(339): NCBI GI NO: 18405635 NR Description: nodulin MtN21 family protein
  misc_feature (1)..(344): NCBI GI NO: 11994130 NR Description: contains similarity to integral membrane proteinnodulin~gene_id:MMG15
  misc_feature (10)..(339): NCBI GI NO: 21594034 NR Description: nodulin MtN21-like protein [Arabidopsis thaliana]
  misc_feature (1)..(347): NCBI GI NO: 22331380 NR Description: nodulin MtN21 family protein
  misc_feature (1)..(344): NCBI GI NO: 15242612 NR Description: nodulin MtN21-related [Arabidopsis thaliana]
  misc_feature (23)..(329): NCBI GI NO: 19347832 NR Description: unknown protein [Arabidopsis thaliana]
  misc_feature (1)..(344): NCBI GI NO: 15242614 NR Description: nodulin MtN21 family protein
  misc_feature (1)..(344): NCBI GI NO: 21618226 NR Description: contains similarity to integral membrane proteinnodulin
  misc_feature (26)..(344): NCBI GI NO: 10177510 NR Description: nodulin-like protein [Arabidopsis thaliana]
MATWVNGWGKLLPFLGMLMAMLTQSGSMVVIKFAMTDGMNKYVMVVYSMALSSSILLPFVLFLHSRSELPLLTVPALGSFFLLALFASSAHIMAYVGIELSSPTLASAILNVIPAFTFVLALIFRMEEVHWRYFSSQAKVLGTIVSIGGAFVVILYKGPPIFRTHSSYTSNKLQFSAQPNWILGGIFLVADSFLSSMWYIYQASVAKKYPAVTVIVFFQFLFSTIQCGVFALIAVRDPTEWELKFDRGLSVILYQAIVATMLRYTLTTWCVHRAGPLFCAMFKPVGIIFTVSMSAIFLGENFGLGSLIGAVIIVIGFYAVLWGNSREENKIENLESSSHNAPLLQDRS

SEQ ID NO: 5286 - protein, 332 aa, Glycine max
  peptide (1)..(332): Ceres Seq. ID no. 14313669
  misc_feature (10)..(138): Pfam Name: Pfam Description:  Integral membrane protein DUF6
  misc_feature (1)..(328): NCBI GI NO: 10177511 NR Description: nodulin-like protein [Arabidopsis thaliana]
  misc_feature (1)..(323): NCBI GI NO: 18405635 NR Description: nodulin MtN21 family protein
  misc_feature (1)..(328): NCBI GI NO: 11994130 NR Description: contains similarity to integral membrane proteinnodulin~gene_id:MMG15
  misc_feature (1)..(323): NCBI GI NO: 21594034 NR Description: nodulin MtN21-like protein [Arabidopsis thaliana]
  misc_feature (1)..(331): NCBI GI NO: 22331380 NR Description: nodulin MtN21 family protein
  misc_feature (1)..(328): NCBI GI NO: 15242612 NR Description: nodulin MtN21-related [Arabidopsis thaliana]
  misc_feature (7)..(313): NCBI GI NO: 19347832 NR Description: unknown protein [Arabidopsis thaliana]
  misc_feature (1)..(328): NCBI GI NO: 15242614 NR Description: nodulin MtN21 family protein
  misc_feature (1)..(328): NCBI GI NO: 21618226 NR Description: contains similarity to integral membrane proteinnodulin
  misc_feature (10)..(328): NCBI GI NO: 10177510 NR Description: nodulin-like protein [Arabidopsis thaliana]
MLMAMLTQSGSMVVIKFAMTDGMNKYVMVVYSMALSSSILLPFVLFLHSRSELPLLTVPALGSFFLLALFASSAHIMAYVGIELSSPTLASAILNVIPAFTFVLALIFRMEEVHWRYFSSQAKVLGTIVSIGGAFVVILYKGPPIFRTHSSYTSNKLQFSAQPNWILGGIFLVADSFLSSMWYIYQASVAKKYPAVTVIVFFQFLFSTIQCGVFALIAVRDPTEWELKFDRGLSVILYQAIVATMLRYTLTTWCVHRAGPLFCAMFKPVGIIFTVSMSAIFLGENFGLGSLIGAVIIVIGFYAVLWGNSREENKIENLESSSHNAPLLQDRS

SEQ ID NO: 5287 - DNA, 1591 bp, Glycine max
  misc_feature (1)..(1591): Ceres Seq. ID no. 14310920
aagaaagaagtgagaatacgaaagaaggggttttattgccaaatgaagaaggctcacgagacacgcatggggtcagccacatgctatccctcctcctcctccttctctctccggtggtggtgactcgccggaaaacacccactgccacctctaacgccgccgccggcgaacacccttctcaaaatctcacccgacccaattcacctttctcctctctcttctcaattccccatctgggtatccctgtttccctcaaagttctcttctttttcgtgattcagaagtgctcagtgatacccttttcttagaacaatgagagcggggaaagggagtcaggaagaggatgagtacgaggaagaagagtttggttcttccaagaaacagggcacttcctctgcccctaacaccaataaagcagatggaaaagccatcgataaggctagtgcgataagatcgaaacattctgtgactgagcagcggagaaggagcaagataaatgagagattccagatattgagggatctcatacctcatagtgatcaaaagagggacacggcatcatttttattagaggtgatagagtatgttcagtacttacaggagaaggtacaaaagtatgaaggttcatatcaaggttggggtcaagaaccctcgaagttgatgccatggagaaatagtcattggcgtgtccagagctttgccggtcaacccacggctgtaaagaatggtttgggtccagtatcaccttttcctggaaagtttgatgaaagcaatgttagtatctctccaactatgcttaatggctcccagaatacaatagatcctgatcagagcagggatattgtcaacaaaacggctgagaggcaacctgatttagtaagcaagggaatacctcttccccttgctatgcatgcaaacatgtctgttcctgtcagaagtgatggcgtacttgcacatcctcttcagggaactgtttctaatgcacaatcaactgaatgcccaacaactagtgaaccacagaatcaacaggatgaactctcggttgaaggagggacaattagcatctcaagtgcatactcccaagggttgttgaataatctaactcaagcgctacaaagtgctggtttagatctgtctcaggctagcatatcagttcagattaatcttgggaaacgggcaaacaaaggactgaattgtgggacctcttctctcaagcatcatgacaacccttcttcaaacaatcaaacaattgcacattttagagatgcaggcagtggagaagactctgatcaagcacaaaaaagaatgaaaacatataagtgatatatatgtggcattttcatgagaatccacttgcatccagatttctcacttattcttggtgcagcatataacttgtggttactgtacatccttccccatttgtttgacttttaatggttattttaaaactatttaaaccttgaacacgatcatttgtggagatattgaggcttctactgtagggagcatgtcatctatttcgcttgtatgatacatattataattataattattcagtattattgagcttttggatggcaattttatg

SEQ ID NO: 5288 - protein, 336 aa, Glycine max
  peptide (1)..(336): Ceres Seq. ID no. 14310921
  misc_feature (46)..(96): Pfam Name: Pfam Description:  Helix-loop-helix DNA-binding domain
  misc_feature (1)..(282): NCBI GI NO: 15221582 NR Description: bHLH protein family [Arabidopsis thaliana]
  misc_feature (1)..(282): NCBI GI NO: 21555388 NR Description: putative DNA-binding protein
  misc_feature (1)..(144): NCBI GI NO: 30682248 NR Description: bHLH protein family [Arabidopsis thaliana]
  misc_feature (194)..(304): NCBI GI NO: 30682248 NR Description: bHLH protein family [Arabidopsis thaliana]
  misc_feature (1)..(144): NCBI GI NO: 11358566 NR Description: myc-like protein - Arabidopsis thaliana
  misc_feature (194)..(304): NCBI GI NO: 11358566 NR Description: myc-like protein - Arabidopsis thaliana
  misc_feature (27)..(186): NCBI GI NO: 9758063 NR Description: DNA-binding protein-like [Arabidopsis thaliana]
  misc_feature (227)..(333): NCBI GI NO: 9758063 NR Description: DNA-binding protein-like [Arabidopsis thaliana]
  misc_feature (27)..(186): NCBI GI NO: 15241563 NR Description: bHLH protein family [Arabidopsis thaliana]
  misc_feature (258)..(333): NCBI GI NO: 15241563 NR Description: bHLH protein family [Arabidopsis thaliana]
MRAGKGSQEEDEYEEEEFGSSKKQGTSSAPNTNKADGKAIDKASAIRSKHSVTEQRRRSKINERFQILRDLIPHSDQKRDTASFLLEVIEYVQYLQEKVQKYEGSYQGWGQEPSKLMPWRNSHWRVQSFAGQPTAVKNGLGPVSPFPGKFDESNVSISPTMLNGSQNTIDPDQSRDIVNKTAERQPDLVSKGIPLPLAMHANMSVPVRSDGVLAHPLQGTVSNAQSTECPTTSEPQNQQDELSVEGGTISISSAYSQGLLNNLTQALQSAGLDLSQASISVQINLGKRANKGLNCGTSSLKHHDNPSSNNQTIAHFRDAGSGEDSDQAQKRMKTYK

SEQ ID NO: 5289 - protein, 220 aa, Glycine max
  peptide (1)..(220): Ceres Seq. ID no. 14310922
  misc_feature (1)..(166): NCBI GI NO: 15221582 NR Description: bHLH protein family [Arabidopsis thaliana]
  misc_feature (1)..(166): NCBI GI NO: 21555388 NR Description: putative DNA-binding protein
  misc_feature (1)..(28): NCBI GI NO: 30682248 NR Description: bHLH protein family [Arabidopsis thaliana]
  misc_feature (78)..(188): NCBI GI NO: 30682248 NR Description: bHLH protein family [Arabidopsis thaliana]
  misc_feature (1)..(28): NCBI GI NO: 11358566 NR Description: myc-like protein - Arabidopsis thaliana
  misc_feature (78)..(188): NCBI GI NO: 11358566 NR Description: myc-like protein - Arabidopsis thaliana
  misc_feature (1)..(70): NCBI GI NO: 9758063 NR Description: DNA-binding protein-like [Arabidopsis thaliana]
  misc_feature (111)..(217): NCBI GI NO: 9758063 NR Description: DNA-binding protein-like [Arabidopsis thaliana]
  misc_feature (1)..(70): NCBI GI NO: 15241563 NR Description: bHLH protein family [Arabidopsis thaliana]
  misc_feature (142)..(217): NCBI GI NO: 15241563 NR Description: bHLH protein family [Arabidopsis thaliana]
MPWRNSHWRVQSFAGQPTAVKNGLGPVSPFPGKFDESNVSISPTMLNGSQNTIDPDQSRDIVNKTAERQPDLVSKGIPLPLAMHANMSVPVRSDGVLAHPLQGTVSNAQSTECPTTSEPQNQQDELSVEGGTISISSAYSQGLLNNLTQALQSAGLDLSQASISVQINLGKRANKGLNCGTSSLKHHDNPSSNNQTIAHFRDAGSGEDSDQAQKRMKTYK

SEQ ID NO: 5290 - protein, 176 aa, Glycine max
  peptide (1)..(176): Ceres Seq. ID no. 14310923
  misc_feature (1)..(122): NCBI GI NO: 15221582 NR Description: bHLH protein family [Arabidopsis thaliana]
  misc_feature (1)..(122): NCBI GI NO: 21555388 NR Description: putative DNA-binding protein
  misc_feature (34)..(144): NCBI GI NO: 30682248 NR Description: bHLH protein family [Arabidopsis thaliana]
  misc_feature (34)..(144): NCBI GI NO: 11358566 NR Description: myc-like protein - Arabidopsis thaliana
  misc_feature (1)..(26): NCBI GI NO: 9758063 NR Description: DNA-binding protein-like [Arabidopsis thaliana]
  misc_feature (67)..(173): NCBI GI NO: 9758063 NR Description: DNA-binding protein-like [Arabidopsis thaliana]
  misc_feature (1)..(26): NCBI GI NO: 15241563 NR Description: bHLH protein family [Arabidopsis thaliana]
  misc_feature (98)..(173): NCBI GI NO: 15241563 NR Description: bHLH protein family [Arabidopsis thaliana]
  misc_feature (1)..(122): NCBI GI NO: 19310568 NR Description: putative DNA-binding protein
  misc_feature (56)..(174): NCBI GI NO: 15221582 NR Description: bHLH protein family [Arabidopsis thaliana]
MLNGSQNTIDPDQSRDIVNKTAERQPDLVSKGIPLPLAMHANMSVPVRSDGVLAHPLQGTVSNAQSTECPTTSEPQNQQDELSVEGGTISISSAYSQGLLNNLTQALQSAGLDLSQASISVQINLGKRANKGLNCGTSSLKHHDNPSSNNQTIAHFRDAGSGEDSDQAQKRMKTYK

SEQ ID NO: 5291 - DNA, 1321 bp, Glycine max
  misc_feature (1)..(1321): Ceres Seq. ID no. 14313674
tctagattcacgtgttgtagaatcaacaacagattttcctcagaagttcttctactgcttttggtggggtttgcgcaatttaagttctcttggacaaaatctaaagactagtactgatgtctcagaaatagcttttgcaatcttcattgccatctttggattggtcttattctcattacttattggaaacatgcagaaatatctgcaatctacaactgtaagagtggaggagatgagagtgaagagacaggacgcagaacagtggatgtcccaccgtatgctacctgagaacttgagggaaagaattagaaagtacgaacagtaccaatggcaagaaaataggggtgttgaggaggaggcattaattcgtaaccttcctaaagatctcagaagggacattaagcgtcacctttgcttaactttagttaaaaaagtgccaatgtttgagaaaatggatgagcagttgttggatgcaatgtgtgatagactgaagccagtcctttatactgagaagagctacattgttcgtgaagaagatccagttgatgagatgcttttcattatgcgcggaaaagtttcgaccatgacaacgaatggtggaagaactggtttcttcaactccatgttcctcaaggctggtgacttttgtggagaggaacttctgacatgggctttggatcccaactcctcctcaaatctacccatttcaaccaggacagtagaaactatatcagaagttgaagcctttgctctcacggctgatgacttgaagtttgttgcttcccaatttcgacgccttcacagcaaacagctccaacacgctttcaggttctattcctcacagtggaagacatgggctgctactttcatacaagcagcttggcgtcgatactggaaaaagaagattgagaggtcattgcgcgaagcagaagatgagctacaagatgctttggcaaatgaggaagagtctagtctaagccttggtgcaaccatatatgcatcaaggtttgctgccaatgcactgcgaaatttgagagaaaatagcagacacaatagaatgcaacagagactactacctctgttacctccaaagccagctgaaccagatttcacttctcagaaacactaatttgcaaataggaataagtacatgttaatgttatccatactccatagctattttgtgtgtatattttgggagggttgcttaggaattgcttcaacaactacatgtggatatgtaggggtaatatttcatcaaaatttaattaaacaatcatttagattacaattttttaaataaccgtctagttaatactgc

SEQ ID NO: 5292 - protein, 375 aa, Glycine max
  peptide (1)..(375): Ceres Seq. ID no. 14313675
  misc_feature (162)..(265): Pfam Name: Pfam Description:  Cyclic nucleotide-binding domain
  misc_feature (3)..(375): NCBI GI NO: 24943192 NR Description: cyclic nucleotide-gated channel A
  misc_feature (1)..(372): NCBI GI NO: 15238657 NR Description: cyclic nucleotide-regulated ion channel (CNGC1)
  misc_feature (1)..(373): NCBI GI NO: 6969231 NR Description: cyclic nucleotide-gated cyclic nucleotide-gated calmodulin-binding ionchannel
  misc_feature (1)..(374): NCBI GI NO: 24943196 NR Description: cyclic nucleotide-gated channel C
  misc_feature (1)..(372): NCBI GI NO: 18378827 NR Description: cyclic nucleotide-regulated ion channel
  misc_feature (1)..(372): NCBI GI NO: 38503202 NR Description: Probable cyclic nucleotide-gated ion channel 10
  misc_feature (1)..(372): NCBI GI NO: 6969229 NR Description: cyclic nucleotide-gated cyclic nucleotide-gated calmodulin-binding ionchannel
  misc_feature (1)..(371): NCBI GI NO: 7484881 NR Description: cyclic nucleotide gated channel homolog F3I3
  misc_feature (1)..(371): NCBI GI NO: 22328204 NR Description: cyclic nucleotide-regulated ion channel, putative
  misc_feature (1)..(370): NCBI GI NO: 18407073 NR Description: cyclic nucleotide-regulated ion channel (CNGC3)
LDSRVVESTTDFPQKFFYCFWWGLRNLSSLGQNLKTSTDVSEIAFAIFIAIFGLVLFSLLIGNMQKYLQSTTVRVEEMRVKRQDAEQWMSHRMLPENLRERIRKYEQYQWQENRGVEEEALIRNLPKDLRRDIKRHLCLTLVKKVPMFEKMDEQLLDAMCDRLKPVLYTEKSYIVREEDPVDEMLFIMRGKVSTMTTNGGRTGFFNSMFLKAGDFCGEELLTWALDPNSSSNLPISTRTVETISEVEAFALTADDLKFVASQFRRLHSKQLQHAFRFYSSQWKTWAATFIQAAWRRYWKKKIERSLREAEDELQDALANEEESSLSLGATIYASRFAANALRNLRENSRHNRMQQRLLPLLPPKPAEPDFTSQKH

SEQ ID NO: 5293 - protein, 312 aa, Glycine max
  peptide (1)..(312): Ceres Seq. ID no. 14313676
  misc_feature (99)..(202): Pfam Name: Pfam Description:  Cyclic nucleotide-binding domain
  misc_feature (1)..(312): NCBI GI NO: 24943192 NR Description: cyclic nucleotide-gated channel A
  misc_feature (1)..(309): NCBI GI NO: 15238657 NR Description: cyclic nucleotide-regulated ion channel (CNGC1)
  misc_feature (1)..(310): NCBI GI NO: 6969231 NR Description: cyclic nucleotide-gated cyclic nucleotide-gated calmodulin-binding ionchannel
  misc_feature (1)..(311): NCBI GI NO: 24943196 NR Description: cyclic nucleotide-gated channel C
  misc_feature (1)..(309): NCBI GI NO: 18378827 NR Description: cyclic nucleotide-regulated ion channel
  misc_feature (1)..(309): NCBI GI NO: 38503202 NR Description: Probable cyclic nucleotide-gated ion channel 10
  misc_feature (1)..(309): NCBI GI NO: 6969229 NR Description: cyclic nucleotide-gated cyclic nucleotide-gated calmodulin-binding ionchannel
  misc_feature (1)..(308): NCBI GI NO: 7484881 NR Description: cyclic nucleotide gated channel homolog F3I3
  misc_feature (1)..(308): NCBI GI NO: 22328204 NR Description: cyclic nucleotide-regulated ion channel, putative
  misc_feature (1)..(307): NCBI GI NO: 18407073 NR Description: cyclic nucleotide-regulated ion channel (CNGC3)
MQKYLQSTTVRVEEMRVKRQDAEQWMSHRMLPENLRERIRKYEQYQWQENRGVEEEALIRNLPKDLRRDIKRHLCLTLVKKVPMFEKMDEQLLDAMCDRLKPVLYTEKSYIVREEDPVDEMLFIMRGKVSTMTTNGGRTGFFNSMFLKAGDFCGEELLTWALDPNSSSNLPISTRTVETISEVEAFALTADDLKFVASQFRRLHSKQLQHAFRFYSSQWKTWAATFIQAAWRRYWKKKIERSLREAEDELQDALANEEESSLSLGATIYASRFAANALRNLRENSRHNRMQQRLLPLLPPKPAEPDFTSQKH

SEQ ID NO: 5294 - protein, 298 aa, Glycine max
  peptide (1)..(298): Ceres Seq. ID no. 14313677
  misc_feature (85)..(188): Pfam Name: Pfam Description:  Cyclic nucleotide-binding domain
  misc_feature (1)..(298): NCBI GI NO: 24943192 NR Description: cyclic nucleotide-gated channel A
  misc_feature (1)..(295): NCBI GI NO: 15238657 NR Description: cyclic nucleotide-regulated ion channel (CNGC1)
  misc_feature (1)..(296): NCBI GI NO: 6969231 NR Description: cyclic nucleotide-gated cyclic nucleotide-gated calmodulin-binding ionchannel
  misc_feature (1)..(297): NCBI GI NO: 24943196 NR Description: cyclic nucleotide-gated channel C
  misc_feature (1)..(295): NCBI GI NO: 18378827 NR Description: cyclic nucleotide-regulated ion channel
  misc_feature (1)..(295): NCBI GI NO: 38503202 NR Description: Probable cyclic nucleotide-gated ion channel 10
  misc_feature (1)..(295): NCBI GI NO: 6969229 NR Description: cyclic nucleotide-gated cyclic nucleotide-gated calmodulin-binding ionchannel
  misc_feature (1)..(294): NCBI GI NO: 7484881 NR Description: cyclic nucleotide gated channel homolog F3I3
  misc_feature (1)..(294): NCBI GI NO: 22328204 NR Description: cyclic nucleotide-regulated ion channel, putative
  misc_feature (1)..(293): NCBI GI NO: 18407073 NR Description: cyclic nucleotide-regulated ion channel (CNGC3)
MRVKRQDAEQWMSHRMLPENLRERIRKYEQYQWQENRGVEEEALIRNLPKDLRRDIKRHLCLTLVKKVPMFEKMDEQLLDAMCDRLKPVLYTEKSYIVREEDPVDEMLFIMRGKVSTMTTNGGRTGFFNSMFLKAGDFCGEELLTWALDPNSSSNLPISTRTVETISEVEAFALTADDLKFVASQFRRLHSKQLQHAFRFYSSQWKTWAATFIQAAWRRYWKKKIERSLREAEDELQDALANEEESSLSLGATIYASRFAANALRNLRENSRHNRMQQRLLPLLPPKPAEPDFTSQKH

SEQ ID NO: 5295 - DNA, 1121 bp, Glycine max
  misc_feature (1)..(1121): Ceres Seq. ID no. 13593968
  misc_feature (1022)..(1022): n is a, c, t, g, unknown, or other
atcacagctgcaatcaacaagacttagaatgcgatgagcaaaaatagacctcaattccgaattcagagatagcacgcaccaggagaagccatggctactcaatccccttcacctcagaacctaggtggtgaaattgagcaaacagaaaatgtagatcagcataataggggagaagagcttggtaaacagagttcagacacatcggtgtttgtgaactcagagccattgcgtgaggaacaaattcagaatgctgtgaaatttctgtcgcacccgaaagttagaggttctcctgtcatccacagacgatcgtttctggagaagaagggccttacgaaggaggagattgatgaagcctttcggcgtgtgcctgattcacctccaagtgtgcagacagctggcataaatcaagatggacaattgaagccatcatcaaacattcagcagcaaggccaaccacaggctttgcagctgactgtaccagcttctactggtgttactactacgcttggaaccttatctcgccgcagttttcactggtcacatgcccttattgcagttggattactggctgcttcaggtgctggtacagttatagtaattaagaattctattctccctcggttaaaatcctggatacgcaatgttgtcctagaagaggatcatgaccaatcaaagagaacaggctcaaaaccaacattggcagaagaagctgcacaggctgcaaaagcagctgcagttgcagctgctgatattgcaaaagcaagccaagaattactgagttcaaaaattgaagagaagagatattttgtagaagttgtgaaccttttggataagcaagtgcaggaaatgaagttgatgactaatgcaataggaagattggaagcttctggtggactctctgtctcaaagcaagaagaccgcttagtcactcaaacaggttcaaagacacagcaactgatcgtgaatgggaagtcagactatgagtcccgatcagtgagatcttcatcccctcctgtatctgntgaaccatctagtgctcctcatcctaaatcatatatggagataatggccatgatccaaagaggggagaagccttctaacattagggaaattgatgattc

SEQ ID NO: 5296 - protein, 343 aa, Glycine max
  peptide (1)..(343): Ceres Seq. ID no. 13593969
  misc_feature (46)..(177): Pfam Name: Pex14p Pfam Description: Peroxisomal membrane anchor protein
  misc_feature (33)..(342): NCBI GI NO: 11094252 NR Description: PEX14 [Arabidopsis thaliana]
  misc_feature (33)..(342): NCBI GI NO: 30697742 NR Description: (PEX14) protein [Arabidopsis thaliana]
  misc_feature (33)..(342): NCBI GI NO: 11121113 NR Description: peroxin Pex14 [Arabidopsis thaliana]
  misc_feature (127)..(342): NCBI GI NO: 20466350 NR Description: putative protein [Arabidopsis thaliana]
  misc_feature (32)..(93): NCBI GI NO: 9945056 NR Description: rice EST D22333 corresponds to a region of thepredicated gene
  misc_feature (253)..(342): NCBI GI NO: 21593914 NR Description: unknown [Arabidopsis thaliana]
  misc_feature (311)..(311): Xaa is any aa, unknown or other
MATQSPSPQNLGGEIEQTENVDQHNRGEELGKQSSDTSVFVNSEPLREEQIQNAVKFLSHPKVRGSPVIHRRSFLEKKGLTKEEIDEAFRRVPDSPPSVQTAGINQDGQLKPSSNIQQQGQPQALQLTVPASTGVTTTLGTLSRRSFHWSHALIAVGLLAASGAGTVIVIKNSILPRLKSWIRNVVLEEDHDQSKRTGSKPTLAEEAAQAAKAAAVAAADIAKASQELLSSKIEEKRYFVEVVNLLDKQVQEMKLMTNAIGRLEASGGLSVSKQEDRLVTQTGSKTQQLIVNGKSDYESRSVRSSSPPVSXEPSSAPHPKSYMEIMAMIQRGEKPSNIREIDD

SEQ ID NO: 5297 - DNA, 749 bp, Glycine max
  misc_feature (1)..(749): Ceres Seq. ID no. 14307257
tatttttcatgattttaataatcatcgaccaatgtagtctatcaaaatcaacattatcagtcaatttgatttctggcgttaccaaatcagttaactaaattatgaatttgcactttgtgtgtatacaggtattcacacaaccagttttccagcttgtggaaacttgggttgcgaagcgttggcctgaaagcaacttcatgggaaaagaatatcgtgttggcaagttcagattcaatggattcaggatgatatggaggacagtgtacgtgattttcacagcagtggttgctatgatacttcccttcttcaacagcattgtgggtttgcttggagctatttccttctttcctttgacagtgtattttccaacagagatgtatctggtgcaggctaaagtgcccaagttttctctggtctggattggggtcaaaattctaagtggcttctgcttgattgtcactcttgttgctgcagctggatcaatccaaggaatcatcgcagaccttaaaatctatgagcccttcaagtaaatatcctttgtgtagtttagctctttggatgaacaatggtttgtggctaagtttgtggtcattattgatcagttgtttggataaactttctttcaagtgttttcataatatatacttttataatggatcgataagaatgcttttagatcctagaaaaattttaaattgctttttgtcctcaacttctataatcaataatagttttcgtttctgtatttc

SEQ ID NO: 5298 - protein, 142 aa, Glycine max
  peptide (1)..(142): Ceres Seq. ID no. 14307258
  misc_feature (3)..(142): NCBI GI NO: 27447655 NR Description: amino acid transporter [Lycopersicon esculentum]
  misc_feature (3)..(142): NCBI GI NO: 15216030 NR Description: amino acid permease AAP4 [Vicia faba var. minor]
  misc_feature (3)..(142): NCBI GI NO: 15240523 NR Description: amino acid permease 6 (AAP6)
  misc_feature (3)..(142): NCBI GI NO: 13676299 NR Description: amino acid transporter [Glycine max]
  misc_feature (4)..(142): NCBI GI NO: 31455391 NR Description: amino acid permease 1 [Brassica napus]
  misc_feature (3)..(142): NCBI GI NO: 4138679 NR Description: amino acid transporter [Vicia faba]
  misc_feature (3)..(142): NCBI GI NO: 31455393 NR Description: amino acid permease 6 [Brassica napus]
  misc_feature (3)..(142): NCBI GI NO: 20161442 NR Description: putative amino acid transport protein
  misc_feature (3)..(142): NCBI GI NO: 4164408 NR Description: amino acid carrier [Ricinus communis]
  misc_feature (3)..(142): NCBI GI NO: 7442735 NR Description: amino acid transport protein AAP1 - castor bean
MNLHFVCIQVFTQPVFQLVETWVAKRWPESNFMGKEYRVGKFRFNGFRMIWRTVYVIFTAVVAMILPFFNSIVGLLGAISFFPLTVYFPTEMYLVQAKVPKFSLVWIGVKILSGFCLIVTLVAAAGSIQGIIADLKIYEPFK

SEQ ID NO: 5299 - protein, 110 aa, Glycine max
  peptide (1)..(110): Ceres Seq. ID no. 14307259
  misc_feature (1)..(110): NCBI GI NO: 27447655 NR Description: amino acid transporter [Lycopersicon esculentum]
  misc_feature (1)..(110): NCBI GI NO: 15216030 NR Description: amino acid permease AAP4 [Vicia faba var. minor]
  misc_feature (1)..(110): NCBI GI NO: 15240523 NR Description: amino acid permease 6 (AAP6)
  misc_feature (1)..(110): NCBI GI NO: 13676299 NR Description: amino acid transporter [Glycine max]
  misc_feature (1)..(110): NCBI GI NO: 31455391 NR Description: amino acid permease 1 [Brassica napus]
  misc_feature (1)..(110): NCBI GI NO: 4138679 NR Description: amino acid transporter [Vicia faba]
  misc_feature (1)..(110): NCBI GI NO: 31455393 NR Description: amino acid permease 6 [Brassica napus]
  misc_feature (1)..(110): NCBI GI NO: 20161442 NR Description: putative amino acid transport protein
  misc_feature (1)..(110): NCBI GI NO: 4164408 NR Description: amino acid carrier [Ricinus communis]
  misc_feature (1)..(110): NCBI GI NO: 7442735 NR Description: amino acid transport protein AAP1 - castor bean
MGKEYRVGKFRFNGFRMIWRTVYVIFTAVVAMILPFFNSIVGLLGAISFFPLTVYFPTEMYLVQAKVPKFSLVWIGVKILSGFCLIVTLVAAAGSIQGIIADLKIYEPFK

SEQ ID NO: 5300 - protein, 94 aa, Glycine max
  peptide (1)..(94): Ceres Seq. ID no. 14307260
  misc_feature (1)..(94): NCBI GI NO: 27447655 NR Description: amino acid transporter [Lycopersicon esculentum]
  misc_feature (1)..(94): NCBI GI NO: 15216030 NR Description: amino acid permease AAP4 [Vicia faba var. minor]
  misc_feature (1)..(94): NCBI GI NO: 15240523 NR Description: amino acid permease 6 (AAP6)
  misc_feature (1)..(94): NCBI GI NO: 13676299 NR Description: amino acid transporter [Glycine max]
  misc_feature (1)..(94): NCBI GI NO: 31455391 NR Description: amino acid permease 1 [Brassica napus]
  misc_feature (1)..(94): NCBI GI NO: 4138679 NR Description: amino acid transporter [Vicia faba]
  misc_feature (1)..(94): NCBI GI NO: 31455393 NR Description: amino acid permease 6 [Brassica napus]
  misc_feature (1)..(94): NCBI GI NO: 20161442 NR Description: putative amino acid transport protein
  misc_feature (1)..(94): NCBI GI NO: 4164408 NR Description: amino acid carrier [Ricinus communis]
  misc_feature (1)..(94): NCBI GI NO: 7442735 NR Description: amino acid transport protein AAP1 - castor bean
MIWRTVYVIFTAVVAMILPFFNSIVGLLGAISFFPLTVYFPTEMYLVQAKVPKFSLVWIGVKILSGFCLIVTLVAAAGSIQGIIADLKIYEPFK

SEQ ID NO: 5301 - DNA, 1498 bp, Glycine max
  misc_feature (1)..(1498): Ceres Seq. ID no. 15225741
ccgggccccccctcgagtcagctacgtaggcccccccccccccaagcagtgtcagaaagcaaatattgcctattccgcaatatggcggaaaatgcttcgattgagctgaacaagtttgtgttcttttgtttgttggtgctaatacaagtggcagtttctgaaatcatttttgaagagcgttttgatgatggatggcgaggtaggtgggtgaagtcagactggaaaagcagtgaaggcaaagcaggttcattcaagcacacagctggaaaatgggccagtgatccagatgataaaggtattcaaacatccagtgatgccaaacactttgccatctctgcaaaaataccagaattcacaaacaagaacagaacattggtccttcagtattctgtaaaatttgagcaagagattgaatgtggtggaggttacatcaagcttctctctggatttgttaatcaaaagaagtttggtggggatacaccatatattttaatgtttggaccagatttatgtggcacggatacaaagaagctccatgtgatactctcctaccacggtcaaaattaccccataaagaaggacctgcaatgtgaaactgacaggttaactcacttctacacattcattctcaggccagatgccacatacagtgtcctggttgacaatagagagagagattccggaagcatgtatacagattgggatattcttcctccacgaaaaatcaaagatgtcaaggccaaaaagcctaaagactgggaagaaagagaatacattgaagaccctaatgatgtcaaacctgagggatatgattcgatcccaagagaaattcctgacccaaatgctaaagagcctgaaaactgggatgaagaggaagatgggaaatggaaaccaccaaagataccaaatccagcatacaaaggaccatggaaaagaaagaaaatcaagaaccctaactacaaagggaaatggaaaactccatggatagataatccagaatttgaagacgaccctgatctttatgtgcttaagcctatcaagtatgtgggcattgaagtttggcaggttaaaggcggttcagtttttgacaatgttttgatttgtgatgaccctgattatgcaaaacaagttgttgaggaagtgtttgccaacagggagattgaaaaggaaggttttgaagaagcagagaaagtaaggaaagccaaagaggaggaggaggctcaaagagcaagagaagaaggtgaaaagcgtagacgagagagaggtcatgatcgacgataccgggacaaatatagagacaaatatagaaggcatcgccaccatgattacgatgatcatgacgagctttgatgggataaaacgtccttctcagttctcacttatttggttgacaagaatttcgagattgttatgaattatagttacgttgatagtccatctcatgttaatttccaagggaaacattttaattttaaataaaaagtagtctatttgctgc

SEQ ID NO: 5302 - protein, 449 aa, Glycine max
  peptide (1)..(449): Ceres Seq. ID no. 15225742
  misc_feature (55)..(367): Pfam Name: Pfam Description:  Calreticulin family
  misc_feature (41)..(449): NCBI GI NO: 34907604 NR Description: putative calreticulin
  misc_feature (37)..(449): NCBI GI NO: 18390896 NR Description: calreticulin 3 (CRT3) [Arabidopsis thaliana]
  misc_feature (37)..(449): NCBI GI NO: 12643531 NR Description: Calreticulin 3 precursor
  misc_feature (37)..(449): NCBI GI NO: 27311777 NR Description: calreticulin, putative [Arabidopsis thaliana]
  misc_feature (42)..(405): NCBI GI NO: 33517365 NR Description: calreticulin 3 [Brassica rapa subsp. pekinensis]
  misc_feature (44)..(449): NCBI GI NO: 11131745 NR Description: Calreticulin precursor
  misc_feature (44)..(449): NCBI GI NO: 9858814 NR Description: calreticulin [Pinus taeda]
  misc_feature (40)..(449): NCBI GI NO: 12643243 NR Description: CALRETICULIN 2 PRECURSOR
  misc_feature (44)..(449): NCBI GI NO: 11131631 NR Description: Calreticulin precursor
  misc_feature (46)..(449): NCBI GI NO: 11131769 NR Description: Calreticulin precursor
PGPPSSQLRRPPPPQAVSESKYCLFRNMAENASIELNKFVFFCLLVLIQVAVSEIIFEERFDDGWRGRWVKSDWKSSEGKAGSFKHTAGKWASDPDDKGIQTSSDAKHFAISAKIPEFTNKNRTLVLQYSVKFEQEIECGGGYIKLLSGFVNQKKFGGDTPYILMFGPDLCGTDTKKLHVILSYHGQNYPIKKDLQCETDRLTHFYTFILRPDATYSVLVDNRERDSGSMYTDWDILPPRKIKDVKAKKPKDWEEREYIEDPNDVKPEGYDSIPREIPDPNAKEPENWDEEEDGKWKPPKIPNPAYKGPWKRKKIKNPNYKGKWKTPWIDNPEFEDDPDLYVLKPIKYVGIEVWQVKGGSVFDNVLICDDPDYAKQVVEEVFANREIEKEGFEEAEKVRKAKEEEEAQRAREEGEKRRRERGHDRRYRDKYRDKYRRHRHHDYDDHDEL

SEQ ID NO: 5303 - protein, 422 aa, Glycine max
  peptide (1)..(422): Ceres Seq. ID no. 15225743
  misc_feature (28)..(340): Pfam Name: Pfam Description:  Calreticulin family
  misc_feature (14)..(422): NCBI GI NO: 34907604 NR Description: putative calreticulin
  misc_feature (10)..(422): NCBI GI NO: 18390896 NR Description: calreticulin 3 (CRT3) [Arabidopsis thaliana]
  misc_feature (10)..(422): NCBI GI NO: 12643531 NR Description: Calreticulin 3 precursor
  misc_feature (10)..(422): NCBI GI NO: 27311777 NR Description: calreticulin, putative [Arabidopsis thaliana]
  misc_feature (15)..(378): NCBI GI NO: 33517365 NR Description: calreticulin 3 [Brassica rapa subsp. pekinensis]
  misc_feature (17)..(422): NCBI GI NO: 11131745 NR Description: Calreticulin precursor
  misc_feature (17)..(422): NCBI GI NO: 9858814 NR Description: calreticulin [Pinus taeda]
  misc_feature (13)..(422): NCBI GI NO: 12643243 NR Description: CALRETICULIN 2 PRECURSOR
  misc_feature (17)..(422): NCBI GI NO: 11131631 NR Description: Calreticulin precursor
  misc_feature (19)..(422): NCBI GI NO: 11131769 NR Description: Calreticulin precursor
MAENASIELNKFVFFCLLVLIQVAVSEIIFEERFDDGWRGRWVKSDWKSSEGKAGSFKHTAGKWASDPDDKGIQTSSDAKHFAISAKIPEFTNKNRTLVLQYSVKFEQEIECGGGYIKLLSGFVNQKKFGGDTPYILMFGPDLCGTDTKKLHVILSYHGQNYPIKKDLQCETDRLTHFYTFILRPDATYSVLVDNRERDSGSMYTDWDILPPRKIKDVKAKKPKDWEEREYIEDPNDVKPEGYDSIPREIPDPNAKEPENWDEEEDGKWKPPKIPNPAYKGPWKRKKIKNPNYKGKWKTPWIDNPEFEDDPDLYVLKPIKYVGIEVWQVKGGSVFDNVLICDDPDYAKQVVEEVFANREIEKEGFEEAEKVRKAKEEEEAQRAREEGEKRRRERGHDRRYRDKYRDKYRRHRHHDYDDHDEL

SEQ ID NO: 5304 - protein, 285 aa, Glycine max
  peptide (1)..(285): Ceres Seq. ID no. 15225744
  misc_feature (1)..(203): Pfam Name: Pfam Description:  Calreticulin family
  misc_feature (1)..(285): NCBI GI NO: 34907604 NR Description: putative calreticulin
  misc_feature (1)..(285): NCBI GI NO: 18390896 NR Description: calreticulin 3 (CRT3) [Arabidopsis thaliana]
  misc_feature (1)..(285): NCBI GI NO: 12643531 NR Description: Calreticulin 3 precursor
  misc_feature (1)..(285): NCBI GI NO: 27311777 NR Description: calreticulin, putative [Arabidopsis thaliana]
  misc_feature (1)..(241): NCBI GI NO: 33517365 NR Description: calreticulin 3 [Brassica rapa subsp. pekinensis]
  misc_feature (1)..(285): NCBI GI NO: 11131745 NR Description: Calreticulin precursor
  misc_feature (1)..(285): NCBI GI NO: 9858814 NR Description: calreticulin [Pinus taeda]
  misc_feature (1)..(285): NCBI GI NO: 12643243 NR Description: CALRETICULIN 2 PRECURSOR
  misc_feature (1)..(285): NCBI GI NO: 11131631 NR Description: Calreticulin precursor
  misc_feature (1)..(285): NCBI GI NO: 11131769 NR Description: Calreticulin precursor
MFGPDLCGTDTKKLHVILSYHGQNYPIKKDLQCETDRLTHFYTFILRPDATYSVLVDNRERDSGSMYTDWDILPPRKIKDVKAKKPKDWEEREYIEDPNDVKPEGYDSIPREIPDPNAKEPENWDEEEDGKWKPPKIPNPAYKGPWKRKKIKNPNYKGKWKTPWIDNPEFEDDPDLYVLKPIKYVGIEVWQVKGGSVFDNVLICDDPDYAKQVVEEVFANREIEKEGFEEAEKVRKAKEEEEAQRAREEGEKRRRERGHDRRYRDKYRDKYRRHRHHDYDDHDEL

SEQ ID NO: 5305 - DNA, 1388 bp, Glycine max
  misc_feature (1)..(1388): Ceres Seq. ID no. 14313758
gaaccatcattgcgccttgcagcagctacgccttctacttaaatcgtaagaaggaactctctctccaccgtcccatcctctttccactcaacttctgccaatgcgtccgtttgcacctcaagtcgcacgcttcacgaacagatcaacttcatcctcaccagcactacagtccgcagcaagttattttacatccggttaccgcagcactccttctcccacacaacaacaaaccagaatgtcttcctccaccgagactggcgagcttaagctcgagagcaccgtcaagaccgccactggtgtcgagctcagcaacgagcagaggactatcgtgtcttcagtgctggacctcttcgctggcaggccctcccttgccaagctacagctctggaaggacgatgccgtcttcagcgaccccatcactgtcgcaaagggcaggaaggagtttgagcctcaatggtacggcctccaaaccgccttctccgaaatcgagcgcaaagaccacagcgtcacctcctccggcaaccccatcgagctagacatgaccacaatgtacaaggtcaagggtatcggcaaggagacgaccatcaccagcaaggtcaacatcttccacgagaacggcaagatcacccgcgtcgaggacaagtggaacggcaacctccccgactctggcatcgcaaatgcattccgacgactcaacgccgttagtgtccccaagatggtcggcgtgcccaagaacgcagaggaggatgccaagcgcggcaattagaagcgctgctacattgtagcctcccactgctttcgtttcggctttctactcggtggttttcgttctgttgtcaaggagtcggacgttcaacctgcgacagcgcctggcattatgaggaatcctggtcctcagggtggacaagatcgaccgcgcgattctgcaacggctgtgcatttcgagcctgctttgagcgacattccggaagaggctgcttctactggggcttcaccacctccggctgcatcgtcctcggtctcagatccttcagcttcatcttcttctcaacctcgcgatcccgcgccaactgttcactttgatcctaacttgaagaaaccgaagaagggtcgtccctctactgcgactgctttaccttcagacgggtcacctcctccaccaattcggccctatcttaagcagcctccgcaatcgctaccgccgactcccgagtcagagccacctgaggcgtcgaatgctcctccggcagttgctgaagccgaagcgagttcggggaagcgggtgtcgcctctacgtttgctgggttttcgttgattaagatacttttacggttggacagtacacacagcattattcttagcaggatgtatcactattcattatgatg

SEQ ID NO: 5306 - protein, 221 aa, Glycine max
  peptide (1)..(221): Ceres Seq. ID no. 14313759
  misc_feature (54)..(205): NCBI GI NO: 32409371 NR Description: predicted protein [Neurospora crassa]
MRPFAPQVARFTNRSTSSSPALQSAASYFTSGYRSTPSPTQQQTRMSSSTETGELKLESTVKTATGVELSNEQRTIVSSVLDLFAGRPSLAKLQLWKDDAVFSDPITVAKGRKEFEPQWYGLQTAFSEIERKDHSVTSSGNPIELDMTTMYKVKGIGKETTITSKVNIFHENGKITRVEDKWNGNLPDSGIANAFRRLNAVSVPKMVGVPKNAEEDAKRGN

SEQ ID NO: 5307 - protein, 177 aa, Glycine max
  peptide (1)..(177): Ceres Seq. ID no. 14313760
  misc_feature (46)..(176): Pfam Name: Pfam Description:  Extensin-like region
  misc_feature (72)..(177): NCBI GI NO: 13592175 NR Description: ppg3 [Leishmania major]
  misc_feature (82)..(177): NCBI GI NO: 13592175 NR Description: ppg3 [Leishmania major]
  misc_feature (82)..(177): NCBI GI NO: 13592175 NR Description: ppg3 [Leishmania major]
  misc_feature (82)..(177): NCBI GI NO: 13592175 NR Description: ppg3 [Leishmania major]
  misc_feature (81)..(177): NCBI GI NO: 13592175 NR Description: ppg3 [Leishmania major]
  misc_feature (81)..(177): NCBI GI NO: 13592175 NR Description: ppg3 [Leishmania major]
  misc_feature (89)..(177): NCBI GI NO: 13592175 NR Description: ppg3 [Leishmania major]
  misc_feature (79)..(177): NCBI GI NO: 13592175 NR Description: ppg3 [Leishmania major]
  misc_feature (53)..(177): NCBI GI NO: 20138131 NR Description: Vegetative cell wall protein gp1 precursor
  misc_feature (80)..(177): NCBI GI NO: 15233976 NR Description: leucine-rich repeat extensin family
TIIAPCSSYAFYLNRKKELSLHRPILFPLNFCQCVRLHLKSHASRTDQLHPHQHYSPQQVILHPVTAALLLPHNNKPECLPPPRLASLSSRAPSRPPLVSSSATSRGLSCLQCWTSSLAGPPLPSYSSGRTMPSSATPSLSQRAGRSLSLNGTASKPPSPKSSAKTTASPPPATPSS

SEQ ID NO: 5308 - protein, 176 aa, Glycine max
  peptide (1)..(176): Ceres Seq. ID no. 14313761
  misc_feature (9)..(160): NCBI GI NO: 32409371 NR Description: predicted protein [Neurospora crassa]
MSSSTETGELKLESTVKTATGVELSNEQRTIVSSVLDLFAGRPSLAKLQLWKDDAVFSDPITVAKGRKEFEPQWYGLQTAFSEIERKDHSVTSSGNPIELDMTTMYKVKGIGKETTITSKVNIFHENGKITRVEDKWNGNLPDSGIANAFRRLNAVSVPKMVGVPKNAEEDAKRGN

SEQ ID NO: 5309 - DNA, 1484 bp, Glycine max
  misc_feature (1)..(1484): Ceres Seq. ID no. 14310387
ggtaaaaatgaacatgatagtcctgatgctcaatgcatggaaaggctcattgtgagtgatacttcattgcctaaatctgctaccagtcattttgaaagcccagctatttcagagtcttcagacattgtggatgatgggcctgtgaacaagtcaaatggtacagagtgcagaaatacaaatccactaccaggtgcccagaaagacataaaagaagatgaagtctatattaatatcaaactaaatgaagaatataacaagtctgttgatgttgatactcctaccgagtcacatcaagcagaagatgctggactattagtgaaggctgcagaagaccttgctagggagtatacatctcctttaactactgaaccttctgctcagcctgacagggaagtgtccggacttactgctgtgcctgttcaagatcaagctggtaataacttgggtaaacttggttcatccagagttgatgcttcagttgagtcaggtagccggtgtgacagtttggaaggcatctggggctctgtttcagttctgtcaattcaatccgatgcaccagctgttattgatgctgaaaccttgccatcaactggcttgctggcatcaacagaagcagggaaatcaaacttcaacgactcaaaagctacacctgacagacagcagtctggaaaatcagaaatgtttgaagcaccatctttcatgacattggttgatcctggtcaggttagcccaaaagccaatgcttctgaagtccagaagggacagaacacacaacagccagattccacttcacaggctgcttggtttcccactcttacacaagttgtcaatgagtctcaagggagaaagaagaatgaagaaataatagccaaggtgacaaactggagcactagtaaggagcacactcctcttaagagcctcttaggtgaggctgcccatagcagcaagccaagatctccaaaaatggaagaaaaatcagtgagtcagaagagtggtaaagttccggaaaagaatggttctgggttgacaactgttaactccattctgggtcctgaatcccctgtggctcaagtggtaaaaggagaggttgcaaaagaatggaactctccagcaagatatcctgctgatatcaagagagaaaaaaggaaagttaagagcagaccatactggatacaattggtatgctgcacatctgtcagtcctcagcgaaggtagaaaatcactaggttctgataatgcttccactctgatggattctggtcatagacatgctatttgcagtatttttctgtttttagtttgtctttgggtgcatattttgatcatgtgtcttctgttcattttggtagcctcctaggagtttggttgtatatgttgaccatcttcagttattatttatccctgcggtcatacatttttaccatacatagtaacgtatcattattttggcctggacccatattttagtccggtcttagttcttg

SEQ ID NO: 5310 - protein, 404 aa, Glycine max
  peptide (1)..(404): Ceres Seq. ID no. 14310388
  misc_feature (272)..(399): NCBI GI NO: 17064874 NR Description: Unknown protein [Arabidopsis thaliana]
  misc_feature (272)..(399): NCBI GI NO: 22328620 NR Description: expressed protein [Arabidopsis thaliana]
  misc_feature (272)..(398): NCBI GI NO: 7488181 NR Description: probable salt-inducible protein - Arabidopsisthaliana
  misc_feature (345)..(385): NCBI GI NO: 16973320 NR Description: salt inducible-like protein [Gossypium hirsutum]
GKNEHDSPDAQCMERLIVSDTSLPKSATSHFESPAISESSDIVDDGPVNKSNGTECRNTNPLPGAQKDIKEDEVYINIKLNEEYNKSVDVDTPTESHQAEDAGLLVKAAEDLAREYTSPLTTEPSAQPDREVSGLTAVPVQDQAGNNLGKLGSSRVDASVESGSRCDSLEGIWGSVSVLSIQSDAPAVIDAETLPSTGLLASTEAGKSNFNDSKATPDRQQSGKSEMFEAPSFMTLVDPGQVSPKANASEVQKGQNTQQPDSTSQAAWFPTLTQVVNESQGRKKNEEIIAKVTNWSTSKEHTPLKSLLGEAAHSSKPRSPKMEEKSVSQKSGKVPEKNGSGLTTVNSILGPESPVAQVVKGEVAKEWNSPARYPADIKREKRKVKSRPYWIQLVCCTSVSPQRR

SEQ ID NO: 5311 - protein, 392 aa, Glycine max
  peptide (1)..(392): Ceres Seq. ID no. 14310389
  misc_feature (260)..(387): NCBI GI NO: 17064874 NR Description: Unknown protein [Arabidopsis thaliana]
  misc_feature (260)..(387): NCBI GI NO: 22328620 NR Description: expressed protein [Arabidopsis thaliana]
  misc_feature (260)..(386): NCBI GI NO: 7488181 NR Description: probable salt-inducible protein - Arabidopsisthaliana
  misc_feature (333)..(373): NCBI GI NO: 16973320 NR Description: salt inducible-like protein [Gossypium hirsutum]
MERLIVSDTSLPKSATSHFESPAISESSDIVDDGPVNKSNGTECRNTNPLPGAQKDIKEDEVYINIKLNEEYNKSVDVDTPTESHQAEDAGLLVKAAEDLAREYTSPLTTEPSAQPDREVSGLTAVPVQDQAGNNLGKLGSSRVDASVESGSRCDSLEGIWGSVSVLSIQSDAPAVIDAETLPSTGLLASTEAGKSNFNDSKATPDRQQSGKSEMFEAPSFMTLVDPGQVSPKANASEVQKGQNTQQPDSTSQAAWFPTLTQVVNESQGRKKNEEIIAKVTNWSTSKEHTPLKSLLGEAAHSSKPRSPKMEEKSVSQKSGKVPEKNGSGLTTVNSILGPESPVAQVVKGEVAKEWNSPARYPADIKREKRKVKSRPYWIQLVCCTSVSPQRR

SEQ ID NO: 5312 - DNA, 1346 bp, Glycine max
  misc_feature (1)..(1346): Ceres Seq. ID no. 14310446
ttacttcatatagagtctattttgtcttctatcagaatcgccctacaatttaatgcttgtttcttttacatttgattggctaaacatatcatgaaacaaacaagcaccaagtagaaatgtttttcaaccagtgaaagactgaaagtccattttcaaggcacatgaatcacaaaacatggatagagtaaatatcccagtgcaagctcagaaatagatcttattctgaatactctggtggtcaatagccacagcccacttctattttgtaaattagcttctagcttaagtacatctagatcatgaaaccaaactttgatcttgaagtggaggcatgtgcagcatatgaatctgaagttagcagccaggttgcttccaatgtatctattcaagaaacctctataggtccttgtagtgacagtctcactaacatttccaacatcacaaatccaatagggattcatcctaattcagatgctatttcacttgacttaagtctcaacttcaagaatagtgcgccagggggaagagattcaataggattctccttctcaagcactagcgagagcagcaatgaacctgcctcacaaactacagcagcaaccattccacgagtcttctcttgcaattactgccagcgcaagtttttcagttctcaggctcttggtggacaccagaatgcacacaagagagaaaggacattagcaaaaagggctatgagaatgggatttttctctgaaaggtacgccaatctagcatctctccctctgcatggttctttcaggtccttaggaataaaggcgcactcttcactgcaccatggtttctcaccaacaatgaggcgtcctgagataaagaacaatgcaagatttgatcaagggtatgttggccacccgatattcttggaggatgatgagtcagatttgttgtggcctggtagttttcgtcaagttgctgaggcaggtgatagtcatcagaatttcatactgactggaagttcaaatttgagttttactgaggtgaatccacctgtagacatagataactcaacaccagatttgactttgaaactttgaaggaggttatttggtatggttctgaccttgagttgtcttctttattgctatgttataacacagtaagacatgcatgcaaggggccatgattgccagattgattcctatactcagttgggtttccttttacttttactctcattttcagttttctgttaggaatcttgctttggtattttgctttttatgtttctcattgtataagagctccgggaggacaattttggagcttctgtgcttgttatataaatcatgttatcccttcactgtaag

SEQ ID NO: 5313 - protein, 257 aa, Glycine max
  peptide (1)..(257): Ceres Seq. ID no. 14310447
  misc_feature (106)..(128): Pfam Name: Pfam Description:  Zinc finger, C2H2 type
  misc_feature (31)..(159): NCBI GI NO: 15218939 NR Description: C2H2-type zinc finger protein -related
  misc_feature (149)..(257): NCBI GI NO: 15218939 NR Description: C2H2-type zinc finger protein -related
  misc_feature (151)..(257): NCBI GI NO: 1362017 NR Description: CCHH finger protein 4 - Arabidopsis thaliana
  misc_feature (31)..(139): NCBI GI NO: 1362017 NR Description: CCHH finger protein 4 - Arabidopsis thaliana
  misc_feature (87)..(257): NCBI GI NO: 18395528 NR Description: zinc finger protein 7, ZFP7 [Arabidopsis thaliana]
  misc_feature (60)..(257): NCBI GI NO: 15220823 NR Description: zinc finger protein [Arabidopsis thaliana]
  misc_feature (58)..(172): NCBI GI NO: 15238913 NR Description: zinc finger -related protein
  misc_feature (95)..(172): NCBI GI NO: 15238724 NR Description: ZFP3 zinc finger protein [Arabidopsis thaliana]
  misc_feature (84)..(176): NCBI GI NO: 15242152 NR Description: zinc finger protein 2 (ZFP2)
  misc_feature (70)..(193): NCBI GI NO: 40538953 NR Description: expressed protein
MKPNFDLEVEACAAYESEVSSQVASNVSIQETSIGPCSDSLTNISNITNPIGIHPNSDAISLDLSLNFKNSAPGGRDSIGFSFSSTSESSNEPASQTTAATIPRVFSCNYCQRKFFSSQALGGHQNAHKRERTLAKRAMRMGFFSERYANLASLPLHGSFRSLGIKAHSSLHHGFSPTMRRPEIKNNARFDQGYVGHPIFLEDDESDLLWPGSFRQVAEAGDSHQNFILTGSSNLSFTEVNPPVDIDNSTPDLTLKL

SEQ ID NO: 5314 - DNA, 1003 bp, Glycine max
  misc_feature (1)..(1003): Ceres Seq. ID no. 14303321
gaagacaccgagcgacaaagatcgacgatgacggacgaaaccgaagaattggaaccgttgtttgattacagccgggttcagcctctgaaccccatcgacctcgatgatgattttgatgattacgaggatgtgatttgcgttgatagtaaaaagaggaagaattcccaggctgttgggaatgagaagactaatgggaaaggagtaacagtggtggacattgaggatgatgattggttgcctcctccaccaaagatcgcaagtaatgcacagaagaccacggacgaggactcaactttgaaaaaattgagattaaagaagcaggaacttgcctggtttgctgaatcagcaaaagaattgttaaaagatgttgaagagtcatcaaaattggaaattaataattcgttgcagtcttctgtggttggtgtagatgagaaaagtacagagcattctgaaagagcaaagattgtcatttccgttcaggacaaggatggaacaaagcagattcgtatgttcatggatgacaagtttgaaaggattgtcaaaatatatgcagagaaaatcaaatgtgacatgaaactgatagtattgtcctttgatggtgataaaataagtttgtctgaaacccctgcaagccttgggatggaagacgatgatattattgaagttcacttgaaatcaagttgatcgaggtcttcagtcatggattcatgaagctcaaactgacattttggggccacatttgggagttacgtaccctagaaggttgtttgtttttagcatctttagtacaagaaaaacagtgccagttcggccgaactgtatagcacattatttttttatgtaattgtctagtatcgctccttttggtggatgtttctttgtttatggtataggtttctgataatgcagaaaccctcctgtttttggatgtgcattattgcttttggttttctgcaatcagtttgcttgattgttcaaatagatgtaagtcaagatgaagctc

SEQ ID NO: 5315 - protein, 227 aa, Glycine max
  peptide (1)..(227): Ceres Seq. ID no. 14303322
  misc_feature (155)..(227): Pfam Name: Pfam Description:  Ubiquitin family
  misc_feature (10)..(227): NCBI GI NO: 18408968 NR Description: ubiquitin family [Arabidopsis thaliana]
  misc_feature (59)..(222): NCBI GI NO: 34912494 NR Description: putative amino acid or GABA permease
  misc_feature (3)..(175): NCBI GI NO: 34912494 NR Description: putative amino acid or GABA permease
EDTERQRSTMTDETEELEPLFDYSRVQPLNPIDLDDDFDDYEDVICVDSKKRKNSQAVGNEKTNGKGVTVVDIEDDDWLPPPPKIASNAQKTTDEDSTLKKLRLKKQELAWFAESAKELLKDVEESSKLEINNSLQSSVVGVDEKSTEHSERAKIVISVQDKDGTKQIRMFMDDKFERIVKIYAEKIKCDMKLIVLSFDGDKISLSETPASLGMEDDDIIEVHLKSS

SEQ ID NO: 5316 - protein, 218 aa, Glycine max
  peptide (1)..(218): Ceres Seq. ID no. 14303323
  misc_feature (146)..(218): Pfam Name: Pfam Description:  Ubiquitin family
  misc_feature (1)..(218): NCBI GI NO: 18408968 NR Description: ubiquitin family [Arabidopsis thaliana]
  misc_feature (50)..(213): NCBI GI NO: 34912494 NR Description: putative amino acid or GABA permease
  misc_feature (1)..(166): NCBI GI NO: 34912494 NR Description: putative amino acid or GABA permease
MTDETEELEPLFDYSRVQPLNPIDLDDDFDDYEDVICVDSKKRKNSQAVGNEKTNGKGVTVVDIEDDDWLPPPPKIASNAQKTTDEDSTLKKLRLKKQELAWFAESAKELLKDVEESSKLEINNSLQSSVVGVDEKSTEHSERAKIVISVQDKDGTKQIRMFMDDKFERIVKIYAEKIKCDMKLIVLSFDGDKISLSETPASLGMEDDDIIEVHLKSS

SEQ ID NO: 5317 - DNA, 1212 bp, Glycine max
  misc_feature (1)..(1212): Ceres Seq. ID no. 14303340
gaaacaatggaaaagaaatcacctgaaccacccgaagaagcatcacagtcacgagactcatcgcgagataaccagacctggataactgcacaaaacattctgagagaaaaactgatcacagaggactgtttcgcatggaaattacaagctggttccaaagaggaagaagcattgagatacgttggtggggttgacataagcttctcaaaggatgacccatcaagggcatgtggcacccttgtagtcttggacttccacactcttcaagttctctatcaagatttctctttggtcactcttcaagtcccttatgtgcctggctttctagcatttagagaggccccagttcttctgcagcttctagagaaaatgaaaaggagcaataatcctttctaccctcagctattaatggttgatggaaacggaatacttcatccccgaggttttgggctggcctgtcatattggagttgaggccaatctcccaacaattgggattggaaagaatttgcatcatgtggatggtcttactcattctagagtgagagaacttcttggagctgaagaaaactgttctgaagattttattaatttggtgggttgttctgggcatatatggggagtggccatgagatctacccagggttccataaaaccaatatttatatcaattggtcacaagatatcacttcagactgccattatgattgttcaaatgacatgcaagtaccgtgtgcctgagccaattaggcaggctgacataagatctagagactacattcggaaacttgaagcaaatgccaaagtaaagtaatttcactcatatggtttaagtttttatcctgttaaattatgaaatagctagccatgtgagatgacaataacaagtttggctgcaaggggctcaaatgaacttgatagaaccatcacaattcgtcaagtggttagaaacaatgccagtgccagtggatttgcttatagcttcattgaatgatccatttcacctcacaggattacataaggactcagcattccatccattagcataattatatctaaaccactcatgtaaaagagtgatgatatatgcacaaccaaatcactctcaaaatagaactatttgcgagctagcattctgtgtagtgtagaagcagaatttttatttctggttgctttgattgtctgatgagaagtgctagcaacattctttaat

SEQ ID NO: 5318 - protein, 270 aa, Glycine max
  peptide (1)..(270): Ceres Seq. ID no. 14303341
  misc_feature (12)..(262): NCBI GI NO: 18417747 NR Description: expressed protein [Arabidopsis thaliana]
  misc_feature (11)..(188): NCBI GI NO: 28828773 NR Description: similar to Arabidopsis thaliana (Mouse-ear cress)
  misc_feature (190)..(261): NCBI GI NO: 28828773 NR Description: similar to Arabidopsis thaliana (Mouse-ear cress)
  misc_feature (27)..(262): NCBI GI NO: 31542775 NR Description: hypothetical protein FLJ35220 [Homo sapiens]
  misc_feature (34)..(262): NCBI GI NO: 34875599 NR Description: similar to chromosome 17 open reading frame 27
  misc_feature (134)..(262): NCBI GI NO: 7486498 NR Description: hypothetical protein F6E21
  misc_feature (97)..(262): NCBI GI NO: 28893575 NR Description: RIKEN cDNA A730011L01 gene [Mus musculus]
  misc_feature (132)..(262): NCBI GI NO: 40555767 NR Description: Unknown (protein for MGC:74455) [Homo sapiens]
  misc_feature (27)..(94): NCBI GI NO: 40555767 NR Description: Unknown (protein for MGC:74455) [Homo sapiens]
  misc_feature (132)..(262): NCBI GI NO: 21751158 NR Description: unnamed protein product [Homo sapiens]
ETMEKKSPEPPEEASQSRDSSRDNQTWITAQNILREKLITEDCFAWKLQAGSKEEEALRYVGGVDISFSKDDPSRACGTLVVLDFHTLQVLYQDFSLVTLQVPYVPGFLAFREAPVLLQLLEKMKRSNNPFYPQLLMVDGNGILHPRGFGLACHIGVEANLPTIGIGKNLHHVDGLTHSRVRELLGAEENCSEDFINLVGCSGHIWGVAMRSTQGSIKPIFISIGHKISLQTAIMIVQMTCKYRVPEPIRQADIRSRDYIRKLEANAKVK

SEQ ID NO: 5319 - protein, 268 aa, Glycine max
  peptide (1)..(268): Ceres Seq. ID no. 14303342
  misc_feature (10)..(260): NCBI GI NO: 18417747 NR Description: expressed protein [Arabidopsis thaliana]
  misc_feature (9)..(186): NCBI GI NO: 28828773 NR Description: similar to Arabidopsis thaliana (Mouse-ear cress)
  misc_feature (188)..(259): NCBI GI NO: 28828773 NR Description: similar to Arabidopsis thaliana (Mouse-ear cress)
  misc_feature (25)..(260): NCBI GI NO: 31542775 NR Description: hypothetical protein FLJ35220 [Homo sapiens]
  misc_feature (32)..(260): NCBI GI NO: 34875599 NR Description: similar to chromosome 17 open reading frame 27
  misc_feature (132)..(260): NCBI GI NO: 7486498 NR Description: hypothetical protein F6E21
  misc_feature (95)..(260): NCBI GI NO: 28893575 NR Description: RIKEN cDNA A730011L01 gene [Mus musculus]
  misc_feature (130)..(260): NCBI GI NO: 40555767 NR Description: Unknown (protein for MGC:74455) [Homo sapiens]
  misc_feature (25)..(92): NCBI GI NO: 40555767 NR Description: Unknown (protein for MGC:74455) [Homo sapiens]
  misc_feature (130)..(260): NCBI GI NO: 21751158 NR Description: unnamed protein product [Homo sapiens]
MEKKSPEPPEEASQSRDSSRDNQTWITAQNILREKLITEDCFAWKLQAGSKEEEALRYVGGVDISFSKDDPSRACGTLVVLDFHTLQVLYQDFSLVTLQVPYVPGFLAFREAPVLLQLLEKMKRSNNPFYPQLLMVDGNGILHPRGFGLACHIGVEANLPTIGIGKNLHHVDGLTHSRVRELLGAEENCSEDFINLVGCSGHIWGVAMRSTQGSIKPIFISIGHKISLQTAIMIVQMTCKYRVPEPIRQADIRSRDYIRKLEANAKVK

SEQ ID NO: 5320 - protein, 147 aa, Glycine max
  peptide (1)..(147): Ceres Seq. ID no. 14303343
  misc_feature (1)..(139): NCBI GI NO: 18417747 NR Description: expressed protein [Arabidopsis thaliana]
  misc_feature (1)..(65): NCBI GI NO: 28828773 NR Description: similar to Arabidopsis thaliana (Mouse-ear cress)
  misc_feature (67)..(138): NCBI GI NO: 28828773 NR Description: similar to Arabidopsis thaliana (Mouse-ear cress)
  misc_feature (1)..(139): NCBI GI NO: 31542775 NR Description: hypothetical protein FLJ35220 [Homo sapiens]
  misc_feature (1)..(139): NCBI GI NO: 34875599 NR Description: similar to chromosome 17 open reading frame 27
  misc_feature (11)..(139): NCBI GI NO: 7486498 NR Description: hypothetical protein F6E21
  misc_feature (1)..(139): NCBI GI NO: 28893575 NR Description: RIKEN cDNA A730011L01 gene [Mus musculus]
  misc_feature (9)..(139): NCBI GI NO: 40555767 NR Description: Unknown (protein for MGC:74455) [Homo sapiens]
  misc_feature (9)..(139): NCBI GI NO: 21751158 NR Description: unnamed protein product [Homo sapiens]
  misc_feature (1)..(145): NCBI GI NO: 19115244 NR Description: putative endonuclease [Schizosaccharomyces pombe]
MKRSNNPFYPQLLMVDGNGILHPRGFGLACHIGVEANLPTIGIGKNLHHVDGLTHSRVRELLGAEENCSEDFINLVGCSGHIWGVAMRSTQGSIKPIFISIGHKISLQTAIMIVQMTCKYRVPEPIRQADIRSRDYIRKLEANAKVK

SEQ ID NO: 5321 - DNA, 1796 bp, Glycine max
  misc_feature (1)..(1796): Ceres Seq. ID no. 14310375
ttttttcctccatttttcgcctcaatcgcacttctctaccttcgatagtaacagtaatctcgaattttaattccgaatatggaatcgagaactaagagtaatccccaattaactagagctctatgctatggaaacgatggcaagcagcagggaaggtcaccatccgttattgtcattggcggtggcatggctgggattgctgctgctcgtgcactccataatgcttcgtttcaggttgttctcttagagtcaagggatagaattggtggccgaattcacactgattactcatttggttttcctgttgacctgggagcatcatggttgcatggagtttccaacgagaatccgctggcttcggtgattgggaggctaggtctacctctttaccgtactagtggggataactccgtactctatgaccatgatttggaaagctatgcactttttgatatggatgggaaacaagttcctccagagttggtaacaaaagttggtgaaatatttgagacaattttacaggagacagataaaataagacaagaatccagtgaagacatgtctgtacttcgtggtctttccattgtttttgacaggaagccggaattgaggttggaggggcttgcgcataaggtgcttcagtggtacttatgcagaatggagggctggtttgctgcagattctgatactatttcactgaaaggatgggaccaggaggtgctgctccctggtggtcatggtcttatggtccgtggttacttgcctgttataaataccctagccaagggacttgatattctcttggggcacagggtcacaaaagtagttaggcgatataatggagtaaaggtaacagtggaaagtgggaaaacgttttttgctgatgctgctgttattgctgtcccacttggggtgctcaaggcaaagaaaatattgtttaagccaaagcttccagactggaaggaagctgccattgcggatcttgggattggacttgagaataaaatcattttacactttgaaaatgtgttttggcctaatgtggagttcttgggagtagttgcagatacatcttatggatgtagctacttccttaatctccacaaggccgccggtcatgctgttctggtttacatgccttctgggcagcttgccaaagacgttgaaaagatgtctgatgaagcagccgtcaacttcgctttcatgcagctcaagaagattcttccagatgcttcttcaccgattcagtatcttgtgtctcggtggggatcagatataaattcactaggttcatatagctacgatgcagttgggaaaccccatgaactatatgagaggctacgggtcccagtagataacttgttctttgcaggggaagcaacgagtatgagctatccaggatctgtccatggggcattctccactggaatgatggccgctgaagattgccggatgcgtgtgctcgagcgatatggagaggttgatttattccagccagtgatgggagaagaggcttccttgtctatcccacttcagatatctcgtctgtaatcatctttgggtcacaactagtggacagaaacagaatctatgcttgttcttttgttatcaacctataggctatatatagcaaatgttttggcaatagtcttcaagactatgtgtccacttgtgaaatcacattttgtgttgcatttccgtagtcagtgttactggtaatgtgaatattgcgtacctaaggccttgtcacttctatcagtctatatataataaaattgtggcaacaatttatgttc

SEQ ID NO: 5322 - protein, 490 aa, Glycine max
  peptide (1)..(490): Ceres Seq. ID no. 14310376
  misc_feature (39)..(458): Pfam Name: Pfam Description:  Flavin containing amine oxidoreductase
  misc_feature (1)..(490): NCBI GI NO: 15224204 NR Description: amine oxidase family [Arabidopsis thaliana]
  misc_feature (1)..(490): NCBI GI NO: 18650598 NR Description: At2g43020/MFL8.12 [Arabidopsis thaliana]
  misc_feature (1)..(490): NCBI GI NO: 15231622 NR Description: amine oxidase family [Arabidopsis thaliana]
  misc_feature (1)..(490): NCBI GI NO: 21553762 NR Description: putative amine oxidase [Arabidopsis thaliana]
  misc_feature (17)..(490): NCBI GI NO: 38344167 NR Description: OSJNBa0053K19.6
  misc_feature (20)..(490): NCBI GI NO: 32488722 NR Description: OSJNBb0004A17.1
  misc_feature (22)..(490): NCBI GI NO: 15218830 NR Description: amine oxidase family [Arabidopsis thaliana]
  misc_feature (22)..(490): NCBI GI NO: 13877615 NR Description: putative protein kinase gb|AAD22129
  misc_feature (22)..(392): NCBI GI NO: 25404949 NR Description: protein F1E22.18 [imported] - Arabidopsis thaliana
  misc_feature (357)..(490): NCBI GI NO: 25404949 NR Description: protein F1E22.18 [imported] - Arabidopsis thaliana
MESRTKSNPQLTRALCYGNDGKQQGRSPSVIVIGGGMAGIAAARALHNASFQVVLLESRDRIGGRIHTDYSFGFPVDLGASWLHGVSNENPLASVIGRLGLPLYRTSGDNSVLYDHDLESYALFDMDGKQVPPELVTKVGEIFETILQETDKIRQESSEDMSVLRGLSIVFDRKPELRLEGLAHKVLQWYLCRMEGWFAADSDTISLKGWDQEVLLPGGHGLMVRGYLPVINTLAKGLDILLGHRVTKVVRRYNGVKVTVESGKTFFADAAVIAVPLGVLKAKKILFKPKLPDWKEAAIADLGIGLENKIILHFENVFWPNVEFLGVVADTSYGCSYFLNLHKAAGHAVLVYMPSGQLAKDVEKMSDEAAVNFAFMQLKKILPDASSPIQYLVSRWGSDINSLGSYSYDAVGKPHELYERLRVPVDNLFFAGEATSMSYPGSVHGAFSTGMMAAEDCRMRVLERYGEVDLFQPVMGEEASLSIPLQISRL

SEQ ID NO: 5323 - protein, 454 aa, Glycine max
  peptide (1)..(454): Ceres Seq. ID no. 14310377
  misc_feature (3)..(422): Pfam Name: Pfam Description:  Flavin containing amine oxidoreductase
  misc_feature (1)..(454): NCBI GI NO: 15224204 NR Description: amine oxidase family [Arabidopsis thaliana]
  misc_feature (1)..(454): NCBI GI NO: 18650598 NR Description: At2g43020/MFL8.12 [Arabidopsis thaliana]
  misc_feature (1)..(454): NCBI GI NO: 15231622 NR Description: amine oxidase family [Arabidopsis thaliana]
  misc_feature (1)..(454): NCBI GI NO: 21553762 NR Description: putative amine oxidase [Arabidopsis thaliana]
  misc_feature (1)..(454): NCBI GI NO: 38344167 NR Description: OSJNBa0053K19.6
  misc_feature (1)..(454): NCBI GI NO: 32488722 NR Description: OSJNBb0004A17.1
  misc_feature (1)..(454): NCBI GI NO: 15218830 NR Description: amine oxidase family [Arabidopsis thaliana]
  misc_feature (1)..(454): NCBI GI NO: 13877615 NR Description: putative protein kinase gb|AAD22129
  misc_feature (1)..(356): NCBI GI NO: 25404949 NR Description: protein F1E22.18 [imported] - Arabidopsis thaliana
  misc_feature (321)..(454): NCBI GI NO: 25404949 NR Description: protein F1E22.18 [imported] - Arabidopsis thaliana
MAGIAAARALHNASFQVVLLESRDRIGGRIHTDYSFGFPVDLGASWLHGVSNENPLASVIGRLGLPLYRTSGDNSVLYDHDLESYALFDMDGKQVPPELVTKVGEIFETILQETDKIRQESSEDMSVLRGLSIVFDRKPELRLEGLAHKVLQWYLCRMEGWFAADSDTISLKGWDQEVLLPGGHGLMVRGYLPVINTLAKGLDILLGHRVTKVVRRYNGVKVTVESGKTFFADAAVIAVPLGVLKAKKILFKPKLPDWKEAAIADLGIGLENKIILHFENVFWPNVEFLGVVADTSYGCSYFLNLHKAAGHAVLVYMPSGQLAKDVEKMSDEAAVNFAFMQLKKILPDASSPIQYLVSRWGSDINSLGSYSYDAVGKPHELYERLRVPVDNLFFAGEATSMSYPGSVHGAFSTGMMAAEDCRMRVLERYGEVDLFQPVMGEEASLSIPLQISRL

SEQ ID NO: 5324 - protein, 365 aa, Glycine max
  peptide (1)..(365): Ceres Seq. ID no. 14310378
  misc_feature (1)..(333): Pfam Name: Pfam Description:  Flavin containing amine oxidoreductase
  misc_feature (1)..(365): NCBI GI NO: 15224204 NR Description: amine oxidase family [Arabidopsis thaliana]
  misc_feature (1)..(365): NCBI GI NO: 18650598 NR Description: At2g43020/MFL8.12 [Arabidopsis thaliana]
  misc_feature (1)..(365): NCBI GI NO: 15231622 NR Description: amine oxidase family [Arabidopsis thaliana]
  misc_feature (1)..(365): NCBI GI NO: 21553762 NR Description: putative amine oxidase [Arabidopsis thaliana]
  misc_feature (1)..(365): NCBI GI NO: 38344167 NR Description: OSJNBa0053K19.6
  misc_feature (1)..(365): NCBI GI NO: 32488722 NR Description: OSJNBb0004A17.1
  misc_feature (1)..(365): NCBI GI NO: 15218830 NR Description: amine oxidase family [Arabidopsis thaliana]
  misc_feature (1)..(365): NCBI GI NO: 13877615 NR Description: putative protein kinase gb|AAD22129
  misc_feature (1)..(267): NCBI GI NO: 25404949 NR Description: protein F1E22.18 [imported] - Arabidopsis thaliana
  misc_feature (232)..(365): NCBI GI NO: 25404949 NR Description: protein F1E22.18 [imported] - Arabidopsis thaliana
MDGKQVPPELVTKVGEIFETILQETDKIRQESSEDMSVLRGLSIVFDRKPELRLEGLAHKVLQWYLCRMEGWFAADSDTISLKGWDQEVLLPGGHGLMVRGYLPVINTLAKGLDILLGHRVTKVVRRYNGVKVTVESGKTFFADAAVIAVPLGVLKAKKILFKPKLPDWKEAAIADLGIGLENKIILHFENVFWPNVEFLGVVADTSYGCSYFLNLHKAAGHAVLVYMPSGQLAKDVEKMSDEAAVNFAFMQLKKILPDASSPIQYLVSRWGSDINSLGSYSYDAVGKPHELYERLRVPVDNLFFAGEATSMSYPGSVHGAFSTGMMAAEDCRMRVLERYGEVDLFQPVMGEEASLSIPLQISRL

SEQ ID NO: 5325 - DNA, 1523 bp, Glycine max
  misc_feature (1)..(1523): Ceres Seq. ID no. 14313893
aatgcagtcaaacaataacatatcgtaaaaagtactactatagttgctgttttgttgaagaagaaaacaaagtagaagcaaagttctttaagagtgaaagagaccatttttgcaaccccaattgatcagctcttgaaacaaacatgaagaagaacacctctgcgatggagaatgccggtggcatcaaggcatggagtttccgtcgccaccagcttttggttagaagggtgatgcaattaaccatgttcattgctggacttcctgtgttgtgggtgtttctctctaactctgcctcttccattgaattccataccttctcacattacttcactgctcagtcaacaaaggctggttatgaatcaaagctagagagtgtttttagaactgcgtctatgaaggataagacagtgataatcacaactttaaacgatgcatgggcaaagccaggttcggtatttgacctctttcttgagagttttcgcctagggaatgagacacaatggcttttaaatcacttggtggtaataacttgggaccaaaagacaaatgcttattgccttgctttgcacaaacattgttaccaagttgaaactaaaggtgccaatttcaccggtgaagtattattcatgaccccgacatacctacacatgatgtgtagaagaactgaattcctcacttctgttcttgagatgggatataactttgtgttcacggatactgatataatgtggcttagagatcccttcaaacaattttatgaagatgcagatttccaaatagcttgtgatgctttcaatggcaactcctctgacatatacaactatccaaatggagggtttaaatacataaaatcgaataaccgaactatttggtttaacaagttctggttcaactctagcaaagagtacccagggttgggtgagcaggctgtgttcaataagatcaaaatgcaccccttaatttcccacatgaagctgaagattaggttccttagcactagctattttggagggttttgtgagcctagcaaggacttcaacaaggtctcaacaatgcatgccaattgttgtgttggcatagacaacaaagtcaatgatcttaaaattttgcttgaggattggaagaagtatatggcattgtctgaaattgacaaaaaacagtcaaatcttacttggagcgtaccacaaagttgcagtaagtcctttgaacatgccaaagaaaggaagaataaagggaggttgcgacgggctttggttgaaactgtttgatgcatttataaagaggtttgagaatgattgactcaaattttggatcaaagcaaaaggtttactttgccaagccaattcttttgcaatggaaaagaaatgtgtggaagtggtacacccattgaaaatgtaggaaacagagaaaagtttgttcaaagttttattatgagatgtaatatatgcagtatgtacaataatttatataacagtttgtataacattttttttgggtttatatctatcattataaaatgtaac

SEQ ID NO: 5326 - protein, 374 aa, Glycine max
  peptide (1)..(374): Ceres Seq. ID no. 14313894
  misc_feature (72)..(351): NCBI GI NO: 18395292 NR Description: hypothetical protein [Arabidopsis thaliana]
  misc_feature (1)..(351): NCBI GI NO: 15223826 NR Description: expressed protein [Arabidopsis thaliana]
  misc_feature (74)..(356): NCBI GI NO: 38344278 NR Description: OSJNBa0013K16.10
  misc_feature (1)..(351): NCBI GI NO: 15235236 NR Description: hypothetical protein common family
  misc_feature (59)..(350): NCBI GI NO: 21536907 NR Description: regulatory protein [Arabidopsis thaliana]
  misc_feature (68)..(351): NCBI GI NO: 23306127 NR Description: Putataive InsB from Escherichia coli
  misc_feature (73)..(349): NCBI GI NO: 15235236 NR Description: hypothetical protein common family
  misc_feature (84)..(350): NCBI GI NO: 6063544 NR Description: similar to Arabidopsis thaliana chromosome 2
  misc_feature (74)..(354): NCBI GI NO: 18414558 NR Description: hypothetical protein common family
  misc_feature (75)..(350): NCBI GI NO: 34897442 NR Description: putative regulatory protein
MKKNTSAMENAGGIKAWSFRRHQLLVRRVMQLTMFIAGLPVLWVFLSNSASSIEFHTFSHYFTAQSTKAGYESKLESVFRTASMKDKTVIITTLNDAWAKPGSVFDLFLESFRLGNETQWLLNHLVVITWDQKTNAYCLALHKHCYQVETKGANFTGEVLFMTPTYLHMMCRRTEFLTSVLEMGYNFVFTDTDIMWLRDPFKQFYEDADFQIACDAFNGNSSDIYNYPNGGFKYIKSNNRTIWFNKFWFNSSKEYPGLGEQAVFNKIKMHPLISHMKLKIRFLSTSYFGGFCEPSKDFNKVSTMHANCCVGIDNKVNDLKILLEDWKKYMALSEIDKKQSNLTWSVPQSCSKSFEHAKERKNKGRLRRALVETV

SEQ ID NO: 5327 - protein, 367 aa, Glycine max
  peptide (1)..(367): Ceres Seq. ID no. 14313895
  misc_feature (65)..(344): NCBI GI NO: 18395292 NR Description: hypothetical protein [Arabidopsis thaliana]
  misc_feature (1)..(344): NCBI GI NO: 15223826 NR Description: expressed protein [Arabidopsis thaliana]
  misc_feature (67)..(349): NCBI GI NO: 38344278 NR Description: OSJNBa0013K16.10
  misc_feature (1)..(344): NCBI GI NO: 15235236 NR Description: hypothetical protein common family
  misc_feature (52)..(343): NCBI GI NO: 21536907 NR Description: regulatory protein [Arabidopsis thaliana]
  misc_feature (61)..(344): NCBI GI NO: 23306127 NR Description: Putataive InsB from Escherichia coli
  misc_feature (66)..(342): NCBI GI NO: 15235236 NR Description: hypothetical protein common family
  misc_feature (77)..(343): NCBI GI NO: 6063544 NR Description: similar to Arabidopsis thaliana chromosome 2
  misc_feature (67)..(347): NCBI GI NO: 18414558 NR Description: hypothetical protein common family
  misc_feature (68)..(343): NCBI GI NO: 34897442 NR Description: putative regulatory protein
MENAGGIKAWSFRRHQLLVRRVMQLTMFIAGLPVLWVFLSNSASSIEFHTFSHYFTAQSTKAGYESKLESVFRTASMKDKTVIITTLNDAWAKPGSVFDLFLESFRLGNETQWLLNHLVVITWDQKTNAYCLALHKHCYQVETKGANFTGEVLFMTPTYLHMMCRRTEFLTSVLEMGYNFVFTDTDIMWLRDPFKQFYEDADFQIACDAFNGNSSDIYNYPNGGFKYIKSNNRTIWFNKFWFNSSKEYPGLGEQAVFNKIKMHPLISHMKLKIRFLSTSYFGGFCEPSKDFNKVSTMHANCCVGIDNKVNDLKILLEDWKKYMALSEIDKKQSNLTWSVPQSCSKSFEHAKERKNKGRLRRALVETV

SEQ ID NO: 5328 - protein, 345 aa, Glycine max
  peptide (1)..(345): Ceres Seq. ID no. 14313896
  misc_feature (43)..(322): NCBI GI NO: 18395292 NR Description: hypothetical protein [Arabidopsis thaliana]
  misc_feature (1)..(322): NCBI GI NO: 15223826 NR Description: expressed protein [Arabidopsis thaliana]
  misc_feature (45)..(327): NCBI GI NO: 38344278 NR Description: OSJNBa0013K16.10
  misc_feature (1)..(322): NCBI GI NO: 15235236 NR Description: hypothetical protein common family
  misc_feature (30)..(321): NCBI GI NO: 21536907 NR Description: regulatory protein [Arabidopsis thaliana]
  misc_feature (39)..(322): NCBI GI NO: 23306127 NR Description: Putataive InsB from Escherichia coli
  misc_feature (44)..(320): NCBI GI NO: 15235236 NR Description: hypothetical protein common family
  misc_feature (55)..(321): NCBI GI NO: 6063544 NR Description: similar to Arabidopsis thaliana chromosome 2
  misc_feature (45)..(325): NCBI GI NO: 18414558 NR Description: hypothetical protein common family
  misc_feature (46)..(321): NCBI GI NO: 34897442 NR Description: putative regulatory protein
MQLTMFIAGLPVLWVFLSNSASSIEFHTFSHYFTAQSTKAGYESKLESVFRTASMKDKTVIITTLNDAWAKPGSVFDLFLESFRLGNETQWLLNHLVVITWDQKTNAYCLALHKHCYQVETKGANFTGEVLFMTPTYLHMMCRRTEFLTSVLEMGYNFVFTDTDIMWLRDPFKQFYEDADFQIACDAFNGNSSDIYNYPNGGFKYIKSNNRTIWFNKFWFNSSKEYPGLGEQAVFNKIKMHPLISHMKLKIRFLSTSYFGGFCEPSKDFNKVSTMHANCCVGIDNKVNDLKILLEDWKKYMALSEIDKKQSNLTWSVPQSCSKSFEHAKERKNKGRLRRALVETV

SEQ ID NO: 5329 - DNA, 1492 bp, Glycine max
  misc_feature (1)..(1492): Ceres Seq. ID no. 13637842
gacaagtgagtttgttgatcgagataactagaaacagtgtgatgaaaatgaaggtccttgttttcttcgttgctacaattttggtagcatggcaatgccatgcgtacgatatgttccctctccgaatgaacactggctatggtgcccgtactccggaggtgaaatgcgcaagttggaggcttgctgtggaagcacacaacatctttggctttgagaccattcctgaagagtgcgttgaagcaacaaaggaatacatccatggcgaacaatatagatcagactccaaaacagttaaccaacaagcttacttttatgccagagacctcgaagtccatcccaaggacacatttgtgttcagtatagatggcaccgtactctctaatattccatactacaaaaaacatggatatgggtattatgctcttagttaattttcttctaatactctctttttccgtttttgctattactaggttactcccttatatgcgcatcatttattttcaactatttttggtattgatcgagtttcggtgtttggcccgactaacaacattaaggtttctcatcacatgcatgtagatttgaaaccttcattatatatgacattttatgattagatataatataaagaaaaagtttcattgtgagtgcataaatatatatatatacagacacaggcacatacatgctttcaggatcgtgttcattgttcttaatgcaatattttatgtgatagggtggagaaatttaactcgaccttgtatgatgaatgggttaacaagggcaatgcaccggcactgcccgagactcttaagaattacaacaagctggtgtctcttggcttcaagattatattcttgtcaggaagaacactggacaaacaggccgtaacagaagcaaacttaaagaaggctggctaccacacatgggaaaaattaattctcaagtcagttttcttttttctctatactatattctcaagtcaattaattctcaacgttgcaccaaatctgccaggaaggaacagtttatagataatcagaaattatataattattttaagtacatggtgcgatatgagtttgaaatactagtagctaattggatctatttttggttggtgcagggatccacaagatccttccactccaaatgcagtttcatacaaaacagcagcgagagagaaactgataaggcagggatacaacattgttgggatcattggagaccaatggagcgatctcctcggaggccacagaggcgaaagcaggacctttaagcttcctaatcccctgtactacattcagtagttccttcacctctcaacaatctagcttgctcctatctatctatatgtaataagatgcgttcaaataggggcactagcttcactttatgttgtttcagctgtgtgtcaacaagtcatgtaagagacttcactatgttgttttctctttcgtggctttaataaattatgcgcccttgttcc

SEQ ID NO: 5330 - protein, 142 aa, Glycine max
  peptide (1)..(142): Ceres Seq. ID no. 15220387
  misc_feature (41)..(137): Pfam Name: Acid phosphatase Pfam Description: HAD superfamily, subfamily IIIB
  misc_feature (17)..(137): NCBI GI NO: 1351033 NR Description: STEM 31 KD GLYCOPROTEIN PRECURSOR
  misc_feature (14)..(137): NCBI GI NO: 134145 NR Description: STEM 28 kDa glycoprotein precursor
  misc_feature (17)..(137): NCBI GI NO: 72304 NR Description: vegetative storage protein
  misc_feature (14)..(137): NCBI GI NO: 226866 NR Description: 31kD glycoprotein
  misc_feature (16)..(137): NCBI GI NO: 134146 NR Description: STEM 31 kDa glycoprotein precursor
  misc_feature (16)..(137): NCBI GI NO: 7488715 NR Description: storage protein homolog, 31K - soybean (fragment)
  misc_feature (16)..(137): NCBI GI NO: 2627233 NR Description: pod storage protein [Phaseolus vulgaris]
  misc_feature (16)..(137): NCBI GI NO: 7442055 NR Description: pod storage protein - kidney bean
  misc_feature (16)..(137): NCBI GI NO: 7442053 NR Description: acid phosphatase (EC 3.1.3.-) - soybean
  misc_feature (55)..(137): NCBI GI NO: 15234949 NR Description: acid phosphatase - like protein
QVSLLIEITRNSVMKMKVLVFFVATILVAWQCHAYDMFPLRMNTGYGARTPEVKCASWRLAVEAHNIFGFETIPEECVEATKEYIHGEQYRSDSKTVNQQAYFYARDLEVHPKDTFVFSIDGTVLSNIPYYKKHGYGYYALS

SEQ ID NO: 5331 - protein, 129 aa, Glycine max
  peptide (1)..(129): Ceres Seq. ID no. 15220388
  misc_feature (28)..(124): Pfam Name: Acid phosphatase Pfam Description: HAD superfamily, subfamily IIIB
  misc_feature (4)..(124): NCBI GI NO: 1351033 NR Description: STEM 31 KD GLYCOPROTEIN PRECURSOR
  misc_feature (1)..(124): NCBI GI NO: 134145 NR Description: STEM 28 kDa glycoprotein precursor
  misc_feature (4)..(124): NCBI GI NO: 72304 NR Description: vegetative storage protein
  misc_feature (1)..(124): NCBI GI NO: 226866 NR Description: 31kD glycoprotein
  misc_feature (3)..(124): NCBI GI NO: 134146 NR Description: STEM 31 kDa glycoprotein precursor
  misc_feature (3)..(124): NCBI GI NO: 7488715 NR Description: storage protein homolog, 31K - soybean (fragment)
  misc_feature (3)..(124): NCBI GI NO: 2627233 NR Description: pod storage protein [Phaseolus vulgaris]
  misc_feature (3)..(124): NCBI GI NO: 7442055 NR Description: pod storage protein - kidney bean
  misc_feature (3)..(124): NCBI GI NO: 7442053 NR Description: acid phosphatase (EC 3.1.3.-) - soybean
  misc_feature (42)..(124): NCBI GI NO: 15234949 NR Description: acid phosphatase - like protein
MKMKVLVFFVATILVAWQCHAYDMFPLRMNTGYGARTPEVKCASWRLAVEAHNIFGFETIPEECVEATKEYIHGEQYRSDSKTVNQQAYFYARDLEVHPKDTFVFSIDGTVLSNIPYYKKHGYGYYALS

SEQ ID NO: 5332 - protein, 127 aa, Glycine max
  peptide (1)..(127): Ceres Seq. ID no. 15220389
  misc_feature (26)..(122): Pfam Name: Acid phosphatase Pfam Description: HAD superfamily, subfamily IIIB
  misc_feature (2)..(122): NCBI GI NO: 1351033 NR Description: STEM 31 KD GLYCOPROTEIN PRECURSOR
  misc_feature (1)..(122): NCBI GI NO: 134145 NR Description: STEM 28 kDa glycoprotein precursor
  misc_feature (2)..(122): NCBI GI NO: 72304 NR Description: vegetative storage protein
  misc_feature (1)..(122): NCBI GI NO: 226866 NR Description: 31kD glycoprotein
  misc_feature (1)..(122): NCBI GI NO: 134146 NR Description: STEM 31 kDa glycoprotein precursor
  misc_feature (1)..(122): NCBI GI NO: 7488715 NR Description: storage protein homolog, 31K - soybean (fragment)
  misc_feature (1)..(122): NCBI GI NO: 2627233 NR Description: pod storage protein [Phaseolus vulgaris]
  misc_feature (1)..(122): NCBI GI NO: 7442055 NR Description: pod storage protein - kidney bean
  misc_feature (1)..(122): NCBI GI NO: 7442053 NR Description: acid phosphatase (EC 3.1.3.-) - soybean
  misc_feature (40)..(122): NCBI GI NO: 15234949 NR Description: acid phosphatase - like protein
MKVLVFFVATILVAWQCHAYDMFPLRMNTGYGARTPEVKCASWRLAVEAHNIFGFETIPEECVEATKEYIHGEQYRSDSKTVNQQAYFYARDLEVHPKDTFVFSIDGTVLSNIPYYKKHGYGYYALS

SEQ ID NO: 5333 - DNA, 1242 bp, Glycine max
  misc_feature (1)..(1242): Ceres Seq. ID no. 15169292
ggtatccgtgtcttccccaaccattccttaacccaccgcaaattcaaattcaattcgagctgaacctagggttagtcctattgccttcaccgatctcgaatttcggaaacggtaaaagaaaatgcacgtcaaatcggcgcagtcatcgttccgggatcggacacaggaattccacagcatcacagagaggttgaagaagtccggatcagggcccaatgggcccagtagtagcagcacttcttccagatcggaggaacagcgatccgcgatcgcgaatcaatcggagttcaatagaagggcctccaaaatcggctacgggattcaccaaacgtctcagaagctcgccaaactcgccaaattagcgaaaaggacttcggtttttgatgaccctactatggaaatccaagagcttacgggggttattaagcaggatatcactgctctgaactctgctgttgtggatcttcagttggtgtgtagctctaggaatgagactggaaatgtttctgccgatacctctagccattcgagcacggtggtcgatgacttgaagacacggttgatgagcaccaccaaagagtttaaggatgttttgaccatgagaactgagaatatgaaagtgcatgagaatagaagacagttgttttcgtcttctgcttctaaggattctgcgaatccttttattcggcaacggccgttggctgcaagggcggctgctagtacttctagtgcccctgctcttccctgggctaatgggtcaccatcttcatctcaggcgtttcccaagaagcaagtggatggggagagtcaaccattgttgcaacagcaacagcagcagcaggaggtagttccattgcaagatagttacatgcaaagcagagctgaagcacttcagaatgttgagtccactattcatgagcttagcaacattttcaatcagctagcaacacttgtttcccaacaaggagagattgccatcaggattgatgaaaacatggatgatacattggcaaacgtagagggagcacagggggctttgttgaagtatctgaacagcatatcttctaatcggtggttgatgatcaaaattttctttgtattaatatttttccttatggttttcttattttttgtggcatagtcatttgggtgacagaaatgaaaacaatgacatgagtgtcggcgttctgtatttctttaatatttatttctccaaatatatatattcattcttgcagagtt

SEQ ID NO: 5334 - protein, 339 aa, Glycine max
  peptide (1)..(339): Ceres Seq. ID no. 15169293
  misc_feature (54)..(158): Pfam Name: Pfam Description:  Syntaxin
  misc_feature (1)..(339): NCBI GI NO: 30687459 NR Description: syntaxin of plants SYP32 [Arabidopsis thaliana]
  misc_feature (4)..(339): NCBI GI NO: 34906154 NR Description: putative t-SNARE SED5
  misc_feature (8)..(339): NCBI GI NO: 15239228 NR Description: syntaxin of plants SYP31 [Arabidopsis thaliana]
  misc_feature (8)..(339): NCBI GI NO: 2981439 NR Description: syntaxin of plants 31 [Arabidopsis thaliana]
  misc_feature (10)..(339): NCBI GI NO: 28829569 NR Description: similar to syntaxin 5
  misc_feature (9)..(332): NCBI GI NO: 32490453 NR Description: syntaxin homologue [Aspergillus oryzae]
  misc_feature (35)..(339): NCBI GI NO: 20148780 NR Description: syntaxin 5 [Phytophthora sojae]
  misc_feature (42)..(339): NCBI GI NO: 542593 NR Description: SED5 protein - fruit fly
  misc_feature (42)..(339): NCBI GI NO: 24584581 NR Description: Syntaxin 5 CG4214-PA [Drosophila melanogaster]
  misc_feature (9)..(332): NCBI GI NO: 40747582 NR Description: hypothetical protein AN9526.2
MHVKSAQSSFRDRTQEFHSITERLKKSGSGPNGPSSSSTSSRSEEQRSAIANQSEFNRRASKIGYGIHQTSQKLAKLAKLAKRTSVFDDPTMEIQELTGVIKQDITALNSAVVDLQLVCSSRNETGNVSADTSSHSSTVVDDLKTRLMSTTKEFKDVLTMRTENMKVHENRRQLFSSSASKDSANPFIRQRPLAARAAASTSSAPALPWANGSPSSSQAFPKKQVDGESQPLLQQQQQQQEVVPLQDSYMQSRAEALQNVESTIHELSNIFNQLATLVSQQGEIAIRIDENMDDTLANVEGAQGALLKYLNSISSNRWLMIKIFFVLIFFLMVFLFFVA

SEQ ID NO: 5335 - protein, 248 aa, Glycine max
  peptide (1)..(248): Ceres Seq. ID no. 15169294
  misc_feature (1)..(67): Pfam Name: Pfam Description:  Syntaxin
  misc_feature (1)..(248): NCBI GI NO: 30687459 NR Description: syntaxin of plants SYP32 [Arabidopsis thaliana]
  misc_feature (1)..(248): NCBI GI NO: 34906154 NR Description: putative t-SNARE SED5
  misc_feature (1)..(248): NCBI GI NO: 15239228 NR Description: syntaxin of plants SYP31 [Arabidopsis thaliana]
  misc_feature (1)..(248): NCBI GI NO: 2981439 NR Description: syntaxin of plants 31 [Arabidopsis thaliana]
  misc_feature (1)..(248): NCBI GI NO: 28829569 NR Description: similar to syntaxin 5
  misc_feature (1)..(241): NCBI GI NO: 32490453 NR Description: syntaxin homologue [Aspergillus oryzae]
  misc_feature (1)..(248): NCBI GI NO: 20148780 NR Description: syntaxin 5 [Phytophthora sojae]
  misc_feature (1)..(248): NCBI GI NO: 542593 NR Description: SED5 protein - fruit fly
  misc_feature (1)..(248): NCBI GI NO: 24584581 NR Description: Syntaxin 5 CG4214-PA [Drosophila melanogaster]
  misc_feature (1)..(241): NCBI GI NO: 40747582 NR Description: hypothetical protein AN9526.2
MEIQELTGVIKQDITALNSAVVDLQLVCSSRNETGNVSADTSSHSSTVVDDLKTRLMSTTKEFKDVLTMRTENMKVHENRRQLFSSSASKDSANPFIRQRPLAARAAASTSSAPALPWANGSPSSSQAFPKKQVDGESQPLLQQQQQQQEVVPLQDSYMQSRAEALQNVESTIHELSNIFNQLATLVSQQGEIAIRIDENMDDTLANVEGAQGALLKYLNSISSNRWLMIKIFFVLIFFLMVFLFFVA

SEQ ID NO: 5336 - protein, 192 aa, Glycine max
  peptide (1)..(192): Ceres Seq. ID no. 15169295
  misc_feature (105)..(167): Pfam Name: Pfam Description:  SNARE domain
  misc_feature (1)..(192): NCBI GI NO: 30687459 NR Description: syntaxin of plants SYP32 [Arabidopsis thaliana]
  misc_feature (1)..(192): NCBI GI NO: 34906154 NR Description: putative t-SNARE SED5
  misc_feature (1)..(192): NCBI GI NO: 15239228 NR Description: syntaxin of plants SYP31 [Arabidopsis thaliana]
  misc_feature (1)..(192): NCBI GI NO: 2981439 NR Description: syntaxin of plants 31 [Arabidopsis thaliana]
  misc_feature (1)..(192): NCBI GI NO: 28829569 NR Description: similar to syntaxin 5
  misc_feature (1)..(185): NCBI GI NO: 32490453 NR Description: syntaxin homologue [Aspergillus oryzae]
  misc_feature (1)..(192): NCBI GI NO: 20148780 NR Description: syntaxin 5 [Phytophthora sojae]
  misc_feature (1)..(192): NCBI GI NO: 542593 NR Description: SED5 protein - fruit fly
  misc_feature (1)..(192): NCBI GI NO: 24584581 NR Description: Syntaxin 5 CG4214-PA [Drosophila melanogaster]
  misc_feature (1)..(185): NCBI GI NO: 40747582 NR Description: hypothetical protein AN9526.2
MSTTKEFKDVLTMRTENMKVHENRRQLFSSSASKDSANPFIRQRPLAARAAASTSSAPALPWANGSPSSSQAFPKKQVDGESQPLLQQQQQQQEVVPLQDSYMQSRAEALQNVESTIHELSNIFNQLATLVSQQGEIAIRIDENMDDTLANVEGAQGALLKYLNSISSNRWLMIKIFFVLIFFLMVFLFFVA

SEQ ID NO: 5337 - DNA, 1410 bp, Glycine max
  misc_feature (1)..(1410): Ceres Seq. ID no. 15170881
ggacgctgctgctataaaaaagctcgaatactcggataaggagagtaagggcggtgcagtgcttcaaacccctttttctcttctcatttcctttcatcactctcttgcttcttttcttcttctcgcaattttccattttcacacttttagcgtaagaacatcttttaatggcgtcccaaatccgtgagtggtctggaatcaatacattcgcacctgctacccagactaagttgcttgaactcttgggaaatcttaaacaagagaatgtgaactccttgactatacttgtgatgggaaaaggaggtgttggaaaatcttcaactgtgaactccatcattggggaaagagtggtttcgattagtcctttccagtcggaagggccaagacctgtgatggtgtcacgatcaagggctggttttacattgaacattattgacactcctggtctcattgaaggggggtacatcaatgatatggcacttgatataataaaacgtttccttctgaacaagaccatagatgtgctgctttacgtggatcgcttggatgtgtacagagtggacaacttggataagttagtcgccaaagctataacagatagttttggcaaaggaatatggaacaaggccattgtaacactcacacatgcccagttctctccaccagatggattgccctatgatgaattcttttcacaaagatctgagtctctcttgaaggttcttaggtcaggtgccaggataaagaaagaagcctttcaggctgcttcaattcctgttgttttggtcgagaacagtgggagatgcaacaaaaatgacagtgatgaaaaggttcttccaaatgggactgcttggattcctaatctagtccagacaatcacagaaatcgcattgaacaaaagtgagtctattcatgttgacaagaatttgattgaagggccaaatccgaatcagagaggaaaattatggattcctctcgtgttcgctctccaatacttccttatcatgaagccaataaaaggactgatcgagaaggacattgcaaatgagagaaagccaacatgggagagacgcgatgctgcttttcggaagagagatttatattagttgtgcatttctgtgcccatgaaattccattgatgttttagcttcctttgctgacacattttagtttttgtctgttctatgagtgaaacttggatgattttccttatactgtaattgctagtagtctggcataggaatttgtttgtgcctgagaggattgcatgtatgctggtaagtttttggcttttgcatgattcagtttgttaatgttagtatttagttgtcttgtaaacatagctctagatgtggctactatcgataatagcttgatattctaataaaattagcccgaagtatcgatatc

SEQ ID NO: 5338 - protein, 312 aa, Glycine max
  peptide (1)..(312): Ceres Seq. ID no. 15170882
  misc_feature (37)..(233): Pfam Name: Pfam Description:  AIG1 family
  misc_feature (1)..(308): NCBI GI NO: 25091388 NR Description: Translocase of chloroplast 34
  misc_feature (1)..(308): NCBI GI NO: 1076522 NR Description: chloroplast import-associated protein IAP36
  misc_feature (5)..(256): NCBI GI NO: 18655563 NR Description: Chain A
  misc_feature (5)..(309): NCBI GI NO: 15238381 NR Description: GTP-binding protein (gb|AAD09203.1)
  misc_feature (5)..(309): NCBI GI NO: 21594231 NR Description: GTP-binding protein [Arabidopsis thaliana]
  misc_feature (5)..(309): NCBI GI NO: 25091410 NR Description: Translocase of chloroplast 34
  misc_feature (1)..(302): NCBI GI NO: 7259224 NR Description: Toc34-2 protein [Zea mays]
  misc_feature (1)..(302): NCBI GI NO: 6689637 NR Description: Toc34-1 protein [Zea mays]
  misc_feature (1)..(297): NCBI GI NO: 15217705 NR Description: GTP-binding protein -related
  misc_feature (1)..(297): NCBI GI NO: 33391904 NR Description: TOC33 [Brassica napus]
MASQIREWSGINTFAPATQTKLLELLGNLKQENVNSLTILVMGKGGVGKSSTVNSIIGERVVSISPFQSEGPRPVMVSRSRAGFTLNIIDTPGLIEGGYINDMALDIIKRFLLNKTIDVLLYVDRLDVYRVDNLDKLVAKAITDSFGKGIWNKAIVTLTHAQFSPPDGLPYDEFFSQRSESLLKVLRSGARIKKEAFQAASIPVVLVENSGRCNKNDSDEKVLPNGTAWIPNLVQTITEIALNKSESIHVDKNLIEGPNPNQRGKLWIPLVFALQYFLIMKPIKGLIEKDIANERKPTWERRDAAFRKRDLY

SEQ ID NO: 5339 - protein, 271 aa, Glycine max
  peptide (1)..(271): Ceres Seq. ID no. 15170883
  misc_feature (1)..(192): Pfam Name: Pfam Description:  AIG1 family
  misc_feature (1)..(267): NCBI GI NO: 25091388 NR Description: Translocase of chloroplast 34
  misc_feature (1)..(267): NCBI GI NO: 1076522 NR Description: chloroplast import-associated protein IAP36
  misc_feature (1)..(215): NCBI GI NO: 18655563 NR Description: Chain A
  misc_feature (1)..(268): NCBI GI NO: 15238381 NR Description: GTP-binding protein (gb|AAD09203.1)
  misc_feature (1)..(268): NCBI GI NO: 21594231 NR Description: GTP-binding protein [Arabidopsis thaliana]
  misc_feature (1)..(268): NCBI GI NO: 25091410 NR Description: Translocase of chloroplast 34
  misc_feature (1)..(261): NCBI GI NO: 7259224 NR Description: Toc34-2 protein [Zea mays]
  misc_feature (1)..(261): NCBI GI NO: 6689637 NR Description: Toc34-1 protein [Zea mays]
  misc_feature (1)..(256): NCBI GI NO: 15217705 NR Description: GTP-binding protein -related
  misc_feature (1)..(256): NCBI GI NO: 33391904 NR Description: TOC33 [Brassica napus]
MGKGGVGKSSTVNSIIGERVVSISPFQSEGPRPVMVSRSRAGFTLNIIDTPGLIEGGYINDMALDIIKRFLLNKTIDVLLYVDRLDVYRVDNLDKLVAKAITDSFGKGIWNKAIVTLTHAQFSPPDGLPYDEFFSQRSESLLKVLRSGARIKKEAFQAASIPVVLVENSGRCNKNDSDEKVLPNGTAWIPNLVQTITEIALNKSESIHVDKNLIEGPNPNQRGKLWIPLVFALQYFLIMKPIKGLIEKDIANERKPTWERRDAAFRKRDLY

SEQ ID NO: 5340 - protein, 237 aa, Glycine max
  peptide (1)..(237): Ceres Seq. ID no. 15170884
  misc_feature (1)..(158): Pfam Name: Pfam Description:  AIG1 family
  misc_feature (1)..(233): NCBI GI NO: 25091388 NR Description: Translocase of chloroplast 34
  misc_feature (1)..(233): NCBI GI NO: 1076522 NR Description: chloroplast import-associated protein IAP36
  misc_feature (1)..(181): NCBI GI NO: 18655563 NR Description: Chain A
  misc_feature (1)..(234): NCBI GI NO: 15238381 NR Description: GTP-binding protein (gb|AAD09203.1)
  misc_feature (1)..(234): NCBI GI NO: 21594231 NR Description: GTP-binding protein [Arabidopsis thaliana]
  misc_feature (1)..(234): NCBI GI NO: 25091410 NR Description: Translocase of chloroplast 34
  misc_feature (1)..(227): NCBI GI NO: 7259224 NR Description: Toc34-2 protein [Zea mays]
  misc_feature (1)..(227): NCBI GI NO: 6689637 NR Description: Toc34-1 protein [Zea mays]
  misc_feature (1)..(222): NCBI GI NO: 15217705 NR Description: GTP-binding protein -related
  misc_feature (1)..(222): NCBI GI NO: 33391904 NR Description: TOC33 [Brassica napus]
MVSRSRAGFTLNIIDTPGLIEGGYINDMALDIIKRFLLNKTIDVLLYVDRLDVYRVDNLDKLVAKAITDSFGKGIWNKAIVTLTHAQFSPPDGLPYDEFFSQRSESLLKVLRSGARIKKEAFQAASIPVVLVENSGRCNKNDSDEKVLPNGTAWIPNLVQTITEIALNKSESIHVDKNLIEGPNPNQRGKLWIPLVFALQYFLIMKPIKGLIEKDIANERKPTWERRDAAFRKRDLY

SEQ ID NO: 5341 - DNA, 1218 bp, Glycine max
  misc_feature (1)..(1218): Ceres Seq. ID no. 15170857
gaaagccattttccgatttctaagaaggaaccagtttttgttcccactttcctaagtttccttctcgctcccgtctctgaaatttcgagggtttcatcgttgctgaatcaacaattcggaaccagttagcaatgttcagattctggggatcacaagagcaacaatcacaggatggttcttcgcagtcacagtcgtggtatccgccgtcggtggtgagttcaccaacttcgtcgaggcctgttacaccgactgcatcttcttcttcattatcacagaggccttcgtctcatgttccaccttctgaagctgctgcagttattgccgttttgaaggacaagagtgttgatgagttgcggaagcttttatctgacaaagatgcgtatcaacagtttttgcattcacttgatcaggtcaagattcaaactaatctgaaagatgaactttgcaaggagaatttacagcttgcagaggaaaatcttcaaaaggaacctcgtatcatggaacttaggaatcaatgtagaataattcggacaaccgagttagctgctgctaaggagaaactaaatgagcttgagaagcagaaagaagacatgttgaaattgaattccgcagcatcccttctccaaaggattcaagagtctgtgaataagaccgacgaggaatctgaaaacttgcaccacaatctccttgacagagagattgaccttggtgcttttttgcaaaagtacaagaagctacgtaccacttaccacaggaagactctcgtacatcttgctgccaaaacatcaacagtatgagcactgacatgaaatattaagaaattaaaactggttttggcaagtatgtatttgatttttggttcattattgtcaatagttatcattggtcaaagatacttgccaccaaattacatagagtcacagtcgttgggatagaaccatctactacaaattagattgttcatatatgtgcagcctgagattgttcattgtggtgacattgtcgagtggtttcatgccacttggaatgaggtatggacttgcatttacttttctagtttgccatcggctatcttcaactttatttgtatgaactctgaagtgtgctgtagcttatgagatcatcatcgccgatataggatttactgttgtgttgtaaaatgtaaaaaatgctgactttcttttctttgggagcaactacaagtttttcagaacccag

SEQ ID NO: 5342 - protein, 221 aa, Glycine max
  peptide (1)..(221): Ceres Seq. ID no. 15170858
  misc_feature (1)..(221): NCBI GI NO: 15231750 NR Description: expressed protein [Arabidopsis thaliana]
  misc_feature (1)..(137): NCBI GI NO: 30686871 NR Description: expressed protein [Arabidopsis thaliana]
  misc_feature (1)..(128): NCBI GI NO: 30686868 NR Description: expressed protein [Arabidopsis thaliana]
  misc_feature (1)..(137): NCBI GI NO: 25408498 NR Description: hypothetical protein At2g36680
  misc_feature (66)..(211): NCBI GI NO: 31197371 NR Description: ENSANGP00000016351 [Anopheles gambiae]
  misc_feature (66)..(207): NCBI GI NO: 18490855 NR Description: Similar to RIKEN cDNA 4930592A21 gene
  misc_feature (36)..(209): NCBI GI NO: 39645505 NR Description: Unknown (protein for MGC:77637) [Danio rerio]
  misc_feature (36)..(209): NCBI GI NO: 37590372 NR Description: Unknown (protein for MGC:73244) [Danio rerio]
  misc_feature (36)..(207): NCBI GI NO: 34878493 NR Description: similar to D8Ertd531e protein [Rattus norvegicus]
  misc_feature (70)..(207): NCBI GI NO: 38014518 NR Description: Unknown (protein for MGC:68472) [Xenopus laevis]
MFRFWGSQEQQSQDGSSQSQSWYPPSVVSSPTSSRPVTPTASSSSLSQRPSSHVPPSEAAAVIAVLKDKSVDELRKLLSDKDAYQQFLHSLDQVKIQTNLKDELCKENLQLAEENLQKEPRIMELRNQCRIIRTTELAAAKEKLNELEKQKEDMLKLNSAASLLQRIQESVNKTDEESENLHHNLLDREIDLGAFLQKYKKLRTTYHRKTLVHLAAKTSTV

SEQ ID NO: 5343 - DNA, 1221 bp, Glycine max
  misc_feature (1)..(1221): Ceres Seq. ID no. 15176407
gttcttcctaaaacaaatcgtgtaaaggcaaagtacagacaaagttagttagaaattgaaagggaaagggaaacgaaaatgagtagtagggtttggtgtgtggtgatggtatcagcgttggcgttgatgttacaatggcacgaagcattcagctcctacgctggctccgcaagtgcgatcatcgacccttccaaggtcaaacaagtttcgtggaaaccgagagctttcgtttacgagggttttctgacggaattggaatgcgatcacttgatttccatcgccaaatcggagctcaagagatccgcggtggccgataatttgtccggcgagagcaagttgagcgaagtcagaacgagctccggcatgttcattcccaagaacaaggatctgattgttgctggtattgaagacaagatttcatcatggacctttcttccaaaagaaaatggagaagacatacaagtattaagatatgagcacgggcagaaatatgatcctcattatgattactttgctgataaagttaatatagctcggggtggacaccgagttgcgacagttctcatgtatctcactgatgtaaccaaaggtggtgagacagtgttccctgatgcagaggaatctccacgtcacaaaggttctgaaacaaatgaaaatctctctgagtgtgcccaaaaaggaatagcagtgaaaccacgaagaggggatgcacttcttttctttagtctctacccaaatgctatcccagacacactgagtctacatgcaggatgccctgtaattgaaggtgagaaatggtcagcaacaaaatggattcatgtggactcatttgacaaggtggtgggagatggaggggattgcaatgataagcacgaaaactgtgagagatgggctacccttggagaatgtactagtaatcccgaatatatggttggatctccaggccttcctggctactgcatgaaaagttgcaaggaatgttagaagtgttactgaatgctttccagattccacatggtatttttgacgttgactcaaatttcaattggttctcagatttttattatgtattttctttttttgtgaattgtattgtattctgtctcattataattagctctcagatagtgttctagtgcatggtcacacttcaagaggtacatttcgtcggatactttgtatgtaaaactacaaaaaaggaagtatacgttgttttatccc

SEQ ID NO: 5344 - protein, 301 aa, Glycine max
  peptide (1)..(301): Ceres Seq. ID no. 15176408
  misc_feature (123)..(248): Pfam Name: II Pfam Description: 2OG-Fe
  misc_feature (9)..(301): NCBI GI NO: 15239594 NR Description: oxidoreductase, 2OG-Fe(II) oxygenase family
  misc_feature (9)..(301): NCBI GI NO: 20260280 NR Description: unknown protein [Arabidopsis thaliana]
  misc_feature (3)..(301): NCBI GI NO: 18397528 NR Description: oxidoreductase, 2OG-Fe(II) oxygenase family
  misc_feature (3)..(301): NCBI GI NO: 21618073 NR Description: prolyl 4-hydroxylase alpha subunit-like protein
  misc_feature (3)..(180): NCBI GI NO: 6437556 NR Description: unknown protein [Arabidopsis thaliana]
  misc_feature (186)..(301): NCBI GI NO: 6437556 NR Description: unknown protein [Arabidopsis thaliana]
  misc_feature (10)..(301): NCBI GI NO: 29150365 NR Description: putative oxidoreductase
  misc_feature (103)..(301): NCBI GI NO: 37534316 NR Description: unknown protein
  misc_feature (13)..(111): NCBI GI NO: 37534316 NR Description: unknown protein
  misc_feature (30)..(301): NCBI GI NO: 9294583 NR Description: prolyl 4-hydroxylase alpha subunit-like protein
MSSRVWCVVMVSALALMLQWHEAFSSYAGSASAIIDPSKVKQVSWKPRAFVYEGFLTELECDHLISIAKSELKRSAVADNLSGESKLSEVRTSSGMFIPKNKDLIVAGIEDKISSWTFLPKENGEDIQVLRYEHGQKYDPHYDYFADKVNIARGGHRVATVLMYLTDVTKGGETVFPDAEESPRHKGSETNENLSECAQKGIAVKPRRGDALLFFSLYPNAIPDTLSLHAGCPVIEGEKWSATKWIHVDSFDKVVGDGGDCNDKHENCERWATLGECTSNPEYMVGSPGLPGYCMKSCKEC

SEQ ID NO: 5345 - protein, 292 aa, Glycine max
  peptide (1)..(292): Ceres Seq. ID no. 15176409
  misc_feature (114)..(239): Pfam Name: II Pfam Description: 2OG-Fe
  misc_feature (1)..(292): NCBI GI NO: 15239594 NR Description: oxidoreductase, 2OG-Fe(II) oxygenase family
  misc_feature (1)..(292): NCBI GI NO: 20260280 NR Description: unknown protein [Arabidopsis thaliana]
  misc_feature (1)..(292): NCBI GI NO: 18397528 NR Description: oxidoreductase, 2OG-Fe(II) oxygenase family
  misc_feature (1)..(292): NCBI GI NO: 21618073 NR Description: prolyl 4-hydroxylase alpha subunit-like protein
  misc_feature (1)..(171): NCBI GI NO: 6437556 NR Description: unknown protein [Arabidopsis thaliana]
  misc_feature (177)..(292): NCBI GI NO: 6437556 NR Description: unknown protein [Arabidopsis thaliana]
  misc_feature (1)..(292): NCBI GI NO: 29150365 NR Description: putative oxidoreductase
  misc_feature (94)..(292): NCBI GI NO: 37534316 NR Description: unknown protein
  misc_feature (4)..(102): NCBI GI NO: 37534316 NR Description: unknown protein
  misc_feature (21)..(292): NCBI GI NO: 9294583 NR Description: prolyl 4-hydroxylase alpha subunit-like protein
MVSALALMLQWHEAFSSYAGSASAIIDPSKVKQVSWKPRAFVYEGFLTELECDHLISIAKSELKRSAVADNLSGESKLSEVRTSSGMFIPKNKDLIVAGIEDKISSWTFLPKENGEDIQVLRYEHGQKYDPHYDYFADKVNIARGGHRVATVLMYLTDVTKGGETVFPDAEESPRHKGSETNENLSECAQKGIAVKPRRGDALLFFSLYPNAIPDTLSLHAGCPVIEGEKWSATKWIHVDSFDKVVGDGGDCNDKHENCERWATLGECTSNPEYMVGSPGLPGYCMKSCKEC

SEQ ID NO: 5346 - protein, 285 aa, Glycine max
  peptide (1)..(285): Ceres Seq. ID no. 15176410
  misc_feature (107)..(232): Pfam Name: II Pfam Description: 2OG-Fe
  misc_feature (1)..(285): NCBI GI NO: 15239594 NR Description: oxidoreductase, 2OG-Fe(II) oxygenase family
  misc_feature (1)..(285): NCBI GI NO: 20260280 NR Description: unknown protein [Arabidopsis thaliana]
  misc_feature (1)..(285): NCBI GI NO: 18397528 NR Description: oxidoreductase, 2OG-Fe(II) oxygenase family
  misc_feature (1)..(285): NCBI GI NO: 21618073 NR Description: prolyl 4-hydroxylase alpha subunit-like protein
  misc_feature (1)..(164): NCBI GI NO: 6437556 NR Description: unknown protein [Arabidopsis thaliana]
  misc_feature (170)..(285): NCBI GI NO: 6437556 NR Description: unknown protein [Arabidopsis thaliana]
  misc_feature (1)..(285): NCBI GI NO: 29150365 NR Description: putative oxidoreductase
  misc_feature (87)..(285): NCBI GI NO: 37534316 NR Description: unknown protein
  misc_feature (1)..(95): NCBI GI NO: 37534316 NR Description: unknown protein
  misc_feature (14)..(285): NCBI GI NO: 9294583 NR Description: prolyl 4-hydroxylase alpha subunit-like protein
MLQWHEAFSSYAGSASAIIDPSKVKQVSWKPRAFVYEGFLTELECDHLISIAKSELKRSAVADNLSGESKLSEVRTSSGMFIPKNKDLIVAGIEDKISSWTFLPKENGEDIQVLRYEHGQKYDPHYDYFADKVNIARGGHRVATVLMYLTDVTKGGETVFPDAEESPRHKGSETNENLSECAQKGIAVKPRRGDALLFFSLYPNAIPDTLSLHAGCPVIEGEKWSATKWIHVDSFDKVVGDGGDCNDKHENCERWATLGECTSNPEYMVGSPGLPGYCMKSCKEC

SEQ ID NO: 5347 - DNA, 1344 bp, Glycine max
  misc_feature (1)..(1344): Ceres Seq. ID no. 14307091
attggaagaatgcatcaccgcgttgtgttgtgattgaaaatggagagcgatgttgaagaatctatgcggaagaggcccagaaaatatcctttctccgccgattcatcctctcgcaagcaatttgaacaatattctggacggacatttgcaattatgggggaagtgaattttatgcaagatgatgataatcgtttggagattacccgaactaaatttggaagtttgcttaaaagacatggagatttgacagagcggcttgctagggattctgacaagataatatttgagcgtctacagaaggagtttgaagctgcacgagcttctcaaactgaagagatatgtttagacggggaagagtggaatgatggtctactagctacaataagagagcgggtgcatatggaggcggacagaaaagcaatgcaaggggatgcggacatattagcatgtcccctggaaaaaattacatataaaattggaaacaaggtaatttgctgtttggaaggggcaagaatcggcgtacaatatgagacatcgtttgctggtgaaccttgtgagttttaccattgtgtgctggaaagcaagtcatttcttgaaaagatgactgtccttgaacacacagttccatttttcctgccaatacgagaaatagaaaatgatctccattcatccaatgcaatgaaactcatagatcatgttggagatctattgcaggcttttgtggatagacgggaacaggtcagacttataaaggagctgtatggaaatcagattagagagctgtatcatagccttccctaccatatggtcgaatttgtattagatgattctgattgcaaggtgacagtcagccttagatatgcagatctcatttcggtgcttccaactcgaatttcagtgctagcctggcctatgttcaataaaaatactatgagtaggaaggaagatggactctcgggaagtcattcttccccaattcgcctaacatatgcagaagatgccttacgaaccatgagtttacccgaagcatatgcagagattgtattaaacttaccacaggcgattcggcagacgtatcatcaaaaagccaccgcttagagctttgccctttcagtagcctagatgcatctgtaaaaattcttggtagagatgttaaatattagaaaaacaacttcagaattattacctatttacctagtcaaattgctcaggttgagttcattttgctgtaatattgtcatatagcatttagcatttgtacttcggcctctctggcctcgttattccttcaatacctactccggtgtcttgtatcattaatacaacagggctaggtttacatct

SEQ ID NO: 5348 - protein, 352 aa, Glycine max
  peptide (1)..(352): Ceres Seq. ID no. 14307092
  misc_feature (39)..(346): NCBI GI NO: 18416357 NR Description: expressed protein [Arabidopsis thaliana]
  misc_feature (42)..(344): NCBI GI NO: 38346430 NR Description: OSJNBa0019J05.15
  misc_feature (39)..(346): NCBI GI NO: 13430738 NR Description: unknown protein [Arabidopsis thaliana]
  misc_feature (121)..(346): NCBI GI NO: 10129649 NR Description: putative protein [Arabidopsis thaliana]
MESDVEESMRKRPRKYPFSADSSSRKQFEQYSGRTFAIMGEVNFMQDDDNRLEITRTKFGSLLKRHGDLTERLARDSDKIIFERLQKEFEAARASQTEEICLDGEEWNDGLLATIRERVHMEADRKAMQGDADILACPLEKITYKIGNKVICCLEGARIGVQYETSFAGEPCEFYHCVLESKSFLEKMTVLEHTVPFFLPIREIENDLHSSNAMKLIDHVGDLLQAFVDRREQVRLIKELYGNQIRELYHSLPYHMVEFVLDDSDCKVTVSLRYADLISVLPTRISVLAWPMFNKNTMSRKEDGLSGSHSSPIRLTYAEDALRTMSLPEAYAEIVLNLPQAIRQTYHQKATA

SEQ ID NO: 5349 - protein, 344 aa, Glycine max
  peptide (1)..(344): Ceres Seq. ID no. 14307093
  misc_feature (31)..(338): NCBI GI NO: 18416357 NR Description: expressed protein [Arabidopsis thaliana]
  misc_feature (34)..(336): NCBI GI NO: 38346430 NR Description: OSJNBa0019J05.15
  misc_feature (31)..(338): NCBI GI NO: 13430738 NR Description: unknown protein [Arabidopsis thaliana]
  misc_feature (113)..(338): NCBI GI NO: 10129649 NR Description: putative protein [Arabidopsis thaliana]
MRKRPRKYPFSADSSSRKQFEQYSGRTFAIMGEVNFMQDDDNRLEITRTKFGSLLKRHGDLTERLARDSDKIIFERLQKEFEAARASQTEEICLDGEEWNDGLLATIRERVHMEADRKAMQGDADILACPLEKITYKIGNKVICCLEGARIGVQYETSFAGEPCEFYHCVLESKSFLEKMTVLEHTVPFFLPIREIENDLHSSNAMKLIDHVGDLLQAFVDRREQVRLIKELYGNQIRELYHSLPYHMVEFVLDDSDCKVTVSLRYADLISVLPTRISVLAWPMFNKNTMSRKEDGLSGSHSSPIRLTYAEDALRTMSLPEAYAEIVLNLPQAIRQTYHQKATA

SEQ ID NO: 5350 - protein, 314 aa, Glycine max
  peptide (1)..(314): Ceres Seq. ID no. 14307094
  misc_feature (1)..(308): NCBI GI NO: 18416357 NR Description: expressed protein [Arabidopsis thaliana]
  misc_feature (4)..(306): NCBI GI NO: 38346430 NR Description: OSJNBa0019J05.15
  misc_feature (1)..(308): NCBI GI NO: 13430738 NR Description: unknown protein [Arabidopsis thaliana]
  misc_feature (83)..(308): NCBI GI NO: 10129649 NR Description: putative protein [Arabidopsis thaliana]
MGEVNFMQDDDNRLEITRTKFGSLLKRHGDLTERLARDSDKIIFERLQKEFEAARASQTEEICLDGEEWNDGLLATIRERVHMEADRKAMQGDADILACPLEKITYKIGNKVICCLEGARIGVQYETSFAGEPCEFYHCVLESKSFLEKMTVLEHTVPFFLPIREIENDLHSSNAMKLIDHVGDLLQAFVDRREQVRLIKELYGNQIRELYHSLPYHMVEFVLDDSDCKVTVSLRYADLISVLPTRISVLAWPMFNKNTMSRKEDGLSGSHSSPIRLTYAEDALRTMSLPEAYAEIVLNLPQAIRQTYHQKATA

SEQ ID NO: 5351 - DNA, 2061 bp, Glycine max
  misc_feature (1)..(2061): Ceres Seq. ID no. 14313151
tttatgttcaaagcatttcttttgggcttctgacccaaataattcctcctaacgattcaacccatttcaaacaatctgtaatagtgttataggatagatgaatcagaagacaacgttgcatggaaagcaattggatactgcggacctgatccagaattcaaagctcggttgaagagccactttttagatggaacatctaaaggaggacaagaggataaggaagatgaagatgctgaagaggtgataggaccactttacaaaggtctagtccatctcaattacccacgagacatcactgcagatgctctaaaacgactcggattccctgtatcggtcatccgtcagaagcataaagctgctgcaaacttatcatctccttctttggtgatacaatgtgatgcagtggtggttggttctggctcaggaggtggagtgatagctggtgttcttgcaaaagctggttacaaagtgttggtgttggagaaaggaggttattctgctaggaacaatctttctcttcttgaaggaccaaccatggatcaaatgtacctcaatggtggtctggttgcaagtgatgatatgggtgtgttcattctatcaggatccactgttggtggagggtcagcaatcaactggtctgcgtgcattaaaacccctcagcatgtgtgcaaggagtggagtgataaacatggtctagagctgtttgagagtgaactgtatagagaagccttgaatgctgtttgtgagaagatggaagttcaatctgagattgaagatgaaggattcaacaatgcaatactaagaaaagggtgtcaagaaatggggtatcctgttagtaacattcctaggaattctgcggcagatcactactgtggctggtgttgcatgggttgtaaggatgggaggaagaagggtacctcagaaacatggttagtggacttggtgaaatctggcaatggagcaattcttccaggttgtgaggcaataaaagtcttgcacaagaaaaaggaagggagggatagaaagattgcgcgtggagtggcttttgaatttgaatataaagggactaaagacatttgtgtggtggagtccaaggtcacaattgtagcatgtggagcactgagtactccagcattgcttaaaaaaagtggcttgaggaatcagaacatagggaggaacttgcatcttcatccagtggcgatggcttggggatacttcccagatgcacctgaatctgaggtgtggccagaggcatataagaagagctatgaaggagggataatgacagcaatgtcaactgttgttgcagagtttgaacaatctggatatggtgcagtgatccaaacaccttcattgcatcctggtatgttctcaattgtcacaccatggacttctggaatcgatataagagaccgaatgcgaaagttttcaagaacagctcatatatttgcactggcaagggatcaaggatcagggactgtaaaagccccagatcgtatcagttataagccggcaggtgtagatgaagagaatttaaagaaaggaattgagaaggtgctgagaattctggcagcagctggtgctgaagaaattgggacacatcataataagggaaggaccttaaatgtaaagcaggtaagatatcatgagtttgagaaatttgttaaagaggaaagttcaaggtcattgacagaccttacaacaccattgtgctcggcacatcaaatggggagttgccggatgggttctaatccaaagcaatcagcggtgaatcagacaggggagacatgggaagtggagggcctttatgtggcagatacaagtgtcttcccaacagcattgggtgtgaatccaatggttactgttcaagctattgcttattgcacagcacaatctgttgttgaagtacttagaaggaaaagaactaaatgagaaaaataaaataaaatcttttgctgcttctgttgctccaatggtactgaatattcatggcattgggcagaaaactttgttcaaataataattgtttggtgagaaaagcaatggttgaaattttaacat

SEQ ID NO: 5352 - protein, 465 aa, Glycine max
  peptide (1)..(465): Ceres Seq. ID no. 14313152
  misc_feature (1)..(228): Pfam Name: Pfam Description:  GMC oxidoreductase
  misc_feature (1)..(463): NCBI GI NO: 15234998 NR Description: alcohol oxidase-related [Arabidopsis thaliana]
  misc_feature (1)..(459): NCBI GI NO: 37535330 NR Description: putative alcohol oxidase
  misc_feature (1)..(457): NCBI GI NO: 18403753 NR Description: alcohol oxidase-related [Arabidopsis thaliana]
  misc_feature (1)..(457): NCBI GI NO: 22798796 NR Description: alcohol oxidase [Arabidopsis thaliana]
  misc_feature (1)..(457): NCBI GI NO: 16905151 NR Description: putative alcohol oxidase [Oryza sativa]
  misc_feature (1)..(457): NCBI GI NO: 37535334 NR Description: putative oxidase
  misc_feature (1)..(465): NCBI GI NO: 37535318 NR Description: putative alcohol oxidase
  misc_feature (1)..(463): NCBI GI NO: 25367436 NR Description: hypothetical protein
  misc_feature (1)..(463): NCBI GI NO: 15219612 NR Description: alcohol oxidase-related [Arabidopsis thaliana]
  misc_feature (1)..(465): NCBI GI NO: 14532706 NR Description: unknown protein [Arabidopsis thaliana]
MDQMYLNGGLVASDDMGVFILSGSTVGGGSAINWSACIKTPQHVCKEWSDKHGLELFESELYREALNAVCEKMEVQSEIEDEGFNNAILRKGCQEMGYPVSNIPRNSAADHYCGWCCMGCKDGRKKGTSETWLVDLVKSGNGAILPGCEAIKVLHKKKEGRDRKIARGVAFEFEYKGTKDICVVESKVTIVACGALSTPALLKKSGLRNQNIGRNLHLHPVAMAWGYFPDAPESEVWPEAYKKSYEGGIMTAMSTVVAEFEQSGYGAVIQTPSLHPGMFSIVTPWTSGIDIRDRMRKFSRTAHIFALARDQGSGTVKAPDRISYKPAGVDEENLKKGIEKVLRILAAAGAEEIGTHHNKGRTLNVKQVRYHEFEKFVKEESSRSLTDLTTPLCSAHQMGSCRMGSNPKQSAVNQTGETWEVEGLYVADTSVFPTALGVNPMVTVQAIAYCTAQSVVEVLRRKRTK

SEQ ID NO: 5353 - protein, 462 aa, Glycine max
  peptide (1)..(462): Ceres Seq. ID no. 14313153
  misc_feature (1)..(225): Pfam Name: Pfam Description:  GMC oxidoreductase
  misc_feature (1)..(460): NCBI GI NO: 15234998 NR Description: alcohol oxidase-related [Arabidopsis thaliana]
  misc_feature (1)..(456): NCBI GI NO: 37535330 NR Description: putative alcohol oxidase
  misc_feature (1)..(454): NCBI GI NO: 18403753 NR Description: alcohol oxidase-related [Arabidopsis thaliana]
  misc_feature (1)..(454): NCBI GI NO: 22798796 NR Description: alcohol oxidase [Arabidopsis thaliana]
  misc_feature (1)..(454): NCBI GI NO: 16905151 NR Description: putative alcohol oxidase [Oryza sativa]
  misc_feature (1)..(454): NCBI GI NO: 37535334 NR Description: putative oxidase
  misc_feature (1)..(462): NCBI GI NO: 37535318 NR Description: putative alcohol oxidase
  misc_feature (1)..(460): NCBI GI NO: 25367436 NR Description: hypothetical protein
  misc_feature (1)..(460): NCBI GI NO: 15219612 NR Description: alcohol oxidase-related [Arabidopsis thaliana]
  misc_feature (1)..(462): NCBI GI NO: 14532706 NR Description: unknown protein [Arabidopsis thaliana]
MYLNGGLVASDDMGVFILSGSTVGGGSAINWSACIKTPQHVCKEWSDKHGLELFESELYREALNAVCEKMEVQSEIEDEGFNNAILRKGCQEMGYPVSNIPRNSAADHYCGWCCMGCKDGRKKGTSETWLVDLVKSGNGAILPGCEAIKVLHKKKEGRDRKIARGVAFEFEYKGTKDICVVESKVTIVACGALSTPALLKKSGLRNQNIGRNLHLHPVAMAWGYFPDAPESEVWPEAYKKSYEGGIMTAMSTVVAEFEQSGYGAVIQTPSLHPGMFSIVTPWTSGIDIRDRMRKFSRTAHIFALARDQGSGTVKAPDRISYKPAGVDEENLKKGIEKVLRILAAAGAEEIGTHHNKGRTLNVKQVRYHEFEKFVKEESSRSLTDLTTPLCSAHQMGSCRMGSNPKQSAVNQTGETWEVEGLYVADTSVFPTALGVNPMVTVQAIAYCTAQSVVEVLRRKRTK

SEQ ID NO: 5354 - protein, 450 aa, Glycine max
  peptide (1)..(450): Ceres Seq. ID no. 14313154
  misc_feature (1)..(213): Pfam Name: Pfam Description:  GMC oxidoreductase
  misc_feature (1)..(448): NCBI GI NO: 15234998 NR Description: alcohol oxidase-related [Arabidopsis thaliana]
  misc_feature (1)..(444): NCBI GI NO: 37535330 NR Description: putative alcohol oxidase
  misc_feature (1)..(442): NCBI GI NO: 18403753 NR Description: alcohol oxidase-related [Arabidopsis thaliana]
  misc_feature (1)..(442): NCBI GI NO: 22798796 NR Description: alcohol oxidase [Arabidopsis thaliana]
  misc_feature (1)..(442): NCBI GI NO: 16905151 NR Description: putative alcohol oxidase [Oryza sativa]
  misc_feature (1)..(442): NCBI GI NO: 37535334 NR Description: putative oxidase
  misc_feature (1)..(450): NCBI GI NO: 37535318 NR Description: putative alcohol oxidase
  misc_feature (1)..(448): NCBI GI NO: 25367436 NR Description: hypothetical protein
  misc_feature (1)..(448): NCBI GI NO: 15219612 NR Description: alcohol oxidase-related [Arabidopsis thaliana]
  misc_feature (1)..(450): NCBI GI NO: 14532706 NR Description: unknown protein [Arabidopsis thaliana]
MGVFILSGSTVGGGSAINWSACIKTPQHVCKEWSDKHGLELFESELYREALNAVCEKMEVQSEIEDEGFNNAILRKGCQEMGYPVSNIPRNSAADHYCGWCCMGCKDGRKKGTSETWLVDLVKSGNGAILPGCEAIKVLHKKKEGRDRKIARGVAFEFEYKGTKDICVVESKVTIVACGALSTPALLKKSGLRNQNIGRNLHLHPVAMAWGYFPDAPESEVWPEAYKKSYEGGIMTAMSTVVAEFEQSGYGAVIQTPSLHPGMFSIVTPWTSGIDIRDRMRKFSRTAHIFALARDQGSGTVKAPDRISYKPAGVDEENLKKGIEKVLRILAAAGAEEIGTHHNKGRTLNVKQVRYHEFEKFVKEESSRSLTDLTTPLCSAHQMGSCRMGSNPKQSAVNQTGETWEVEGLYVADTSVFPTALGVNPMVTVQAIAYCTAQSVVEVLRRKRTK

SEQ ID NO: 5355 - DNA, 1328 bp, Glycine max
  misc_feature (1)..(1328): Ceres Seq. ID no. 14313847
acttcttccaatttcaaattcttcactcacccagtcgcgcttttctctgaatttcacgatgcgcacgtccagaaaagcagaaccctccaacaacgacgtcgtttcttcggaacacagaaactggagcaacatcttcaaatcgctggttcagatggtgtgcagccagcagaaccagcttcactccttcgcgagccgccacaagtttctcgaagaccgccttcgaatgcagcacgaagggtgggtctccgatgttcgatgtcacaaggatcaaatttctcagatgaatgggatgttgacgtttgaggagaagaaacagtcgctcgaggcggcaaaggcggattttgcgcttagtttgaagcacagagaggctgctatgttgaaatggattttagagcatgcagaggatgagttggcggattttaaagcctggtttgaaatcctttcttgtaaatcctctaatggagaagatcaaggaacagcatttaaggatactgacttgaagaagaaaggaagcacggatagagggaacatgtccactaggaatactgcagaaaaagagaagtattccagtgaaaacaaagatgaatttagtaggttaaaaggtgaatatgataagcttgctttagaaaaatattcggaggtgacgacactcttggcagaaaagaaatttatgtggaatcaatataatgtaatggagaatgattatgctgataaattaaggactaaagaagctgaagtagaaaaagcaaatgaaaagataaagatacttgtttctagcatggagcagctacagtctgaaaattatgaaaaggatagtaaaatatcagagttacaaagtaaaatggctgagatggaagctgagacaaaaagattgaacaatgaaatatctgaactctcagtggagttggaatctttaagaaagttcaggaacagccaagttacaccatctgttttaaatcgctgcacagaaggaactaaagcacctgagtcaggagttgttaagagcaacaagagtagaagaaatatgactctgaaaaaagaaatatgtactcctgatgctccagttcctgccaaatcctctgaaaaggggacaaaaacaaaaagcatgaagaggaaagaggctccagttattcccacttctgagactccgaaactgttctcttccggcttcaaggttccaaaactgaagtcctctgtaagggtcacatgacagatgacaccttccgataacttttagtgtgttacttaggatatgttagtcttgtacacgcgacttttgtattatatgctccttgtgtaaactatgtattatgaatgagctttctgtc

SEQ ID NO: 5356 - protein, 402 aa, Glycine max
  peptide (1)..(402): Ceres Seq. ID no. 14313848
  misc_feature (198)..(397): NCBI GI NO: 15223725 NR Description: expressed protein [Arabidopsis thaliana]
  misc_feature (198)..(395): NCBI GI NO: 25518429 NR Description: hypothetical protein T20H2
  misc_feature (35)..(343): NCBI GI NO: 15223725 NR Description: expressed protein [Arabidopsis thaliana]
  misc_feature (35)..(391): NCBI GI NO: 25518429 NR Description: hypothetical protein T20H2
  misc_feature (21)..(320): NCBI GI NO: 38344113 NR Description: OSJNBb0050O03.10
LLPISNSSLTQSRFSLNFTMRTSRKAEPSNNDVVSSEHRNWSNIFKSLVQMVCSQQNQLHSFASRHKFLEDRLRMQHEGWVSDVRCHKDQISQMNGMLTFEEKKQSLEAAKADFALSLKHREAAMLKWILEHAEDELADFKAWFEILSCKSSNGEDQGTAFKDTDLKKKGSTDRGNMSTRNTAEKEKYSSENKDEFSRLKGEYDKLALEKYSEVTTLLAEKKFMWNQYNVMENDYADKLRTKEAEVEKANEKIKILVSSMEQLQSENYEKDSKISELQSKMAEMEAETKRLNNEISELSVELESLRKFRNSQVTPSVLNRCTEGTKAPESGVVKSNKSRRNMTLKKEICTPDAPVPAKSSEKGTKTKSMKRKEAPVIPTSETPKLFSSGFKVPKLKSSVRVT

SEQ ID NO: 5357 - protein, 383 aa, Glycine max
  peptide (1)..(383): Ceres Seq. ID no. 14313849
  misc_feature (179)..(378): NCBI GI NO: 15223725 NR Description: expressed protein [Arabidopsis thaliana]
  misc_feature (179)..(376): NCBI GI NO: 25518429 NR Description: hypothetical protein T20H2
  misc_feature (16)..(324): NCBI GI NO: 15223725 NR Description: expressed protein [Arabidopsis thaliana]
  misc_feature (16)..(372): NCBI GI NO: 25518429 NR Description: hypothetical protein T20H2
  misc_feature (2)..(301): NCBI GI NO: 38344113 NR Description: OSJNBb0050O03.10
MRTSRKAEPSNNDVVSSEHRNWSNIFKSLVQMVCSQQNQLHSFASRHKFLEDRLRMQHEGWVSDVRCHKDQISQMNGMLTFEEKKQSLEAAKADFALSLKHREAAMLKWILEHAEDELADFKAWFEILSCKSSNGEDQGTAFKDTDLKKKGSTDRGNMSTRNTAEKEKYSSENKDEFSRLKGEYDKLALEKYSEVTTLLAEKKFMWNQYNVMENDYADKLRTKEAEVEKANEKIKILVSSMEQLQSENYEKDSKISELQSKMAEMEAETKRLNNEISELSVELESLRKFRNSQVTPSVLNRCTEGTKAPESGVVKSNKSRRNMTLKKEICTPDAPVPAKSSEKGTKTKSMKRKEAPVIPTSETPKLFSSGFKVPKLKSSVRVT

SEQ ID NO: 5358 - protein, 352 aa, Glycine max
  peptide (1)..(352): Ceres Seq. ID no. 14313850
  misc_feature (148)..(347): NCBI GI NO: 15223725 NR Description: expressed protein [Arabidopsis thaliana]
  misc_feature (148)..(345): NCBI GI NO: 25518429 NR Description: hypothetical protein T20H2
  misc_feature (1)..(293): NCBI GI NO: 15223725 NR Description: expressed protein [Arabidopsis thaliana]
  misc_feature (1)..(341): NCBI GI NO: 25518429 NR Description: hypothetical protein T20H2
  misc_feature (1)..(270): NCBI GI NO: 38344113 NR Description: OSJNBb0050O03.10
MVCSQQNQLHSFASRHKFLEDRLRMQHEGWVSDVRCHKDQISQMNGMLTFEEKKQSLEAAKADFALSLKHREAAMLKWILEHAEDELADFKAWFEILSCKSSNGEDQGTAFKDTDLKKKGSTDRGNMSTRNTAEKEKYSSENKDEFSRLKGEYDKLALEKYSEVTTLLAEKKFMWNQYNVMENDYADKLRTKEAEVEKANEKIKILVSSMEQLQSENYEKDSKISELQSKMAEMEAETKRLNNEISELSVELESLRKFRNSQVTPSVLNRCTEGTKAPESGVVKSNKSRRNMTLKKEICTPDAPVPAKSSEKGTKTKSMKRKEAPVIPTSETPKLFSSGFKVPKLKSSVRVT

SEQ ID NO: 5359 - DNA, 1474 bp, Glycine max
  misc_feature (1)..(1474): Ceres Seq. ID no. 15172325
ggatgggcgtccctcactttcttctaattccatatccaacactaggacatgtgaacccccttatgcagttgtctcaggttcttgccagacatggctgcaagatcacttttctgaacacagaattcaaccacaaaggagcaaatacagcagcaggtgttgggatagacaacgcccatataaagtttgtgacactcccagatggtttggtccctgaagatgacagaagtgaccacaaaaaagttattttctcaatcaaaagccacatgcctcctatgcttcccaaactcattcaagatatcgatgctttggatgctaacaataacatcacttgcattgttgtcacagtgaatatgggttgggccttggaagttggccacaaattgggaattaaaggagctcttctgtggcctgcatctgcaacttcgttggccacgtgtgattgtatcccatggttgattcatgatggaattatagattcagatggaaaccccatcaaaaaacaagaaattcaactctccacaaatctgccaatgatggacacagaaaacttgccatggtgtagcctaggtaagatgctctttcatcatattgcacaagagatgcaaactattaagttaggagactggtggctttgcaacacaacatatgatcttgagtctgccgcattttccatatcacgacggttcctaccaattggtccattgattgcaagtgacagcaacaaaagttcactctggcaaggagacacaactttcttagactggttagatcagcagccacctcaatcagttatatatgttgcctttggtagtttggcagtaattgatcacaaccaacttaaggaattagctctaggactcaatttccttgacaagccttttctttgggttgtacggccgagtaatgataatgaggcaaacaatgcatgctctgatgaattccatggaagtaaaggcagaattgtaagttgggcaccacagaagaagatattgaaccaccctgccatagcttgtttcattagtcactgtggttggaattctaccatagaaggtgtatgtggtggcgtacctttcttgtgttggccattagccaaggatcagtttgttaacaagtcatatatttgtgatgtgtggaaggttggactgggattagacaaggctgagaatggattaatatcaaagggagagataaggaagaaggtagagcaattacttggcgatgaaggcataaaagcaaggtcgttgaaactgaaggaattgaccttgaataacatagtagaaggtggtcactcttcaaagaatctcaaaaactttatcagctgggcagagtaataatgctttggtatagtttggaaatcgttgtaaacttgcaatgtagttagtaaaattgttcattccgttatgtagtattttgaggacattgaatattataaatatcatcatttccattccatgataaaggattagagaccttt

SEQ ID NO: 5360 - protein, 442 aa, Glycine max
  peptide (1)..(442): Ceres Seq. ID no. 15172326
  misc_feature (59)..(438): Pfam Name: Pfam Description:  UDP-glucoronosyl and UDP-glucosyl transferase
  misc_feature (59)..(438): NCBI GI NO: 10953887 NR Description: UDP-glucosyltransferase HRA25 [Phaseolus vulgaris]
  misc_feature (1)..(438): NCBI GI NO: 21326124 NR Description: putative glucosyl transferase [Sorghum bicolor]
  misc_feature (4)..(439): NCBI GI NO: 21326127 NR Description: putative glucosyl transferase [Sorghum bicolor]
  misc_feature (1)..(440): NCBI GI NO: 15232846 NR Description: glycosyltransferase family [Arabidopsis thaliana]
  misc_feature (4)..(439): NCBI GI NO: 13236650 NR Description: putative glucosyltransferase [Oryza sativa]
  misc_feature (1)..(439): NCBI GI NO: 21326123 NR Description: putative glucosyl transferase [Sorghum bicolor]
  misc_feature (1)..(438): NCBI GI NO: 21326125 NR Description: putative glucosyl transferase [Sorghum bicolor]
  misc_feature (2)..(438): NCBI GI NO: 13236658 NR Description: putative glucosyltransferase [Oryza sativa]
  misc_feature (1)..(438): NCBI GI NO: 13236656 NR Description: putative glucosyltransferase [Oryza sativa]
  misc_feature (4)..(439): NCBI GI NO: 13236653 NR Description: putative glucosyltransferase [Oryza sativa]
MGVPHFLLIPYPTLGHVNPLMQLSQVLARHGCKITFLNTEFNHKGANTAAGVGIDNAHIKFVTLPDGLVPEDDRSDHKKVIFSIKSHMPPMLPKLIQDIDALDANNNITCIVVTVNMGWALEVGHKLGIKGALLWPASATSLATCDCIPWLIHDGIIDSDGNPIKKQEIQLSTNLPMMDTENLPWCSLGKMLFHHIAQEMQTIKLGDWWLCNTTYDLESAAFSISRRFLPIGPLIASDSNKSSLWQGDTTFLDWLDQQPPQSVIYVAFGSLAVIDHNQLKELALGLNFLDKPFLWVVRPSNDNEANNACSDEFHGSKGRIVSWAPQKKILNHPAIACFISHCGWNSTIEGVCGGVPFLCWPLAKDQFVNKSYICDVWKVGLGLDKAENGLISKGEIRKKVEQLLGDEGIKARSLKLKELTLNNIVEGGHSSKNLKNFISWAE

SEQ ID NO: 5361 - protein, 422 aa, Glycine max
  peptide (1)..(422): Ceres Seq. ID no. 15172327
  misc_feature (39)..(418): Pfam Name: Pfam Description:  UDP-glucoronosyl and UDP-glucosyl transferase
  misc_feature (39)..(418): NCBI GI NO: 10953887 NR Description: UDP-glucosyltransferase HRA25 [Phaseolus vulgaris]
  misc_feature (1)..(418): NCBI GI NO: 21326124 NR Description: putative glucosyl transferase [Sorghum bicolor]
  misc_feature (1)..(419): NCBI GI NO: 21326127 NR Description: putative glucosyl transferase [Sorghum bicolor]
  misc_feature (1)..(420): NCBI GI NO: 15232846 NR Description: glycosyltransferase family [Arabidopsis thaliana]
  misc_feature (1)..(419): NCBI GI NO: 13236650 NR Description: putative glucosyltransferase [Oryza sativa]
  misc_feature (1)..(419): NCBI GI NO: 21326123 NR Description: putative glucosyl transferase [Sorghum bicolor]
  misc_feature (1)..(418): NCBI GI NO: 21326125 NR Description: putative glucosyl transferase [Sorghum bicolor]
  misc_feature (1)..(418): NCBI GI NO: 13236658 NR Description: putative glucosyltransferase [Oryza sativa]
  misc_feature (1)..(418): NCBI GI NO: 13236656 NR Description: putative glucosyltransferase [Oryza sativa]
  misc_feature (1)..(419): NCBI GI NO: 13236653 NR Description: putative glucosyltransferase [Oryza sativa]
MQLSQVLARHGCKITFLNTEFNHKGANTAAGVGIDNAHIKFVTLPDGLVPEDDRSDHKKVIFSIKSHMPPMLPKLIQDIDALDANNNITCIVVTVNMGWALEVGHKLGIKGALLWPASATSLATCDCIPWLIHDGIIDSDGNPIKKQEIQLSTNLPMMDTENLPWCSLGKMLFHHIAQEMQTIKLGDWWLCNTTYDLESAAFSISRRFLPIGPLIASDSNKSSLWQGDTTFLDWLDQQPPQSVIYVAFGSLAVIDHNQLKELALGLNFLDKPFLWVVRPSNDNEANNACSDEFHGSKGRIVSWAPQKKILNHPAIACFISHCGWNSTIEGVCGGVPFLCWPLAKDQFVNKSYICDVWKVGLGLDKAENGLISKGEIRKKVEQLLGDEGIKARSLKLKELTLNNIVEGGHSSKNLKNFISWAE

SEQ ID NO: 5362 - protein, 355 aa, Glycine max
  peptide (1)..(355): Ceres Seq. ID no. 15172328
  misc_feature (1)..(351): Pfam Name: Pfam Description:  UDP-glucoronosyl and UDP-glucosyl transferase
  misc_feature (1)..(351): NCBI GI NO: 10953887 NR Description: UDP-glucosyltransferase HRA25 [Phaseolus vulgaris]
  misc_feature (1)..(351): NCBI GI NO: 21326124 NR Description: putative glucosyl transferase [Sorghum bicolor]
  misc_feature (1)..(352): NCBI GI NO: 21326127 NR Description: putative glucosyl transferase [Sorghum bicolor]
  misc_feature (1)..(353): NCBI GI NO: 15232846 NR Description: glycosyltransferase family [Arabidopsis thaliana]
  misc_feature (1)..(352): NCBI GI NO: 13236650 NR Description: putative glucosyltransferase [Oryza sativa]
  misc_feature (1)..(352): NCBI GI NO: 21326123 NR Description: putative glucosyl transferase [Sorghum bicolor]
  misc_feature (1)..(351): NCBI GI NO: 21326125 NR Description: putative glucosyl transferase [Sorghum bicolor]
  misc_feature (1)..(351): NCBI GI NO: 13236658 NR Description: putative glucosyltransferase [Oryza sativa]
  misc_feature (1)..(351): NCBI GI NO: 13236656 NR Description: putative glucosyltransferase [Oryza sativa]
  misc_feature (1)..(352): NCBI GI NO: 13236653 NR Description: putative glucosyltransferase [Oryza sativa]
MPPMLPKLIQDIDALDANNNITCIVVTVNMGWALEVGHKLGIKGALLWPASATSLATCDCIPWLIHDGIIDSDGNPIKKQEIQLSTNLPMMDTENLPWCSLGKMLFHHIAQEMQTIKLGDWWLCNTTYDLESAAFSISRRFLPIGPLIASDSNKSSLWQGDTTFLDWLDQQPPQSVIYVAFGSLAVIDHNQLKELALGLNFLDKPFLWVVRPSNDNEANNACSDEFHGSKGRIVSWAPQKKILNHPAIACFISHCGWNSTIEGVCGGVPFLCWPLAKDQFVNKSYICDVWKVGLGLDKAENGLISKGEIRKKVEQLLGDEGIKARSLKLKELTLNNIVEGGHSSKNLKNFISWAE

SEQ ID NO: 5363 - DNA, 1220 bp, Glycine max
  misc_feature (1)..(1220): Ceres Seq. ID no. 14307041
aaaaacataagaatgcattcaacgcgttgagttgttgtctggaagagcttatgctgtttgttcgcaattcgcatggaaccatcagtttcagctccaccaaaaccttgggagaaagcagcatcatcatctgggccagcaccttttaaacccccatcagcaggtagcacaagtgatgtagttgaggcttcagggactgcaaaacctggcgaaatagttccagcttccgataagactgcaactgtcaataggaatgctcttgggagaccccttcccacaaggccatgggagcagaataatggaagtaccagctatggaggttatggttccacaatgaattataattctggatatggatcttatggtggagtgggagggttgtatggcggaggaatgtatggcagcagtatgtacaggggaggatatgggggcctctatggttcctctgggatgtatggagggggaatgtataatggtggctttggtggtccaatgggtggttatggtatgggtggtggtggtccttatggagctgaagatcccaataatccgtacggagttccttcatcgcccccaggattttggatttcttttatgcgtgtgatgcaaggtgtggttaacttttttggccggatttcaatgctcatagaccagaacacgcaggctttccatatgttcatgactgcacttcttcagctttttgatcgttctggtgtactgtatggagagctagctagatttgtgttgcggttgcttggaatcagaactaaaccaaagaagattaaccctccaggtccagatggacttccactacctgggcaacacaattcctctgtaaatcagaacttcattgagggaacaaagcctgctccaagtggttcttgggacaatgtatgggaaaatgacgccaaaaaatgatgatgcaaatttgttttgctgatagagcaagtccaaatacaaaccaaggaattgaggaacagatgaagcaatacaagtgaatatactgaagctgtgaaatcgatgcttaatctggaagtttaagttcattattgctttgcttagattgctctgataagagagaacaaactagcaatacagttgccttctaagcatttgttctgaatcttgtaggatgctatttgtatagatagttgtattactttgtatttcaaatgtttcttaatcttttgggggcgacaaattgaaagaagtaaattgagtgg

SEQ ID NO: 5364 - protein, 280 aa, Glycine max
  peptide (1)..(280): Ceres Seq. ID no. 14307042
  misc_feature (74)..(153): Pfam Name: Pfam Description:  Keratin
  misc_feature (7)..(276): NCBI GI NO: 34395055 NR Description: putative glycine-rich protein
  misc_feature (9)..(276): NCBI GI NO: 15231481 NR Description: glycine-rich protein [Arabidopsis thaliana]
  misc_feature (2)..(166): NCBI GI NO: 15231481 NR Description: glycine-rich protein [Arabidopsis thaliana]
  misc_feature (5)..(255): NCBI GI NO: 32422747 NR Description: hypothetical protein [Neurospora crassa]
  misc_feature (4)..(269): NCBI GI NO: 40744668 NR Description: hypothetical protein AN1511.2
  misc_feature (66)..(231): NCBI GI NO: 2498763 NR Description: Peroxisomal membrane protein PEX13 (Peroxin-13)
  misc_feature (46)..(152): NCBI GI NO: 33239465 NR Description: RNA-binding protein, RRM domain
  misc_feature (32)..(161): NCBI GI NO: 17555156 NR Description: predicted CDS, putative protein (3D984)
  misc_feature (62)..(161): NCBI GI NO: 33864553 NR Description: RNA-binding region RNP-1 (RNA recognition motif)
  misc_feature (76)..(168): NCBI GI NO: 17555156 NR Description: predicted CDS, putative protein (3D984)
MEPSVSAPPKPWEKAASSSGPAPFKPPSAGSTSDVVEASGTAKPGEIVPASDKTATVNRNALGRPLPTRPWEQNNGSTSYGGYGSTMNYNSGYGSYGGVGGLYGGGMYGSSMYRGGYGGLYGSSGMYGGGMYNGGFGGPMGGYGMGGGGPYGAEDPNNPYGVPSSPPGFWISFMRVMQGVVNFFGRISMLIDQNTQAFHMFMTALLQLFDRSGVLYGELARFVLRLLGIRTKPKKINPPGPDGLPLPGQHNSSVNQNFIEGTKPAPSGSWDNVWENDAKK

SEQ ID NO: 5365 - protein, 194 aa, Glycine max
  peptide (1)..(194): Ceres Seq. ID no. 14307043
  misc_feature (1)..(67): Pfam Name: Pfam Description:  Keratin
  misc_feature (1)..(190): NCBI GI NO: 34395055 NR Description: putative glycine-rich protein
  misc_feature (1)..(190): NCBI GI NO: 15231481 NR Description: glycine-rich protein [Arabidopsis thaliana]
  misc_feature (1)..(80): NCBI GI NO: 15231481 NR Description: glycine-rich protein [Arabidopsis thaliana]
  misc_feature (1)..(169): NCBI GI NO: 32422747 NR Description: hypothetical protein [Neurospora crassa]
  misc_feature (1)..(183): NCBI GI NO: 40744668 NR Description: hypothetical protein AN1511.2
  misc_feature (1)..(145): NCBI GI NO: 2498763 NR Description: Peroxisomal membrane protein PEX13 (Peroxin-13)
  misc_feature (1)..(66): NCBI GI NO: 33239465 NR Description: RNA-binding protein, RRM domain
  misc_feature (1)..(75): NCBI GI NO: 17555156 NR Description: predicted CDS, putative protein (3D984)
  misc_feature (1)..(75): NCBI GI NO: 33864553 NR Description: RNA-binding region RNP-1 (RNA recognition motif)
  misc_feature (1)..(82): NCBI GI NO: 17555156 NR Description: predicted CDS, putative protein (3D984)
MNYNSGYGSYGGVGGLYGGGMYGSSMYRGGYGGLYGSSGMYGGGMYNGGFGGPMGGYGMGGGGPYGAEDPNNPYGVPSSPPGFWISFMRVMQGVVNFFGRISMLIDQNTQAFHMFMTALLQLFDRSGVLYGELARFVLRLLGIRTKPKKINPPGPDGLPLPGQHNSSVNQNFIEGTKPAPSGSWDNVWENDAKK

SEQ ID NO: 5366 - protein, 174 aa, Glycine max
  peptide (1)..(174): Ceres Seq. ID no. 14307044
  misc_feature (1)..(62): Pfam Name: LMP1 Pfam Description: Herpesvirus latent membrane protein 1
  misc_feature (1)..(170): NCBI GI NO: 34395055 NR Description: putative glycine-rich protein
  misc_feature (1)..(170): NCBI GI NO: 15231481 NR Description: glycine-rich protein [Arabidopsis thaliana]
  misc_feature (1)..(60): NCBI GI NO: 15231481 NR Description: glycine-rich protein [Arabidopsis thaliana]
  misc_feature (1)..(149): NCBI GI NO: 32422747 NR Description: hypothetical protein [Neurospora crassa]
  misc_feature (1)..(163): NCBI GI NO: 40744668 NR Description: hypothetical protein AN1511.2
  misc_feature (1)..(125): NCBI GI NO: 2498763 NR Description: Peroxisomal membrane protein PEX13 (Peroxin-13)
  misc_feature (1)..(46): NCBI GI NO: 33239465 NR Description: RNA-binding protein, RRM domain
  misc_feature (1)..(55): NCBI GI NO: 17555156 NR Description: predicted CDS, putative protein (3D984)
  misc_feature (1)..(55): NCBI GI NO: 33864553 NR Description: RNA-binding region RNP-1 (RNA recognition motif)
  misc_feature (1)..(62): NCBI GI NO: 17555156 NR Description: predicted CDS, putative protein (3D984)
MYGSSMYRGGYGGLYGSSGMYGGGMYNGGFGGPMGGYGMGGGGPYGAEDPNNPYGVPSSPPGFWISFMRVMQGVVNFFGRISMLIDQNTQAFHMFMTALLQLFDRSGVLYGELARFVLRLLGIRTKPKKINPPGPDGLPLPGQHNSSVNQNFIEGTKPAPSGSWDNVWENDAKK

SEQ ID NO: 5367 - DNA, 1164 bp, Glycine max
  misc_feature (1)..(1164): Ceres Seq. ID no. 15169703
ataaattaagaaccctcttttgggaggtgtccttctttttcatgcccatctttcccctaatgctggtggtgggttcagttttttggtgaggaaggataataaagaaggaagctttttttgtgtgagagaaggaagaggagaaaagaaggcatggggagagggaagattgagattaagaagattgagaatttgaacagcagacaagttaccttctccaagaggagaaatgggttgttgaagaaggccaaagagttgtctgttctctgtgatgcagaggttgctgtcatcatattctccagcactggcaagctttatgagttctcaaacacaagcatggagcataccctttcgaggtacagtaaaggcgcagaatcagattctgcagagcaacctattgatgtgcccccaacagatgttatggctgtggagcctgatactaaccttttgatggaggaaataacaaagcttcgatcagcatacttaaggatgatgggtaaggagcttgatggattgagccttaaagaactgcaacaactagaaaatcaactaagtgaagggatgcaatctgtcaaagacaagaaggaacaagtacttgtggaacagcttaggaagtccaggatacaggagcaaaaggccatgctggaaaatgaagttctgcgcaaacagcttgaggaaatacaaaataaaacaaagtcacagttccttgaattcagctctttggataggacattttccaagaatggttcaaaatcccttttcaattgtgcttcagaggaaaatgacctttcagatacttccttgcagttagggttgtcaacagattatggtcgccagaggaaagcattgaagatggaaccttgcaacgactcagggagtcaagtggcttcacattgacattttagtactgaaagcttacctttagaacatgggaaacatggcctagttctttatctggtcacattaagtttagcttatagaaatagtttaggctaaatttaataaatttatatttagttcacaaatttttggctttcaccagcgtttgattgctaaattaggtgtaagtttacatgctaaatgactcaccctattgaaatactttagtcatttagttcaaccaaacggttttcaggttattaagatggttgattagataaaaaggtc

SEQ ID NO: 5368 - protein, 247 aa, Glycine max
  peptide (1)..(247): Ceres Seq. ID no. 15169704
  misc_feature (9)..(59): Pfam Name: DNA-binding and dimerisationdomain Pfam Description: SRF-type transcription factor
  misc_feature (1)..(246): NCBI GI NO: 15230284 NR Description: MADS-box protein [Arabidopsis thaliana]
  misc_feature (1)..(246): NCBI GI NO: 21593229 NR Description: MADS transcription factor-like protein
  misc_feature (1)..(240): NCBI GI NO: 15240706 NR Description: floral homeotic protein, AGL15
  misc_feature (1)..(240): NCBI GI NO: 3831486 NR Description: Agamous-like MADS box protein AGL15
  misc_feature (1)..(240): NCBI GI NO: 7446561 NR Description: MADS box protein AGL15 (type 2) - rape
  misc_feature (7)..(240): NCBI GI NO: 862646 NR Description: MADS-box protein AGL15
  misc_feature (1)..(220): NCBI GI NO: 21396795 NR Description: MADS-box gene 2 protein [Lycopodium annotinum]
  misc_feature (1)..(220): NCBI GI NO: 4101710 NR Description: MADS box transcription factor [Pinus resinosa]
  misc_feature (1)..(220): NCBI GI NO: 4103486 NR Description: MADS box protein [Pinus radiata]
  misc_feature (1)..(220): NCBI GI NO: 4033710 NR Description: AGAMOUS-like MADS-box transcription factor SMADS42B
MGRGKIEIKKIENLNSRQVTFSKRRNGLLKKAKELSVLCDAEVAVIIFSSTGKLYEFSNTSMEHTLSRYSKGAESDSAEQPIDVPPTDVMAVEPDTNLLMEEITKLRSAYLRMMGKELDGLSLKELQQLENQLSEGMQSVKDKKEQVLVEQLRKSRIQEQKAMLENEVLRKQLEEIQNKTKSQFLEFSSLDRTFSKNGSKSLFNCASEENDLSDTSLQLGLSTDYGRQRKALKMEPCNDSGSQVASH

SEQ ID NO: 5369 - protein, 186 aa, Glycine max
  peptide (1)..(186): Ceres Seq. ID no. 15169705
  misc_feature (41)..(113): Pfam Name: Pfam Description:  K-box region
  misc_feature (1)..(185): NCBI GI NO: 15230284 NR Description: MADS-box protein [Arabidopsis thaliana]
  misc_feature (1)..(185): NCBI GI NO: 21593229 NR Description: MADS transcription factor-like protein
  misc_feature (1)..(179): NCBI GI NO: 15240706 NR Description: floral homeotic protein, AGL15
  misc_feature (1)..(179): NCBI GI NO: 3831486 NR Description: Agamous-like MADS box protein AGL15
  misc_feature (1)..(179): NCBI GI NO: 7446561 NR Description: MADS box protein AGL15 (type 2) - rape
  misc_feature (1)..(179): NCBI GI NO: 862646 NR Description: MADS-box protein AGL15
  misc_feature (1)..(159): NCBI GI NO: 21396795 NR Description: MADS-box gene 2 protein [Lycopodium annotinum]
  misc_feature (1)..(159): NCBI GI NO: 4101710 NR Description: MADS box transcription factor [Pinus resinosa]
  misc_feature (1)..(159): NCBI GI NO: 4103486 NR Description: MADS box protein [Pinus radiata]
  misc_feature (1)..(159): NCBI GI NO: 4033710 NR Description: AGAMOUS-like MADS-box transcription factor SMADS42B
MEHTLSRYSKGAESDSAEQPIDVPPTDVMAVEPDTNLLMEEITKLRSAYLRMMGKELDGLSLKELQQLENQLSEGMQSVKDKKEQVLVEQLRKSRIQEQKAMLENEVLRKQLEEIQNKTKSQFLEFSSLDRTFSKNGSKSLFNCASEENDLSDTSLQLGLSTDYGRQRKALKMEPCNDSGSQVASH

SEQ ID NO: 5370 - protein, 158 aa, Glycine max
  peptide (1)..(158): Ceres Seq. ID no. 15169706
  misc_feature (13)..(85): Pfam Name: Pfam Description:  K-box region
  misc_feature (1)..(157): NCBI GI NO: 15230284 NR Description: MADS-box protein [Arabidopsis thaliana]
  misc_feature (1)..(157): NCBI GI NO: 21593229 NR Description: MADS transcription factor-like protein
  misc_feature (1)..(151): NCBI GI NO: 15240706 NR Description: floral homeotic protein, AGL15
  misc_feature (1)..(151): NCBI GI NO: 3831486 NR Description: Agamous-like MADS box protein AGL15
  misc_feature (1)..(151): NCBI GI NO: 7446561 NR Description: MADS box protein AGL15 (type 2) - rape
  misc_feature (1)..(151): NCBI GI NO: 862646 NR Description: MADS-box protein AGL15
  misc_feature (1)..(131): NCBI GI NO: 21396795 NR Description: MADS-box gene 2 protein [Lycopodium annotinum]
  misc_feature (1)..(131): NCBI GI NO: 4101710 NR Description: MADS box transcription factor [Pinus resinosa]
  misc_feature (1)..(131): NCBI GI NO: 4103486 NR Description: MADS box protein [Pinus radiata]
  misc_feature (1)..(131): NCBI GI NO: 4033710 NR Description: AGAMOUS-like MADS-box transcription factor SMADS42B
MAVEPDTNLLMEEITKLRSAYLRMMGKELDGLSLKELQQLENQLSEGMQSVKDKKEQVLVEQLRKSRIQEQKAMLENEVLRKQLEEIQNKTKSQFLEFSSLDRTFSKNGSKSLFNCASEENDLSDTSLQLGLSTDYGRQRKALKMEPCNDSGSQVASH

SEQ ID NO: 5371 - DNA, 1264 bp, Glycine max
  misc_feature (1)..(1264): Ceres Seq. ID no. 14313159
agtagttttaggcacatagggtttggactttggaaaggcttattctccgctctcgtctgaaacctgaaaccctttgttcttcgtcggcggaagcatgtcatcgtcatcatcaagcaacgcctacgacgtgccatgggtagaaaagtaccgtcccagcaaggtcgccgacatcgtcggcaacgaggacgccgtctccaggctccaagtcatcgctcgcgacggcaacatgcccaatctcattttatccggtcctcccggaaccggcaaaaccactagcattctcgccctcgcgcacgagcttctcggaggaccaaattgcaaggaagctgttctcgaactaaacgcttcggatgatagaggaattgatgttgtgaggaacaagatcaagatgtttgctcagaagaaagtcacactgaccccggggaggcacaagatagtgatactggatgaagctgatagcatgaccacaggggcacaacaagcattgagaaggacgatggagatatattcaaacaccactcggtttgcccttgcttgcaatacctcagctaagattattgagcccattcagagtagatgtgccattgtgcgattttcacggttgtctgatcaagagatacttggtcgtctcatggttgtggttcaagctgagaaggttccctatgttcctgaaggacttgaagccatcattttcacagctgacggtgatatgagacaggcattgaataacttgcaagcaacatacagtgggttccaatttgttaaccaagcaaatgttttcaaggtttgtgaccagccacatccactgcatgtgaagaatatggtgcgtaatgtgattgaagggaattttgatgaagcttgttcaggcctcaagcaactgtacgacttgggatattcccccacagatatcatcacgacactctttcgtataataaaaaattatgatatggccgagtacctgaaattggaattcatgaaggaaactggttttgctcatatgagaatttgtgatggagttggttcttatcttcagttgtgtggtctattggctaagctttctctagttcgtgagacagctaaagctgtatgagctggtcctaagtgcaactgagatgtcattatttttaagttttccgatagtgaaatgttctgctgatgtagccttatattttttatgtccagatgctaactgatacatcaatatttcggcttctataaatatgttgtgttttagcttggatcaataactcccacttttgaaaat

SEQ ID NO: 5372 - protein, 331 aa, Glycine max
  peptide (1)..(331): Ceres Seq. ID no. 14313160
  misc_feature (47)..(220): Pfam Name: AAA Pfam Description: ATPase family associated with various cellular activities
  misc_feature (1)..(330): NCBI GI NO: 15221697 NR Description: replication factor -related [Arabidopsis thaliana]
  misc_feature (1)..(330): NCBI GI NO: 15991286 NR Description: replication factor C 40kDa subunit
  misc_feature (1)..(330): NCBI GI NO: 38344372 NR Description: OSJNBb0032E06.6
  misc_feature (1)..(321): NCBI GI NO: 1703053 NR Description: Activator 1 40 kDa subunit
  misc_feature (4)..(321): NCBI GI NO: 34871892 NR Description: replication factor C 2 (40kD) [Rattus norvegicus]
  misc_feature (4)..(321): NCBI GI NO: 11177922 NR Description: replication factor C
  misc_feature (6)..(321): NCBI GI NO: 31563534 NR Description: replication factor C 2
  misc_feature (4)..(321): NCBI GI NO: 12847419 NR Description: unnamed protein product [Mus musculus]
  misc_feature (6)..(321): NCBI GI NO: 539678 NR Description: replication factor C - human
  misc_feature (3)..(331): NCBI GI NO: 28950096 NR Description: probable REPLICATION FACTOR C (40 KDA SUBUNIT)
MSSSSSSNAYDVPWVEKYRPSKVADIVGNEDAVSRLQVIARDGNMPNLILSGPPGTGKTTSILALAHELLGGPNCKEAVLELNASDDRGIDVVRNKIKMFAQKKVTLTPGRHKIVILDEADSMTTGAQQALRRTMEIYSNTTRFALACNTSAKIIEPIQSRCAIVRFSRLSDQEILGRLMVVVQAEKVPYVPEGLEAIIFTADGDMRQALNNLQATYSGFQFVNQANVFKVCDQPHPLHVKNMVRNVIEGNFDEACSGLKQLYDLGYSPTDIITTLFRIIKNYDMAEYLKLEFMKETGFAHMRICDGVGSYLQLCGLLAKLSLVRETAKAV

SEQ ID NO: 5373 - protein, 287 aa, Glycine max
  peptide (1)..(287): Ceres Seq. ID no. 14313161
  misc_feature (3)..(176): Pfam Name: AAA Pfam Description: ATPase family associated with various cellular activities
  misc_feature (1)..(286): NCBI GI NO: 15221697 NR Description: replication factor -related [Arabidopsis thaliana]
  misc_feature (1)..(286): NCBI GI NO: 15991286 NR Description: replication factor C 40kDa subunit
  misc_feature (1)..(286): NCBI GI NO: 38344372 NR Description: OSJNBb0032E06.6
  misc_feature (1)..(277): NCBI GI NO: 1703053 NR Description: Activator 1 40 kDa subunit
  misc_feature (1)..(277): NCBI GI NO: 34871892 NR Description: replication factor C 2 (40kD) [Rattus norvegicus]
  misc_feature (1)..(277): NCBI GI NO: 11177922 NR Description: replication factor C
  misc_feature (1)..(277): NCBI GI NO: 31563534 NR Description: replication factor C 2
  misc_feature (1)..(277): NCBI GI NO: 12847419 NR Description: unnamed protein product [Mus musculus]
  misc_feature (1)..(277): NCBI GI NO: 539678 NR Description: replication factor C - human
  misc_feature (1)..(287): NCBI GI NO: 28950096 NR Description: probable REPLICATION FACTOR C (40 KDA SUBUNIT)
MPNLILSGPPGTGKTTSILALAHELLGGPNCKEAVLELNASDDRGIDVVRNKIKMFAQKKVTLTPGRHKIVILDEADSMTTGAQQALRRTMEIYSNTTRFALACNTSAKIIEPIQSRCAIVRFSRLSDQEILGRLMVVVQAEKVPYVPEGLEAIIFTADGDMRQALNNLQATYSGFQFVNQANVFKVCDQPHPLHVKNMVRNVIEGNFDEACSGLKQLYDLGYSPTDIITTLFRIIKNYDMAEYLKLEFMKETGFAHMRICDGVGSYLQLCGLLAKLSLVRETAKAV

SEQ ID NO: 5374 - protein, 233 aa, Glycine max
  peptide (1)..(233): Ceres Seq. ID no. 14313162
  misc_feature (1)..(122): Pfam Name: AAA Pfam Description: ATPase family associated with various cellular activities
  misc_feature (1)..(232): NCBI GI NO: 15221697 NR Description: replication factor -related [Arabidopsis thaliana]
  misc_feature (1)..(232): NCBI GI NO: 15991286 NR Description: replication factor C 40kDa subunit
  misc_feature (1)..(232): NCBI GI NO: 38344372 NR Description: OSJNBb0032E06.6
  misc_feature (1)..(223): NCBI GI NO: 1703053 NR Description: Activator 1 40 kDa subunit
  misc_feature (1)..(223): NCBI GI NO: 34871892 NR Description: replication factor C 2 (40kD) [Rattus norvegicus]
  misc_feature (1)..(223): NCBI GI NO: 11177922 NR Description: replication factor C
  misc_feature (1)..(223): NCBI GI NO: 31563534 NR Description: replication factor C 2
  misc_feature (1)..(223): NCBI GI NO: 12847419 NR Description: unnamed protein product [Mus musculus]
  misc_feature (1)..(223): NCBI GI NO: 539678 NR Description: replication factor C - human
  misc_feature (1)..(233): NCBI GI NO: 28950096 NR Description: probable REPLICATION FACTOR C (40 KDA SUBUNIT)
MFAQKKVTLTPGRHKIVILDEADSMTTGAQQALRRTMEIYSNTTRFALACNTSAKIIEPIQSRCAIVRFSRLSDQEILGRLMVVVQAEKVPYVPEGLEAIIFTADGDMRQALNNLQATYSGFQFVNQANVFKVCDQPHPLHVKNMVRNVIEGNFDEACSGLKQLYDLGYSPTDIITTLFRIIKNYDMAEYLKLEFMKETGFAHMRICDGVGSYLQLCGLLAKLSLVRETAKAV

SEQ ID NO: 5375 - DNA, 1374 bp, Glycine max
  misc_feature (1)..(1374): Ceres Seq. ID no. 15226103
gcagctacgtaggcccccccccatgtgtgttgagcgttcccctgatgaaataaggccctggtgcaaggtttcttgagatattttcagctgaaacagttgctaaactttctacttgcatctccaatactgtctctggcacttcgctcagagttgtccattatgctaagtcaaggcctcagaactttttctctctgggttttttaactcctatggaagaagagagccgtggagttgtgtttttatcagatgaactctcaaggtccaaagaagctggaagtgtggaaaaatcctctgtttgattagaagaacactccaatcttaggaggagcaagaatgtgagcaagggagacattgctaatgttcccatggaatctgagccagcagcaatttggccgggatacttgtctgcttctgttctcccattcgtgctacacttgggattcatggtgtcaactcgtttcttgtctgccagccctcctctttattggtttgcttcatatataatggcgaatctttattggtttgcttcatatataatggcgaatcctgcaaaatactttagatggggatacgtgatatgggcatactctatggcatacatttttcttggcagtctgctgttttcaaacttctaccctttcacctaacgagaagaaaggtagatggttcttgaaagctgttagtctttttatttcatgcaaatgcaatgcacaaaggcatatagctatcatgaagtgttcaccacaaaaaaaaataaaaaaaaaccaggatttagcgtcggttatatatgacacttttctggcggttcaaaccaggatttaacgttgctgctgaatttcatatttatgttggcttcttcagtgcttttgcccatttggtggttgctgtttgatcttaaacgcctgtgatttactagtagtggagaaaatgcccccttccctctctcaaattagcacgttttgttttggtcagtgtgtattcagtataatatctagatgagtaaactaatagaattcctttttcctttgttgtaattttcttttttgactattatttttctttttattcgatgatagcttttgttgaagtccaataccactttattttcaatgagtggcaaagtgatctatcttagaaacatggtcatagatgaaaaaaaaaaaaaaaaaaaaaaaaaaaaaaaaaaaaaaaaaaaaaaaaaaaaaaaaaaaaaaaaggaaaaaaaaaaaaaaaaargatttcctgcaccccggggaatccacwakttcaaaaggggccgccmccgcggrggagccccagtttttgttcccttaagggaagggtaaatttcaagtttggcgaaacaagggccaaaattgtttcctggggaaaatt

SEQ ID NO: 5376 - protein, 93 aa, Glycine max
  peptide (1)..(93): Ceres Seq. ID no. 15226104
  misc_feature (1)..(93): Pfam Name: DUF409 Pfam Description: Protein of unknown function
  misc_feature (1)..(93): NCBI GI NO: 15221122 NR Description: hypothetical protein [Arabidopsis thaliana]
MESEPAAIWPGYLSASVLPFVLHLGFMVSTRFLSASPPLYWFASYIMANLYWFASYIMANPAKYFRWGYVIWAYSMAYIFLGSLLFSNFYPFT

SEQ ID NO: 5377 - protein, 71 aa, Glycine max
  peptide (1)..(71): Ceres Seq. ID no. 15226105
  misc_feature (6)..(42): NCBI GI NO: 37536950 NR Description: hypothetical protein
  misc_feature (13)..(42): NCBI GI NO: 39595494 NR Description: Hypothetical protein CBG04159
  misc_feature (15)..(42): NCBI GI NO: 10439524 NR Description: unnamed protein product [Homo sapiens]
  misc_feature (15)..(42): NCBI GI NO: 32416700 NR Description: predicted protein [Neurospora crassa]
  misc_feature (8)..(42): NCBI GI NO: 39597582 NR Description: Hypothetical protein CBG03276
  misc_feature (14)..(42): NCBI GI NO: 16416102 NR Description: hypothetical protein [Neurospora crassa]
  misc_feature (14)..(42): NCBI GI NO: 39595494 NR Description: Hypothetical protein CBG04159
  misc_feature (14)..(42): NCBI GI NO: 39592010 NR Description: Hypothetical protein CBG23181
  misc_feature (15)..(42): NCBI GI NO: 10439524 NR Description: unnamed protein product [Homo sapiens]
  misc_feature (15)..(42): NCBI GI NO: 16416102 NR Description: hypothetical protein [Neurospora crassa]
  misc_feature (43)..(43): Xaa is any aa, unknown or other
  misc_feature (52)..(52): Xaa is any aa, unknown or other
  misc_feature (58)..(58): Xaa is any aa, unknown or other
  misc_feature (60)..(60): Xaa is any aa, unknown or other
MSGKVIYLRNMVIDEKKKKKKKKKKKKKKKKKKKKKEKKKKKXFPAPRGIHXFKRGRXRXGAPVFVPLREG

SEQ ID NO: 5378 - protein, 67 aa, Glycine max
  peptide (1)..(67): Ceres Seq. ID no. 15226106
  misc_feature (1)..(67): Pfam Name: DUF409 Pfam Description: Protein of unknown function
  misc_feature (1)..(67): NCBI GI NO: 15221122 NR Description: hypothetical protein [Arabidopsis thaliana]
MVSTRFLSASPPLYWFASYIMANLYWFASYIMANPAKYFRWGYVIWAYSMAYIFLGSLLFSNFYPFT

SEQ ID NO: 5379 - DNA, 1617 bp, Glycine max
  misc_feature (1)..(1617): Ceres Seq. ID no. 15172112
aagaggggcttccccacgccatcctctctcccaacaagagagcgaacgagcccattcctgtttctccaccaccgaacacacacacgccctttgcttccttcctcacctcgcgctaacctgcaccccccttcttatcctgcgcaccccttctttatccaattctttcctcagattcggagcaccgcgcgcgccaccattgggaaaagaggttccggtgctgggggcctagggttagggtttctgagagatgtgggatgctccatgcattgatgagccttatcgcgcgctgttggaagccgttcgggcacggtgacgatgccggtaatgccgccgccggaagagaatgcaaggacggcctcctctggttccgcgacatcggaaagtttgcagccggcgatttctccatggccgtcgtccaggccaaccaggtcatcgaggaccagagccagatcgagtccggcgccttcggcaccttcgtcggcgtctacgacggccacggcggccccgattgctcccgctacgtttgcgataacttgttccgcaatctccaagcgatattggccgagtcacagagtgttgtgacatctgaggccattcatcaggcgttccggcggacagaggaggggtttacggcgcttgtttcggagctgtggagctctcggccgcagattgcgactactgggacgtgttgtttggttggggttatttgtcggcagacactctttgtggcaagtcttggagattcccgtgctgtgttgggtaggagagttggcaacaccggtgggatggccgcgattcagttgtctacggagcacaatgcgaattttgaggctgtcaggcaggagcttaaggaattgcacccgaatgacccccagattgttgtcctcaaacatggagtgtggagagtaaagggcattattcaggtttctagatctataggtgacgtatatatgaaacatgcgcagtttaaccgagaacccattaatgcaaaattcagactccccgaaccaatgaacatgcctttcttgtctgctaatccaactattctttctcatcctctccaaccaaatgattccttccttatatttgcatcagatggtttatgggagcacctgagtaatgatcaagcagtggatattgttcacagcagtccatgcgcgggtagtgcgaagaaacttgtcaaggctgccctacaagaagcagcaagaaaacgtgaaatgcgatattcagacctttacaagattgacaagaaggttcgtcgccattttcacgacgatataactgttattgttttattcttaaaccacaaccttatatccaggggtgcagttctaaatacaccacttacaattcgtagtgctctcgatcactgacgcttcatgatttgtaaacatgcttctcttatacgggtgttctggcaactgtgccaataccagaaaatacaccattggtacgttgctagaatataccattcatagtgctgccacgtatggttactgataccgagacaacttattgatgacgcacgaacttgtaacacttgttagaagtttatccatgaaaatgaaaaagagaaaaagaaaaaaaaaaatatcagaaaagtaacttttgattagt

SEQ ID NO: 5380 - protein, 372 aa, Glycine max
  peptide (1)..(372): Ceres Seq. ID no. 15172113
  misc_feature (39)..(321): Pfam Name: Pfam Description:  Protein phosphatase 2C
  misc_feature (1)..(372): NCBI GI NO: 18401370 NR Description: protein phosphatase-2c -related
  misc_feature (6)..(372): NCBI GI NO: 7670033 NR Description: protein phosphatase 2C-like protein
  misc_feature (1)..(372): NCBI GI NO: 21537406 NR Description: protein phosphatase-2c, putative
  misc_feature (1)..(372): NCBI GI NO: 11282004 NR Description: protein phosphatase 2C homolog
  misc_feature (1)..(372): NCBI GI NO: 31249768 NR Description: putative protein phosphatase 2C
  misc_feature (1)..(363): NCBI GI NO: 18855039 NR Description: putative protein phosphatase [Oryza sativa]
  misc_feature (1)..(369): NCBI GI NO: 22329238 NR Description: protein phosphatase-2c -related
  misc_feature (1)..(369): NCBI GI NO: 17064756 NR Description: putative protein phosphatase-2c
  misc_feature (1)..(367): NCBI GI NO: 7768153 NR Description: protein phosphatase 2C (PP2C) [Fagus sylvatica]
  misc_feature (6)..(369): NCBI GI NO: 7485891 NR Description: hypothetical protein F20M13
MLHALMSLIARCWKPFGHGDDAGNAAAGRECKDGLLWFRDIGKFAAGDFSMAVVQANQVIEDQSQIESGAFGTFVGVYDGHGGPDCSRYVCDNLFRNLQAILAESQSVVTSEAIHQAFRRTEEGFTALVSELWSSRPQIATTGTCCLVGVICRQTLFVASLGDSRAVLGRRVGNTGGMAAIQLSTEHNANFEAVRQELKELHPNDPQIVVLKHGVWRVKGIIQVSRSIGDVYMKHAQFNREPINAKFRLPEPMNMPFLSANPTILSHPLQPNDSFLIFASDGLWEHLSNDQAVDIVHSSPCAGSAKKLVKAALQEAARKREMRYSDLYKIDKKVRRHFHDDITVIVLFLNHNLISRGAVLNTPLTIRSALDH

SEQ ID NO: 5381 - protein, 367 aa, Glycine max
  peptide (1)..(367): Ceres Seq. ID no. 15172114
  misc_feature (34)..(316): Pfam Name: Pfam Description:  Protein phosphatase 2C
  misc_feature (1)..(367): NCBI GI NO: 18401370 NR Description: protein phosphatase-2c -related
  misc_feature (1)..(367): NCBI GI NO: 7670033 NR Description: protein phosphatase 2C-like protein
  misc_feature (1)..(367): NCBI GI NO: 21537406 NR Description: protein phosphatase-2c, putative
  misc_feature (1)..(367): NCBI GI NO: 11282004 NR Description: protein phosphatase 2C homolog
  misc_feature (1)..(367): NCBI GI NO: 31249768 NR Description: putative protein phosphatase 2C
  misc_feature (1)..(358): NCBI GI NO: 18855039 NR Description: putative protein phosphatase [Oryza sativa]
  misc_feature (1)..(364): NCBI GI NO: 22329238 NR Description: protein phosphatase-2c -related
  misc_feature (1)..(364): NCBI GI NO: 17064756 NR Description: putative protein phosphatase-2c
  misc_feature (1)..(362): NCBI GI NO: 7768153 NR Description: protein phosphatase 2C (PP2C) [Fagus sylvatica]
  misc_feature (1)..(364): NCBI GI NO: 7485891 NR Description: hypothetical protein F20M13
MSLIARCWKPFGHGDDAGNAAAGRECKDGLLWFRDIGKFAAGDFSMAVVQANQVIEDQSQIESGAFGTFVGVYDGHGGPDCSRYVCDNLFRNLQAILAESQSVVTSEAIHQAFRRTEEGFTALVSELWSSRPQIATTGTCCLVGVICRQTLFVASLGDSRAVLGRRVGNTGGMAAIQLSTEHNANFEAVRQELKELHPNDPQIVVLKHGVWRVKGIIQVSRSIGDVYMKHAQFNREPINAKFRLPEPMNMPFLSANPTILSHPLQPNDSFLIFASDGLWEHLSNDQAVDIVHSSPCAGSAKKLVKAALQEAARKREMRYSDLYKIDKKVRRHFHDDITVIVLFLNHNLISRGAVLNTPLTIRSALDH

SEQ ID NO: 5382 - protein, 322 aa, Glycine max
  peptide (1)..(322): Ceres Seq. ID no. 15172115
  misc_feature (1)..(271): Pfam Name: Pfam Description:  Protein phosphatase 2C
  misc_feature (1)..(322): NCBI GI NO: 18401370 NR Description: protein phosphatase-2c -related
  misc_feature (1)..(322): NCBI GI NO: 7670033 NR Description: protein phosphatase 2C-like protein
  misc_feature (1)..(322): NCBI GI NO: 21537406 NR Description: protein phosphatase-2c, putative
  misc_feature (1)..(322): NCBI GI NO: 11282004 NR Description: protein phosphatase 2C homolog
  misc_feature (1)..(322): NCBI GI NO: 31249768 NR Description: putative protein phosphatase 2C
  misc_feature (1)..(313): NCBI GI NO: 18855039 NR Description: putative protein phosphatase [Oryza sativa]
  misc_feature (1)..(319): NCBI GI NO: 22329238 NR Description: protein phosphatase-2c -related
  misc_feature (1)..(319): NCBI GI NO: 17064756 NR Description: putative protein phosphatase-2c
  misc_feature (1)..(317): NCBI GI NO: 7768153 NR Description: protein phosphatase 2C (PP2C) [Fagus sylvatica]
  misc_feature (1)..(319): NCBI GI NO: 7485891 NR Description: hypothetical protein F20M13
MAVVQANQVIEDQSQIESGAFGTFVGVYDGHGGPDCSRYVCDNLFRNLQAILAESQSVVTSEAIHQAFRRTEEGFTALVSELWSSRPQIATTGTCCLVGVICRQTLFVASLGDSRAVLGRRVGNTGGMAAIQLSTEHNANFEAVRQELKELHPNDPQIVVLKHGVWRVKGIIQVSRSIGDVYMKHAQFNREPINAKFRLPEPMNMPFLSANPTILSHPLQPNDSFLIFASDGLWEHLSNDQAVDIVHSSPCAGSAKKLVKAALQEAARKREMRYSDLYKIDKKVRRHFHDDITVIVLFLNHNLISRGAVLNTPLTIRSALDH

SEQ ID NO: 5383 - DNA, 517 bp, Glycine max
  misc_feature (1)..(517): Ceres Seq. ID no. 15225715
ccctcgagtcagctacgtaggcccccccccattttttttctgggaaaaactgcaggtttatgcctttcctgatcttatctggacaactttgtcctccaggaattgaagggactttatttgcacttttcatgtcaataaacaacttgggatccacagtggggtcttttgtgggtgctggcttggcttctatattgaacattgattcaggatcatttgacaatcttctcttgggcatcattgttcatgccttgtgcaatttcatcccaattgcttttctgtttctgataccaaaggaagctacaggttcttcaacatagattatgactactacacagggattggctttgcttcattaggttcttctaggcctaccatagttgtaattttacacttgtagatgggaatattttggagcaaatgaggaacatattaatctgatttatgcgaactcggatcatagtaattgtatatactattttactgacaattttggtcagcaagtctattttcttgcatg

SEQ ID NO: 5384 - protein, 85 aa, Glycine max
  peptide (1)..(85): Ceres Seq. ID no. 15225716
  misc_feature (1)..(84): Pfam Name: Pfam Description:  BT1 family
  misc_feature (1)..(84): NCBI GI NO: 9758266 NR Description: contains similarity to integral membraneprotein~gene_id:MBG8
  misc_feature (1)..(84): NCBI GI NO: 22327842 NR Description: expressed protein [Arabidopsis thaliana]
  misc_feature (1)..(82): NCBI GI NO: 34904540 NR Description: B1066G12.15
  misc_feature (1)..(80): NCBI GI NO: 34394451 NR Description: putative integral membrane protein
  misc_feature (1)..(78): NCBI GI NO: 15238691 NR Description: membrane protein -related [Arabidopsis thaliana]
  misc_feature (1)..(84): NCBI GI NO: 15219976 NR Description: hypothetical protein [Arabidopsis thaliana]
  misc_feature (1)..(78): NCBI GI NO: 28973640 NR Description: putative membrane protein [Arabidopsis thaliana]
  misc_feature (1)..(85): NCBI GI NO: 25408206 NR Description: hypothetical protein At2g32040
  misc_feature (1)..(85): NCBI GI NO: 18402856 NR Description: expressed protein [Arabidopsis thaliana]
  misc_feature (1)..(77): NCBI GI NO: 16331564 NR Description: integral membrane protein
MPFLILSGQLCPPGIEGTLFALFMSINNLGSTVGSFVGAGLASILNIDSGSFDNLLLGIIVHALCNFIPIAFLFLIPKEATGSST

SEQ ID NO: 5385 - protein, 62 aa, Glycine max
  peptide (1)..(62): Ceres Seq. ID no. 15225717
  misc_feature (1)..(61): Pfam Name: Pfam Description:  BT1 family
  misc_feature (1)..(61): NCBI GI NO: 9758266 NR Description: contains similarity to integral membraneprotein~gene_id:MBG8
  misc_feature (1)..(61): NCBI GI NO: 22327842 NR Description: expressed protein [Arabidopsis thaliana]
  misc_feature (1)..(59): NCBI GI NO: 34904540 NR Description: B1066G12.15
  misc_feature (1)..(57): NCBI GI NO: 34394451 NR Description: putative integral membrane protein
  misc_feature (1)..(55): NCBI GI NO: 15238691 NR Description: membrane protein -related [Arabidopsis thaliana]
  misc_feature (1)..(61): NCBI GI NO: 15219976 NR Description: hypothetical protein [Arabidopsis thaliana]
  misc_feature (1)..(55): NCBI GI NO: 28973640 NR Description: putative membrane protein [Arabidopsis thaliana]
  misc_feature (1)..(62): NCBI GI NO: 25408206 NR Description: hypothetical protein At2g32040
  misc_feature (1)..(62): NCBI GI NO: 18402856 NR Description: expressed protein [Arabidopsis thaliana]
  misc_feature (1)..(54): NCBI GI NO: 16331564 NR Description: integral membrane protein
MSINNLGSTVGSFVGAGLASILNIDSGSFDNLLLGIIVHALCNFIPIAFLFLIPKEATGSST

SEQ ID NO: 5386 - DNA, 1897 bp, Glycine max
  misc_feature (1)..(1897): Ceres Seq. ID no. 14307510
gattacatattgaaaagtcaatctaacaagtactccaccctaaaggaaaagctttctagttgcttgtcatctaatatggttcgcagatggtttgtttttgaatggttttatagtgcaattgattatccatggtttgccaaaagggaattcatggagtacttaaatcatgttggactagggaatatcccaaggttaactcgtgtcgagtggagtgtcataaaaagttcccttggcaaaccccgcaggttttctgaacactttctatgtgaagaaaggcaaaaacttgaacagtatcgggaatcagtgaggaaacattacactgaactgcggactggtattagggatggacttccaacagatttagccaaaccattatatgttggacaacatgtaattgctcttcatccaaaaacaagagagattcatgatggtagtgtgcttaccgttgactatgacaagtgcaggattcagtttgaccgtcctgaattaggtgttgaatttgtaatggacattgattgcatgcctttgaattcatcagataatatgccagaagctctgaggaggcatattggttccccaatatcctctttcatgaataaagagccacaaattagtggaaattcaaattttggggggtgcgaaatgaatcattcctcacccgtgaaggcaaaggttgctaccgttgataatctctgtgcacaagcaggttgtgctcaaccatgtaaagtaacacaccatcaagctaaggaagctgacatacaggcagtttctgaactaaagcatgctctagataaaaaggagacattgttgatggagcttcgaagtgcaaatagcgacatattggaaaacaaaaatggcatagactgcttaaaagattctgaggttttcaagaagcattatgcgacggtttctgatgctatgctacaactgaggcaacgcaatacttacagaggaaactctctgccatcctggatgaagccacaagcaagtttcaatgttcatgatgatcttcccagtatgttggatagttctctgacacaagagttagggtcaactgttgttcaagttattaaaggatccaggctaagggcacatgcaatggtagatgctgcatttcaggcattgtctttggcaaaggaaggtgaagatgctttcataaagattgggcaagcattggattctataaatcatcagcagttagcctcccagtctaggttacccgtgatcaggtctcaagagcaagtgaacgcgaatggcagtttttatcatcttaatcattcaactagcggtgtatcagaacctatacttaatgatccatcgcttccaaaaccacataattgttctgacaaatttgatactgaacttccatcagatcttatcacttcgtgtgttgctacattaatcatgattcagacttgtactgaacggcaataccctccagctgatgtggctcagatattagattctgccgttaccagtctgcatccatgctgttctcaaaaccttcctatttatagagaaattcaaatgtgcatgggaagaatcaaaacgcagatgttagctctcatccctacttgacttacatcttttcttctgcagatctctctctaatgtagctgctgctgtacatatgatgctgaagctgaactattagttcagaacttcagatcacatacgggctcgtcgcctaccttgtaatgtctttattgagaggtacaataatttatttcttttactccacaccgatagggtcaaacggtggtattagaaatcatgtaattcactaccgtgtctttttttatctttggtgtcaaatggtggtacttaataaaaatgattatttaatattttgatgattcaaaaattaataaaaagcactaaaggttattttttgttt

SEQ ID NO: 5387 - protein, 525 aa, Glycine max
  peptide (1)..(525): Ceres Seq. ID no. 14307511
  misc_feature (214)..(525): NCBI GI NO: 15233065 NR Description: expressed protein [Arabidopsis thaliana]
  misc_feature (16)..(220): NCBI GI NO: 15233065 NR Description: expressed protein [Arabidopsis thaliana]
  misc_feature (214)..(525): NCBI GI NO: 9294690 NR Description: gene_id:MHC9.11~unknown protein
  misc_feature (4)..(220): NCBI GI NO: 9294690 NR Description: gene_id:MHC9.11~unknown protein
  misc_feature (5)..(267): NCBI GI NO: 15229976 NR Description: expressed protein [Arabidopsis thaliana]
  misc_feature (5)..(267): NCBI GI NO: 19347724 NR Description: unknown protein [Arabidopsis thaliana]
  misc_feature (347)..(525): NCBI GI NO: 15229976 NR Description: expressed protein [Arabidopsis thaliana]
  misc_feature (347)..(525): NCBI GI NO: 19347724 NR Description: unknown protein [Arabidopsis thaliana]
  misc_feature (9)..(190): NCBI GI NO: 15240995 NR Description: expressed protein [Arabidopsis thaliana]
  misc_feature (343)..(525): NCBI GI NO: 15240995 NR Description: expressed protein [Arabidopsis thaliana]
DYILKSQSNKYSTLKEKLSSCLSSNMVRRWFVFEWFYSAIDYPWFAKREFMEYLNHVGLGNIPRLTRVEWSVIKSSLGKPRRFSEHFLCEERQKLEQYRESVRKHYTELRTGIRDGLPTDLAKPLYVGQHVIALHPKTREIHDGSVLTVDYDKCRIQFDRPELGVEFVMDIDCMPLNSSDNMPEALRRHIGSPISSFMNKEPQISGNSNFGGCEMNHSSPVKAKVATVDNLCAQAGCAQPCKVTHHQAKEADIQAVSELKHALDKKETLLMELRSANSDILENKNGIDCLKDSEVFKKHYATVSDAMLQLRQRNTYRGNSLPSWMKPQASFNVHDDLPSMLDSSLTQELGSTVVQVIKGSRLRAHAMVDAAFQALSLAKEGEDAFIKIGQALDSINHQQLASQSRLPVIRSQEQVNANGSFYHLNHSTSGVSEPILNDPSLPKPHNCSDKFDTELPSDLITSCVATLIMIQTCTERQYPPADVAQILDSAVTSLHPCCSQNLPIYREIQMCMGRIKTQMLALIPT

SEQ ID NO: 5388 - protein, 500 aa, Glycine max
  peptide (1)..(500): Ceres Seq. ID no. 14307512
  misc_feature (189)..(500): NCBI GI NO: 15233065 NR Description: expressed protein [Arabidopsis thaliana]
  misc_feature (1)..(195): NCBI GI NO: 15233065 NR Description: expressed protein [Arabidopsis thaliana]
  misc_feature (189)..(500): NCBI GI NO: 9294690 NR Description: gene_id:MHC9.11~unknown protein
  misc_feature (1)..(195): NCBI GI NO: 9294690 NR Description: gene_id:MHC9.11~unknown protein
  misc_feature (1)..(242): NCBI GI NO: 15229976 NR Description: expressed protein [Arabidopsis thaliana]
  misc_feature (1)..(242): NCBI GI NO: 19347724 NR Description: unknown protein [Arabidopsis thaliana]
  misc_feature (322)..(500): NCBI GI NO: 15229976 NR Description: expressed protein [Arabidopsis thaliana]
  misc_feature (322)..(500): NCBI GI NO: 19347724 NR Description: unknown protein [Arabidopsis thaliana]
  misc_feature (1)..(165): NCBI GI NO: 15240995 NR Description: expressed protein [Arabidopsis thaliana]
  misc_feature (318)..(500): NCBI GI NO: 15240995 NR Description: expressed protein [Arabidopsis thaliana]
MVRRWFVFEWFYSAIDYPWFAKREFMEYLNHVGLGNIPRLTRVEWSVIKSSLGKPRRFSEHFLCEERQKLEQYRESVRKHYTELRTGIRDGLPTDLAKPLYVGQHVIALHPKTREIHDGSVLTVDYDKCRIQFDRPELGVEFVMDIDCMPLNSSDNMPEALRRHIGSPISSFMNKEPQISGNSNFGGCEMNHSSPVKAKVATVDNLCAQAGCAQPCKVTHHQAKEADIQAVSELKHALDKKETLLMELRSANSDILENKNGIDCLKDSEVFKKHYATVSDAMLQLRQRNTYRGNSLPSWMKPQASFNVHDDLPSMLDSSLTQELGSTVVQVIKGSRLRAHAMVDAAFQALSLAKEGEDAFIKIGQALDSINHQQLASQSRLPVIRSQEQVNANGSFYHLNHSTSGVSEPILNDPSLPKPHNCSDKFDTELPSDLITSCVATLIMIQTCTERQYPPADVAQILDSAVTSLHPCCSQNLPIYREIQMCMGRIKTQMLALIPT

SEQ ID NO: 5389 - protein, 475 aa, Glycine max
  peptide (1)..(475): Ceres Seq. ID no. 14307513
  misc_feature (164)..(475): NCBI GI NO: 15233065 NR Description: expressed protein [Arabidopsis thaliana]
  misc_feature (1)..(170): NCBI GI NO: 15233065 NR Description: expressed protein [Arabidopsis thaliana]
  misc_feature (164)..(475): NCBI GI NO: 9294690 NR Description: gene_id:MHC9.11~unknown protein
  misc_feature (1)..(170): NCBI GI NO: 9294690 NR Description: gene_id:MHC9.11~unknown protein
  misc_feature (1)..(217): NCBI GI NO: 15229976 NR Description: expressed protein [Arabidopsis thaliana]
  misc_feature (1)..(217): NCBI GI NO: 19347724 NR Description: unknown protein [Arabidopsis thaliana]
  misc_feature (297)..(475): NCBI GI NO: 15229976 NR Description: expressed protein [Arabidopsis thaliana]
  misc_feature (297)..(475): NCBI GI NO: 19347724 NR Description: unknown protein [Arabidopsis thaliana]
  misc_feature (1)..(140): NCBI GI NO: 15240995 NR Description: expressed protein [Arabidopsis thaliana]
  misc_feature (293)..(475): NCBI GI NO: 15240995 NR Description: expressed protein [Arabidopsis thaliana]
MEYLNHVGLGNIPRLTRVEWSVIKSSLGKPRRFSEHFLCEERQKLEQYRESVRKHYTELRTGIRDGLPTDLAKPLYVGQHVIALHPKTREIHDGSVLTVDYDKCRIQFDRPELGVEFVMDIDCMPLNSSDNMPEALRRHIGSPISSFMNKEPQISGNSNFGGCEMNHSSPVKAKVATVDNLCAQAGCAQPCKVTHHQAKEADIQAVSELKHALDKKETLLMELRSANSDILENKNGIDCLKDSEVFKKHYATVSDAMLQLRQRNTYRGNSLPSWMKPQASFNVHDDLPSMLDSSLTQELGSTVVQVIKGSRLRAHAMVDAAFQALSLAKEGEDAFIKIGQALDSINHQQLASQSRLPVIRSQEQVNANGSFYHLNHSTSGVSEPILNDPSLPKPHNCSDKFDTELPSDLITSCVATLIMIQTCTERQYPPADVAQILDSAVTSLHPCCSQNLPIYREIQMCMGRIKTQMLALIPT

SEQ ID NO: 5390 - DNA, 1326 bp, Glycine max
  misc_feature (1)..(1326): Ceres Seq. ID no. 14307464
aattactatttttcactttctcctttcaatatgaggaaccccactcacaagtcccctgaggttgaaaatgatggtgattttaaagttcatctgttctcttcatcatccgagttgcttgaaaagcttcatgaaaaatggagttcagtggagaaaccaccatacccagctatttattctagtatttatggaggtatcatacttgatccagcaatgatggtaatccccattgatgatcacatggttcacagagggcatggtgtgtttgatacagctattgttctagatggatacctctatgagttggatgttcaccttgacagattcctaagttcagcctccaaagcaaagatatcctctcccttttctcgatcagtgcttcacagcattctaatacaactaactgcagcatcaaaatgcaagaagggaactctaagatactggctcagtgcaggtcctggagatttcttgctatcatcagcaggatgtccaacatctgcattctatgcagtagtcattgaccaagatatttcccaatgcaaagagggagttaaagtgattacttccaacataccaatgaagccttctctatttgccacagccaaaaatgtgaactatcttccaaatgtcctttcagtaatggaagctgaagagaaaggagcatcttcttctatatgggttgatgaggaaggttatattgctgaaggtccaaatgtgaatgttgctttcataactcaagacaaggaacttgtcatgcctccttttgataacatcttacatggttgcactgcaaaaaggctccttgaactggcacccaagttggttgatcaagggcttctgaaaggtgtagcaactaaaaaactaactgtggaggaagctaaagctgctgctgaaatgatgtatgtaggaagcacgcttcctctgttgcctatcatcgtttgggatgatcaacccattggcaatggaagggtgggagaattaacaatgttactttcggatatgctttgggatgatatggtagctggccctggcacacagaggatacctgttccttatgttgagtaaacctacaaagtcatcaaattacaggctgggaacaactttcttacttttctatgtcatgttcctaggagttctccttgcaaagatttatcaagaggtttctctttgtatttgctttttgtatttcaagtgtgaacactgaacaagtccttaagtgaagcaccaggtgtttcctgcaacacaaaatttacgtagcagataaatagtccttgaactgtttcacgttgttgtattgatataataataataatgaagactcttcatgct

SEQ ID NO: 5391 - protein, 353 aa, Glycine max
  peptide (1)..(353): Ceres Seq. ID no. 14307465
  misc_feature (63)..(335): Pfam Name: Pfam Description:  Aminotransferase class IV
  misc_feature (57)..(351): NCBI GI NO: 34904468 NR Description: putative branched-chain amino acid aminotransferaseprotein
  misc_feature (56)..(351): NCBI GI NO: 22327924 NR Description: branched-chain amino acid aminotransferase-related
  misc_feature (57)..(351): NCBI GI NO: 9758354 NR Description: branched-chain amino acid aminotransferase-like
  misc_feature (39)..(338): NCBI GI NO: 23474241 NR Description: hypothetical protein
  misc_feature (74)..(327): NCBI GI NO: 20095063 NR Description: Branched-chain amino acid aminotransferase
  misc_feature (61)..(336): NCBI GI NO: 15669197 NR Description: branched-chain amino acid aminotransferase (ilvE)
  misc_feature (74)..(336): NCBI GI NO: 13470635 NR Description: D-alanine aminotransferase [Mesorhizobium loti]
  misc_feature (74)..(332): NCBI GI NO: 11498538 NR Description: branched-chain amino acid aminotransferase (ilvE)
  misc_feature (76)..(336): NCBI GI NO: 13488121 NR Description: branched-chain amino acid aminotransferase
  misc_feature (74)..(333): NCBI GI NO: 33599322 NR Description: probable aminotransferase
NYYFSLSPFNMRNPTHKSPEVENDGDFKVHLFSSSSELLEKLHEKWSSVEKPPYPAIYSSIYGGIILDPAMMVIPIDDHMVHRGHGVFDTAIVLDGYLYELDVHLDRFLSSASKAKISSPFSRSVLHSILIQLTAASKCKKGTLRYWLSAGPGDFLLSSAGCPTSAFYAVVIDQDISQCKEGVKVITSNIPMKPSLFATAKNVNYLPNVLSVMEAEEKGASSSIWVDEEGYIAEGPNVNVAFITQDKELVMPPFDNILHGCTAKRLLELAPKLVDQGLLKGVATKKLTVEEAKAAAEMMYVGSTLPLLPIIVWDDQPIGNGRVGELTMLLSDMLWDDMVAGPGTQRIPVPYVE

SEQ ID NO: 5392 - protein, 343 aa, Glycine max
  peptide (1)..(343): Ceres Seq. ID no. 14307466
  misc_feature (53)..(325): Pfam Name: Pfam Description:  Aminotransferase class IV
  misc_feature (47)..(341): NCBI GI NO: 34904468 NR Description: putative branched-chain amino acid aminotransferaseprotein
  misc_feature (46)..(341): NCBI GI NO: 22327924 NR Description: branched-chain amino acid aminotransferase-related
  misc_feature (47)..(341): NCBI GI NO: 9758354 NR Description: branched-chain amino acid aminotransferase-like
  misc_feature (29)..(328): NCBI GI NO: 23474241 NR Description: hypothetical protein
  misc_feature (64)..(317): NCBI GI NO: 20095063 NR Description: Branched-chain amino acid aminotransferase
  misc_feature (51)..(326): NCBI GI NO: 15669197 NR Description: branched-chain amino acid aminotransferase (ilvE)
  misc_feature (64)..(326): NCBI GI NO: 13470635 NR Description: D-alanine aminotransferase [Mesorhizobium loti]
  misc_feature (64)..(322): NCBI GI NO: 11498538 NR Description: branched-chain amino acid aminotransferase (ilvE)
  misc_feature (66)..(326): NCBI GI NO: 13488121 NR Description: branched-chain amino acid aminotransferase
  misc_feature (64)..(323): NCBI GI NO: 33599322 NR Description: probable aminotransferase
MRNPTHKSPEVENDGDFKVHLFSSSSELLEKLHEKWSSVEKPPYPAIYSSIYGGIILDPAMMVIPIDDHMVHRGHGVFDTAIVLDGYLYELDVHLDRFLSSASKAKISSPFSRSVLHSILIQLTAASKCKKGTLRYWLSAGPGDFLLSSAGCPTSAFYAVVIDQDISQCKEGVKVITSNIPMKPSLFATAKNVNYLPNVLSVMEAEEKGASSSIWVDEEGYIAEGPNVNVAFITQDKELVMPPFDNILHGCTAKRLLELAPKLVDQGLLKGVATKKLTVEEAKAAAEMMYVGSTLPLLPIIVWDDQPIGNGRVGELTMLLSDMLWDDMVAGPGTQRIPVPYVE

SEQ ID NO: 5393 - protein, 283 aa, Glycine max
  peptide (1)..(283): Ceres Seq. ID no. 14307467
  misc_feature (1)..(265): Pfam Name: Pfam Description:  Aminotransferase class IV
  misc_feature (1)..(281): NCBI GI NO: 34904468 NR Description: putative branched-chain amino acid aminotransferaseprotein
  misc_feature (1)..(281): NCBI GI NO: 22327924 NR Description: branched-chain amino acid aminotransferase-related
  misc_feature (1)..(281): NCBI GI NO: 9758354 NR Description: branched-chain amino acid aminotransferase-like
  misc_feature (1)..(268): NCBI GI NO: 23474241 NR Description: hypothetical protein
  misc_feature (4)..(257): NCBI GI NO: 20095063 NR Description: Branched-chain amino acid aminotransferase
  misc_feature (1)..(266): NCBI GI NO: 15669197 NR Description: branched-chain amino acid aminotransferase (ilvE)
  misc_feature (4)..(266): NCBI GI NO: 13470635 NR Description: D-alanine aminotransferase [Mesorhizobium loti]
  misc_feature (4)..(262): NCBI GI NO: 11498538 NR Description: branched-chain amino acid aminotransferase (ilvE)
  misc_feature (6)..(266): NCBI GI NO: 13488121 NR Description: branched-chain amino acid aminotransferase
  misc_feature (4)..(263): NCBI GI NO: 33599322 NR Description: probable aminotransferase
MMVIPIDDHMVHRGHGVFDTAIVLDGYLYELDVHLDRFLSSASKAKISSPFSRSVLHSILIQLTAASKCKKGTLRYWLSAGPGDFLLSSAGCPTSAFYAVVIDQDISQCKEGVKVITSNIPMKPSLFATAKNVNYLPNVLSVMEAEEKGASSSIWVDEEGYIAEGPNVNVAFITQDKELVMPPFDNILHGCTAKRLLELAPKLVDQGLLKGVATKKLTVEEAKAAAEMMYVGSTLPLLPIIVWDDQPIGNGRVGELTMLLSDMLWDDMVAGPGTQRIPVPYVE

SEQ ID NO: 5394 - DNA, 1674 bp, Glycine max
  misc_feature (1)..(1674): Ceres Seq. ID no. 15227226
cagctaagtaggccccccccccccgaagactcgctacatcttctttccaaatcccaactactactcacactcactgcagatctcaatccatggctaccattgttagcatcaaggcccgccagatctttgacagtcgtggcaatccaaccgtcgaggtggatttgacatgctccgatggtacttttgctagagctgctgttccaagtggtgcatccactgggatttatgaggcccttgaattgagagatggaggatctgactaccttggaaagggtgtatcaaaggctgttgacaatgtgaacaccattattgcccctgctttggttggcaaggacccaactcagcagactgctattgacaacttaatggttcaacaacttgatggaactgttaacgaatggggttggtgcaagcaaaagcttggagcaaatgccatattggcagtgtctcttgcagtctgcaaagctggtgctgctgtcctgaaagttcctctttacaagcatattgcaaatattgcgggtaacaaaaagttggttttgcctgttcctgctttcaatgtcattaatggtggatcacatgctggaaacaaacttgctatgcaggagtttatggttcttcccgtgggagcttcctctttcaaggaagccatgaagatgggtgtagaagtatatcacaatttgaagtctgtgattaagaagaaatatggtcaagatgcagtaaatgttggtgacgaaggtggctttgcccctaacatccaggaaaacaaggaaggtttggaattgctgaaaactgccattgccaaagctggttacacaggcaaagttgtcattggaatggatgttgcagcttctgaattctacaaggaagataaaacatacgatttgaacttcaaggaagataacaatgatggctcacagaagatctctggagatgctttgaaagatctatacaagtcatttgtgacagagtatccaattgtttcaattgaggatccttttgaccaggatgactgggagcactatgctaagcttactgctgaggttggaaccaatgtacaaattgttggtgatgatctcttggttaccaaccccaagagggttcagaaggcaattgatacaaaagcatgcaatgctcttctccttaaggtcaaccaaattggttctgtgactgagagtattgaagctgtcaggatgtccaaaaaagctggatggggtgtcatggcgagtcacagaagtggagagactgaggataccttcattgctgacctttctgttggtttggcaacgggtcaaattaagactggagctccatgcaggtcagagcgtcttgctaaatataaccagctcttgagaattgaggaggagcttggtgcggaagcagtgtatgctggagctaacttccgtacccctgttgagccctactaaagttttcaagtggaaaaaacctggagatccccacgagtttgagcaatgagatttggatgcgcggttttagttgtgatcaataagtcgatagttagaacaatagtcttggtataaggaccttgccaataattttttagttctgattcacagagctaagacagttccgtcttagactttaaaagttttgatatttagctttaatacttgaagtttacttccaattttatggggtatccccaaaacatttcat

SEQ ID NO: 5395 - protein, 444 aa, Glycine max
  peptide (1)..(444): Ceres Seq. ID no. 15227227
  misc_feature (148)..(441): Pfam Name: Pfam Description:  Enolase, C-terminal TIM barrel domain
  misc_feature (1)..(444): NCBI GI NO: 6996529 NR Description: enolase [Lupinus luteus]
  misc_feature (3)..(444): NCBI GI NO: 1169534 NR Description: Enolase
  misc_feature (3)..(444): NCBI GI NO: 14423687 NR Description: Enolase 2
  misc_feature (2)..(444): NCBI GI NO: 33113259 NR Description: enolase [Oryza sativa (japonica cultivar-group)]
  misc_feature (2)..(444): NCBI GI NO: 3023713 NR Description: Enolase
  misc_feature (1)..(444): NCBI GI NO: 7436883 NR Description: phosphopyruvate hydratase (EC 4
  misc_feature (1)..(444): NCBI GI NO: 3023714 NR Description: Enolase
  misc_feature (3)..(444): NCBI GI NO: 14423688 NR Description: Enolase 1
  misc_feature (2)..(444): NCBI GI NO: 33415263 NR Description: enolase [Gossypium barbadense]
  misc_feature (1)..(444): NCBI GI NO: 8919731 NR Description: enolase [Spinacia oleracea]
MATIVSIKARQIFDSRGNPTVEVDLTCSDGTFARAAVPSGASTGIYEALELRDGGSDYLGKGVSKAVDNVNTIIAPALVGKDPTQQTAIDNLMVQQLDGTVNEWGWCKQKLGANAILAVSLAVCKAGAAVLKVPLYKHIANIAGNKKLVLPVPAFNVINGGSHAGNKLAMQEFMVLPVGASSFKEAMKMGVEVYHNLKSVIKKKYGQDAVNVGDEGGFAPNIQENKEGLELLKTAIAKAGYTGKVVIGMDVAASEFYKEDKTYDLNFKEDNNDGSQKISGDALKDLYKSFVTEYPIVSIEDPFDQDDWEHYAKLTAEVGTNVQIVGDDLLVTNPKRVQKAIDTKACNALLLKVNQIGSVTESIEAVRMSKKAGWGVMASHRSGETEDTFIADLSVGLATGQIKTGAPCRSERLAKYNQLLRIEEELGAEAVYAGANFRTPVEPY

SEQ ID NO: 5396 - protein, 352 aa, Glycine max
  peptide (1)..(352): Ceres Seq. ID no. 15227228
  misc_feature (56)..(349): Pfam Name: Pfam Description:  Enolase, C-terminal TIM barrel domain
  misc_feature (1)..(352): NCBI GI NO: 6996529 NR Description: enolase [Lupinus luteus]
  misc_feature (1)..(352): NCBI GI NO: 1169534 NR Description: Enolase
  misc_feature (1)..(352): NCBI GI NO: 14423687 NR Description: Enolase 2
  misc_feature (1)..(352): NCBI GI NO: 33113259 NR Description: enolase [Oryza sativa (japonica cultivar-group)]
  misc_feature (1)..(352): NCBI GI NO: 3023713 NR Description: Enolase
  misc_feature (1)..(352): NCBI GI NO: 7436883 NR Description: phosphopyruvate hydratase (EC 4
  misc_feature (1)..(352): NCBI GI NO: 3023714 NR Description: Enolase
  misc_feature (1)..(352): NCBI GI NO: 14423688 NR Description: Enolase 1
  misc_feature (1)..(352): NCBI GI NO: 33415263 NR Description: enolase [Gossypium barbadense]
  misc_feature (1)..(352): NCBI GI NO: 8919731 NR Description: enolase [Spinacia oleracea]
MVQQLDGTVNEWGWCKQKLGANAILAVSLAVCKAGAAVLKVPLYKHIANIAGNKKLVLPVPAFNVINGGSHAGNKLAMQEFMVLPVGASSFKEAMKMGVEVYHNLKSVIKKKYGQDAVNVGDEGGFAPNIQENKEGLELLKTAIAKAGYTGKVVIGMDVAASEFYKEDKTYDLNFKEDNNDGSQKISGDALKDLYKSFVTEYPIVSIEDPFDQDDWEHYAKLTAEVGTNVQIVGDDLLVTNPKRVQKAIDTKACNALLLKVNQIGSVTESIEAVRMSKKAGWGVMASHRSGETEDTFIADLSVGLATGQIKTGAPCRSERLAKYNQLLRIEEELGAEAVYAGANFRTPVEPY

SEQ ID NO: 5397 - protein, 275 aa, Glycine max
  peptide (1)..(275): Ceres Seq. ID no. 15227229
  misc_feature (1)..(272): Pfam Name: Pfam Description:  Enolase, C-terminal TIM barrel domain
  misc_feature (1)..(275): NCBI GI NO: 6996529 NR Description: enolase [Lupinus luteus]
  misc_feature (1)..(275): NCBI GI NO: 1169534 NR Description: Enolase
  misc_feature (1)..(275): NCBI GI NO: 14423687 NR Description: Enolase 2
  misc_feature (1)..(275): NCBI GI NO: 33113259 NR Description: enolase [Oryza sativa (japonica cultivar-group)]
  misc_feature (1)..(275): NCBI GI NO: 3023713 NR Description: Enolase
  misc_feature (1)..(275): NCBI GI NO: 7436883 NR Description: phosphopyruvate hydratase (EC 4
  misc_feature (1)..(275): NCBI GI NO: 3023714 NR Description: Enolase
  misc_feature (1)..(275): NCBI GI NO: 14423688 NR Description: Enolase 1
  misc_feature (1)..(275): NCBI GI NO: 33415263 NR Description: enolase [Gossypium barbadense]
  misc_feature (1)..(275): NCBI GI NO: 8919731 NR Description: enolase [Spinacia oleracea]
MQEFMVLPVGASSFKEAMKMGVEVYHNLKSVIKKKYGQDAVNVGDEGGFAPNIQENKEGLELLKTAIAKAGYTGKVVIGMDVAASEFYKEDKTYDLNFKEDNNDGSQKISGDALKDLYKSFVTEYPIVSIEDPFDQDDWEHYAKLTAEVGTNVQIVGDDLLVTNPKRVQKAIDTKACNALLLKVNQIGSVTESIEAVRMSKKAGWGVMASHRSGETEDTFIADLSVGLATGQIKTGAPCRSERLAKYNQLLRIEEELGAEAVYAGANFRTPVEPY

SEQ ID NO: 5398 - DNA, 1409 bp, Glycine max
  misc_feature (1)..(1409): Ceres Seq. ID no. 14310443
aaaaagactctgtgaagtgtgcgtgagaaaggaacagagagaagaaaaagaaaaaagatggaaggagagaaagagaatcccgattgtaacgccactttggtgaactccttctgcgaaatcacttcctcttccaaagaagaagcccttttctttttggagagccacaatttcgacctagacgccgccgtttccactttcctcgacaacgccaacaaccctctcatccctcaaaacgacgacgtcgttgtcgccgcaaacccaaaccccaactccgtttcccctccctccgattctcactccccggacttcaacccttccaggtctccttcgccgtctccgtcgccgactcgcacgccctacgagctccgatcccgcaggtctctcggcaagaaaccctccaccagccgccaaggcaaaattcgcactctcggcgatctcaaacgctcctcccgcgatgatgattccgattccgatcccgatttcgaacccgacgagtactacaccggcggcgaaaagagtgggatgcttgttcgagatcctaccagaggaaacagcaacaacaacaacagtgtggatgatatctttgatcaagcgaggcaggttgctgttgatgcacctccggagaatcctcgaagctcgtcgaggtcgggaagttttagtggcacggcgaggttgctctctggagagagattgccatctgctgctgctgctgctcctgctcctcagcgtgtagaggaagttacccacactgtcactttctggaggaatgggttctctgtcaatgatggtcctctacggaggttggatgatccgcaaaacgcaccgtttctggagagcataaagaagtccgaatgtcccaaagagcttgagccagcagataggaggactgctgtccatgtcaacctcacaaggcgggatgaagactaccctgaaccagtgaagccacgccatcgtgctttccagggtgttggaagaactttaggtagcaccagctccagcaatgatgaacctattcaaacaactggtgcttcaccaagtactgctccattgccaacaatgggtttaattgtagatgaggcacagtcagtgacatcaatccagctgaggttggctgatggcacacgcatggtttctcgcttcaatcaccatcatacaatccgagatgttcgagcattcattgatgcatcaagacccgggggtgtaagaagttaccaactgcagtcaatgggttttcctcccaaacaactcgctaatttggaccagactatagaacaagctggtattgccaactcagttgtcatccaaaagttgtaggttgtttaccagattctattttcagtcgacttgaaattactatttttatgcttaaacattgattgatctacttatattttattagtgaatttgat

SEQ ID NO: 5399 - protein, 418 aa, Glycine max
  peptide (1)..(418): Ceres Seq. ID no. 14310444
  misc_feature (339)..(417): Pfam Name: Pfam Description:  UBX domain
  misc_feature (63)..(418): NCBI GI NO: 13123659 NR Description: phosphatase-like protein Psc923 [Pisum sativum]
  misc_feature (65)..(417): NCBI GI NO: 13123657 NR Description: phosphatase-like protein Mtc923
  misc_feature (9)..(417): NCBI GI NO: 18414442 NR Description: phosphatase like protein [Arabidopsis thaliana]
  misc_feature (9)..(417): NCBI GI NO: 15292665 NR Description: putative phosphatase [Arabidopsis thaliana]
  misc_feature (9)..(414): NCBI GI NO: 7485149 NR Description: hypothetical protein - Arabidopsis thaliana
  misc_feature (103)..(417): NCBI GI NO: 18412499 NR Description: membrane trafficking factor -related
  misc_feature (103)..(417): NCBI GI NO: 7487458 NR Description: hypothetical protein T27D20
  misc_feature (112)..(417): NCBI GI NO: 15234731 NR Description: expressed protein [Arabidopsis thaliana]
  misc_feature (148)..(418): NCBI GI NO: 32489879 NR Description: OSJNBa0060P14.10
  misc_feature (185)..(418): NCBI GI NO: 32492162 NR Description: OSJNBb0048E02.1
MEGEKENPDCNATLVNSFCEITSSSKEEALFFLESHNFDLDAAVSTFLDNANNPLIPQNDDVVVAANPNPNSVSPPSDSHSPDFNPSRSPSPSPSPTRTPYELRSRRSLGKKPSTSRQGKIRTLGDLKRSSRDDDSDSDPDFEPDEYYTGGEKSGMLVRDPTRGNSNNNNSVDDIFDQARQVAVDAPPENPRSSSRSGSFSGTARLLSGERLPSAAAAAPAPQRVEEVTHTVTFWRNGFSVNDGPLRRLDDPQNAPFLESIKKSECPKELEPADRRTAVHVNLTRRDEDYPEPVKPRHRAFQGVGRTLGSTSSSNDEPIQTTGASPSTAPLPTMGLIVDEAQSVTSIQLRLADGTRMVSRFNHHHTIRDVRAFIDASRPGGVRSYQLQSMGFPPKQLANLDQTIEQAGIANSVVIQKL

SEQ ID NO: 5400 - protein, 263 aa, Glycine max
  peptide (1)..(263): Ceres Seq. ID no. 14310445
  misc_feature (184)..(262): Pfam Name: Pfam Description:  UBX domain
  misc_feature (1)..(263): NCBI GI NO: 13123659 NR Description: phosphatase-like protein Psc923 [Pisum sativum]
  misc_feature (1)..(262): NCBI GI NO: 13123657 NR Description: phosphatase-like protein Mtc923
  misc_feature (1)..(262): NCBI GI NO: 18414442 NR Description: phosphatase like protein [Arabidopsis thaliana]
  misc_feature (1)..(262): NCBI GI NO: 15292665 NR Description: putative phosphatase [Arabidopsis thaliana]
  misc_feature (1)..(259): NCBI GI NO: 7485149 NR Description: hypothetical protein - Arabidopsis thaliana
  misc_feature (1)..(262): NCBI GI NO: 18412499 NR Description: membrane trafficking factor -related
  misc_feature (1)..(262): NCBI GI NO: 7487458 NR Description: hypothetical protein T27D20
  misc_feature (1)..(262): NCBI GI NO: 15234731 NR Description: expressed protein [Arabidopsis thaliana]
  misc_feature (1)..(263): NCBI GI NO: 32489879 NR Description: OSJNBa0060P14.10
  misc_feature (30)..(263): NCBI GI NO: 32492162 NR Description: OSJNBb0048E02.1
MLVRDPTRGNSNNNNSVDDIFDQARQVAVDAPPENPRSSSRSGSFSGTARLLSGERLPSAAAAAPAPQRVEEVTHTVTFWRNGFSVNDGPLRRLDDPQNAPFLESIKKSECPKELEPADRRTAVHVNLTRRDEDYPEPVKPRHRAFQGVGRTLGSTSSSNDEPIQTTGASPSTAPLPTMGLIVDEAQSVTSIQLRLADGTRMVSRFNHHHTIRDVRAFIDASRPGGVRSYQLQSMGFPPKQLANLDQTIEQAGIANSVVIQKL

SEQ ID NO: 5401 - DNA, 1618 bp, Glycine max
  misc_feature (1)..(1618): Ceres Seq. ID no. 15171549
gagaacaaaagcgagtgtgagtctcatgggcatgcagacgctgaccctctttcgctccccccaccctatttctcaaaacgctgtcgttccccgccacgccatgtcccgctcctccgaaacctcctttcccaccctcactactatctccatctctttctctcaactccaagtctctctctctctttcactgttctgcgttttcgttttcaatatttttagtgatcgaaaacaacgctcaagctgctttctactttaaaaaattactatcgttcgtgttacatgtgtttgttcctctgttttgtgataagaacgccgacttgtcgttcaagattgaagaaggctttggacccaatggattggggattctatccgtcactgatgtcccaggatactcttcattgcgtagaaatctattgcatcttgcaccaagattggcaaatcttcccaaagaagtgaaggaggatcttgaagatcctcatagtaggtacaattttggttggagtcatgggaaagagaaacttgaatctgggaagccagatattttaaaaggatctttctatgccaatcccatacttgatacacctacaacagaggcttctttgatacaacggtatccatcatattgcggctcaaatatatggcctagaaacgctttaccagaacttgaagtggctttcaaagcacttgggaagctgatatttgacattggattgatgttggcatatcactgcgatcaatatgtatccaaagggatgaaaattcacaaggatgaaggtctggaatcaatacttcgttgctcccgctgtcataaaggacgtttgctatattattttccttcacaacagggagtcccagatggcaactctttgtcttcttggtgtggatggcatactgaccacggttcactggcaggtctgacttgtggtatgtttacgagagatggtgtagaaattgcttgccctgatagtgctgctggcctctatattcgaacaagaaataatcaaattatcaaagttgtctatggaaaagatgatatagcataccaaattggtgaaaccactgaaatactttctggaggttatctttgtgcaacacctcattgtgttcaggctcctacgggggaggagtcctctggtattgagcgctcaacatttgcattattcatgcagcctgactgggatgaaaagctcaatttacccgagaaagttcacattcataaagagcttattccatcaaatgctgcccttacttttggagagtattcagagatgctgctcgacaaatattaccaccaaaaacagaactaacttgttacttctctgccaacaagcataactggttgaagagacttagcctgtgaattcatgagactaaaataaaattgtgtgaatgtgtagtcgctattggataatctcaaaagaaaagaataactgggtaaggttacaagggtaactggttgaagaaacttagccggttaattcacgggtaaatgtgtagtcgctattggggtaatagcaaaagaaaaagaaaattcttatagattacgtggaatagcaacatttaatttatttaacaggatattaacttatgggatggaatgaaagttactgtacaatcc

SEQ ID NO: 5402 - protein, 197 aa, Glycine max
  peptide (1)..(197): Ceres Seq. ID no. 15171550
  misc_feature (62)..(195): NCBI GI NO: 15235700 NR Description: expressed protein [Arabidopsis thaliana]
  misc_feature (1)..(195): NCBI GI NO: 22531058 NR Description: putative protein [Arabidopsis thaliana]
  misc_feature (1)..(194): NCBI GI NO: 28829713 NR Description: similar to Arabidopsis thaliana (Mouse-ear cress)
  misc_feature (22)..(192): NCBI GI NO: 2982272 NR Description: hypothetical protein [Picea mariana]
  misc_feature (1)..(54): NCBI GI NO: 32422631 NR Description: hypothetical protein [Neurospora crassa]
  misc_feature (83)..(165): NCBI GI NO: 32422631 NR Description: hypothetical protein [Neurospora crassa]
  misc_feature (1)..(86): NCBI GI NO: 40747370 NR Description: hypothetical protein AN0427.2
  misc_feature (1)..(53): NCBI GI NO: 37532348 NR Description: unknown protein
  misc_feature (51)..(191): NCBI GI NO: 37532348 NR Description: unknown protein
  misc_feature (55)..(159): NCBI GI NO: 40747370 NR Description: hypothetical protein AN0427.2
MLAYHCDQYVSKGMKIHKDEGLESILRCSRCHKGRLLYYFPSQQGVPDGNSLSSWCGWHTDHGSLAGLTCGMFTRDGVEIACPDSAAGLYIRTRNNQIIKVVYGKDDIAYQIGETTEILSGGYLCATPHCVQAPTGEESSGIERSTFALFMQPDWDEKLNLPEKVHIHKELIPSNAALTFGEYSEMLLDKYYHQKQN

SEQ ID NO: 5403 - protein, 184 aa, Glycine max
  peptide (1)..(184): Ceres Seq. ID no. 15171551
  misc_feature (49)..(182): NCBI GI NO: 15235700 NR Description: expressed protein [Arabidopsis thaliana]
  misc_feature (1)..(182): NCBI GI NO: 22531058 NR Description: putative protein [Arabidopsis thaliana]
  misc_feature (1)..(181): NCBI GI NO: 28829713 NR Description: similar to Arabidopsis thaliana (Mouse-ear cress)
  misc_feature (9)..(179): NCBI GI NO: 2982272 NR Description: hypothetical protein [Picea mariana]
  misc_feature (1)..(41): NCBI GI NO: 32422631 NR Description: hypothetical protein [Neurospora crassa]
  misc_feature (70)..(152): NCBI GI NO: 32422631 NR Description: hypothetical protein [Neurospora crassa]
  misc_feature (1)..(73): NCBI GI NO: 40747370 NR Description: hypothetical protein AN0427.2
  misc_feature (1)..(40): NCBI GI NO: 37532348 NR Description: unknown protein
  misc_feature (38)..(178): NCBI GI NO: 37532348 NR Description: unknown protein
  misc_feature (42)..(146): NCBI GI NO: 40747370 NR Description: hypothetical protein AN0427.2
MKIHKDEGLESILRCSRCHKGRLLYYFPSQQGVPDGNSLSSWCGWHTDHGSLAGLTCGMFTRDGVEIACPDSAAGLYIRTRNNQIIKVVYGKDDIAYQIGETTEILSGGYLCATPHCVQAPTGEESSGIERSTFALFMQPDWDEKLNLPEKVHIHKELIPSNAALTFGEYSEMLLDKYYHQKQN

SEQ ID NO: 5404 - protein, 126 aa, Glycine max
  peptide (1)..(126): Ceres Seq. ID no. 15171552
  misc_feature (1)..(124): NCBI GI NO: 15235700 NR Description: expressed protein [Arabidopsis thaliana]
  misc_feature (1)..(124): NCBI GI NO: 22531058 NR Description: putative protein [Arabidopsis thaliana]
  misc_feature (1)..(123): NCBI GI NO: 28829713 NR Description: similar to Arabidopsis thaliana (Mouse-ear cress)
  misc_feature (1)..(121): NCBI GI NO: 2982272 NR Description: hypothetical protein [Picea mariana]
  misc_feature (12)..(94): NCBI GI NO: 32422631 NR Description: hypothetical protein [Neurospora crassa]
  misc_feature (1)..(15): NCBI GI NO: 40747370 NR Description: hypothetical protein AN0427.2
  misc_feature (1)..(120): NCBI GI NO: 37532348 NR Description: unknown protein
  misc_feature (1)..(88): NCBI GI NO: 40747370 NR Description: hypothetical protein AN0427.2
MFTRDGVEIACPDSAAGLYIRTRNNQIIKVVYGKDDIAYQIGETTEILSGGYLCATPHCVQAPTGEESSGIERSTFALFMQPDWDEKLNLPEKVHIHKELIPSNAALTFGEYSEMLLDKYYHQKQN

SEQ ID NO: 5405 - DNA, 1352 bp, Glycine max
  misc_feature (1)..(1352): Ceres Seq. ID no. 15176919
gagttagttagtttagttgggtgagggaaagaaaagccacttcaaatttcagccccataccatactcattaaagtccacacacacagagcaacactgcactgtgtggaaacgaaacatggcaagagtggtggcactccaacagaaccaactatctttctctaccttagcttcctctctttctgacttcagtggaaccagacttcaaactcaacttcagttcaagagaaagcaatgccatccaaaagggtctttctacgtctccgcatcgagcaccaagaaaatcctaataatgggaggcaccaggtttattggtgtgtttttgtctaggctccttgtcaaagagggtcaccaggtgactttattcacaagaggtaaagcgcctgtcactcaacagttgccaggtgaatcagacagtgattatgctgatttttcttccaagatcttgcatttgaaaggagacaggaaggacttcgactttgtaaaatccagtctctcagcagagggatttgatgttgtttatgacataaatggacgcgaggcagatgaagttgaacccatactggatgctctgcctaatctggagcagtttatttactgctcttctgccggtgtctatctcaaatctgatctattacctcacgcagagactgatgcagttgatcctaagagcagacacaagggaaagcttgagacagagagtttgctacaagcaaggggtgttaattggacatctataaggccagtctacatctatggacccttgaactacaaccctgttgaagagtggttcttccatagattgaaagcgggacgcccaattcctatccccggctcaggaatacagataacccaacttggtcatgttaaggatttggcaaaagcttttatccaggttcttggtaatgagaaggccagcaaggaagtattcaacatctcgggagataagtatgtcacatttgatggattagcaagagcatgtgctaaggctggtgggttcccagagccagagatcattcactacaaccctaaagattttgattttgggaaaaagaaatcatttccattccgtgaccagcatttctttgcatcagttgagaaagcaaagagcgtgcttggattggaacctgaatttggacttgtagagggtctagcagactcgtacaacctggactttggtagaggaacatatcggaaagaggctgatttctcaacagatgacataattcttggcaagagtcttgttagcgtataaacttttctatttcaattttaagtatttcacttgtatttagaaaagctgttcggatttgctacattatgaagtcgtgaaatattcatgagcttttcgttc

SEQ ID NO: 5406 - protein, 378 aa, Glycine max
  peptide (1)..(378): Ceres Seq. ID no. 15176920
  misc_feature (57)..(346): Pfam Name: Pfam Description:  NAD dependent epimerase/dehydratase family
  misc_feature (1)..(376): NCBI GI NO: 15217485 NR Description: RNA-binding protein -related
  misc_feature (1)..(376): NCBI GI NO: 21593201 NR Description: putative RNA-binding protein
  misc_feature (1)..(376): NCBI GI NO: 17064988 NR Description: g5bf protein [Arabidopsis thaliana]
  misc_feature (1)..(376): NCBI GI NO: 25454619 NR Description: hypothetical protein g5bf
  misc_feature (7)..(376): NCBI GI NO: 25456171 NR Description: probable RNA binding protein
  misc_feature (24)..(371): NCBI GI NO: 34398360 NR Description: 38 kDa ribosome-associated protein precursor
  misc_feature (55)..(371): NCBI GI NO: 17232323 NR Description: mRNA-binding protein [Nostoc sp. PCC 7120]
  misc_feature (55)..(371): NCBI GI NO: 23040971 NR Description: hypothetical protein
  misc_feature (55)..(371): NCBI GI NO: 23128166 NR Description: hypothetical protein [Nostoc punctiforme]
  misc_feature (10)..(378): NCBI GI NO: 7484674 NR Description: mRNA-binding protein CSP41 precursor
MARVVALQQNQLSFSTLASSLSDFSGTRLQTQLQFKRKQCHPKGSFYVSASSTKKILIMGGTRFIGVFLSRLLVKEGHQVTLFTRGKAPVTQQLPGESDSDYADFSSKILHLKGDRKDFDFVKSSLSAEGFDVVYDINGREADEVEPILDALPNLEQFIYCSSAGVYLKSDLLPHAETDAVDPKSRHKGKLETESLLQARGVNWTSIRPVYIYGPLNYNPVEEWFFHRLKAGRPIPIPGSGIQITQLGHVKDLAKAFIQVLGNEKASKEVFNISGDKYVTFDGLARACAKAGGFPEPEIIHYNPKDFDFGKKKSFPFRDQHFFASVEKAKSVLGLEPEFGLVEGLADSYNLDFGRGTYRKEADFSTDDIILGKSLVSV

SEQ ID NO: 5407 - protein, 320 aa, Glycine max
  peptide (1)..(320): Ceres Seq. ID no. 15176921
  misc_feature (1)..(288): Pfam Name: Pfam Description:  NAD dependent epimerase/dehydratase family
  misc_feature (1)..(318): NCBI GI NO: 15217485 NR Description: RNA-binding protein -related
  misc_feature (1)..(318): NCBI GI NO: 21593201 NR Description: putative RNA-binding protein
  misc_feature (1)..(318): NCBI GI NO: 17064988 NR Description: g5bf protein [Arabidopsis thaliana]
  misc_feature (1)..(318): NCBI GI NO: 25454619 NR Description: hypothetical protein g5bf
  misc_feature (1)..(318): NCBI GI NO: 25456171 NR Description: probable RNA binding protein
  misc_feature (1)..(313): NCBI GI NO: 34398360 NR Description: 38 kDa ribosome-associated protein precursor
  misc_feature (1)..(313): NCBI GI NO: 17232323 NR Description: mRNA-binding protein [Nostoc sp. PCC 7120]
  misc_feature (1)..(313): NCBI GI NO: 23040971 NR Description: hypothetical protein
  misc_feature (1)..(313): NCBI GI NO: 23128166 NR Description: hypothetical protein [Nostoc punctiforme]
  misc_feature (1)..(320): NCBI GI NO: 7484674 NR Description: mRNA-binding protein CSP41 precursor
MGGTRFIGVFLSRLLVKEGHQVTLFTRGKAPVTQQLPGESDSDYADFSSKILHLKGDRKDFDFVKSSLSAEGFDVVYDINGREADEVEPILDALPNLEQFIYCSSAGVYLKSDLLPHAETDAVDPKSRHKGKLETESLLQARGVNWTSIRPVYIYGPLNYNPVEEWFFHRLKAGRPIPIPGSGIQITQLGHVKDLAKAFIQVLGNEKASKEVFNISGDKYVTFDGLARACAKAGGFPEPEIIHYNPKDFDFGKKKSFPFRDQHFFASVEKAKSVLGLEPEFGLVEGLADSYNLDFGRGTYRKEADFSTDDIILGKSLVSV

SEQ ID NO: 5408 - DNA, 1555 bp, Glycine max
  misc_feature (1)..(1555): Ceres Seq. ID no. 14316204
tgatcaaatggagcgtcaatttattcccacaatggttgtgatattcataaggaattcttgattggcaggtctttgatgggcataacggtatatcagctgctatttttgcgaaggaaaacttgctaagtaatgttttgagtgcaatacctcaagatattagcagggatgcttggcttcaggctcttcctcgtgctctggttgttggttttgtgaagactgacatagagtttcagcaaaagggggaaacttctggaacaacagctacatttgttttggttgatggatggactatcactgttgcatctgtgggagattcccgctgcatattagatactcagggaggtgttgtttctctcttgacagttgatcacaggctggaagagaatgcagaagagagggagcgcgttactgccagcggtggtgaagtaggaagactcaatgtatttggaggcaatgaggttgggcctcttcgctgctggccaggtggattgtgcctatctagatctataggtgacacagacgtgggagaatttattgtgccaataccacatgttaagcaagtgaagctttcaaatgctggtggaaggcttattatagcttctgatggtatttgggatgctttatcatctgatatggctgctaagtcttgtcggggtctacctgcagagcttgctgcaaaactagtggttaaggaagctctaaggtcaagaggcctcaaggatgatacaacttgccttgttgtagatattattccttcggacctccctgtattaccaccaattccaagaaagaaacataatatgctaacttcgcttctattttttggaaagaaatctgagaactctatgaacaaagctaccaataagctttctgcagttggtgttgtggaggagttatttgaagagggttctgcaatgcttacagaaaggctaggtaaggatttcccgcttaacaagaattctggtattttccgttgtgcggtttgccaaatggaccaaccccctggtgatggtttatcaatgaactctgggccttttttctctcctgcatctaatccatgggaaggcccattcctctgcacaaactgttggaagaagaaggatgccatggaaggaaaaagcctagcagacccaccgttacagcataatgattatctagtattacagtagtagcatagtaaatattagtataatttttccctggcagtgtgagcatgcttgactttacattttcggtggttattgccatagatgtgtaagaaatgaggttgagaattgagatagggctagtaggtgttttggaggttgctgcaagtttgattctggcttgtgctcagctgttggaagttggactgactgacagaacaaacaagaaagttgtgtctggtagaaaaaaattctagtgaaatctgctaacggcttgtatttgtaagtaaactgaagcttttgtggctgcctctgttttgagagtgcttcaatgctacacagcccaaatgcatctgtatcttttaaacttatgttatacaaatacaactacatgtctcgaatgtctctgt

SEQ ID NO: 5409 - protein, 178 aa, Glycine max
  peptide (1)..(178): Ceres Seq. ID no. 14316205
  misc_feature (1)..(162): NCBI GI NO: 15217454 NR Description: protein phosphatase 2C (PP2C) -related
  misc_feature (1)..(162): NCBI GI NO: 15221404 NR Description: protein phosphatase 2C (PP2C) -related
  misc_feature (1)..(162): NCBI GI NO: 34394411 NR Description: protein phosphatase 2C-like
  misc_feature (1)..(162): NCBI GI NO: 34914644 NR Description: OSJNBa0054L14.21
  misc_feature (1)..(96): NCBI GI NO: 16930415 NR Description: At1g09160/T12M4_13 [Arabidopsis thaliana]
  misc_feature (1)..(99): NCBI GI NO: 34898168 NR Description: protein phosphatase 2C-like
  misc_feature (1)..(162): NCBI GI NO: 18401703 NR Description: protein phosphatase 2C (PP2C) -related
  misc_feature (1)..(162): NCBI GI NO: 15292869 NR Description: unknown protein [Arabidopsis thaliana]
  misc_feature (1)..(162): NCBI GI NO: 14029015 NR Description: Unknown protein [Oryza sativa]
  misc_feature (1)..(162): NCBI GI NO: 38344839 NR Description: OSJNBa0064H22.20
MAAKSCRGLPAELAAKLVVKEALRSRGLKDDTTCLVVDIIPSDLPVLPPIPRKKHNMLTSLLFFGKKSENSMNKATNKLSAVGVVEELFEEGSAMLTERLGKDFPLNKNSGIFRCAVCQMDQPPGDGLSMNSGPFFSPASNPWEGPFLCTNCWKKKDAMEGKSLADPPLQHNDYLVLQ

SEQ ID NO: 5410 - protein, 122 aa, Glycine max
  peptide (1)..(122): Ceres Seq. ID no. 14316206
  misc_feature (1)..(106): NCBI GI NO: 15217454 NR Description: protein phosphatase 2C (PP2C) -related
  misc_feature (1)..(106): NCBI GI NO: 15221404 NR Description: protein phosphatase 2C (PP2C) -related
  misc_feature (1)..(106): NCBI GI NO: 34394411 NR Description: protein phosphatase 2C-like
  misc_feature (1)..(106): NCBI GI NO: 34914644 NR Description: OSJNBa0054L14.21
  misc_feature (1)..(40): NCBI GI NO: 16930415 NR Description: At1g09160/T12M4_13 [Arabidopsis thaliana]
  misc_feature (1)..(43): NCBI GI NO: 34898168 NR Description: protein phosphatase 2C-like
  misc_feature (1)..(106): NCBI GI NO: 18401703 NR Description: protein phosphatase 2C (PP2C) -related
  misc_feature (1)..(106): NCBI GI NO: 15292869 NR Description: unknown protein [Arabidopsis thaliana]
  misc_feature (1)..(106): NCBI GI NO: 14029015 NR Description: Unknown protein [Oryza sativa]
  misc_feature (1)..(106): NCBI GI NO: 38344839 NR Description: OSJNBa0064H22.20
MLTSLLFFGKKSENSMNKATNKLSAVGVVEELFEEGSAMLTERLGKDFPLNKNSGIFRCAVCQMDQPPGDGLSMNSGPFFSPASNPWEGPFLCTNCWKKKDAMEGKSLADPPLQHNDYLVLQ

SEQ ID NO: 5411 - protein, 107 aa, Glycine max
  peptide (1)..(107): Ceres Seq. ID no. 14316207
  misc_feature (1)..(91): NCBI GI NO: 15217454 NR Description: protein phosphatase 2C (PP2C) -related
  misc_feature (1)..(91): NCBI GI NO: 15221404 NR Description: protein phosphatase 2C (PP2C) -related
  misc_feature (1)..(91): NCBI GI NO: 34394411 NR Description: protein phosphatase 2C-like
  misc_feature (1)..(91): NCBI GI NO: 34914644 NR Description: OSJNBa0054L14.21
  misc_feature (1)..(25): NCBI GI NO: 16930415 NR Description: At1g09160/T12M4_13 [Arabidopsis thaliana]
  misc_feature (1)..(28): NCBI GI NO: 34898168 NR Description: protein phosphatase 2C-like
  misc_feature (1)..(91): NCBI GI NO: 18401703 NR Description: protein phosphatase 2C (PP2C) -related
  misc_feature (1)..(91): NCBI GI NO: 15292869 NR Description: unknown protein [Arabidopsis thaliana]
  misc_feature (1)..(91): NCBI GI NO: 14029015 NR Description: Unknown protein [Oryza sativa]
  misc_feature (1)..(91): NCBI GI NO: 38344839 NR Description: OSJNBa0064H22.20
MNKATNKLSAVGVVEELFEEGSAMLTERLGKDFPLNKNSGIFRCAVCQMDQPPGDGLSMNSGPFFSPASNPWEGPFLCTNCWKKKDAMEGKSLADPPLQHNDYLVLQ

SEQ ID NO: 5412 - DNA, 1492 bp, Glycine max
  misc_feature (1)..(1492): Ceres Seq. ID no. 15175931
gatatgtaaacagtaaaccaaactggactgaggcgagaaggagtagagcatagtatggagcacacagtctcaaactcaagcagtgtcgagcagattctgaatcttctctacgcagccggctacgtcgacgccacaaatcccgatgcgccgccgtctcagaaaatcgccgccggcctctcctggtgcatcgccgccataacaggcgacgacaacacacgtgacatcgaggaatcgtttggattagttggatgcccgcaccctctgcgatcctctcacattcaggatcttgataccgatgctctttttcctgtaattcagtggcttgcgtcacacattcggcaaaatcaagaacactgtgtcaatgaggttcatcatgctgaaaataccattgaagtggatgagtgtagaacttcgattcaggcattaagtggcaacttggatgaactgaatcagcggaagatgaatgttgtgaagcaattatatattctacaagagagaatcaataaggagggtgctgattctgcagtacagaagttgctttctttactgacatctttgaagaatcttgaaaagcaggaaaaatactttcagtccaatcgtgatgctaaacactcagaacttcaagatgatattagtgaattagagaggaaaataacaaatgacagtgataatgagaaccttcctgatgaactacatcattcatttggtgaattagttgaaaaagtcaatttgatgaaaaagcaacttgctgctagactgagggatattgtggtattaagacgacagattgatgacctaccgtgccaatcagaagtcatccagtacgaacgccggctctcagaactgtatgcacaaatttaggttcatgaattgttttgatgaaaaagagtttattattaagaaaagaggaaaagttaagttagtgggaggctaatacttttttttgtttatcaaatcatactcactctggttctcacttaacttctaattgttatgcatgtctttggttttgcctatgcacagggaaaacatcgacaaactcgtaaatactatgctacctacaatgctctcttggaaataaaagaattgatgctaaaggaaacatctttattgaattcgatcatttcccagtttcaagaggcctttagtagcactgatggacgtataaaacttgttcattccatggaaggaattgtcaagggaagtcaacagaagctagaaagggttcatgtaggacttcaagaagaagagagaattcgtaatgatctgaaggataggtatgctgcagcaaccggtgagcacaagcactgctattctctgttgaaagcttttcaggcccaatgtgcgaagaattagaggtttcgatgacaagacaactttgaggttgagttgcacaaagtactgtatcgcgtcaaagcgtagaggtttctctgtaactgtagacgatcccagtaagggtggagaattctccaattgaaatttactttaacgt

SEQ ID NO: 5413 - protein, 268 aa, Glycine max
  peptide (1)..(268): Ceres Seq. ID no. 15175932
  misc_feature (102)..(264): NCBI GI NO: 18418036 NR Description: expressed protein [Arabidopsis thaliana]
  misc_feature (102)..(264): NCBI GI NO: 7486769 NR Description: hypothetical protein L23H3
  misc_feature (128)..(268): NCBI GI NO: 32450714 NR Description: 4633402D15Rik protein [Mus musculus]
  misc_feature (13)..(51): NCBI GI NO: 32450714 NR Description: 4633402D15Rik protein [Mus musculus]
  misc_feature (66)..(99): NCBI GI NO: 32450714 NR Description: 4633402D15Rik protein [Mus musculus]
  misc_feature (128)..(268): NCBI GI NO: 26351751 NR Description: unnamed protein product [Mus musculus]
  misc_feature (66)..(99): NCBI GI NO: 26351751 NR Description: unnamed protein product [Mus musculus]
  misc_feature (96)..(268): NCBI GI NO: 17647427 NR Description: fidipidine CG7773-PA [Drosophila melanogaster]
  misc_feature (66)..(98): NCBI GI NO: 17647427 NR Description: fidipidine CG7773-PA [Drosophila melanogaster]
  misc_feature (128)..(268): NCBI GI NO: 10438181 NR Description: unnamed protein product [Homo sapiens]
MEHTVSNSSSVEQILNLLYAAGYVDATNPDAPPSQKIAAGLSWCIAAITGDDNTRDIEESFGLVGCPHPLRSSHIQDLDTDALFPVIQWLASHIRQNQEHCVNEVHHAENTIEVDECRTSIQALSGNLDELNQRKMNVVKQLYILQERINKEGADSAVQKLLSLLTSLKNLEKQEKYFQSNRDAKHSELQDDISELERKITNDSDNENLPDELHHSFGELVEKVNLMKKQLAARLRDIVVLRRQIDDLPCQSEVIQYERRLSELYAQI

SEQ ID NO: 5414 - DNA, 1445 bp, Glycine max
  misc_feature (1)..(1445): Ceres Seq. ID no. 14307702
atatcctctctctctctctctctctctctctgaacaagagcctgcagccagagttagagggaaatcaagcacggctcaatcatcgaatcatagagaacacatacagaagaaggaaaagtggaaccctggaagctgatattgtaggaaggtttgcaagaaaacggattttgttttgagatatatgcatgtgcaagtgcatagggaaattaacaaaaaataagatgacatggtgcaatgactctgacgagaatagggttattgaatcaatcacgccaagaataactattactcctaacactgatgacaaaaagctcacccaagaaattagaaccacagcatgcccctcgtgcggccataacattgcattcaaagataagggtggaatccatgacttgccggggttaccagctggagttaagtttgacccaaatgaccaagaaatattagaacatttggaggcaaaagttgcgtctgatgcatgcaagcttcatcccctaattgatgagttcataccaacgctcgaaggcgagaatgggatctgttatacacacccagaaaaactaccaggagttagcaaagatgggcagatccgccatttctttcacaggccctcaaaagcatacacgactggaacaaggaaaagaagaaaggttcacactgatgatgaaggaattgaaacaagatggcacaaaacgggaaaaactagagcagtttttgcatctggtggtgcagtgaaaggttttaagaaaatactagtactctacaccaactatggaaggcaaaagaagcctgagaaaacttactgggtgatgcatcaataccatcttggcaatactgaagaagagaaagatggagaactagttgtttcaaaagtcttctaccaaacacaacctagacaatgtgttaatcccattatcataaaggacccgtacgaaaaaatgttgaatggtggaagtgtccaagacagcacaaatacatcaataactaaaactactgcaactcttttggattgctacaatgctccttacatagattatgatcatgcccatgcgagtcataatagggaaagttcctcacaactaataattcccagctcggttgttcaggttgatggctcttatattcgctcaacaatggatgcaaagaaagcaagatttgaaagtaacactgggaagagcttctaggtagacaagcagtgacaatgatttacagcatgtcctccatattgtttccattactaattgagtaatagtatttatatgtgaaattagactgaaggaattccaagggttggaaaaatataggtttttccttgaattattgagatcaatatggcgcaggcatgatggactttcccataattgaccctggttgaagttgagagacaagcaagaaggtatatatatttgcggtactgtagtttgattttaattttagggtacatg

SEQ ID NO: 5415 - protein, 332 aa, Glycine max
  peptide (1)..(332): Ceres Seq. ID no. 14307703
  misc_feature (73)..(215): Pfam Name: NAM Pfam Description: No apical meristem
  misc_feature (13)..(256): NCBI GI NO: 15235314 NR Description: No apical meristem (NAM) protein family
  misc_feature (13)..(239): NCBI GI NO: 21554371 NR Description: NAM protein, putative [Arabidopsis thaliana]
  misc_feature (13)..(239): NCBI GI NO: 18396807 NR Description: No apical meristem (NAM) protein family
  misc_feature (13)..(239): NCBI GI NO: 34911014 NR Description: OJ1125_C04.12
  misc_feature (63)..(239): NCBI GI NO: 6560767 NR Description: F3M18.9 [Arabidopsis thaliana]
  misc_feature (52)..(239): NCBI GI NO: 15233497 NR Description: No apical meristem (NAM) protein family
  misc_feature (52)..(273): NCBI GI NO: 15241889 NR Description: No apical meristem (NAM) protein family
  misc_feature (76)..(239): NCBI GI NO: 34906416 NR Description: P0710E05.22
  misc_feature (12)..(240): NCBI GI NO: 12320749 NR Description: unknown protein [Arabidopsis thaliana]
  misc_feature (14)..(240): NCBI GI NO: 30689293 NR Description: No apical meristem (NAM) protein family
MCKCIGKLTKNKMTWCNDSDENRVIESITPRITITPNTDDKKLTQEIRTTACPSCGHNIAFKDKGGIHDLPGLPAGVKFDPNDQEILEHLEAKVASDACKLHPLIDEFIPTLEGENGICYTHPEKLPGVSKDGQIRHFFHRPSKAYTTGTRKRRKVHTDDEGIETRWHKTGKTRAVFASGGAVKGFKKILVLYTNYGRQKKPEKTYWVMHQYHLGNTEEEKDGELVVSKVFYQTQPRQCVNPIIIKDPYEKMLNGGSVQDSTNTSITKTTATLLDCYNAPYIDYDHAHASHNRESSSQLIIPSSVVQVDGSYIRSTMDAKKARFESNTGKSF

SEQ ID NO: 5416 - protein, 320 aa, Glycine max
  peptide (1)..(320): Ceres Seq. ID no. 14307704
  misc_feature (61)..(203): Pfam Name: NAM Pfam Description: No apical meristem
  misc_feature (1)..(244): NCBI GI NO: 15235314 NR Description: No apical meristem (NAM) protein family
  misc_feature (1)..(227): NCBI GI NO: 21554371 NR Description: NAM protein, putative [Arabidopsis thaliana]
  misc_feature (1)..(227): NCBI GI NO: 18396807 NR Description: No apical meristem (NAM) protein family
  misc_feature (1)..(227): NCBI GI NO: 34911014 NR Description: OJ1125_C04.12
  misc_feature (51)..(227): NCBI GI NO: 6560767 NR Description: F3M18.9 [Arabidopsis thaliana]
  misc_feature (40)..(227): NCBI GI NO: 15233497 NR Description: No apical meristem (NAM) protein family
  misc_feature (40)..(261): NCBI GI NO: 15241889 NR Description: No apical meristem (NAM) protein family
  misc_feature (64)..(227): NCBI GI NO: 34906416 NR Description: P0710E05.22
  misc_feature (1)..(228): NCBI GI NO: 12320749 NR Description: unknown protein [Arabidopsis thaliana]
  misc_feature (2)..(228): NCBI GI NO: 30689293 NR Description: No apical meristem (NAM) protein family
MTWCNDSDENRVIESITPRITITPNTDDKKLTQEIRTTACPSCGHNIAFKDKGGIHDLPGLPAGVKFDPNDQEILEHLEAKVASDACKLHPLIDEFIPTLEGENGICYTHPEKLPGVSKDGQIRHFFHRPSKAYTTGTRKRRKVHTDDEGIETRWHKTGKTRAVFASGGAVKGFKKILVLYTNYGRQKKPEKTYWVMHQYHLGNTEEEKDGELVVSKVFYQTQPRQCVNPIIIKDPYEKMLNGGSVQDSTNTSITKTTATLLDCYNAPYIDYDHAHASHNRESSSQLIIPSSVVQVDGSYIRSTMDAKKARFESNTGKSF

SEQ ID NO: 5417 - DNA, 1505 bp, Glycine max
  misc_feature (1)..(1505): Ceres Seq. ID no. 14307694
ttgcttgaacacagtgccgaggttgaaaccgttgatgatgctggctacactctgttgcattgtgatgctgaggtagaccatttgcaagttgccctctacttgatcgctcatgattcctagaaagattggagtttccattccaatgaaggctaccttatttatgacatacataatggttgatggatgggctggaattgctggtgagattctcagattaaagccattggttatataccatctcagaaacatgttcttatcaaatggttacctggatgaaggggttaaagaaattggtgcatttgtggcttcaagggggtcgctttagcttctgggatcttttggatttggacaaaattccagggaaaggatgggattgtggcaaatttctatagcctacattcatggatgagtttggcttttgtatccctcttcggatcccagaaactaaagcatacaattcacaccaccaaagctggtatgaagttcctgcaaatgaaatttcatgaggagttctccaatctagagtagttagtagtgagtagtaagagggaggaagcagaagtgaagcgatgaatgccctagatcgttacgagcgtttcgtcgtccctgaagggtttcttatgagagggacacgaagatcatcaatgcggcgtccttcaccattgagagagaggagcacaccatcgacaacatcctacgcatgcagcttcacagagaccccaatgtcttgtttgtcggatacaagcttcctcatcctcttcaatacaaaattattgtcaggtgatattcttggtcgcacagttcataaatttcaccaatatggaacatagaaaatagccaagggccatagagcaccaaaggaagcatgttgatgttgatggtttcttggtaagagtgataacttgcaaccatacgggcaagacaggttccatgataagatctttgactgcacatggttctagaattgttgttttatgttcagatcatttaggagacaatgcgagtccaaatttcaacttgagaccaacatgtgcttatttcatcactgaggtagcaaaatgagcatccggaagggctcacatagtacaggcttccatagctgatggtgttttgtcaggtaatactgaccccaagaaaaatattgagttgctacaagatgctattgcttctattactctcttaggaagcataatcacgtccatccctttatcgaggcaagcatgttcatagcttagctcatgcaacttctggatatcacaaagttcttgaagaaaatagcaaactatacaatcaagttcatgatcttaagggtaaatttctgattggttggttgctataagcttagtatgagttatatctttcacacctttctaaagattttgttccttttattgtgcctccctgaaatggttaggcctcgtggagatatgatataggtataggttggataaaatttaattcgactcgacacatttttatacttaataaaaaaattcatttacttt

SEQ ID NO: 5418 - protein, 86 aa, Glycine max
  peptide (1)..(86): Ceres Seq. ID no. 14307695
MNALDRYERFVVPEGFLMRGTRRSSMRRPSPLRERSTPSTTSYACSFTETPMSCLSDTSFLILFNTKLLSGDILGRTVHKFHQYGT

SEQ ID NO: 5419 - protein, 71 aa, Glycine max
  peptide (1)..(71): Ceres Seq. ID no. 14307696
  misc_feature (2)..(49): NCBI GI NO: 22328665 NR Description: ERD4 protein-related [Arabidopsis thaliana]
  misc_feature (2)..(49): NCBI GI NO: 15222569 NR Description: ERD4 protein-related [Arabidopsis thaliana]
  misc_feature (2)..(49): NCBI GI NO: 15233100 NR Description: ERD4 protein-related [Arabidopsis thaliana]
  misc_feature (2)..(49): NCBI GI NO: 7485199 NR Description: hypothetical protein - Arabidopsis thaliana
  misc_feature (2)..(49): NCBI GI NO: 37537172 NR Description: unknown protein
  misc_feature (2)..(49): NCBI GI NO: 17381104 NR Description: unknown protein [Arabidopsis thaliana]
  misc_feature (1)..(49): NCBI GI NO: 34913548 NR Description: OJ1029_F04.25
  misc_feature (2)..(49): NCBI GI NO: 15233476 NR Description: ERD4 protein-related [Arabidopsis thaliana]
  misc_feature (2)..(49): NCBI GI NO: 15810533 NR Description: unknown protein [Arabidopsis thaliana]
  misc_feature (2)..(48): NCBI GI NO: 7486105 NR Description: hypothetical protein F24O1
MIPRKIGVSIPMKATLFMTYIMVDGWAGIAGEILRLKPLVIYHLRNMFLSNGYLDEGVKEIGAFVASRGSL

SEQ ID NO: 5420 - protein, 69 aa, Glycine max
  peptide (1)..(69): Ceres Seq. ID no. 14307697
MRGTRRSSMRRPSPLRERSTPSTTSYACSFTETPMSCLSDTSFLILFNTKLLSGDILGRTVHKFHQYGT

SEQ ID NO: 5421 - DNA, 1776 bp, Glycine max
  misc_feature (1)..(1776): Ceres Seq. ID no. 14313155
agaaaaaaaaaaagaaggaaaaaggggctagacggcatgttggactgatttgaccttgaagaaggggtcattcatatgatcccgtgtttgtttgggtctttcttcattcttcaaccaacccattccttcccccacgcgccattctccggccaccgtcgacgacggaacgccgttcaccgcttcatattctcccaaaggcttcggcgaccgcccgtgatggataaagtcttcaacaagctccgcaatttggacgcttacccaaaagtcaatgaagatttttacaaccgcacgctcgccggcggcgttgtcaccgtcgtttccgccgccgtcatgctctttctcttcttttccgagctaagtttatacctctacacagttacggagagtaagcttttggtggatacttcaaggggagataccttgcacatcaattttgatgtcacttttcctgctgttcgatgttcaatactcagcttagatgcaatggatattagtggcgagcagcatcttgacatacgacataatatagtgaagaaaagaattgatgctaatggtaatgtgatagaagagaggaaggatggaattggtgcaccaaagattgagagacccttacagaaacatggtggcagacttggacatgatgaaaagtattgtggttcatgttttggtgcagaagagtcagatgaacactgttgtaattcttgtgaagaagtgcgtgaagcatataggaaaaagggctgggcaatgacaaatatggatttgattgatcagtgtcaaagagagggttatgtgcaaagggtaaaggatgaagaaggtgaaggatgcaatcttcaaggatctcttgaagttaataaagtagcaggaaattttcattttgcaactgggaaaagctttcttcagtctgctatatttctggctgatctgcttgctctacaggataatcattataatattagccatcggatcaacaaattaagttttggtcaccatttccctggattggtaaatcctcttgacggggtaaagtgggtgcaaggacctgctcatggcatgtaccagtatttcataaaggtggtccctacaatatacacagacattagaggccgtgttatccattcaaatcagtattctgtgactgagcatttcaagagttcagagctgggtgttgcagttcctggagttttcttcttttatgacatatctccaatcaaggtcaactttaaagaggaacatattccatttttacatttcctgaccaatatttgtgcaattattggaggtgtatttactgttgcgggaataatagattcatcgatatattatggtcagagaacaatcaagaggaagatggagcttggaaaatttacatgatgtggtcaaattctgcatgagtgctctaatatcctaattgatttgacgtatttggttggctggtgcattgagtatcgtttataatgtggtagcatatgcacataatgccaagggtaagcagagccgtaggttcggttgatgcatgaagtgtattttttggatcatgatttttcctttaatgtgtagcaatttctattaagttgctactttggtgggtttttaatatatggatgaagatgaggaatgcaaagagttgttgggaactttttagatatttttgctgcataatacatgacatggttgattatgcataacatacagttcttgtgttgctgttccccgtgctgtaatctagccaatgttttcattgaacttgaagaatttgaagctgctaagttaggattt

SEQ ID NO: 5422 - protein, 431 aa, Glycine max
  peptide (1)..(431): Ceres Seq. ID no. 14313156
  misc_feature (48)..(431): NCBI GI NO: 30693281 NR Description: expressed protein [Arabidopsis thaliana]
  misc_feature (48)..(430): NCBI GI NO: 38347102 NR Description: OSJNBa0006M15.17
  misc_feature (51)..(430): NCBI GI NO: 18395087 NR Description: expressed protein [Arabidopsis thaliana]
  misc_feature (196)..(407): NCBI GI NO: 6598578 NR Description: F5J5.4 [Arabidopsis thaliana]
  misc_feature (48)..(200): NCBI GI NO: 6598578 NR Description: F5J5.4 [Arabidopsis thaliana]
  misc_feature (403)..(431): NCBI GI NO: 6598578 NR Description: F5J5.4 [Arabidopsis thaliana]
  misc_feature (22)..(431): NCBI GI NO: 34860248 NR Description: similar to serologically defined breast cancerantigen 84
  misc_feature (50)..(431): NCBI GI NO: 13384938 NR Description: serologically defined breast cancer antigen 84
  misc_feature (48)..(429): NCBI GI NO: 28278376 NR Description: Similar to serologically defined breast cancerantigen 84
  misc_feature (50)..(431): NCBI GI NO: 7706278 NR Description: serologically defined breast cancer antigen 84
MIPCLFGSFFILQPTHSFPHAPFSGHRRRRNAVHRFIFSQRLRRPPVMDKVFNKLRNLDAYPKVNEDFYNRTLAGGVVTVVSAAVMLFLFFSELSLYLYTVTESKLLVDTSRGDTLHINFDVTFPAVRCSILSLDAMDISGEQHLDIRHNIVKKRIDANGNVIEERKDGIGAPKIERPLQKHGGRLGHDEKYCGSCFGAEESDEHCCNSCEEVREAYRKKGWAMTNMDLIDQCQREGYVQRVKDEEGEGCNLQGSLEVNKVAGNFHFATGKSFLQSAIFLADLLALQDNHYNISHRINKLSFGHHFPGLVNPLDGVKWVQGPAHGMYQYFIKVVPTIYTDIRGRVIHSNQYSVTEHFKSSELGVAVPGVFFFYDISPIKVNFKEEHIPFLHFLTNICAIIGGVFTVAGIIDSSIYYGQRTIKRKMELGKFT

SEQ ID NO: 5423 - protein, 384 aa, Glycine max
  peptide (1)..(384): Ceres Seq. ID no. 14313157
  misc_feature (1)..(384): NCBI GI NO: 30693281 NR Description: expressed protein [Arabidopsis thaliana]
  misc_feature (1)..(383): NCBI GI NO: 38347102 NR Description: OSJNBa0006M15.17
  misc_feature (4)..(383): NCBI GI NO: 18395087 NR Description: expressed protein [Arabidopsis thaliana]
  misc_feature (149)..(360): NCBI GI NO: 6598578 NR Description: F5J5.4 [Arabidopsis thaliana]
  misc_feature (1)..(153): NCBI GI NO: 6598578 NR Description: F5J5.4 [Arabidopsis thaliana]
  misc_feature (356)..(384): NCBI GI NO: 6598578 NR Description: F5J5.4 [Arabidopsis thaliana]
  misc_feature (1)..(384): NCBI GI NO: 34860248 NR Description: similar to serologically defined breast cancerantigen 84
  misc_feature (3)..(384): NCBI GI NO: 13384938 NR Description: serologically defined breast cancer antigen 84
  misc_feature (1)..(382): NCBI GI NO: 28278376 NR Description: Similar to serologically defined breast cancerantigen 84
  misc_feature (3)..(384): NCBI GI NO: 7706278 NR Description: serologically defined breast cancer antigen 84
MDKVFNKLRNLDAYPKVNEDFYNRTLAGGVVTVVSAAVMLFLFFSELSLYLYTVTESKLLVDTSRGDTLHINFDVTFPAVRCSILSLDAMDISGEQHLDIRHNIVKKRIDANGNVIEERKDGIGAPKIERPLQKHGGRLGHDEKYCGSCFGAEESDEHCCNSCEEVREAYRKKGWAMTNMDLIDQCQREGYVQRVKDEEGEGCNLQGSLEVNKVAGNFHFATGKSFLQSAIFLADLLALQDNHYNISHRINKLSFGHHFPGLVNPLDGVKWVQGPAHGMYQYFIKVVPTIYTDIRGRVIHSNQYSVTEHFKSSELGVAVPGVFFFYDISPIKVNFKEEHIPFLHFLTNICAIIGGVFTVAGIIDSSIYYGQRTIKRKMELGKFT

SEQ ID NO: 5424 - protein, 346 aa, Glycine max
  peptide (1)..(346): Ceres Seq. ID no. 14313158
  misc_feature (1)..(346): NCBI GI NO: 30693281 NR Description: expressed protein [Arabidopsis thaliana]
  misc_feature (1)..(345): NCBI GI NO: 38347102 NR Description: OSJNBa0006M15.17
  misc_feature (1)..(345): NCBI GI NO: 18395087 NR Description: expressed protein [Arabidopsis thaliana]
  misc_feature (111)..(322): NCBI GI NO: 6598578 NR Description: F5J5.4 [Arabidopsis thaliana]
  misc_feature (1)..(115): NCBI GI NO: 6598578 NR Description: F5J5.4 [Arabidopsis thaliana]
  misc_feature (318)..(346): NCBI GI NO: 6598578 NR Description: F5J5.4 [Arabidopsis thaliana]
  misc_feature (1)..(346): NCBI GI NO: 34860248 NR Description: similar to serologically defined breast cancerantigen 84
  misc_feature (1)..(346): NCBI GI NO: 13384938 NR Description: serologically defined breast cancer antigen 84
  misc_feature (1)..(344): NCBI GI NO: 28278376 NR Description: Similar to serologically defined breast cancerantigen 84
  misc_feature (1)..(346): NCBI GI NO: 7706278 NR Description: serologically defined breast cancer antigen 84
MLFLFFSELSLYLYTVTESKLLVDTSRGDTLHINFDVTFPAVRCSILSLDAMDISGEQHLDIRHNIVKKRIDANGNVIEERKDGIGAPKIERPLQKHGGRLGHDEKYCGSCFGAEESDEHCCNSCEEVREAYRKKGWAMTNMDLIDQCQREGYVQRVKDEEGEGCNLQGSLEVNKVAGNFHFATGKSFLQSAIFLADLLALQDNHYNISHRINKLSFGHHFPGLVNPLDGVKWVQGPAHGMYQYFIKVVPTIYTDIRGRVIHSNQYSVTEHFKSSELGVAVPGVFFFYDISPIKVNFKEEHIPFLHFLTNICAIIGGVFTVAGIIDSSIYYGQRTIKRKMELGKFT

SEQ ID NO: 5425 - DNA, 1352 bp, Glycine max
  misc_feature (1)..(1352): Ceres Seq. ID no. 14307728
atcatgtttttaagttttaagcttctctctcttaatttcatcagtagtgtgtgtttgaatgcaaagaagcacatgtgccaatgtgcatttgtgtgtcatgcagtaatgccaggcttatacttgcatatgcttggtaattatattcttgtaattatctagctagttgccacaaaaggtgtgattagatttgtttctagttggactatgaaataggaagaattaacattgagttaaatacaaagattttaatattcataattgttggttatatattcccccaatgaccaaattgttgatctcttgttagttcttgagcttatttcctagcaacttgatcttttgtgtaacttcatttctctccaccagttttaccaatataccaattttaaattataaatatttgtgtaggagcatgccaacctctgctgccctggatgttgttgccaaacatctgaatttgaaattttttgaggtccccacgggttggaagttctttggtaatttaatggatgctggattatgttcagtctgtggtgaagaaagttttgggactggttctgaccatattcgtgagaaagatggaatctgggcagttttggcctggctatctatacttgcatataaaaataaagataaacttgaagacaagcttgtcactgttgaagacatagttcgccagcattgggctacttatgggcgccattattatactcgatatgactatgaaaacgtggatgcaggtgcagcaaaggaactgatggcatatttggtcaagctgcagtcctcactttcagaagtcaatcagattgttaaggggataaggtcagatgtttcgaatgttgtccacggtgatgaatttgagtacaatgatcctgtggatggttccatctcatcacatcagggaatccgatatttgtttgaggatggatcacgattgattttccgcctatctggaactggatcagaaggtgcaacaattcgattatacattgagcaatatgagaaggatccatcaaagattgggagactttcaaacgaagcacttgctcctcttgtggaagttgcgttgaaactttcgaagatggaagaattcactggtcgatccgctccaacagtcattacatgaacacattcaagtggaaggtggttagatcctgaagcttctcccagtcatttcatttcttctttgtccagtatcttacggatagccgaacagtagatttggttgtttgcagcctttgctatgggaaattgagtggaatttgagtttctttatctaaattttgatatgctgaataatttgcaacagccgagtgctaattatatagtcttaatataatggtttctcttgc

SEQ ID NO: 5426 - protein, 237 aa, Glycine max
  peptide (1)..(237): Ceres Seq. ID no. 14307729
  misc_feature (1)..(94): Pfam Name: Pfam Description:  Phosphoglucomutase/phosphomannomutase
  misc_feature (1)..(237): NCBI GI NO: 12585296 NR Description: Phosphoglucomutase, cytoplasmic
  misc_feature (1)..(237): NCBI GI NO: 12585316 NR Description: Phosphoglucomutase, cytoplasmic
  misc_feature (1)..(237): NCBI GI NO: 12585330 NR Description: Phosphoglucomutase, cytoplasmic
  misc_feature (1)..(237): NCBI GI NO: 40233152 NR Description: cytosolic phosphoglucomutase [Populus tomentosa]
  misc_feature (1)..(237): NCBI GI NO: 15220668 NR Description: phosphoglucomutase -related [Arabidopsis thaliana]
  misc_feature (1)..(237): NCBI GI NO: 26185954 NR Description: cytosolic phosphoglucomutase
  misc_feature (1)..(237): NCBI GI NO: 12585308 NR Description: Phosphoglucomutase, cytoplasmic
  misc_feature (1)..(237): NCBI GI NO: 12585310 NR Description: Phosphoglucomutase, cytoplasmic 2
  misc_feature (1)..(237): NCBI GI NO: 13324798 NR Description: phosphoglucomutase [Oryza sativa]
  misc_feature (1)..(237): NCBI GI NO: 12585309 NR Description: Phosphoglucomutase, cytoplasmic 1
MPTSAALDVVAKHLNLKFFEVPTGWKFFGNLMDAGLCSVCGEESFGTGSDHIREKDGIWAVLAWLSILAYKNKDKLEDKLVTVEDIVRQHWATYGRHYYTRYDYENVDAGAAKELMAYLVKLQSSLSEVNQIVKGIRSDVSNVVHGDEFEYNDPVDGSISSHQGIRYLFEDGSRLIFRLSGTGSEGATIRLYIEQYEKDPSKIGRLSNEALAPLVEVALKLSKMEEFTGRSAPTVIT

SEQ ID NO: 5427 - protein, 206 aa, Glycine max
  peptide (1)..(206): Ceres Seq. ID no. 14307730
  misc_feature (1)..(63): Pfam Name: Pfam Description:  Phosphoglucomutase/phosphomannomutase
  misc_feature (1)..(206): NCBI GI NO: 12585296 NR Description: Phosphoglucomutase, cytoplasmic
  misc_feature (1)..(206): NCBI GI NO: 12585316 NR Description: Phosphoglucomutase, cytoplasmic
  misc_feature (1)..(206): NCBI GI NO: 12585330 NR Description: Phosphoglucomutase, cytoplasmic
  misc_feature (1)..(206): NCBI GI NO: 40233152 NR Description: cytosolic phosphoglucomutase [Populus tomentosa]
  misc_feature (1)..(206): NCBI GI NO: 15220668 NR Description: phosphoglucomutase -related [Arabidopsis thaliana]
  misc_feature (1)..(206): NCBI GI NO: 26185954 NR Description: cytosolic phosphoglucomutase
  misc_feature (1)..(206): NCBI GI NO: 12585308 NR Description: Phosphoglucomutase, cytoplasmic
  misc_feature (1)..(206): NCBI GI NO: 12585310 NR Description: Phosphoglucomutase, cytoplasmic 2
  misc_feature (1)..(206): NCBI GI NO: 13324798 NR Description: phosphoglucomutase [Oryza sativa]
  misc_feature (1)..(206): NCBI GI NO: 12585309 NR Description: Phosphoglucomutase, cytoplasmic 1
MDAGLCSVCGEESFGTGSDHIREKDGIWAVLAWLSILAYKNKDKLEDKLVTVEDIVRQHWATYGRHYYTRYDYENVDAGAAKELMAYLVKLQSSLSEVNQIVKGIRSDVSNVVHGDEFEYNDPVDGSISSHQGIRYLFEDGSRLIFRLSGTGSEGATIRLYIEQYEKDPSKIGRLSNEALAPLVEVALKLSKMEEFTGRSAPTVIT

SEQ ID NO: 5428 - protein, 122 aa, Glycine max
  peptide (1)..(122): Ceres Seq. ID no. 14307731
  misc_feature (13)..(111): Pfam Name: Pfam Description:  Phosphoglucomutase/phosphomannomutase
  misc_feature (1)..(122): NCBI GI NO: 12585296 NR Description: Phosphoglucomutase, cytoplasmic
  misc_feature (1)..(122): NCBI GI NO: 12585316 NR Description: Phosphoglucomutase, cytoplasmic
  misc_feature (1)..(122): NCBI GI NO: 12585330 NR Description: Phosphoglucomutase, cytoplasmic
  misc_feature (1)..(122): NCBI GI NO: 40233152 NR Description: cytosolic phosphoglucomutase [Populus tomentosa]
  misc_feature (1)..(122): NCBI GI NO: 15220668 NR Description: phosphoglucomutase -related [Arabidopsis thaliana]
  misc_feature (1)..(122): NCBI GI NO: 26185954 NR Description: cytosolic phosphoglucomutase
  misc_feature (1)..(122): NCBI GI NO: 12585308 NR Description: Phosphoglucomutase, cytoplasmic
  misc_feature (1)..(122): NCBI GI NO: 12585310 NR Description: Phosphoglucomutase, cytoplasmic 2
  misc_feature (1)..(122): NCBI GI NO: 13324798 NR Description: phosphoglucomutase [Oryza sativa]
  misc_feature (1)..(122): NCBI GI NO: 12585309 NR Description: Phosphoglucomutase, cytoplasmic 1
MAYLVKLQSSLSEVNQIVKGIRSDVSNVVHGDEFEYNDPVDGSISSHQGIRYLFEDGSRLIFRLSGTGSEGATIRLYIEQYEKDPSKIGRLSNEALAPLVEVALKLSKMEEFTGRSAPTVIT

SEQ ID NO: 5429 - DNA, 1409 bp, Glycine max
  misc_feature (1)..(1409): Ceres Seq. ID no. 14307716
tgctcttgatgaaaaaatcaggtctcaaatggatgttattgacaatggtgtccctgctccattatcaatgttcagtgagagtgattcagacatgaaatctgttaatatagatgacttgctgcccaaagaaaagctgcagaggaagttgccaaagccatcagcgggaaggcgaaaaaatggttacctacaaaatggtggttctgtgcatccttatgctgatccagagcaatgtgcagatacaaagcaatcctttggagcctcttccagtggggttacttctcttgatagcatccagaaacataagttgaacatagattctgattctttaggctgtatacagacacaaattcctatgacacgccctgactatagtcatgctccaaatcacacttccctctttccgactttgtctggatcaagatctgagcatgatggacatctgtctccttctcttaaagaatcatcttatgcatcaaacatggagagttcccatggtcattctttggaggctgcggccttgaaaacaaaagagaatagagaaaagttgtataattgctgtgatggacccctaaatagtagtttcaaaaatgaaaatacaccaaatcaaatgccattttgcagtccgggttcagctcagcaagtaggtcatcattttgaaaatgaaaatgaaggtcatagtgaattccgaggagttggcctaggcttttcaccagaaatagattcatcaacagtgcaggaaagctcatccatgggctctgctctggaccaagcttcacttgaagcaactagcttttgccacctgcaacagatcatggatcagttggatattaaaaccaaaatgtgcataagggacagtctataccgcttggctaagagtgctgagcatagacacaataattcaaatgcaaatggttgcattggagacgatgaaacatgcaaagcaatgatggcgcaggatgcaaacaggtgtgccggattaatggatatggaaactgacacaaaccccattgatcggtctgtagcacacttactgtttcacaggccctcagatccatcagtgttgcttcctaacgaaactttacctttcaaatccagtgccacgatgcatcatggatcagtgatcaatccaccagtgaagactgagaaacaggtctgtcaggaagattctactggagtggaaaaaaaggttttacggggtaacacctaatgaaagtgaaaccagcgttggcgcatttcgttgtacaatttatacttttccggtcattgtcgtatatgatgatgtataattatttcgggctaactcggatccctttgttaatttctgaagcatttttgcataggatgccataatactaatgtaactttgtgctaatcaaatcatcaaaaggtagcatacgatgatttagtgt

SEQ ID NO: 5430 - protein, 401 aa, Glycine max
  peptide (1)..(401): Ceres Seq. ID no. 14307717
  misc_feature (113)..(383): NCBI GI NO: 15237638 NR Description: expressed protein [Arabidopsis thaliana]
  misc_feature (232)..(350): NCBI GI NO: 15232525 NR Description: expressed protein [Arabidopsis thaliana]
ALDEKIRSQMDVIDNGVPAPLSMFSESDSDMKSVNIDDLLPKEKLQRKLPKPSAGRRKNGYLQNGGSVHPYADPEQCADTKQSFGASSSGVTSLDSIQKHKLNIDSDSLGCIQTQIPMTRPDYSHAPNHTSLFPTLSGSRSEHDGHLSPSLKESSYASNMESSHGHSLEAAALKTKENREKLYNCCDGPLNSSFKNENTPNQMPFCSPGSAQQVGHHFENENEGHSEFRGVGLGFSPEIDSSTVQESSSMGSALDQASLEATSFCHLQQIMDQLDIKTKMCIRDSLYRLAKSAEHRHNNSNANGCIGDDETCKAMMAQDANRCAGLMDMETDTNPIDRSVAHLLFHRPSDPSVLLPNETLPFKSSATMHHGSVINPPVKTEKQVCQEDSTGVEKKVLRGNT

SEQ ID NO: 5431 - protein, 392 aa, Glycine max
  peptide (1)..(392): Ceres Seq. ID no. 14307718
  misc_feature (104)..(374): NCBI GI NO: 15237638 NR Description: expressed protein [Arabidopsis thaliana]
  misc_feature (223)..(341): NCBI GI NO: 15232525 NR Description: expressed protein [Arabidopsis thaliana]
MDVIDNGVPAPLSMFSESDSDMKSVNIDDLLPKEKLQRKLPKPSAGRRKNGYLQNGGSVHPYADPEQCADTKQSFGASSSGVTSLDSIQKHKLNIDSDSLGCIQTQIPMTRPDYSHAPNHTSLFPTLSGSRSEHDGHLSPSLKESSYASNMESSHGHSLEAAALKTKENREKLYNCCDGPLNSSFKNENTPNQMPFCSPGSAQQVGHHFENENEGHSEFRGVGLGFSPEIDSSTVQESSSMGSALDQASLEATSFCHLQQIMDQLDIKTKMCIRDSLYRLAKSAEHRHNNSNANGCIGDDETCKAMMAQDANRCAGLMDMETDTNPIDRSVAHLLFHRPSDPSVLLPNETLPFKSSATMHHGSVINPPVKTEKQVCQEDSTGVEKKVLRGNT

SEQ ID NO: 5432 - protein, 379 aa, Glycine max
  peptide (1)..(379): Ceres Seq. ID no. 14307719
  misc_feature (91)..(361): NCBI GI NO: 15237638 NR Description: expressed protein [Arabidopsis thaliana]
  misc_feature (210)..(328): NCBI GI NO: 15232525 NR Description: expressed protein [Arabidopsis thaliana]
MFSESDSDMKSVNIDDLLPKEKLQRKLPKPSAGRRKNGYLQNGGSVHPYADPEQCADTKQSFGASSSGVTSLDSIQKHKLNIDSDSLGCIQTQIPMTRPDYSHAPNHTSLFPTLSGSRSEHDGHLSPSLKESSYASNMESSHGHSLEAAALKTKENREKLYNCCDGPLNSSFKNENTPNQMPFCSPGSAQQVGHHFENENEGHSEFRGVGLGFSPEIDSSTVQESSSMGSALDQASLEATSFCHLQQIMDQLDIKTKMCIRDSLYRLAKSAEHRHNNSNANGCIGDDETCKAMMAQDANRCAGLMDMETDTNPIDRSVAHLLFHRPSDPSVLLPNETLPFKSSATMHHGSVINPPVKTEKQVCQEDSTGVEKKVLRGNT

SEQ ID NO: 5433 - DNA, 1478 bp, Glycine max
  misc_feature (1)..(1478): Ceres Seq. ID no. 15176895
tattcgcacactccctgaggagtgaagagaatctctctcctttttataaacccataaatttagggcgcgctttttcccggcctcccctcgccaccgcatctccatccatctccgccacgtcgcctcctctctctctcgcttttcgtagttatacttcttctctcgttcctagaaatgagcttctcaacatgcgcagagctgtcgcgttgtttcgccgcagcatcggcgaaacctaattccggtcagtcaaacggcacttccacaacaagcctcagttttctcactccaatcggtcgttacggcgccgtttcatcagtatcgaggtcgaataagaccaacagaatagtcgcggaagctactcaaggtcttacttacagggacgccggcgtggacatcgacgccggctccgaactcgtgcgcaggatagcgaagatggcgccagggattgtaggcttcggtggtttattccctctcggtgactcgtacctcgttgctggtaccgatggcgtgggaacgaaggtgatgcttgccttcgaaactggaatccacgatactattgggattgacctggttgcgatgagtgtgaatgacattgttacttcgggggcgaagcctttgtttttccttgattactttgccactgggcaccttgacgtggacgttgctgaaaaggttataaaaggcattgttgatggttgtaagcaatctgattgtgttcttttaggaggagagactgcagagatgcctggtctctataaagaaggtgagtatgatcttagtggctgtgcagttggcattgtgaagaaagattctgtaatcaatgggtcaaacattgttgctggtgatgttattattggtcttccatctagtggagttcactctaatggtttctctcttgtaagaagagtgcttgctcaaagtggtctgtcactgaaagatcaacttcctggcagtgatgttacaattgcagaggcattgatggccccaactgttatctatgttaaacaggtacttgacttagttagtaagggaggggtgaaaggaattgcccacatcaccggtggtggtttcacagataacataccccgagtttttccagaaggccttggagctgtaatatacgacggttcatgggaagtgcctgcagtgtttaagtggcttcaggaggctgggaagatagaagactctgagatgagacggacttttaatatgggcatagggatgatcctggtagttagtccggaggcagctaatagaatactcgagaacagaggcgaaacagagaaattctatcgcattggtgaaattataagcggcaagggagtgacctttagctaattttaattgagtttaatcatgtagtacccttttaatactttcatggaaaatttctgggaatatgagatttgaatggtcagtttatttggagcctaataattttccatacataaatgatgaaatttgcaacaattttgagg

SEQ ID NO: 5434 - protein, 387 aa, Glycine max
  peptide (1)..(387): Ceres Seq. ID no. 15176896
  misc_feature (221)..(387): Pfam Name: Pfam Description:  AIR synthase related protein, C-terminal domain
  misc_feature (1)..(387): NCBI GI NO: 1709925 NR Description: Phosphoribosylformylglycinamidine cyclo-ligase
  misc_feature (10)..(386): NCBI GI NO: 15233161 NR Description: phosphoribosylformylglycinamidine cyclo-ligaseprecursor
  misc_feature (63)..(386): NCBI GI NO: 34897250 NR Description: putative 5'-phosphoribosyl-5-aminoimidazolesynthetase
  misc_feature (10)..(343): NCBI GI NO: 541885 NR Description: phosphoribosylformylglycinamidine cyclo-ligase
  misc_feature (65)..(383): NCBI GI NO: 23029993 NR Description: hypothetical protein
  misc_feature (59)..(378): NCBI GI NO: 17547342 NR Description: PROBABLE PHOSPHORIBOSYLFORMYLGLYCINAMIDINE CYCLO-LIGASE
  misc_feature (62)..(383): NCBI GI NO: 34499070 NR Description: phosphoribosylformylglycinamidine cyclo-ligase
  misc_feature (60)..(382): NCBI GI NO: 23013851 NR Description: hypothetical protein
  misc_feature (63)..(378): NCBI GI NO: 39996857 NR Description: phosphoribosylformylglycinamidine cyclo-ligase
  misc_feature (53)..(380): NCBI GI NO: 15888478 NR Description: AGR_C_2111p [Agrobacterium tumefaciens]
MSFSTCAELSRCFAAASAKPNSGQSNGTSTTSLSFLTPIGRYGAVSSVSRSNKTNRIVAEATQGLTYRDAGVDIDAGSELVRRIAKMAPGIVGFGGLFPLGDSYLVAGTDGVGTKVMLAFETGIHDTIGIDLVAMSVNDIVTSGAKPLFFLDYFATGHLDVDVAEKVIKGIVDGCKQSDCVLLGGETAEMPGLYKEGEYDLSGCAVGIVKKDSVINGSNIVAGDVIIGLPSSGVHSNGFSLVRRVLAQSGLSLKDQLPGSDVTIAEALMAPTVIYVKQVLDLVSKGGVKGIAHITGGGFTDNIPRVFPEGLGAVIYDGSWEVPAVFKWLQEAGKIEDSEMRRTFNMGIGMILVVSPEAANRILENRGETEKFYRIGEIISGKGVTFS

SEQ ID NO: 5435 - protein, 301 aa, Glycine max
  peptide (1)..(301): Ceres Seq. ID no. 15176897
  misc_feature (135)..(301): Pfam Name: Pfam Description:  AIR synthase related protein, C-terminal domain
  misc_feature (1)..(301): NCBI GI NO: 1709925 NR Description: Phosphoribosylformylglycinamidine cyclo-ligase
  misc_feature (1)..(300): NCBI GI NO: 15233161 NR Description: phosphoribosylformylglycinamidine cyclo-ligaseprecursor
  misc_feature (1)..(300): NCBI GI NO: 34897250 NR Description: putative 5'-phosphoribosyl-5-aminoimidazolesynthetase
  misc_feature (1)..(257): NCBI GI NO: 541885 NR Description: phosphoribosylformylglycinamidine cyclo-ligase
  misc_feature (1)..(297): NCBI GI NO: 23029993 NR Description: hypothetical protein
  misc_feature (1)..(292): NCBI GI NO: 17547342 NR Description: PROBABLE PHOSPHORIBOSYLFORMYLGLYCINAMIDINE CYCLO-LIGASE
  misc_feature (1)..(297): NCBI GI NO: 34499070 NR Description: phosphoribosylformylglycinamidine cyclo-ligase
  misc_feature (1)..(296): NCBI GI NO: 23013851 NR Description: hypothetical protein
  misc_feature (1)..(292): NCBI GI NO: 39996857 NR Description: phosphoribosylformylglycinamidine cyclo-ligase
  misc_feature (1)..(294): NCBI GI NO: 15888478 NR Description: AGR_C_2111p [Agrobacterium tumefaciens]
MAPGIVGFGGLFPLGDSYLVAGTDGVGTKVMLAFETGIHDTIGIDLVAMSVNDIVTSGAKPLFFLDYFATGHLDVDVAEKVIKGIVDGCKQSDCVLLGGETAEMPGLYKEGEYDLSGCAVGIVKKDSVINGSNIVAGDVIIGLPSSGVHSNGFSLVRRVLAQSGLSLKDQLPGSDVTIAEALMAPTVIYVKQVLDLVSKGGVKGIAHITGGGFTDNIPRVFPEGLGAVIYDGSWEVPAVFKWLQEAGKIEDSEMRRTFNMGIGMILVVSPEAANRILENRGETEKFYRIGEIISGKGVTFS

SEQ ID NO: 5436 - protein, 271 aa, Glycine max
  peptide (1)..(271): Ceres Seq. ID no. 15176898
  misc_feature (105)..(271): Pfam Name: Pfam Description:  AIR synthase related protein, C-terminal domain
  misc_feature (1)..(271): NCBI GI NO: 1709925 NR Description: Phosphoribosylformylglycinamidine cyclo-ligase
  misc_feature (1)..(270): NCBI GI NO: 15233161 NR Description: phosphoribosylformylglycinamidine cyclo-ligaseprecursor
  misc_feature (1)..(270): NCBI GI NO: 34897250 NR Description: putative 5'-phosphoribosyl-5-aminoimidazolesynthetase
  misc_feature (1)..(227): NCBI GI NO: 541885 NR Description: phosphoribosylformylglycinamidine cyclo-ligase
  misc_feature (1)..(267): NCBI GI NO: 23029993 NR Description: hypothetical protein
  misc_feature (1)..(262): NCBI GI NO: 17547342 NR Description: PROBABLE PHOSPHORIBOSYLFORMYLGLYCINAMIDINE CYCLO-LIGASE
  misc_feature (1)..(267): NCBI GI NO: 34499070 NR Description: phosphoribosylformylglycinamidine cyclo-ligase
  misc_feature (1)..(266): NCBI GI NO: 23013851 NR Description: hypothetical protein
  misc_feature (1)..(262): NCBI GI NO: 39996857 NR Description: phosphoribosylformylglycinamidine cyclo-ligase
  misc_feature (1)..(264): NCBI GI NO: 15888478 NR Description: AGR_C_2111p [Agrobacterium tumefaciens]
MLAFETGIHDTIGIDLVAMSVNDIVTSGAKPLFFLDYFATGHLDVDVAEKVIKGIVDGCKQSDCVLLGGETAEMPGLYKEGEYDLSGCAVGIVKKDSVINGSNIVAGDVIIGLPSSGVHSNGFSLVRRVLAQSGLSLKDQLPGSDVTIAEALMAPTVIYVKQVLDLVSKGGVKGIAHITGGGFTDNIPRVFPEGLGAVIYDGSWEVPAVFKWLQEAGKIEDSEMRRTFNMGIGMILVVSPEAANRILENRGETEKFYRIGEIISGKGVTFS

SEQ ID NO: 5437 - DNA, 1572 bp, Glycine max
  misc_feature (1)..(1572): Ceres Seq. ID no. 15175651
gaacaatatggcccaaaacggcgacactgaggcccaaagcccatcaacccccgaggcccggcccgtcggcggcaccgagttcagctggtgcaaggctgttcccatcggcactggcgtaacggttctgagcctcctcctctcaaaaccgccgcaaatcgctgttgtccaaaatgccctccacaaactccaaaattcccaccctattctccgctccaagatccatctcgatccctccaacaacactttccacttcctcacccctcccactcccaccgtccaaatccaccccttcgatctcgcttcaacggctcacatcatccaatgccaatccgacggccacgatcccttccacgtgctcctcgagcacgagatgaaccaggaggacacgtggcgcaattacgccgccgacgtcgacgtactccacgccgccgtgtatagcatcagccacgaccgcttcgccgtgttcctccgcctccacaccgcttcgtgcgaccgcgcctccgccgtggcgctgctcaacgagctcctccgcttcgtcgccggcggcgacgaggcgagcggggagaaggtaaattctccgatcgaggatctgattcctgaggggaagacgaacaagccgttctgggcgcgtggactggacgtgctcgggtacacgctcaacgcgttcaggttcgcgaatttgagtttcgtcgacgctggctcgccccggagttcgaggataataaggttgcaactgaacgtagctgaaaccgagaacttattagctggatgcaaatcaagagggatcaaactttgtggggcacttgctgcagctggaatgattgctgcatggacctctagatgccttcctgattatcaaagagaaaagtatgctgtagtaacacttgttgattgccgctcacttcttgatccagtccttcccagcaaccatgctggattttaccattctgccgtcctgaacacacatgacgtgtgtggggaaacagaaaccttatgggagttggcaaagaaaagctacacagcctttgtaaatgctatgaactgcaacaagcatttcacagacatgtctgacctgaactacctcatgtgcaaggctattgagaaccccggtttgacgccatcgtcatcacttaggacagccttgatctctgtgtttgaagatcctgtcttcgacgactcggccgaaatgcatggagagattggattggaagactatgtaggttgtgcttctgctcatggtgttggtccatccattgccgtattcgacaccatacggaatggaaagttggattgtgcttgtatatatccatcaccccttcattcaagagagcagattcaaggactagttgatcatatgaagagaatacttgtggaaggttgtaacagtgaaaatcaacaaattgaaccataatccgcttctgaggctgggcaattggttataatttcataatcaaattcataaacttcgttgcctcttcaatttcagtctgtgactctgtgattctccttgctctgttgaatttcccagggccaggtattttaatatgaaggtagaaataaatatattgcatg

SEQ ID NO: 5438 - protein, 469 aa, Glycine max
  peptide (1)..(469): Ceres Seq. ID no. 15175652
  misc_feature (92)..(462): NCBI GI NO: 11357759 NR Description: hypothetical protein F3C22
  misc_feature (92)..(462): NCBI GI NO: 18409645 NR Description: expressed protein [Arabidopsis thaliana]
  misc_feature (92)..(462): NCBI GI NO: 14334448 NR Description: unknown protein [Arabidopsis thaliana]
  misc_feature (36)..(468): NCBI GI NO: 34908510 NR Description: P0679C12.25
  misc_feature (20)..(202): NCBI GI NO: 7485998 NR Description: hypothetical protein F22O6
  misc_feature (20)..(202): NCBI GI NO: 11357759 NR Description: hypothetical protein F3C22
  misc_feature (20)..(202): NCBI GI NO: 18409645 NR Description: expressed protein [Arabidopsis thaliana]
  misc_feature (20)..(202): NCBI GI NO: 14334448 NR Description: unknown protein [Arabidopsis thaliana]
  misc_feature (92)..(232): NCBI GI NO: 7485998 NR Description: hypothetical protein F22O6
  misc_feature (7)..(196): NCBI GI NO: 34908510 NR Description: P0679C12.25
NNMAQNGDTEAQSPSTPEARPVGGTEFSWCKAVPIGTGVTVLSLLLSKPPQIAVVQNALHKLQNSHPILRSKIHLDPSNNTFHFLTPPTPTVQIHPFDLASTAHIIQCQSDGHDPFHVLLEHEMNQEDTWRNYAADVDVLHAAVYSISHDRFAVFLRLHTASCDRASAVALLNELLRFVAGGDEASGEKVNSPIEDLIPEGKTNKPFWARGLDVLGYTLNAFRFANLSFVDAGSPRSSRIIRLQLNVAETENLLAGCKSRGIKLCGALAAAGMIAAWTSRCLPDYQREKYAVVTLVDCRSLLDPVLPSNHAGFYHSAVLNTHDVCGETETLWELAKKSYTAFVNAMNCNKHFTDMSDLNYLMCKAIENPGLTPSSSLRTALISVFEDPVFDDSAEMHGEIGLEDYVGCASAHGVGPSIAVFDTIRNGKLDCACIYPSPLHSREQIQGLVDHMKRILVEGCNSENQQIEP

SEQ ID NO: 5439 - protein, 467 aa, Glycine max
  peptide (1)..(467): Ceres Seq. ID no. 15175653
  misc_feature (90)..(460): NCBI GI NO: 11357759 NR Description: hypothetical protein F3C22
  misc_feature (90)..(460): NCBI GI NO: 18409645 NR Description: expressed protein [Arabidopsis thaliana]
  misc_feature (90)..(460): NCBI GI NO: 14334448 NR Description: unknown protein [Arabidopsis thaliana]
  misc_feature (34)..(466): NCBI GI NO: 34908510 NR Description: P0679C12.25
  misc_feature (18)..(200): NCBI GI NO: 7485998 NR Description: hypothetical protein F22O6
  misc_feature (18)..(200): NCBI GI NO: 11357759 NR Description: hypothetical protein F3C22
  misc_feature (18)..(200): NCBI GI NO: 18409645 NR Description: expressed protein [Arabidopsis thaliana]
  misc_feature (18)..(200): NCBI GI NO: 14334448 NR Description: unknown protein [Arabidopsis thaliana]
  misc_feature (90)..(230): NCBI GI NO: 7485998 NR Description: hypothetical protein F22O6
  misc_feature (5)..(194): NCBI GI NO: 34908510 NR Description: P0679C12.25
MAQNGDTEAQSPSTPEARPVGGTEFSWCKAVPIGTGVTVLSLLLSKPPQIAVVQNALHKLQNSHPILRSKIHLDPSNNTFHFLTPPTPTVQIHPFDLASTAHIIQCQSDGHDPFHVLLEHEMNQEDTWRNYAADVDVLHAAVYSISHDRFAVFLRLHTASCDRASAVALLNELLRFVAGGDEASGEKVNSPIEDLIPEGKTNKPFWARGLDVLGYTLNAFRFANLSFVDAGSPRSSRIIRLQLNVAETENLLAGCKSRGIKLCGALAAAGMIAAWTSRCLPDYQREKYAVVTLVDCRSLLDPVLPSNHAGFYHSAVLNTHDVCGETETLWELAKKSYTAFVNAMNCNKHFTDMSDLNYLMCKAIENPGLTPSSSLRTALISVFEDPVFDDSAEMHGEIGLEDYVGCASAHGVGPSIAVFDTIRNGKLDCACIYPSPLHSREQIQGLVDHMKRILVEGCNSENQQIEP

SEQ ID NO: 5440 - protein, 346 aa, Glycine max
  peptide (1)..(346): Ceres Seq. ID no. 15175654
  misc_feature (1)..(339): NCBI GI NO: 11357759 NR Description: hypothetical protein F3C22
  misc_feature (1)..(339): NCBI GI NO: 18409645 NR Description: expressed protein [Arabidopsis thaliana]
  misc_feature (1)..(339): NCBI GI NO: 14334448 NR Description: unknown protein [Arabidopsis thaliana]
  misc_feature (1)..(345): NCBI GI NO: 34908510 NR Description: P0679C12.25
  misc_feature (1)..(79): NCBI GI NO: 7485998 NR Description: hypothetical protein F22O6
  misc_feature (1)..(79): NCBI GI NO: 11357759 NR Description: hypothetical protein F3C22
  misc_feature (1)..(79): NCBI GI NO: 18409645 NR Description: expressed protein [Arabidopsis thaliana]
  misc_feature (1)..(79): NCBI GI NO: 14334448 NR Description: unknown protein [Arabidopsis thaliana]
  misc_feature (1)..(109): NCBI GI NO: 7485998 NR Description: hypothetical protein F22O6
  misc_feature (1)..(73): NCBI GI NO: 34908510 NR Description: P0679C12.25
MNQEDTWRNYAADVDVLHAAVYSISHDRFAVFLRLHTASCDRASAVALLNELLRFVAGGDEASGEKVNSPIEDLIPEGKTNKPFWARGLDVLGYTLNAFRFANLSFVDAGSPRSSRIIRLQLNVAETENLLAGCKSRGIKLCGALAAAGMIAAWTSRCLPDYQREKYAVVTLVDCRSLLDPVLPSNHAGFYHSAVLNTHDVCGETETLWELAKKSYTAFVNAMNCNKHFTDMSDLNYLMCKAIENPGLTPSSSLRTALISVFEDPVFDDSAEMHGEIGLEDYVGCASAHGVGPSIAVFDTIRNGKLDCACIYPSPLHSREQIQGLVDHMKRILVEGCNSENQQIEP

SEQ ID NO: 5441 - DNA, 1541 bp, Glycine max
  misc_feature (1)..(1541): Ceres Seq. ID no. 15174669
gaaaaatgggtaaaagcaaccccaaaattcttgcgtgtccgaaacctctgaaagaaattgcaatctaatcaaagccagagtgaatgctgttgaacgctgtctgaattttttgagctaaataaaagaagaaaaacagggtgagagagaaacagagtgagagagaaacagaggatcttcatatgaagagtgaagtgagttggagaataaagattcaacaacctgggaaagccgggagagtttttcttggagggaattttggactgcatccatgaaatcacaacagctcttgcttttgctgataggatgagcgattctgcatacagagtccaaaccacaccgcgccttgctcaatggagaatcgaaaacttggcttcttgcacttaccgcaaatcagatcctttcaagatcggaaactggaattgggttttgtttgttaaattgttcccagaaatatccaatcttacgagagacaaccccccaattgcatctttcatcgttcgggtcgttagttctgttggaggtcgccaggccatcacacatccagaaataaaggacaaagtgttaaagaacaacgaggattttgtttgggcaattgaggttccactaactgggaaattcattattgacgtagagtttcttgatttgaagactgcatccccaaacggtggagaaccttgttccatttgggcagaaggatttactcagcaaagatcaaatgcaaaagccatagagtctcttggtagaatgctaacagaaggcattcacacagacatcaccatcaatgcttctgatggaagtataggagctcatagagctgttcttgctgccagatcacctgtcttccgcagcatgttctcacataatcttcaggagaaagagttatcaaccataaacatctcagacatgtcacttgaatcatgccaggcttttctctattatctttatgggataatcaaacatgaagagtttctgactcataggctggcccttctgcaggcggctgacaagtatgacatatctgacttgagagatgtatgccacgaaagtcttctagaagatattgacacaaagaatgtacttgagaggctccaaaatgcatctctatatcagttgatgaaactgaagatgagttgcatccgatatcttgtgaagtttggtaaaatatatgaaattcgcgatgatttcaataccttcctgcgaaatgcagatagggatctgatttctgaagtcttccatgaagttcttgatgcttggaaaggattctgaagattttgcagcttcaatgaaagataggaaagcttgttgttattcaacatacccaagaaataggttgtttcaatttgttgtgcaggatttgttttgatgaacctaattctttctctcagatgattttttattattattatgattttatgtacatacttatgttgtgctcttcaaatgtaaaccataaggtattattgtttacaaaaaatgtatatcatatgaaaagaaaagtaacatattcatgaatgcaaaaggtcctcctgaattctgatgat

SEQ ID NO: 5442 - protein, 320 aa, Glycine max
  peptide (1)..(320): Ceres Seq. ID no. 15174670
  misc_feature (145)..(253): Pfam Name: Pfam Description:  BTB/POZ domain
  misc_feature (1)..(320): NCBI GI NO: 15222771 NR Description: POZ domain protein family [Arabidopsis thaliana]
  misc_feature (1)..(283): NCBI GI NO: 8778495 NR Description: F20N2.15 [Arabidopsis thaliana]
  misc_feature (1)..(318): NCBI GI NO: 15219092 NR Description: POZ domain protein family [Arabidopsis thaliana]
  misc_feature (42)..(318): NCBI GI NO: 38637050 NR Description: POZ domain protein family-like
  misc_feature (143)..(282): NCBI GI NO: 27661061 NR Description: similar to speckle-type POZ protein
  misc_feature (143)..(282): NCBI GI NO: 34858214 NR Description: similar to speckle-type POZ protein-like 1
  misc_feature (57)..(282): NCBI GI NO: 34858205 NR Description: similar to speckle-type POZ protein-like 1
  misc_feature (132)..(313): NCBI GI NO: 25150010 NR Description: speckle-type POZ protein Spop
  misc_feature (133)..(302): NCBI GI NO: 15223447 NR Description: expressed protein [Arabidopsis thaliana]
  misc_feature (143)..(320): NCBI GI NO: 34766460 NR Description: TDPOZ4 [Mus musculus]
MSDSAYRVQTTPRLAQWRIENLASCTYRKSDPFKIGNWNWVLFVKLFPEISNLTRDNPPIASFIVRVVSSVGGRQAITHPEIKDKVLKNNEDFVWAIEVPLTGKFIIDVEFLDLKTASPNGGEPCSIWAEGFTQQRSNAKAIESLGRMLTEGIHTDITINASDGSIGAHRAVLAARSPVFRSMFSHNLQEKELSTINISDMSLESCQAFLYYLYGIIKHEEFLTHRLALLQAADKYDISDLRDVCHESLLEDIDTKNVLERLQNASLYQLMKLKMSCIRYLVKFGKIYEIRDDFNTFLRNADRDLISEVFHEVLDAWKGF

SEQ ID NO: 5443 - protein, 173 aa, Glycine max
  peptide (1)..(173): Ceres Seq. ID no. 15174671
  misc_feature (1)..(106): Pfam Name: Pfam Description:  BTB/POZ domain
  misc_feature (1)..(173): NCBI GI NO: 15222771 NR Description: POZ domain protein family [Arabidopsis thaliana]
  misc_feature (1)..(136): NCBI GI NO: 8778495 NR Description: F20N2.15 [Arabidopsis thaliana]
  misc_feature (1)..(171): NCBI GI NO: 15219092 NR Description: POZ domain protein family [Arabidopsis thaliana]
  misc_feature (1)..(171): NCBI GI NO: 38637050 NR Description: POZ domain protein family-like
  misc_feature (1)..(135): NCBI GI NO: 27661061 NR Description: similar to speckle-type POZ protein
  misc_feature (1)..(135): NCBI GI NO: 34858214 NR Description: similar to speckle-type POZ protein-like 1
  misc_feature (1)..(135): NCBI GI NO: 34858205 NR Description: similar to speckle-type POZ protein-like 1
  misc_feature (1)..(166): NCBI GI NO: 25150010 NR Description: speckle-type POZ protein Spop
  misc_feature (1)..(155): NCBI GI NO: 15223447 NR Description: expressed protein [Arabidopsis thaliana]
  misc_feature (1)..(173): NCBI GI NO: 34766460 NR Description: TDPOZ4 [Mus musculus]
MLTEGIHTDITINASDGSIGAHRAVLAARSPVFRSMFSHNLQEKELSTINISDMSLESCQAFLYYLYGIIKHEEFLTHRLALLQAADKYDISDLRDVCHESLLEDIDTKNVLERLQNASLYQLMKLKMSCIRYLVKFGKIYEIRDDFNTFLRNADRDLISEVFHEVLDAWKGF

SEQ ID NO: 5444 - DNA, 1250 bp, Glycine max
  misc_feature (1)..(1250): Ceres Seq. ID no. 14307817
agttatctggaaatggtttctgtgtgaaatataaatttgataaaggcagaatataatgatgttttatttcaagatatgtttcacaaaccgacctaaagaagtgcattgtgcagttagtaaattgaattgagttttcaagttgtttaagaattttgtataaatgaggatctattatttaattacacggattgcatatattatggattcaatgcattttaaattttttcccattcatgtcctctgttaacagaagttctatataaaacttttactgtatcactttcagtcatgcagatcttgtattgagtgctaataaaaagataaccattactggtataaacctttcttattcatgttaattttgcagccttcaatacttccaattcagatcctccgaattgggcagcttatcattcttagtgtaccaggagaattcacaacaatggccgggaggcgtcttcgtgatgcagtgaagacagtgctaactagtgaagaatattttgaatttgatgacattcacattgttatagcagggttaactaatacttattcacagtacatcactacatacgaagagtaccaggtgcaaagatatgagggtgcttctacgctatatggtccacacacactcagtgcatacattcaggagtttaagaaacttgcagaggctctcgtctacggcgaaccagtagaacctggtcctcaacctcctgatctcctggagaagcaaataagcttacttccacctgttgtggtggatgcaaccccccttggtgtaaattttggggatgtttgcactgatgtaccacggaactccaccttcaagagtggtgacttggtgacagcttcgttctggtctgcatgtcctcgtaacgaccttatgactgaaggcacctttgcactggtggaatttctccaagaaaaggatgcttggactcctgcttatgatgatgatgatttctgcctgcgctataagtggtcaaggccttccaaactgagttctaggagcaaagcaaccttggaatggaggataccacagagtgtggctcctggtgtgtacagattaagacactttggagctgcaaagggcttatttggatcaattcatcactttacaggttcatccactgcgtttgtagtagcctaaagggaggcatgttgtttcagccgttactatatttgtgatttgtttttctgaactttagcagaatctattcaatcctaaagaaggatgtttcactatggatcag

SEQ ID NO: 5445 - protein, 264 aa, Glycine max
  peptide (1)..(264): Ceres Seq. ID no. 14307818
  misc_feature (6)..(263): Pfam Name: Pfam Description:  Neutral/alkaline non-lysosomal ceramidase
  misc_feature (6)..(263): NCBI GI NO: 15222380 NR Description: hypothetical protein [Arabidopsis thaliana]
  misc_feature (6)..(263): NCBI GI NO: 34912830 NR Description: P0501G01.24
  misc_feature (13)..(263): NCBI GI NO: 15224424 NR Description: expressed protein [Arabidopsis thaliana]
  misc_feature (6)..(263): NCBI GI NO: 15237790 NR Description: random slug protein - like [Arabidopsis thaliana]
  misc_feature (6)..(263): NCBI GI NO: 15982799 NR Description: AT5g58980/k19m22_180 [Arabidopsis thaliana]
  misc_feature (13)..(263): NCBI GI NO: 9759229 NR Description: neutral ceramidase [Arabidopsis thaliana]
  misc_feature (6)..(249): NCBI GI NO: 25333800 NR Description: protein F22G5.28 [imported] - Arabidopsis thaliana
  misc_feature (5)..(263): NCBI GI NO: 31200435 NR Description: ENSANGP00000018598 [Anopheles gambiae]
  misc_feature (6)..(263): NCBI GI NO: 2367392 NR Description: random slug cDNA25 protein
  misc_feature (5)..(242): NCBI GI NO: 16758458 NR Description: N-acylsphingosine amidohydrolase 2
MLILQPSILPIQILRIGQLIILSVPGEFTTMAGRRLRDAVKTVLTSEEYFEFDDIHIVIAGLTNTYSQYITTYEEYQVQRYEGASTLYGPHTLSAYIQEFKKLAEALVYGEPVEPGPQPPDLLEKQISLLPPVVVDATPLGVNFGDVCTDVPRNSTFKSGDLVTASFWSACPRNDLMTEGTFALVEFLQEKDAWTPAYDDDDFCLRYKWSRPSKLSSRSKATLEWRIPQSVAPGVYRLRHFGAAKGLFGSIHHFTGSSTAFVVA

SEQ ID NO: 5446 - protein, 234 aa, Glycine max
  peptide (1)..(234): Ceres Seq. ID no. 14307819
  misc_feature (1)..(233): Pfam Name: Pfam Description:  Neutral/alkaline non-lysosomal ceramidase
  misc_feature (1)..(233): NCBI GI NO: 15222380 NR Description: hypothetical protein [Arabidopsis thaliana]
  misc_feature (1)..(233): NCBI GI NO: 34912830 NR Description: P0501G01.24
  misc_feature (1)..(233): NCBI GI NO: 15224424 NR Description: expressed protein [Arabidopsis thaliana]
  misc_feature (1)..(233): NCBI GI NO: 15237790 NR Description: random slug protein - like [Arabidopsis thaliana]
  misc_feature (1)..(233): NCBI GI NO: 15982799 NR Description: AT5g58980/k19m22_180 [Arabidopsis thaliana]
  misc_feature (1)..(233): NCBI GI NO: 9759229 NR Description: neutral ceramidase [Arabidopsis thaliana]
  misc_feature (1)..(219): NCBI GI NO: 25333800 NR Description: protein F22G5.28 [imported] - Arabidopsis thaliana
  misc_feature (1)..(233): NCBI GI NO: 31200435 NR Description: ENSANGP00000018598 [Anopheles gambiae]
  misc_feature (1)..(233): NCBI GI NO: 2367392 NR Description: random slug cDNA25 protein
  misc_feature (1)..(212): NCBI GI NO: 16758458 NR Description: N-acylsphingosine amidohydrolase 2
MAGRRLRDAVKTVLTSEEYFEFDDIHIVIAGLTNTYSQYITTYEEYQVQRYEGASTLYGPHTLSAYIQEFKKLAEALVYGEPVEPGPQPPDLLEKQISLLPPVVVDATPLGVNFGDVCTDVPRNSTFKSGDLVTASFWSACPRNDLMTEGTFALVEFLQEKDAWTPAYDDDDFCLRYKWSRPSKLSSRSKATLEWRIPQSVAPGVYRLRHFGAAKGLFGSIHHFTGSSTAFVVA

SEQ ID NO: 5447 - DNA, 2311 bp, Glycine max
  misc_feature (1)..(2311): Ceres Seq. ID no. 14313943
aagcgtcgagcctctgttctgttcatttgcatttccatttttcacactctctctgctttcaccatgtggacacttcgtcgagcttctcttcgtctcagtacgagccaaggacttaacgcgggagctacccgtgcttcggctgtcaaattagtgccaatcactgttgaagaaaatgaggctggtatccctcagtctcgtcaaatcactcacagtagatttctgtccgctgacacattttgccgcacgggtcgggtgtccctgaaatttgctgtgggcacgcgtgaactttcctcacaagctggtgctagcagcacgaaagtggatgatgatgatttggagggtgggttgtctgagctggagatacagggaagtaatgatgaatctgatgctgacctgtctgatgaagacgaggatggtggaaaaccagttgatgagatggacttatcagatgctgacccaaccaagaaaaaatcacaaggtagaaggactcaatcggaactattcaaggcaattgcaaatgctcctgggttgtctgttgattctgctctcaataagtgggttgagcatgggaaagaactaagtcggaaggagatcttgttggctgtgcgtgagcttcggagacgtaaaatgtatgggagggctttccagctctttcagtggttagagtcaaacaagaagcttgaatttatggagagtgattatgcttctcaacttgatttgattgccaagttgcgtggcctcccaaaggcagagaaatacattgagagtgttccagaatcttttagaggctagctattataccgaacattactggctaactgtgctagtcagaacaatttgattgcaacagagaaaatattcaacaaaatgaaggacttggatttaccacttacagcatttgcttgtaaccagttgctgcttttgtataagaagctggacaagaagaaaatagctgatgttttactgctgatggaaaaagagaatgtcaaaccttctctttttacttacagaatcttaatagactcaaagggccagtccaatgatattgctggaatggagcaagtgtttgagacaatgaaggaagaaggctttgaaccagacatccaaatacaggcactcttggctaggcattacacctcatctgggcttaaagaaaaagctgaagctatgttgaaggagatggaaggtgaaaacttgaaagagaatcagtgggtatgtgcaactttgctccgcctttatgcaaacctgggaaaggctgatgaagtggagagaatttggaaggtctgtgaatcaaaacctcgagttgaggactgcctggctgcagttgaagcctggggaaagttaaataaaattgaagaagcagaggcagtttttgagatggtgtcaaagaaatggaaacttaattccaagaattactcagttcttctgaagatttatgcaaataataagatgctaacgaagggtaaggaacttgtcaagctaatggctgatagtggggtgaggataggcccattaacatgggatgcacttgtgaaactgtatatccaagctggggaagttgagaaggcagactctattttgcataaggcaatccaacagaatcagctgcagccaatgtttaccacctatttggctattttagagcagtatgcaaagaggggtgacgtccataactcggagaagattttccttaaaatgagacaagcaggttatacgtcccgaataagtcagttccaagttctaatacaggcatatgtaaacgccaaggttccagcgtatggaatcagagagaggattaaagctgataacctatttcccaacaaaacgttggctaaccagttggctctagttgatgcatttaggaaaaatgcagtttccgatttgcttgattgaggcatatttagtattctgcaagggttgtttcctacgctttccatgcaactattattattagttgaatagtagattgcacatttagtttgaatgaatgttgtcttgcactgctatctataagttagatacacttttgccttttaagcgcattatattaatgcttaaatactgcttttatgattttattatgcccgcttgtttttagttgtaaagctttctttttttaaaatttagaggctacaatcttcttcccgataggataacaaaatagtagataaatgttgttttgctccccttccctcttgagtgaaataaaattaatgctttatgtagtatcttagtatctggtcaaaatgaaaagaaaatgtagtatcttttcatcttcaaactaaataaattttactataaagttttcaac

SEQ ID NO: 5448 - protein, 341 aa, Glycine max
  peptide (1)..(341): Ceres Seq. ID no. 14313944
  misc_feature (252)..(286): Pfam Name: Pfam Description:  PPR repeat
  misc_feature (1)..(341): NCBI GI NO: 15220095 NR Description: DNA binding protein, putative
  misc_feature (1)..(341): NCBI GI NO: 15218196 NR Description: DNA-binding protein, putative
  misc_feature (1)..(341): NCBI GI NO: 6958202 NR Description: DNA-binding protein [Triticum aestivum]
  misc_feature (1)..(341): NCBI GI NO: 34903362 NR Description: unnamed protein product
  misc_feature (1)..(341): NCBI GI NO: 22331104 NR Description: DNA-binding protein, putative
  misc_feature (1)..(339): NCBI GI NO: 34900334 NR Description: P0592C06.16
  misc_feature (1)..(339): NCBI GI NO: 34394024 NR Description: putative DNA-binding protein
  misc_feature (1)..(319): NCBI GI NO: 15219808 NR Description: pentatricopeptide (PPR) repeat-containing protein
  misc_feature (1)..(340): NCBI GI NO: 15235508 NR Description: pentatricopeptide (PPR) repeat-containing protein
  misc_feature (1)..(332): NCBI GI NO: 34905294 NR Description: putative DNA-binding protein
MKDLDLPLTAFACNQLLLLYKKLDKKKIADVLLLMEKENVKPSLFTYRILIDSKGQSNDIAGMEQVFETMKEEGFEPDIQIQALLARHYTSSGLKEKAEAMLKEMEGENLKENQWVCATLLRLYANLGKADEVERIWKVCESKPRVEDCLAAVEAWGKLNKIEEAEAVFEMVSKKWKLNSKNYSVLLKIYANNKMLTKGKELVKLMADSGVRIGPLTWDALVKLYIQAGEVEKADSILHKAIQQNQLQPMFTTYLAILEQYAKRGDVHNSEKIFLKMRQAGYTSRISQFQVLIQAYVNAKVPAYGIRERIKADNLFPNKTLANQLALVDAFRKNAVSDLLD

SEQ ID NO: 5449 - protein, 307 aa, Glycine max
  peptide (1)..(307): Ceres Seq. ID no. 14313945
  misc_feature (218)..(252): Pfam Name: Pfam Description:  PPR repeat
  misc_feature (1)..(307): NCBI GI NO: 15220095 NR Description: DNA binding protein, putative
  misc_feature (1)..(307): NCBI GI NO: 15218196 NR Description: DNA-binding protein, putative
  misc_feature (1)..(307): NCBI GI NO: 6958202 NR Description: DNA-binding protein [Triticum aestivum]
  misc_feature (1)..(307): NCBI GI NO: 34903362 NR Description: unnamed protein product
  misc_feature (1)..(307): NCBI GI NO: 22331104 NR Description: DNA-binding protein, putative
  misc_feature (1)..(305): NCBI GI NO: 34900334 NR Description: P0592C06.16
  misc_feature (1)..(305): NCBI GI NO: 34394024 NR Description: putative DNA-binding protein
  misc_feature (1)..(285): NCBI GI NO: 15219808 NR Description: pentatricopeptide (PPR) repeat-containing protein
  misc_feature (1)..(306): NCBI GI NO: 15235508 NR Description: pentatricopeptide (PPR) repeat-containing protein
  misc_feature (1)..(298): NCBI GI NO: 34905294 NR Description: putative DNA-binding protein
MEKENVKPSLFTYRILIDSKGQSNDIAGMEQVFETMKEEGFEPDIQIQALLARHYTSSGLKEKAEAMLKEMEGENLKENQWVCATLLRLYANLGKADEVERIWKVCESKPRVEDCLAAVEAWGKLNKIEEAEAVFEMVSKKWKLNSKNYSVLLKIYANNKMLTKGKELVKLMADSGVRIGPLTWDALVKLYIQAGEVEKADSILHKAIQQNQLQPMFTTYLAILEQYAKRGDVHNSEKIFLKMRQAGYTSRISQFQVLIQAYVNAKVPAYGIRERIKADNLFPNKTLANQLALVDAFRKNAVSDLLD

SEQ ID NO: 5450 - protein, 279 aa, Glycine max
  peptide (1)..(279): Ceres Seq. ID no. 14313946
  misc_feature (190)..(224): Pfam Name: Pfam Description:  PPR repeat
  misc_feature (1)..(279): NCBI GI NO: 15220095 NR Description: DNA binding protein, putative
  misc_feature (1)..(279): NCBI GI NO: 15218196 NR Description: DNA-binding protein, putative
  misc_feature (1)..(279): NCBI GI NO: 6958202 NR Description: DNA-binding protein [Triticum aestivum]
  misc_feature (1)..(279): NCBI GI NO: 34903362 NR Description: unnamed protein product
  misc_feature (1)..(279): NCBI GI NO: 22331104 NR Description: DNA-binding protein, putative
  misc_feature (1)..(277): NCBI GI NO: 34900334 NR Description: P0592C06.16
  misc_feature (1)..(277): NCBI GI NO: 34394024 NR Description: putative DNA-binding protein
  misc_feature (1)..(257): NCBI GI NO: 15219808 NR Description: pentatricopeptide (PPR) repeat-containing protein
  misc_feature (1)..(278): NCBI GI NO: 15235508 NR Description: pentatricopeptide (PPR) repeat-containing protein
  misc_feature (1)..(270): NCBI GI NO: 34905294 NR Description: putative DNA-binding protein
MEQVFETMKEEGFEPDIQIQALLARHYTSSGLKEKAEAMLKEMEGENLKENQWVCATLLRLYANLGKADEVERIWKVCESKPRVEDCLAAVEAWGKLNKIEEAEAVFEMVSKKWKLNSKNYSVLLKIYANNKMLTKGKELVKLMADSGVRIGPLTWDALVKLYIQAGEVEKADSILHKAIQQNQLQPMFTTYLAILEQYAKRGDVHNSEKIFLKMRQAGYTSRISQFQVLIQAYVNAKVPAYGIRERIKADNLFPNKTLANQLALVDAFRKNAVSDLLD

SEQ ID NO: 5451 - DNA, 1569 bp, Glycine max
  misc_feature (1)..(1569): Ceres Seq. ID no. 15227110
acatttttgaatttgacagttagttttacagaacctaacaaattgctgtatcgtatatatgctatgcacacaggttctattttctcctttatttattttctaaatccttctcttattttcttatttaattattgaatttattagaatttagactctttcagttcaataaactttaaaactcttgagcctagggatacaaatatattgtatgcttccatgtgaattttcttctcttaatgcttatgagttatgactaatcttgctctcttaagggattattatattgttcccagtaggggaaaaaggatttatcatctaaggaattagggttaaattaattaaattaaagaaattggttaggaattgcataaaacatggatttaatgttacttataattagttcctttccattgctggtttaatataatatgacgtgctggaaatgatcataaatcaagtaaaacctctgcagataacatgctgtatgataatcggtaaaattaaatatacattatcaaacatacaaaggagaaaacaaaacaaatgtattccagtcttctattgaaactgggaaaattcttcgttgacaacttacaagattacacaaaattctcaatacaacataagatacgaacgagtaaagaaaaagaaattccttcaaaattgcatacatatttcaccacagactgacttaatcaatacaaaaagatgcgagacacaaaacgaaaagaagaaaataattgaaagtgctacaagaagttcatgatttactctttaacccaaccaatccagaagctagtaggaatttcagcaaagcacaacaacatcaggaccctactggtcttgcatgcagccaagaaaggtacttacaggtgatcattattgtgccacatgaaccaaacagatctcgtagttatttatcagtaacatcatcatcaatgttctttacataaaagtttgatgatgatgttacatgaaacttgattgggtgagtttttggatgcactagacatcaattatgcagtaagtagttagctgcagagatctttatttatttccaattttgaatatctaaagacaacatttctcttggggaaaatttttaagccaaacttctattttctgtgtagcatgcattttaatatttaattcgtagtttttctgtctctattgattactgcagattgaatttgagccagaatatttggtggagtttgataatccagatattgatgagaaggaacaaattccactacgggatgcacttgagaaggcgaaaccattcttgatgtcatatgaggggattcaaagtcaggaagagtgggagaaaataatggaagagacaatggcgcgagttccattgttgaaaaagattgttgatcactacagtggacctgatagggtaactaccaagaagcaacaagaagaattagacagagttgctaaaactcttcctgaaagtgcaccatcttcagtagaacaatttactaatcgttctgttatttctcttcaggtttggaactgtaaatattgatattgtgttgggcataaaatgtcttttacttgggc

SEQ ID NO: 5452 - protein, 81 aa, Glycine max
  peptide (1)..(81): Ceres Seq. ID no. 15227111
  misc_feature (1)..(75): NCBI GI NO: 18404554 NR Description: expressed protein [Arabidopsis thaliana]
  misc_feature (1)..(75): NCBI GI NO: 21593693 NR Description: Contains similarity to RNA-binding protein fromArabidopsis thaliana gi|2129727 and
  misc_feature (1)..(75): NCBI GI NO: 8671859 NR Description: Contains similarity to RNA-binding protein fromArabidopsis thaliana gi|2129727 and
MSYEGIQSQEEWEKIMEETMARVPLLKKIVDHYSGPDRVTTKKQQEELDRVAKTLPESAPSSVEQFTNRSVISLQVWNCKY

SEQ ID NO: 5453 - protein, 66 aa, Glycine max
  peptide (1)..(66): Ceres Seq. ID no. 15227112
  misc_feature (1)..(60): NCBI GI NO: 18404554 NR Description: expressed protein [Arabidopsis thaliana]
  misc_feature (1)..(60): NCBI GI NO: 21593693 NR Description: Contains similarity to RNA-binding protein fromArabidopsis thaliana gi|2129727 and
  misc_feature (1)..(60): NCBI GI NO: 8671859 NR Description: Contains similarity to RNA-binding protein fromArabidopsis thaliana gi|2129727 and
MEETMARVPLLKKIVDHYSGPDRVTTKKQQEELDRVAKTLPESAPSSVEQFTNRSVISLQVWNCKY

SEQ ID NO: 5454 - protein, 62 aa, Glycine max
  peptide (1)..(62): Ceres Seq. ID no. 15227113
  misc_feature (1)..(56): NCBI GI NO: 18404554 NR Description: expressed protein [Arabidopsis thaliana]
  misc_feature (1)..(56): NCBI GI NO: 21593693 NR Description: Contains similarity to RNA-binding protein fromArabidopsis thaliana gi|2129727 and
  misc_feature (1)..(56): NCBI GI NO: 8671859 NR Description: Contains similarity to RNA-binding protein fromArabidopsis thaliana gi|2129727 and
MARVPLLKKIVDHYSGPDRVTTKKQQEELDRVAKTLPESAPSSVEQFTNRSVISLQVWNCKY

SEQ ID NO: 5455 - DNA, 984 bp, Glycine max
  misc_feature (1)..(984): Ceres Seq. ID no. 12612005
agaccaaacaaaacactgcacctggttaaggatagagtatagcatggcacagtctagttgcaaaactttggtgcagtggttggtagcagcattgctcattgccttgttgggtggtgcacaagctgttgcaatatgtaacatagactcaagtcaattaaacttgtgtcgtgctgcagttactggtcaaaaccctccaccaccggatgagaaatgttgtgcagttgttcgccaagccaatttgcgttgcctctgcagttacaagtctaccctaccttcatttggaataaaccccaaaaatgctttggccttgcctggtaaatgtggtctgcaatggcctcctaattgttgaggtaatcatttgtagcttcaatacactttgaacatattaattactttcaggggtgtttatgaagaagttattaaatggtcctggactaccacttttctttgatatcgattaatctttatgtaacatgtatttaagattttaatttaagagaaaaagaattaataaaacttaattaaacatcttcaataatatatatatatatagactaagttgaacaattcggagcataactcaaactcattttctacatgcattggttctagtttcttaaacccggacctgccaaaagtcctttcaagcagggttgtgttagtgagacaagactcatgtgaacacccctaattacttttgcagttttaattatattaattttacgagataatgtttcatttttacagtgtagtgaagcagtcaatgaaggtcacggactcatggtcattacaagcaccttagtcttcaatattgctttcaggtgtttcattaacactgaagataaattttaagacagcatttgatatctctcgaataacggtgcagtttattttaatcagtatgtaatgtccaaaagtttgctagcagatgtgtacgtgtattagtgttgatgttgcagaggtattgaagatatatcatactct

SEQ ID NO: 5456 - protein, 115 aa, Glycine max
  peptide (1)..(115): Ceres Seq. ID no. 12612006
  misc_feature (45)..(115): Pfam Name: Pfam Description:  Protease inhibitor/seed storage/LTP family
  misc_feature (15)..(115): NCBI GI NO: 2598597 NR Description: MtN5 [Medicago truncatula]
  misc_feature (15)..(115): NCBI GI NO: 18423748 NR Description: expressed protein; protein id: At5g55450
  misc_feature (15)..(115): NCBI GI NO: 9758173 NR Description: gene_id:MTE17.12~unknown protein
  misc_feature (15)..(115): NCBI GI NO: 30696597 NR Description: protease inhibitor/seed storage/lipid transfer
  misc_feature (27)..(115): NCBI GI NO: 9758178 NR Description: gene_id:MTE17.17~unknown protein
  misc_feature (27)..(115): NCBI GI NO: 30696602 NR Description: protease inhibitor/seed storage/lipid transfer
  misc_feature (23)..(115): NCBI GI NO: 18422920 NR Description: Expressed protein; protein id: At5g48485
  misc_feature (18)..(115): NCBI GI NO: 21553364 NR Description: unknown [Arabidopsis thaliana]
  misc_feature (15)..(115): NCBI GI NO: 34915244 NR Description: P0045F02.11
  misc_feature (18)..(115): NCBI GI NO: 15238989 NR Description: putative protein; protein id: At5g48490
DQTKHCTWLRIEYSMAQSSCKTLVQWLVAALLIALLGGAQAVAICNIDSSQLNLCRAAVTGQNPPPPDEKCCAVVRQANLRCLCSYKSTLPSFGINPKNALALPGKCGLQWPPNC

SEQ ID NO: 5457 - protein, 101 aa, Glycine max
  peptide (1)..(101): Ceres Seq. ID no. 12612007
  misc_feature (31)..(101): Pfam Name: Pfam Description:  Protease inhibitor/seed storage/LTP family
  misc_feature (1)..(101): NCBI GI NO: 2598597 NR Description: MtN5 [Medicago truncatula]
  misc_feature (1)..(101): NCBI GI NO: 18423748 NR Description: expressed protein; protein id: At5g55450
  misc_feature (1)..(101): NCBI GI NO: 9758173 NR Description: gene_id:MTE17.12~unknown protein
  misc_feature (1)..(101): NCBI GI NO: 30696597 NR Description: protease inhibitor/seed storage/lipid transfer
  misc_feature (13)..(101): NCBI GI NO: 9758178 NR Description: gene_id:MTE17.17~unknown protein
  misc_feature (13)..(101): NCBI GI NO: 30696602 NR Description: protease inhibitor/seed storage/lipid transfer
  misc_feature (9)..(101): NCBI GI NO: 18422920 NR Description: Expressed protein; protein id: At5g48485
  misc_feature (4)..(101): NCBI GI NO: 21553364 NR Description: unknown [Arabidopsis thaliana]
  misc_feature (1)..(101): NCBI GI NO: 34915244 NR Description: P0045F02.11
  misc_feature (4)..(101): NCBI GI NO: 15238989 NR Description: putative protein; protein id: At5g48490
MAQSSCKTLVQWLVAALLIALLGGAQAVAICNIDSSQLNLCRAAVTGQNPPPPDEKCCAVVRQANLRCLCSYKSTLPSFGINPKNALALPGKCGLQWPPNC

SEQ ID NO: 5458 - DNA, 1484 bp, Glycine max
  misc_feature (1)..(1484): Ceres Seq. ID no. 14307831
aaattcttaagcgttcacacaagcttttcacatggaaatcggctcccccgcattccttaccctcgaagactattcttccttcttcttccctgacatggatcccattcccaattccaatgtcaacaagcgtcgtgcaaacaacgaccagttcgacttaaatgactccgcattcagccacctcctcaattccatcatggatcctaaccatttccaacaccaatccaaaccaatccaattcgactcctccccgaccaagagagctcgccgtgacctcctcgttctcgaagacagccacctcaaccccgcctcggccccgcaacagcagcgccgtctctgggtcaaggaccgctccaaggactggtggcagcggtgcaacagcccggacttccccgaagaggaattccggcgccacttccgcatgagcaaggccaccttcgacatgatctgccagcacctggactccgccgtcaccaagaagaacaccatgctccgagaagccatcccggtccggcagcgcgtggcggtgtgcatttggcgcctcgccaccggcgaccccctccgcgaagtttcgaagcgcttcggcttgggaatctccacgtgtcacaagctggttctggaggtctgctccgccatcaaaagcgttctgatgcccaagttcctccactggccaaacgaagccgaaatgaaacccatcaccgaaaaattcgagtctctctccggaatccccaacgtgggaggctcaatgtacaccactcacattcccatcattgcaccaaaatccaacgtcaacgcttacttcaacaagcgccacacagaaagaaaccagaagacatgttactctataaccgtccagggcgtggttgatcccaaaggtatttttagcgatgtttgtataggttggcctgggtctctctcagacgatcaagtgttggagaaaagcgcgttgtatcagagagccactatgggaaatttgaaggacgtgtgggtggtgggaaactcgggacaccctctgatggagggtgttttggttccttacactcatcagaatcttacttggacgcagcacgcgtttaatcagaaggttggggagattcagagcattgctaaggacgctttcgccaggctcaaagggaggtggtcttgcttgcagaagaggactgaagtcaagcttgaggacttgcccgtgcttcttggggcctgctgtgttttgcataatatttgtgagatgagggatgaggaaatgaagcctcagtggaactttgacatctttgatgatcagatgctgccccagaataataacgttcgctctaatgcttccgagcaagccagagatcagatagcgcactacttgttgcaccatggccgtgcagggactaattttttctagacttcttgggatatcacactttctcattaattcttttggctatgccttattattatagtcacttgcattataataacattctcatcatctacttctc

SEQ ID NO: 5459 - protein, 451 aa, Glycine max
  peptide (1)..(451): Ceres Seq. ID no. 14307832
  misc_feature (97)..(450): NCBI GI NO: 15239835 NR Description: expressed protein [Arabidopsis thaliana]
  misc_feature (94)..(451): NCBI GI NO: 21902022 NR Description: B1097D05.23
  misc_feature (93)..(448): NCBI GI NO: 7452044 NR Description: hypothetical protein F27B13
  misc_feature (93)..(448): NCBI GI NO: 30688449 NR Description: expressed protein [Arabidopsis thaliana]
  misc_feature (93)..(448): NCBI GI NO: 21592524 NR Description: unknown [Arabidopsis thaliana]
  misc_feature (99)..(451): NCBI GI NO: 34906342 NR Description: unnamed protein product
  misc_feature (106)..(440): NCBI GI NO: 15233248 NR Description: expressed protein [Arabidopsis thaliana]
  misc_feature (109)..(444): NCBI GI NO: 34908114 NR Description: P0031D11.14
  misc_feature (110)..(396): NCBI GI NO: 18412695 NR Description: expressed protein [Arabidopsis thaliana]
  misc_feature (115)..(406): NCBI GI NO: 25553597 NR Description: OJ1656_E11.28
MEIGSPAFLTLEDYSSFFFPDMDPIPNSNVNKRRANNDQFDLNDSAFSHLLNSIMDPNHFQHQSKPIQFDSSPTKRARRDLLVLEDSHLNPASAPQQQRRLWVKDRSKDWWQRCNSPDFPEEEFRRHFRMSKATFDMICQHLDSAVTKKNTMLREAIPVRQRVAVCIWRLATGDPLREVSKRFGLGISTCHKLVLEVCSAIKSVLMPKFLHWPNEAEMKPITEKFESLSGIPNVGGSMYTTHIPIIAPKSNVNAYFNKRHTERNQKTCYSITVQGVVDPKGIFSDVCIGWPGSLSDDQVLEKSALYQRATMGNLKDVWVVGNSGHPLMEGVLVPYTHQNLTWTQHAFNQKVGEIQSIAKDAFARLKGRWSCLQKRTEVKLEDLPVLLGACCVLHNICEMRDEEMKPQWNFDIFDDQMLPQNNNVRSNASEQARDQIAHYLLHHGRAGTNFF

SEQ ID NO: 5460 - protein, 430 aa, Glycine max
  peptide (1)..(430): Ceres Seq. ID no. 14307833
  misc_feature (76)..(429): NCBI GI NO: 15239835 NR Description: expressed protein [Arabidopsis thaliana]
  misc_feature (73)..(430): NCBI GI NO: 21902022 NR Description: B1097D05.23
  misc_feature (72)..(427): NCBI GI NO: 7452044 NR Description: hypothetical protein F27B13
  misc_feature (72)..(427): NCBI GI NO: 21592524 NR Description: unknown [Arabidopsis thaliana]
  misc_feature (72)..(427): NCBI GI NO: 30688449 NR Description: expressed protein [Arabidopsis thaliana]
  misc_feature (78)..(430): NCBI GI NO: 34906342 NR Description: unnamed protein product
  misc_feature (85)..(419): NCBI GI NO: 15233248 NR Description: expressed protein [Arabidopsis thaliana]
  misc_feature (88)..(423): NCBI GI NO: 34908114 NR Description: P0031D11.14
  misc_feature (89)..(375): NCBI GI NO: 18412695 NR Description: expressed protein [Arabidopsis thaliana]
  misc_feature (94)..(385): NCBI GI NO: 25553597 NR Description: OJ1656_E11.28
MDPIPNSNVNKRRANNDQFDLNDSAFSHLLNSIMDPNHFQHQSKPIQFDSSPTKRARRDLLVLEDSHLNPASAPQQQRRLWVKDRSKDWWQRCNSPDFPEEEFRRHFRMSKATFDMICQHLDSAVTKKNTMLREAIPVRQRVAVCIWRLATGDPLREVSKRFGLGISTCHKLVLEVCSAIKSVLMPKFLHWPNEAEMKPITEKFESLSGIPNVGGSMYTTHIPIIAPKSNVNAYFNKRHTERNQKTCYSITVQGVVDPKGIFSDVCIGWPGSLSDDQVLEKSALYQRATMGNLKDVWVVGNSGHPLMEGVLVPYTHQNLTWTQHAFNQKVGEIQSIAKDAFARLKGRWSCLQKRTEVKLEDLPVLLGACCVLHNICEMRDEEMKPQWNFDIFDDQMLPQNNNVRSNASEQARDQIAHYLLHHGRAGTNFF

SEQ ID NO: 5461 - protein, 397 aa, Glycine max
  peptide (1)..(397): Ceres Seq. ID no. 14307834
  misc_feature (43)..(396): NCBI GI NO: 15239835 NR Description: expressed protein [Arabidopsis thaliana]
  misc_feature (40)..(397): NCBI GI NO: 21902022 NR Description: B1097D05.23
  misc_feature (39)..(394): NCBI GI NO: 7452044 NR Description: hypothetical protein F27B13
  misc_feature (39)..(394): NCBI GI NO: 30688449 NR Description: expressed protein [Arabidopsis thaliana]
  misc_feature (39)..(394): NCBI GI NO: 21592524 NR Description: unknown [Arabidopsis thaliana]
  misc_feature (45)..(397): NCBI GI NO: 34906342 NR Description: unnamed protein product
  misc_feature (52)..(386): NCBI GI NO: 15233248 NR Description: expressed protein [Arabidopsis thaliana]
  misc_feature (55)..(390): NCBI GI NO: 34908114 NR Description: P0031D11.14
  misc_feature (56)..(342): NCBI GI NO: 18412695 NR Description: expressed protein [Arabidopsis thaliana]
  misc_feature (61)..(352): NCBI GI NO: 25553597 NR Description: OJ1656_E11.28
MDPNHFQHQSKPIQFDSSPTKRARRDLLVLEDSHLNPASAPQQQRRLWVKDRSKDWWQRCNSPDFPEEEFRRHFRMSKATFDMICQHLDSAVTKKNTMLREAIPVRQRVAVCIWRLATGDPLREVSKRFGLGISTCHKLVLEVCSAIKSVLMPKFLHWPNEAEMKPITEKFESLSGIPNVGGSMYTTHIPIIAPKSNVNAYFNKRHTERNQKTCYSITVQGVVDPKGIFSDVCIGWPGSLSDDQVLEKSALYQRATMGNLKDVWVVGNSGHPLMEGVLVPYTHQNLTWTQHAFNQKVGEIQSIAKDAFARLKGRWSCLQKRTEVKLEDLPVLLGACCVLHNICEMRDEEMKPQWNFDIFDDQMLPQNNNVRSNASEQARDQIAHYLLHHGRAGTNFF

SEQ ID NO: 5462 - DNA, 1344 bp, Glycine max
  misc_feature (1)..(1344): Ceres Seq. ID no. 15172070
acgctcaacctccgtcaaagcaaagaaacagtgtttcatcatttgggtttcgcagaagagagagaaacccatttctagagagagaaactcgcagtcgcagacatgtcttccttcgatgccttcgccgacgacttgaacgtcaactcttcttccactcgccagcacgacgatgacgaggacaacttctctggctacggcggctactcctccttcaccggaggattctccgccgacggagatgtcgccgtcgatcactccgccgccgcgtcgccggagatctacggcttcactgattcgaatcccgcttactctcagtctcccttcgaatcggccaccgtagagaacgaaaacggaaacggatacggcgacggcgacggtgtttttgtctccgacggtccggtgcttcctccgccgacggagatggagccggaggaaggttacgctcttcgcgagtggcgccgtcaaaatgccattcagctagaggagaaggagaaaagggaaaaagaaatgagattgaagattattgaagaagctgaggagtataaggtggctttctatgagaagaggaagcttaatgttgagactaacaaggttcagaatagagaaagggagaagttattcgtggccaatcaagagaagtttcacaaagaggcagacaaagcttattggaaaaccattgcagagctcattcctcgtgaggttcccaacattgaaaagaaaagaggcaaaaaggatcaggacaagaagccatcaattacggtcatccaaggcccaaagcctggcaaacccacggatctgtctaggttgcggcaaatactgttaaagctgaagcatacaccaccacctcacatgattcctccaccaccggctcctgctaaagacgccaaagataataaggatggaaaagagaaagcagcatcaaaagcaactggatctgcagcagaaggtgcacctgattcacagccaaaggatgccacctctaatggcctcacagaagaaccccagaaagaagctcctgccactgaggagcagcctgctgcatgattttgtctatgatactttggttccccctcaatctttcttctgccacccctttctccaccctgcagtctttaatgaatctttttgccctgctattagtttctaatgcttatcggttgcattttattattattaactttaaggttttgtatgaattaaatccattattaacaattatgacgtggagattcaatgatcatgggtttaaatagtacatccttttagacagagtatatgttggaataattgctgtctggtggtgtcaaatagacaaatacaatgtttaatatttttcagttgttc

SEQ ID NO: 5463 - protein, 313 aa, Glycine max
  peptide (1)..(313): Ceres Seq. ID no. 15172071
  misc_feature (61)..(246): Pfam Name: Pfam Description:  Clathrin light chain
  misc_feature (1)..(313): NCBI GI NO: 21536711 NR Description: unknown [Arabidopsis thaliana]
  misc_feature (1)..(313): NCBI GI NO: 18399468 NR Description: expressed protein [Arabidopsis thaliana]
  misc_feature (1)..(309): NCBI GI NO: 32487391 NR Description: OSJNBb0017I01.5
  misc_feature (4)..(309): NCBI GI NO: 34394059 NR Description: hypothetical protein
  misc_feature (41)..(279): NCBI GI NO: 18405251 NR Description: expressed protein [Arabidopsis thaliana]
  misc_feature (43)..(279): NCBI GI NO: 21593842 NR Description: unknown [Arabidopsis thaliana]
  misc_feature (100)..(258): NCBI GI NO: 18409442 NR Description: expressed protein [Arabidopsis thaliana]
  misc_feature (100)..(258): NCBI GI NO: 11291712 NR Description: hypothetical protein
MSSFDAFADDLNVNSSSTRQHDDDEDNFSGYGGYSSFTGGFSADGDVAVDHSAAASPEIYGFTDSNPAYSQSPFESATVENENGNGYGDGDGVFVSDGPVLPPPTEMEPEEGYALREWRRQNAIQLEEKEKREKEMRLKIIEEAEEYKVAFYEKRKLNVETNKVQNREREKLFVANQEKFHKEADKAYWKTIAELIPREVPNIEKKRGKKDQDKKPSITVIQGPKPGKPTDLSRLRQILLKLKHTPPPHMIPPPPAPAKDAKDNKDGKEKAASKATGSAAEGAPDSQPKDATSNGLTEEPQKEAPATEEQPAA

SEQ ID NO: 5464 - protein, 207 aa, Glycine max
  peptide (1)..(207): Ceres Seq. ID no. 15172072
  misc_feature (1)..(140): Pfam Name: Pfam Description:  Clathrin light chain
  misc_feature (1)..(207): NCBI GI NO: 21536711 NR Description: unknown [Arabidopsis thaliana]
  misc_feature (1)..(207): NCBI GI NO: 18399468 NR Description: expressed protein [Arabidopsis thaliana]
  misc_feature (1)..(203): NCBI GI NO: 32487391 NR Description: OSJNBb0017I01.5
  misc_feature (1)..(203): NCBI GI NO: 34394059 NR Description: hypothetical protein
  misc_feature (1)..(173): NCBI GI NO: 18405251 NR Description: expressed protein [Arabidopsis thaliana]
  misc_feature (1)..(173): NCBI GI NO: 21593842 NR Description: unknown [Arabidopsis thaliana]
  misc_feature (1)..(152): NCBI GI NO: 18409442 NR Description: expressed protein [Arabidopsis thaliana]
  misc_feature (1)..(152): NCBI GI NO: 11291712 NR Description: hypothetical protein
MEPEEGYALREWRRQNAIQLEEKEKREKEMRLKIIEEAEEYKVAFYEKRKLNVETNKVQNREREKLFVANQEKFHKEADKAYWKTIAELIPREVPNIEKKRGKKDQDKKPSITVIQGPKPGKPTDLSRLRQILLKLKHTPPPHMIPPPPAPAKDAKDNKDGKEKAASKATGSAAEGAPDSQPKDATSNGLTEEPQKEAPATEEQPAA

SEQ ID NO: 5465 - protein, 178 aa, Glycine max
  peptide (1)..(178): Ceres Seq. ID no. 15172073
  misc_feature (1)..(111): Pfam Name: Pfam Description:  Clathrin light chain
  misc_feature (1)..(178): NCBI GI NO: 21536711 NR Description: unknown [Arabidopsis thaliana]
  misc_feature (1)..(178): NCBI GI NO: 18399468 NR Description: expressed protein [Arabidopsis thaliana]
  misc_feature (1)..(174): NCBI GI NO: 32487391 NR Description: OSJNBb0017I01.5
  misc_feature (1)..(174): NCBI GI NO: 34394059 NR Description: hypothetical protein
  misc_feature (1)..(144): NCBI GI NO: 18405251 NR Description: expressed protein [Arabidopsis thaliana]
  misc_feature (1)..(144): NCBI GI NO: 21593842 NR Description: unknown [Arabidopsis thaliana]
  misc_feature (1)..(123): NCBI GI NO: 18409442 NR Description: expressed protein [Arabidopsis thaliana]
  misc_feature (1)..(123): NCBI GI NO: 11291712 NR Description: hypothetical protein
MRLKIIEEAEEYKVAFYEKRKLNVETNKVQNREREKLFVANQEKFHKEADKAYWKTIAELIPREVPNIEKKRGKKDQDKKPSITVIQGPKPGKPTDLSRLRQILLKLKHTPPPHMIPPPPAPAKDAKDNKDGKEKAASKATGSAAEGAPDSQPKDATSNGLTEEPQKEAPATEEQPAA

SEQ ID NO: 5466 - DNA, 1065 bp, Glycine max
  misc_feature (1)..(1065): Ceres Seq. ID no. 15178201
ggtgagtgagagtccgaatcctgaaacgctgaacagttgattgttggtagccatggctgcagcagccaccgcgaaaccgcttctgtcactgtggtttatgcttctgctaccgtcgtttcttcggatcgccgtcgcttaccgacccggcgacatcgttcccatgagctgcatgggtcaataccactcctcgcgaaccgtgtggcaggacctcattggccgccactgccccatcttcgccgtgaatcgcgaggtgttgatgcccatacccaagcccacgggttacactggtgctgatgcttataaaatattgtttcaagttggaagggaaaagtttttaatcccgtggcttcttgtggtgaatcggaaaagtacagaggttccaatgatcgaagtagatctgaggtattcaggaaatgatttgcatggtgtcacagctaaagttgtggatatgcctcatcactatgttgaagttcatcctgagattagtaaacaattctgggattctcagcattggccaaagcatatactcgtccgatatacatggaaagaacattcagagatagatgtaacttcaggattttttgttctgtttggttcagggctcatgttgtctttcatcctttcaatctatgtattgcaatcgtcacgtgacaaattggaaagatttgtaagggaaacagttgtagaaagcagtgtgcctggcgaggtggtagcaaaggttgaatgatgcatctctgatgtcaatgatgcaatgtatacattgtaatattgtattcgtgaattgacaaaatcagttttgttttggaggagggggagaaggggatgttgttcttgcatatacaaagctatgaaccagttgtttcttttcatgatgaaggaagtgacttaggtgggtgagttggagtgcattaatttatcaggaccaactgtggagtgagaagctgtaaaagttgagagattgagtgtattaattcatagggaaggctggatttgtaactacattaggttaaatacttgaaaagctatacaagaagaataaatcaaagtgtagggtattgatttggc

SEQ ID NO: 5467 - protein, 224 aa, Glycine max
  peptide (1)..(224): Ceres Seq. ID no. 15178202
  misc_feature (1)..(214): NCBI GI NO: 18409385 NR Description: expressed protein [Arabidopsis thaliana]
  misc_feature (1)..(214): NCBI GI NO: 21617957 NR Description: unknown [Arabidopsis thaliana]
  misc_feature (37)..(214): NCBI GI NO: 11280696 NR Description: hypothetical protein F26O13
MAAAATAKPLLSLWFMLLLPSFLRIAVAYRPGDIVPMSCMGQYHSSRTVWQDLIGRHCPIFAVNREVLMPIPKPTGYTGADAYKILFQVGREKFLIPWLLVVNRKSTEVPMIEVDLRYSGNDLHGVTAKVVDMPHHYVEVHPEISKQFWDSQHWPKHILVRYTWKEHSEIDVTSGFFVLFGSGLMLSFILSIYVLQSSRDKLERFVRETVVESSVPGEVVAKVE

SEQ ID NO: 5468 - protein, 209 aa, Glycine max
  peptide (1)..(209): Ceres Seq. ID no. 15178203
  misc_feature (1)..(199): NCBI GI NO: 18409385 NR Description: expressed protein [Arabidopsis thaliana]
  misc_feature (1)..(199): NCBI GI NO: 21617957 NR Description: unknown [Arabidopsis thaliana]
  misc_feature (22)..(199): NCBI GI NO: 11280696 NR Description: hypothetical protein F26O13
MLLLPSFLRIAVAYRPGDIVPMSCMGQYHSSRTVWQDLIGRHCPIFAVNREVLMPIPKPTGYTGADAYKILFQVGREKFLIPWLLVVNRKSTEVPMIEVDLRYSGNDLHGVTAKVVDMPHHYVEVHPEISKQFWDSQHWPKHILVRYTWKEHSEIDVTSGFFVLFGSGLMLSFILSIYVLQSSRDKLERFVRETVVESSVPGEVVAKVE

SEQ ID NO: 5469 - protein, 188 aa, Glycine max
  peptide (1)..(188): Ceres Seq. ID no. 15178204
  misc_feature (1)..(178): NCBI GI NO: 18409385 NR Description: expressed protein [Arabidopsis thaliana]
  misc_feature (1)..(178): NCBI GI NO: 21617957 NR Description: unknown [Arabidopsis thaliana]
  misc_feature (1)..(178): NCBI GI NO: 11280696 NR Description: hypothetical protein F26O13
MSCMGQYHSSRTVWQDLIGRHCPIFAVNREVLMPIPKPTGYTGADAYKILFQVGREKFLIPWLLVVNRKSTEVPMIEVDLRYSGNDLHGVTAKVVDMPHHYVEVHPEISKQFWDSQHWPKHILVRYTWKEHSEIDVTSGFFVLFGSGLMLSFILSIYVLQSSRDKLERFVRETVVESSVPGEVVAKVE

SEQ ID NO: 5470 - protein, 185 aa, Glycine max
  peptide (1)..(185): Ceres Seq. ID no. 15178205
  misc_feature (1)..(175): NCBI GI NO: 18409385 NR Description: expressed protein [Arabidopsis thaliana]
  misc_feature (1)..(175): NCBI GI NO: 21617957 NR Description: unknown [Arabidopsis thaliana]
  misc_feature (1)..(175): NCBI GI NO: 11280696 NR Description: hypothetical protein F26O13
MGQYHSSRTVWQDLIGRHCPIFAVNREVLMPIPKPTGYTGADAYKILFQVGREKFLIPWLLVVNRKSTEVPMIEVDLRYSGNDLHGVTAKVVDMPHHYVEVHPEISKQFWDSQHWPKHILVRYTWKEHSEIDVTSGFFVLFGSGLMLSFILSIYVLQSSRDKLERFVRETVVESSVPGEVVAKVE

SEQ ID NO: 5471 - DNA, 1130 bp, Glycine max
  misc_feature (1)..(1130): Ceres Seq. ID no. 14307760
gtttagttctctcttctctctctctcaaacctgaattcggttgtgatataaacctgcgttgcgctaaacgacaccgttttcactgtctctgagaatggaggcactaagtcgctttgtggaagaaatattcgaggatttccagggccgaagagccggcatcatcaaagcccttaccaccgatgttgaagatttctacagccaatgtgatcctgagaaggagaatttgtgcttatatggatttcctaatgagcaatgggaggtaaatttacccgttgaagaagttcctccagagcttcctgagcctgtcctaggcattaactttgctagggatggcatgctggaaaaagactggttatcattagttgctgttcatagtgatacatggttacttgcccttgccttttattttggagccagatttggatttgataaaactgacaggaaacgactattcggtatgatcaatgaactaccaacaatatttgaagttgttactggtgaagcaaagaaacaagttaaagagaagtcttcggtttcaaacaacagtggcaacaaatctaagtctaactctcaagcgcaggcttccgaaacccagggcagacagtcaaaggcattacaaacaaaagatgaggatgaagaactagaagagcaagataacgatgaacatggagataccttgtgtggggcatgtggtgagaattatggtactgatgaattctggatttgctgtgacatctgtgagaagtggttccatggcaaatgtgtgaagatcacccctgctagagcagagcttatcaagcaatacaagtgcccatcatgcagtaacaagagagctcgctaagcaaatttccatcagggacaataaaccatttgagtcttaacgaatctgattaatattttttttttctagatgtagctgatggatagtttttatgtttgacacatgtagatttcttgtctttctgtgggatttatgctgtgttggttgtctgggggaagttcattctttttccaagccttgtcctagctatggatccacatcggcataagcttcatatgaatggggttgaaaccataatctcctggccaccttaatactatggaaatgaaagtacttcgacatttgcacc

SEQ ID NO: 5472 - protein, 248 aa, Glycine max
  peptide (1)..(248): Ceres Seq. ID no. 14307761
  misc_feature (195)..(245): Pfam Name: Pfam Description:  PHD-finger
  misc_feature (6)..(248): NCBI GI NO: 15239624 NR Description: nucleic acid binding protein - like
  misc_feature (6)..(248): NCBI GI NO: 15229157 NR Description: nucleic acid binding protein-related
  misc_feature (6)..(248): NCBI GI NO: 30687843 NR Description: zinc finger protein - like [Arabidopsis thaliana]
  misc_feature (6)..(248): NCBI GI NO: 7486722 NR Description: hypothetical protein F9D12
  misc_feature (6)..(248): NCBI GI NO: 7488751 NR Description: probable zinc finger protein - alfalfa (fragment)
  misc_feature (6)..(243): NCBI GI NO: 14192880 NR Description: Putative nucleic acid binding protein
  misc_feature (6)..(243): NCBI GI NO: 34394182 NR Description: putative nucleic acid binding protein
  misc_feature (5)..(248): NCBI GI NO: 34907474 NR Description: nucleic acid binding protein
  misc_feature (4)..(248): NCBI GI NO: 15226967 NR Description: PHD-type zinc finger protein -related
  misc_feature (1)..(116): NCBI GI NO: 34896004 NR Description: Similar to Oryza sativa nucleic acid bindingprotein
MEALSRFVEEIFEDFQGRRAGIIKALTTDVEDFYSQCDPEKENLCLYGFPNEQWEVNLPVEEVPPELPEPVLGINFARDGMLEKDWLSLVAVHSDTWLLALAFYFGARFGFDKTDRKRLFGMINELPTIFEVVTGEAKKQVKEKSSVSNNSGNKSKSNSQAQASETQGRQSKALQTKDEDEELEEQDNDEHGDTLCGACGENYGTDEFWICCDICEKWFHGKCVKITPARAELIKQYKCPSCSNKRAR

SEQ ID NO: 5473 - protein, 168 aa, Glycine max
  peptide (1)..(168): Ceres Seq. ID no. 14307762
  misc_feature (115)..(165): Pfam Name: Pfam Description:  PHD-finger
  misc_feature (1)..(168): NCBI GI NO: 15239624 NR Description: nucleic acid binding protein - like
  misc_feature (1)..(168): NCBI GI NO: 15229157 NR Description: nucleic acid binding protein-related
  misc_feature (1)..(168): NCBI GI NO: 30687843 NR Description: zinc finger protein - like [Arabidopsis thaliana]
  misc_feature (1)..(168): NCBI GI NO: 7486722 NR Description: hypothetical protein F9D12
  misc_feature (1)..(168): NCBI GI NO: 7488751 NR Description: probable zinc finger protein - alfalfa (fragment)
  misc_feature (1)..(163): NCBI GI NO: 14192880 NR Description: Putative nucleic acid binding protein
  misc_feature (1)..(163): NCBI GI NO: 34394182 NR Description: putative nucleic acid binding protein
  misc_feature (1)..(168): NCBI GI NO: 34907474 NR Description: nucleic acid binding protein
  misc_feature (1)..(168): NCBI GI NO: 15226967 NR Description: PHD-type zinc finger protein -related
  misc_feature (1)..(36): NCBI GI NO: 34896004 NR Description: Similar to Oryza sativa nucleic acid bindingprotein
MLEKDWLSLVAVHSDTWLLALAFYFGARFGFDKTDRKRLFGMINELPTIFEVVTGEAKKQVKEKSSVSNNSGNKSKSNSQAQASETQGRQSKALQTKDEDEELEEQDNDEHGDTLCGACGENYGTDEFWICCDICEKWFHGKCVKITPARAELIKQYKCPSCSNKRAR

SEQ ID NO: 5474 - protein, 127 aa, Glycine max
  peptide (1)..(127): Ceres Seq. ID no. 14307763
  misc_feature (74)..(124): Pfam Name: Pfam Description:  PHD-finger
  misc_feature (1)..(127): NCBI GI NO: 15239624 NR Description: nucleic acid binding protein - like
  misc_feature (1)..(127): NCBI GI NO: 15229157 NR Description: nucleic acid binding protein-related
  misc_feature (1)..(127): NCBI GI NO: 30687843 NR Description: zinc finger protein - like [Arabidopsis thaliana]
  misc_feature (1)..(127): NCBI GI NO: 7486722 NR Description: hypothetical protein F9D12
  misc_feature (1)..(127): NCBI GI NO: 7488751 NR Description: probable zinc finger protein - alfalfa (fragment)
  misc_feature (1)..(122): NCBI GI NO: 14192880 NR Description: Putative nucleic acid binding protein
  misc_feature (1)..(122): NCBI GI NO: 34394182 NR Description: putative nucleic acid binding protein
  misc_feature (1)..(127): NCBI GI NO: 34907474 NR Description: nucleic acid binding protein
  misc_feature (1)..(127): NCBI GI NO: 15226967 NR Description: PHD-type zinc finger protein -related
  misc_feature (6)..(125): NCBI GI NO: 31210707 NR Description: ENSANGP00000012649 [Anopheles gambiae]
MINELPTIFEVVTGEAKKQVKEKSSVSNNSGNKSKSNSQAQASETQGRQSKALQTKDEDEELEEQDNDEHGDTLCGACGENYGTDEFWICCDICEKWFHGKCVKITPARAELIKQYKCPSCSNKRAR

SEQ ID NO: 5475 - DNA, 1238 bp, Glycine max
  misc_feature (1)..(1238): Ceres Seq. ID no. 15177807
aggaatttgctttgaacggaacaagaatccaatagaagaaagaagaagatgtggctttcggatcatcgattgtttcttctctgcattgtttgtggcctttacttttctctgcagttcacaacgggtcatgcagattcaaatgctggaagaactttgaatcaggagggtggtgatcatcaaatacattgctctagagaaagaagtagaacagcttggaaaatcattcaagagtatttgatgccctttgtggagaaagaaaaataccacatctcaaaaaggtgtaggcttcaccctgacaatgacatatacagagatcaggagcaacataagtttcatacagatataaacgaatggcagtgtgggttctgtaagaaaagtttctatgaagagaaacatcttgaccagcattttgacaacagacactccaatttgcttaatttgagtgaaagccagtgcatagcagatgtttgtggtgcactgcactgtgaccatgaaatgaattctggatcaaaaaaatcaaagtgcaatcctgctgctgctgcaaaaaataaacatctatgtgagagcttagccgatagttgttttcctgtcactgagggccctgcggcaagccgacttcatgaattcttcttgcaccaattctgtgatgcacacagctgcactggaaataggaaacctttctccagagggcgcaggaagaagacaaatgtgttctacatctttgtgtctattttgcttgtgatactgctgctactatactacctctacatttacttatatcagagaggaatgaaaagggaaactcaagtgctgaagcgcgtctcacaagccagcagaaagaaaaagccatcttaattgattgttctttccacaaaaagaagttctcaacctacattttcagaaagtaaaggtgtcactaatggatagagtgtgaactgcacgtaaatctacctacattacattttcagaaagttaaggtgtaactaatggatacagtcagaactgcacttggaatccagtttacgctattctgctatttgcaagagtacgtttgaaggcagaaagagattgtcagcttcaaaaatgacttctatgtgatttgctagtttgtaaaccaaattcttgtaaactttttgaacaaaaagggggctgcatgactgaatccaccttagttggccatttgcatttgattgtgcatgacagcactaacaagaaaaaataacatgaacatttgcaac

SEQ ID NO: 5476 - protein, 268 aa, Glycine max
  peptide (1)..(268): Ceres Seq. ID no. 15177808
  misc_feature (102)..(125): Pfam Name: Pfam Description:  Zinc finger, C2H2 type
  misc_feature (10)..(267): NCBI GI NO: 15237477 NR Description: zinc finger - like protein [Arabidopsis thaliana]
  misc_feature (10)..(267): NCBI GI NO: 26452757 NR Description: putative zinc finger protein
  misc_feature (1)..(268): NCBI GI NO: 18424689 NR Description: expressed protein [Arabidopsis thaliana]
  misc_feature (1)..(268): NCBI GI NO: 10177309 NR Description: gene_id:MDC12.25~unknown protein
  misc_feature (44)..(147): NCBI GI NO: 31222156 NR Description: ENSANGP00000018263 [Anopheles gambiae]
  misc_feature (44)..(147): NCBI GI NO: 19920466 NR Description: CG4133-PA [Drosophila melanogaster]
MWLSDHRLFLLCIVCGLYFSLQFTTGHADSNAGRTLNQEGGDHQIHCSRERSRTAWKIIQEYLMPFVEKEKYHISKRCRLHPDNDIYRDQEQHKFHTDINEWQCGFCKKSFYEEKHLDQHFDNRHSNLLNLSESQCIADVCGALHCDHEMNSGSKKSKCNPAAAAKNKHLCESLADSCFPVTEGPAASRLHEFFLHQFCDAHSCTGNRKPFSRGRRKKTNVFYIFVSILLVILLLLYYLYIYLYQRGMKRETQVLKRVSQASRKKKPS

SEQ ID NO: 5477 - protein, 205 aa, Glycine max
  peptide (1)..(205): Ceres Seq. ID no. 15177809
  misc_feature (39)..(62): Pfam Name: Pfam Description:  Zinc finger, C2H2 type
  misc_feature (1)..(204): NCBI GI NO: 15237477 NR Description: zinc finger - like protein [Arabidopsis thaliana]
  misc_feature (1)..(204): NCBI GI NO: 26452757 NR Description: putative zinc finger protein
  misc_feature (1)..(205): NCBI GI NO: 18424689 NR Description: expressed protein [Arabidopsis thaliana]
  misc_feature (1)..(205): NCBI GI NO: 10177309 NR Description: gene_id:MDC12.25~unknown protein
  misc_feature (1)..(84): NCBI GI NO: 31222156 NR Description: ENSANGP00000018263 [Anopheles gambiae]
  misc_feature (1)..(84): NCBI GI NO: 19920466 NR Description: CG4133-PA [Drosophila melanogaster]
MPFVEKEKYHISKRCRLHPDNDIYRDQEQHKFHTDINEWQCGFCKKSFYEEKHLDQHFDNRHSNLLNLSESQCIADVCGALHCDHEMNSGSKKSKCNPAAAAKNKHLCESLADSCFPVTEGPAASRLHEFFLHQFCDAHSCTGNRKPFSRGRRKKTNVFYIFVSILLVILLLLYYLYIYLYQRGMKRETQVLKRVSQASRKKKPS

SEQ ID NO: 5478 - DNA, 1101 bp, Glycine max
  misc_feature (1)..(1101): Ceres Seq. ID no. 14307312
attttccattttcaattttaatttcctctcaaaccctaaccctaaccctaaccctccccgtcacaaaagaaaaccctctttgtccgatcatcgtcgtcaagatgttggaactccgtctcgtgcaaggctccctcctgaagaaggttttggaatccgtcaaggagctcgtgaacgacgcgaacttcgactgctcctccaccgggttctccctccaggccatggactccagccacgtcgccctcgtcgctctcctcctccgatccgagggcttcgagcactaccgctgcgaccgcaacatctccatgggcatgaacctcaacaacatggccaagatgcttaagtgtgctggtaatgacgacatcatcaccatcaaggccgacgacggcagcgacactgtcactttcatgttcgaaagccctacacaagacaagatttctgattttgaaatgaagctgatggacattgatagtgaacacctkgggattccggaggcagagtatcatgctatggttaagatgccatcctctgagtttgctaggatctgcaaggatctcagtagtattggtgacactgttgtcatttcggttactaaggagggtgtgaagttttccaccaaaggagatattggaactgccaatatagtttgtaggcagaatacttctgtggacaagcctgaagaagcaactgtcattgagatgaatgagcccgtgtccttgacatttgctttgcgatatatgaactcttttacaaaggcaacgccattgtctaacacagttaccattagtctttcaaatgagttgccagttgttgttgagtacaagattgctgagatgggttatgtgcggttctatttggctcccaagatagaagaggatgaagaagatacgaaacctcaagtttaatctacctattagatggttgggttaggatattaggattttaatgtctttgaacttgtagctttcgtcatacatcttctgttgaagatattttaaccgtgtgagcaatgaattcacattttgtggatttcttagatgtgtattggttacctaccaccttattttccctcgatttgattgttaagaacaattcgaaacaaat

SEQ ID NO: 5479 - protein, 299 aa, Glycine max
  peptide (1)..(299): Ceres Seq. ID no. 14307313
  misc_feature (160)..(287): Pfam Name: Pfam Description:  Proliferating cell nuclear antigen
  misc_feature (34)..(298): NCBI GI NO: 3608175 NR Description: proliferating cell nuclear antigen [Pisum sativum]
  misc_feature (34)..(297): NCBI GI NO: 10946427 NR Description: proliferating cell nuclear antigen
  misc_feature (34)..(297): NCBI GI NO: 6225836 NR Description: Proliferating cell nuclear antigen (PCNA)
  misc_feature (34)..(297): NCBI GI NO: 3947727 NR Description: proliferating cell nuclear antigen
  misc_feature (34)..(297): NCBI GI NO: 25005275 NR Description: proliferating cell nuclear antigen
  misc_feature (34)..(297): NCBI GI NO: 4406225 NR Description: proliferating cell nuclear antigen II
  misc_feature (34)..(297): NCBI GI NO: 129692 NR Description: PROLIFERATING CELL NUCLEAR ANTIGEN (PCNA) (CYCLIN)
  misc_feature (34)..(297): NCBI GI NO: 100160 NR Description: proliferating cell nuclear antigen (clone 4
  misc_feature (34)..(294): NCBI GI NO: 129691 NR Description: PROLIFERATING CELL NUCLEAR ANTIGEN (PCNA) (CYCLIN)
  misc_feature (34)..(298): NCBI GI NO: 15227564 NR Description: proliferating cell nuclear antigen, PCNA -related
  misc_feature (159)..(159): Xaa is any aa, unknown or other
FPFSILISSQTLTLTLTLPVTKENPLCPIIVVKMLELRLVQGSLLKKVLESVKELVNDANFDCSSTGFSLQAMDSSHVALVALLLRSEGFEHYRCDRNISMGMNLNNMAKMLKCAGNDDIITIKADDGSDTVTFMFESPTQDKISDFEMKLMDIDSEHXGIPEAEYHAMVKMPSSEFARICKDLSSIGDTVVISVTKEGVKFSTKGDIGTANIVCRQNTSVDKPEEATVIEMNEPVSLTFALRYMNSFTKATPLSNTVTISLSNELPVVVEYKIAEMGYVRFYLAPKIEEDEEDTKPQV

SEQ ID NO: 5480 - protein, 266 aa, Glycine max
  peptide (1)..(266): Ceres Seq. ID no. 14307314
  misc_feature (127)..(254): Pfam Name: Pfam Description:  Proliferating cell nuclear antigen
  misc_feature (1)..(265): NCBI GI NO: 3608175 NR Description: proliferating cell nuclear antigen [Pisum sativum]
  misc_feature (1)..(264): NCBI GI NO: 10946427 NR Description: proliferating cell nuclear antigen
  misc_feature (1)..(264): NCBI GI NO: 6225836 NR Description: Proliferating cell nuclear antigen (PCNA)
  misc_feature (1)..(264): NCBI GI NO: 3947727 NR Description: proliferating cell nuclear antigen
  misc_feature (1)..(264): NCBI GI NO: 25005275 NR Description: proliferating cell nuclear antigen
  misc_feature (1)..(264): NCBI GI NO: 4406225 NR Description: proliferating cell nuclear antigen II
  misc_feature (1)..(264): NCBI GI NO: 129692 NR Description: PROLIFERATING CELL NUCLEAR ANTIGEN (PCNA) (CYCLIN)
  misc_feature (1)..(264): NCBI GI NO: 100160 NR Description: proliferating cell nuclear antigen (clone 4
  misc_feature (1)..(261): NCBI GI NO: 129691 NR Description: PROLIFERATING CELL NUCLEAR ANTIGEN (PCNA) (CYCLIN)
  misc_feature (1)..(265): NCBI GI NO: 15227564 NR Description: proliferating cell nuclear antigen, PCNA -related
  misc_feature (126)..(126): Xaa is any aa, unknown or other
MLELRLVQGSLLKKVLESVKELVNDANFDCSSTGFSLQAMDSSHVALVALLLRSEGFEHYRCDRNISMGMNLNNMAKMLKCAGNDDIITIKADDGSDTVTFMFESPTQDKISDFEMKLMDIDSEHXGIPEAEYHAMVKMPSSEFARICKDLSSIGDTVVISVTKEGVKFSTKGDIGTANIVCRQNTSVDKPEEATVIEMNEPVSLTFALRYMNSFTKATPLSNTVTISLSNELPVVVEYKIAEMGYVRFYLAPKIEEDEEDTKPQV

SEQ ID NO: 5481 - protein, 227 aa, Glycine max
  peptide (1)..(227): Ceres Seq. ID no. 14307315
  misc_feature (88)..(215): Pfam Name: Pfam Description:  Proliferating cell nuclear antigen
  misc_feature (1)..(226): NCBI GI NO: 3608175 NR Description: proliferating cell nuclear antigen [Pisum sativum]
  misc_feature (1)..(225): NCBI GI NO: 10946427 NR Description: proliferating cell nuclear antigen
  misc_feature (1)..(225): NCBI GI NO: 6225836 NR Description: Proliferating cell nuclear antigen (PCNA)
  misc_feature (1)..(225): NCBI GI NO: 3947727 NR Description: proliferating cell nuclear antigen
  misc_feature (1)..(225): NCBI GI NO: 25005275 NR Description: proliferating cell nuclear antigen
  misc_feature (1)..(225): NCBI GI NO: 4406225 NR Description: proliferating cell nuclear antigen II
  misc_feature (1)..(225): NCBI GI NO: 129692 NR Description: PROLIFERATING CELL NUCLEAR ANTIGEN (PCNA) (CYCLIN)
  misc_feature (1)..(225): NCBI GI NO: 100160 NR Description: proliferating cell nuclear antigen (clone 4
  misc_feature (1)..(222): NCBI GI NO: 129691 NR Description: PROLIFERATING CELL NUCLEAR ANTIGEN (PCNA) (CYCLIN)
  misc_feature (1)..(226): NCBI GI NO: 15227564 NR Description: proliferating cell nuclear antigen, PCNA -related
  misc_feature (87)..(87): Xaa is any aa, unknown or other
MDSSHVALVALLLRSEGFEHYRCDRNISMGMNLNNMAKMLKCAGNDDIITIKADDGSDTVTFMFESPTQDKISDFEMKLMDIDSEHXGIPEAEYHAMVKMPSSEFARICKDLSSIGDTVVISVTKEGVKFSTKGDIGTANIVCRQNTSVDKPEEATVIEMNEPVSLTFALRYMNSFTKATPLSNTVTISLSNELPVVVEYKIAEMGYVRFYLAPKIEEDEEDTKPQV

SEQ ID NO: 5482 - DNA, 1082 bp, Glycine max
  misc_feature (1)..(1082): Ceres Seq. ID no. 14307085
atcttcttctctaagctataagccatatacaccaaatattttttcacttgctctccatcttttttcagttcatcagtggccaggtaggccatgggaagggctccatgttgtgacaaatccaatgtgaaaagagggccttggtctcctgatgaagatgccaccctcaaaaactaccttgagaaacatggcacaggtggtaactggatagctctccccaaaaaagcaggccttaagcgttgtgggaagagctgtcgtctaagatggctaaactatctcaggcctcatattaagcttggaggtttcactgaagaggaagacaaaattatctgcaccctttatgacaccatcggaagcaggtggtcctttatagcagctcaacttcccgggagaacagacaatgatgtgaaaaatcactggaacaccaagctaaagaaaaagttcttggcaggaaacacaagtagtactgctgccacgacaagcaacaacaatgtcactttcagcaatactagttattctgatcaagttaagacccttgtcttggatcatcaaaaactgaactcagctgataattggtttgactactcctacaatgttttggaattggaacaaacaccaattccagttccttttccaatgtctcaggaattagaggcttttaattatactgctgggagtataagttgtagtgcaccaccaccctctaaggaagtttcaatgctttccaatgcagacaatcatacgctatggtttggttatgaccatgcaagtgaagatgatccaaatttgcttgagtttgtgcttgatgatgatctgctgaatcatggatttgtttctcaagacaaaagctgcagccaagttggtccaccatctggctaattaaccaagatcactcattctttctactcgtcaaaaacttgaaaaaaccaaggctacagaaaataaaggtaaaatggaatattgatcaagttattatagtatagtactagtgatgaattatatacctctaaatctaactggtgtttaaatttgtgattaaagtggttggttgaatgtggaattgtgtgagtttctgaattgttttc

SEQ ID NO: 5483 - protein, 261 aa, Glycine max
  peptide (1)..(261): Ceres Seq. ID no. 14307086
  misc_feature (14)..(62): Pfam Name: Pfam Description:  Myb-like DNA-binding domain
  misc_feature (1)..(167): NCBI GI NO: 11358686 NR Description: probable transcription factor MYB36
  misc_feature (1)..(167): NCBI GI NO: 15242793 NR Description: myb family transcription factor
  misc_feature (1)..(133): NCBI GI NO: 18419456 NR Description: blind [Lycopersicon esculentum]
  misc_feature (1)..(118): NCBI GI NO: 11273952 NR Description: myb-related transcription factor MYB68
  misc_feature (1)..(118): NCBI GI NO: 15239158 NR Description: myb DNA-binding protein (MYB68)
  misc_feature (1)..(118): NCBI GI NO: 40253739 NR Description: putative P-type R2R3 Myb protein
  misc_feature (1)..(118): NCBI GI NO: 2832408 NR Description: R2R3-MYB transcription factor
  misc_feature (1)..(118): NCBI GI NO: 15229192 NR Description: myb family transcription factor(AtMYB84)
  misc_feature (1)..(149): NCBI GI NO: 15228049 NR Description: light-regulated myb protein, putative
  misc_feature (1)..(119): NCBI GI NO: 34911254 NR Description: putative Myb-related transcription factor-l
MGRAPCCDKSNVKRGPWSPDEDATLKNYLEKHGTGGNWIALPKKAGLKRCGKSCRLRWLNYLRPHIKLGGFTEEEDKIICTLYDTIGSRWSFIAAQLPGRTDNDVKNHWNTKLKKKFLAGNTSSTAATTSNNNVTFSNTSYSDQVKTLVLDHQKLNSADNWFDYSYNVLELEQTPIPVPFPMSQELEAFNYTAGSISCSAPPPSKEVSMLSNADNHTLWFGYDHASEDDPNLLEFVLDDDLLNHGFVSQDKSCSQVGPPSG

SEQ ID NO: 5484 - DNA, 1155 bp, Glycine max
  misc_feature (1)..(1155): Ceres Seq. ID no. 14307540
agtttattttttctctctttgatcaaattcccttcccatggtctctctctcttcaattaattccatttagctttccccaaatcccaaaccctttttcgcttagatcccaatccaattgggttatggacatggcttccagtccccgcactgtagaagagatcttcaaggattacagcgccagaagaacctctgttattcgcgctctcactcacgacgttgatgaattttacggcctctgtgatccagataaggataacctgtgcctctatggacatccaaatgaggcctgggaagtaactctgccagcggaggaagttccgccagagctcccggagccggctcttggaatcaattttgctagggatggcatgaaccgcagggactggctttctctggttgctgtccacagtgattcatggttggtttctgtggccttttaccttggggctcgtcttaaccgcaatgaaaggaaacgattatttagcttgatcaatgatcttccatctgtttttgaagttgtgactgacaggaaaccagttaaggacaagccaactgcggatagtggaagcaagtctaggggaagtgccaagagatctagcgatgggcaagttaaaagcaacccaaagtttgtagatgagggttatgaggaggatgaagatgagcataatgaaacactttgtggaagctgcggcggaaattacaacgctgatgagttttggatttgctgtgacatatgtgagaggtggttccatgggaagtgtgttaagattacccctgcaaaggctgagagcataaagcaatataaatgtccatcatgcagcctgaggcggggcaggccttagactgaaagaggcgatggaatgggtacatgtgaggtgagtgttgtttcatggctgacaagatactgtaattttgttacatcacttacagaagttaatgtaatgggcatagtatcgatgctcaagggcaaatttatcagggattaagtttgtttttccagatgaaccattggtgcatgccacagggtatagaatagaacatgacaaattttaattttatgattagtttatatttagtagaatatttgcttgaactttaaatattgtaatttttttatttttaacattgtttaagaaaacaaaccttttcaacaag

SEQ ID NO: 5485 - protein, 279 aa, Glycine max
  peptide (1)..(279): Ceres Seq. ID no. 14307541
  misc_feature (225)..(272): Pfam Name: Pfam Description:  PHD-finger
  misc_feature (43)..(278): NCBI GI NO: 15229696 NR Description: nucleic acid binding protein -related
  misc_feature (44)..(278): NCBI GI NO: 15239180 NR Description: nucleic acid binding protein-related
  misc_feature (43)..(273): NCBI GI NO: 28876028 NR Description: putative PHD-finger domain containing protein
  misc_feature (43)..(273): NCBI GI NO: 29124114 NR Description: putative PHD-type zinc finger protein
  misc_feature (41)..(273): NCBI GI NO: 34900462 NR Description: putative nucleic acid binding protein
  misc_feature (46)..(278): NCBI GI NO: 15229157 NR Description: nucleic acid binding protein-related
  misc_feature (44)..(278): NCBI GI NO: 15239624 NR Description: nucleic acid binding protein - like
  misc_feature (47)..(278): NCBI GI NO: 7488751 NR Description: probable zinc finger protein - alfalfa (fragment)
  misc_feature (47)..(273): NCBI GI NO: 15223786 NR Description: nucleic acid binding protein (alfin-1) -related
  misc_feature (48)..(278): NCBI GI NO: 34907474 NR Description: nucleic acid binding protein
FIFSLFDQIPFPWSLSLQLIPFSFPQIPNPFSLRSQSNWVMDMASSPRTVEEIFKDYSARRTSVIRALTHDVDEFYGLCDPDKDNLCLYGHPNEAWEVTLPAEEVPPELPEPALGINFARDGMNRRDWLSLVAVHSDSWLVSVAFYLGARLNRNERKRLFSLINDLPSVFEVVTDRKPVKDKPTADSGSKSRGSAKRSSDGQVKSNPKFVDEGYEEDEDEHNETLCGSCGGNYNADEFWICCDICERWFHGKCVKITPAKAESIKQYKCPSCSLRRGRP

SEQ ID NO: 5486 - protein, 239 aa, Glycine max
  peptide (1)..(239): Ceres Seq. ID no. 14307542
  misc_feature (185)..(232): Pfam Name: Pfam Description:  PHD-finger
  misc_feature (3)..(238): NCBI GI NO: 15229696 NR Description: nucleic acid binding protein -related
  misc_feature (4)..(238): NCBI GI NO: 15239180 NR Description: nucleic acid binding protein-related
  misc_feature (3)..(233): NCBI GI NO: 28876028 NR Description: putative PHD-finger domain containing protein
  misc_feature (3)..(233): NCBI GI NO: 29124114 NR Description: putative PHD-type zinc finger protein
  misc_feature (1)..(233): NCBI GI NO: 34900462 NR Description: putative nucleic acid binding protein
  misc_feature (6)..(238): NCBI GI NO: 15229157 NR Description: nucleic acid binding protein-related
  misc_feature (4)..(238): NCBI GI NO: 15239624 NR Description: nucleic acid binding protein - like
  misc_feature (7)..(238): NCBI GI NO: 7488751 NR Description: probable zinc finger protein - alfalfa (fragment)
  misc_feature (7)..(233): NCBI GI NO: 15223786 NR Description: nucleic acid binding protein (alfin-1) -related
  misc_feature (8)..(238): NCBI GI NO: 34907474 NR Description: nucleic acid binding protein
MDMASSPRTVEEIFKDYSARRTSVIRALTHDVDEFYGLCDPDKDNLCLYGHPNEAWEVTLPAEEVPPELPEPALGINFARDGMNRRDWLSLVAVHSDSWLVSVAFYLGARLNRNERKRLFSLINDLPSVFEVVTDRKPVKDKPTADSGSKSRGSAKRSSDGQVKSNPKFVDEGYEEDEDEHNETLCGSCGGNYNADEFWICCDICERWFHGKCVKITPAKAESIKQYKCPSCSLRRGRP

SEQ ID NO: 5487 - protein, 237 aa, Glycine max
  peptide (1)..(237): Ceres Seq. ID no. 14307543
  misc_feature (183)..(230): Pfam Name: Pfam Description:  PHD-finger
  misc_feature (1)..(236): NCBI GI NO: 15229696 NR Description: nucleic acid binding protein -related
  misc_feature (2)..(236): NCBI GI NO: 15239180 NR Description: nucleic acid binding protein-related
  misc_feature (1)..(231): NCBI GI NO: 28876028 NR Description: putative PHD-finger domain containing protein
  misc_feature (1)..(231): NCBI GI NO: 29124114 NR Description: putative PHD-type zinc finger protein
  misc_feature (1)..(231): NCBI GI NO: 34900462 NR Description: putative nucleic acid binding protein
  misc_feature (4)..(236): NCBI GI NO: 15229157 NR Description: nucleic acid binding protein-related
  misc_feature (2)..(236): NCBI GI NO: 15239624 NR Description: nucleic acid binding protein - like
  misc_feature (5)..(236): NCBI GI NO: 7488751 NR Description: probable zinc finger protein - alfalfa (fragment)
  misc_feature (5)..(231): NCBI GI NO: 15223786 NR Description: nucleic acid binding protein (alfin-1) -related
  misc_feature (6)..(236): NCBI GI NO: 34907474 NR Description: nucleic acid binding protein
MASSPRTVEEIFKDYSARRTSVIRALTHDVDEFYGLCDPDKDNLCLYGHPNEAWEVTLPAEEVPPELPEPALGINFARDGMNRRDWLSLVAVHSDSWLVSVAFYLGARLNRNERKRLFSLINDLPSVFEVVTDRKPVKDKPTADSGSKSRGSAKRSSDGQVKSNPKFVDEGYEEDEDEHNETLCGSCGGNYNADEFWICCDICERWFHGKCVKITPAKAESIKQYKCPSCSLRRGRP

SEQ ID NO: 5488 - DNA, 1590 bp, Glycine max
  misc_feature (1)..(1590): Ceres Seq. ID no. 15176262
aattaatttaaataatttggacaaatggaaaacaagccagaagaagtaaaagcaaaccaagaaggtgaaactgagaccgttgagaatgtcgaggccacaaagcacgttgagctagatgaaggaaaagatgaacaaattgaatgtgatgacaaagaaaacaacactcagctatcttccaacgatttgcaataccttcttgcagataaagaatggaaagatgctattgtaaacttccctgaaaccgaaaagattatcagtagacttattgagctcggttttgcaaagccctccaaaatccaatccaaaactgttccttttgcacttgctaagaaagacgtcggtatcattgctcaatcacataatggttcaggaaagactctcggcttcgtgttaccagctgttctgagaattgatgccacaaagcctttgatgaaaagccagacaactttcttaccacaagcaatccttattgctccaaatgctgaactttgctctcaaattgttaagattgctgaactagtagctcaaccatttaaagatattaaggtatctggtggcagaactccagctcaccttattgttaagacttcccaaagtctagtcagtgcaattagtaaaaaggagattgatttagctaatgcagatgtccttattgttgatgaagctgatgatcaattaaaaggagacactgctcttagactcctccaaattgtatccaaactgccaaaaggagctggtttattcttcttctctgctactttcaccaaagaagccattgattatatgaaccaattctttgcaaagttgagcttaaaattcgtgttaagatatatgcttaagaccgatgagctaaaacttgacggaattgaacaatatagccgaaaatgtgaccctaatggcaaggcagactatattgctaagcttctcgataagttagaagttgatacacaagctatcatattctctaacactaagaattttgctttgagagttagtaatgaattgaaaagtaaaggtcacaatgttggcttgctaatgggtggtcttatgcctcaagaaagaagtgaaatcttgaactcatttagagaatctaagattaaagtcctgattacaaccaatcttttggcaagaggatttgatcaaagatccattggacttgttatcaacttagacgttcctagacactttggagcagaaaataataaagctgattgcgagacttacttatatagagttggaagaacaggaagatttggagacgtcggattagcaattaacttatattcaaaagaagatgaaaaagacttaatcgatcaagttgaaaagttctacaccgtagaaatcaaggatctttcaaaggaaagtggtgataatgaatttgatttaatcaacgataagcttggaaaagttgtcaagattaatagcaaaaagcgtgaagaaaacagggaaaaaatcgttaaatcctaaacctatctataaaatagttatgcgtttatttcataatatacatgcgtttacgtaaactagtttcatgtttcaaaatagcagcaaattagagtttattcatttattaaattagtctaaaatccc

SEQ ID NO: 5489 - protein, 480 aa, Glycine max
  peptide (1)..(480): Ceres Seq. ID no. 15176263
  misc_feature (80)..(283): Pfam Name: Pfam Description:  DEAD/DEAH box helicase
  misc_feature (17)..(455): NCBI GI NO: 40742655 NR Description: hypothetical protein AN7659.2
  misc_feature (4)..(471): NCBI GI NO: 32412346 NR Description: hypothetical protein [Neurospora crassa]
  misc_feature (2)..(436): NCBI GI NO: 19112808 NR Description: putative ATP-dependent cytosolic RNA helicase
  misc_feature (1)..(456): NCBI GI NO: 38511935 NR Description: DEAD (Asp-Glu-Ala-As) box polypeptide 19
  misc_feature (2)..(456): NCBI GI NO: 28436904 NR Description: Similar to DEAD/H
  misc_feature (75)..(449): NCBI GI NO: 31205465 NR Description: ENSANGP00000014950 [Anopheles gambiae]
  misc_feature (11)..(452): NCBI GI NO: 15231748 NR Description: DEAD/DEAH box helicase, putative
  misc_feature (11)..(452): NCBI GI NO: 15982881 NR Description: AT3g53110/T4D2_40 [Arabidopsis thaliana]
  misc_feature (1)..(449): NCBI GI NO: 15030051 NR Description: Ddx19 protein [Mus musculus]
  misc_feature (1)..(449): NCBI GI NO: 8922886 NR Description: hypothetical protein FLJ11126 [Homo sapiens]
MENKPEEVKANQEGETETVENVEATKHVELDEGKDEQIECDDKENNTQLSSNDLQYLLADKEWKDAIVNFPETEKIISRLIELGFAKPSKIQSKTVPFALAKKDVGIIAQSHNGSGKTLGFVLPAVLRIDATKPLMKSQTTFLPQAILIAPNAELCSQIVKIAELVAQPFKDIKVSGGRTPAHLIVKTSQSLVSAISKKEIDLANADVLIVDEADDQLKGDTALRLLQIVSKLPKGAGLFFFSATFTKEAIDYMNQFFAKLSLKFVLRYMLKTDELKLDGIEQYSRKCDPNGKADYIAKLLDKLEVDTQAIIFSNTKNFALRVSNELKSKGHNVGLLMGGLMPQERSEILNSFRESKIKVLITTNLLARGFDQRSIGLVINLDVPRHFGAENNKADCETYLYRVGRTGRFGDVGLAINLYSKEDEKDLIDQVEKFYTVEIKDLSKESGDNEFDLINDKLGKVVKINSKKREENREKIVKS

SEQ ID NO: 5490 - protein, 345 aa, Glycine max
  peptide (1)..(345): Ceres Seq. ID no. 15176264
  misc_feature (1)..(148): Pfam Name: Pfam Description:  DEAD/DEAH box helicase
  misc_feature (1)..(320): NCBI GI NO: 40742655 NR Description: hypothetical protein AN7659.2
  misc_feature (1)..(336): NCBI GI NO: 32412346 NR Description: hypothetical protein [Neurospora crassa]
  misc_feature (1)..(301): NCBI GI NO: 19112808 NR Description: putative ATP-dependent cytosolic RNA helicase
  misc_feature (1)..(321): NCBI GI NO: 38511935 NR Description: DEAD (Asp-Glu-Ala-As) box polypeptide 19
  misc_feature (1)..(321): NCBI GI NO: 28436904 NR Description: Similar to DEAD/H
  misc_feature (1)..(314): NCBI GI NO: 31205465 NR Description: ENSANGP00000014950 [Anopheles gambiae]
  misc_feature (1)..(317): NCBI GI NO: 15231748 NR Description: DEAD/DEAH box helicase, putative
  misc_feature (1)..(317): NCBI GI NO: 15982881 NR Description: AT3g53110/T4D2_40 [Arabidopsis thaliana]
  misc_feature (1)..(314): NCBI GI NO: 15030051 NR Description: Ddx19 protein [Mus musculus]
  misc_feature (1)..(314): NCBI GI NO: 8922886 NR Description: hypothetical protein FLJ11126 [Homo sapiens]
MKSQTTFLPQAILIAPNAELCSQIVKIAELVAQPFKDIKVSGGRTPAHLIVKTSQSLVSAISKKEIDLANADVLIVDEADDQLKGDTALRLLQIVSKLPKGAGLFFFSATFTKEAIDYMNQFFAKLSLKFVLRYMLKTDELKLDGIEQYSRKCDPNGKADYIAKLLDKLEVDTQAIIFSNTKNFALRVSNELKSKGHNVGLLMGGLMPQERSEILNSFRESKIKVLITTNLLARGFDQRSIGLVINLDVPRHFGAENNKADCETYLYRVGRTGRFGDVGLAINLYSKEDEKDLIDQVEKFYTVEIKDLSKESGDNEFDLINDKLGKVVKINSKKREENREKIVKS

SEQ ID NO: 5491 - DNA, 974 bp, Glycine max
  misc_feature (1)..(974): Ceres Seq. ID no. 15174694
gatatgtctcattgctggtccttttcaaacaaaattatcctgtgacttttctcctatgtaatgaataatcaaatggaaaatttcccatctttctcttttctataactccattttagtagtagttctagcctttgctcatcgattgaatttgtttaggtaatttttcacaaggcgtgagccaattatagaggaagctgtgcggtatcttattatgttttcttggtaatagtgtcatcatcaaattcaaaatgtacatatattttttgcacttttcatgttgcaggtggtatgaatggttctatagtctatgaacttgaaagacctgaaaatgctggcctgaaaaaatcagtaaaggttctgcaaaaagcaaagactcagatagatgctatccaaccagtatcttgggcggacatgattgctgtggctggagctgaagcagttgaagtatgtggaggtccacctattcaagtttcactgggcagattagatacactggtgcctgatccagaagggagacttcctgaggaatctctcaatgcttctggtttgaagaaatgtttccagagcaaaggcttttcaacacaagaacttgtggctttgtctggagcccacactattggaagtaaaggttttggaagcccaatttcttttgacaattcatattataaggttcttttggagaagccgtggacgtcttcaggtggtatgccgagtatgattgggcttccttcagatcacgctcttgttgaggatgatgaatgcttaagatggattaaaaaatacgcagacagtgagaatctattctttgaagatttcaaaaatgcgtatgtcaagctggtgaattctggtgtgaggcggaatagcttataaattcaggagttgaatgttccaacttccactgaaggggcaacttgcatttttattgactttctaacagtgtttatgcacagttgccatgaagttttgggtgcttt

SEQ ID NO: 5492 - protein, 193 aa, Glycine max
  peptide (1)..(193): Ceres Seq. ID no. 15174695
  misc_feature (1)..(167): Pfam Name: Pfam Description:  Peroxidase
  misc_feature (1)..(193): NCBI GI NO: 30689347 NR Description: ascorbate peroxidase family [Arabidopsis thaliana]
  misc_feature (1)..(187): NCBI GI NO: 27817866 NR Description: OJ1081_B12.15
  misc_feature (37)..(135): NCBI GI NO: 7487935 NR Description: L-ascorbate peroxidase homolog F10M6
  misc_feature (161)..(193): NCBI GI NO: 7487935 NR Description: L-ascorbate peroxidase homolog F10M6
  misc_feature (1)..(187): NCBI GI NO: 7489542 NR Description: L-ascorbate peroxidase (EC 1.11.1.11)
  misc_feature (1)..(193): NCBI GI NO: 5442410 NR Description: ascorbate peroxidase [Zantedeschia aethiopica]
  misc_feature (1)..(187): NCBI GI NO: 6682242 NR Description: putative ascorbate peroxidase
  misc_feature (1)..(187): NCBI GI NO: 30680940 NR Description: ascorbate peroxidase (APX) [Arabidopsis thaliana]
  misc_feature (1)..(187): NCBI GI NO: 14210363 NR Description: ascorbate peroxidase [Zantedeschia aethiopica]
  misc_feature (1)..(187): NCBI GI NO: 15080682 NR Description: peroxisome type ascorbate peroxidase
MNGSIVYELERPENAGLKKSVKVLQKAKTQIDAIQPVSWADMIAVAGAEAVEVCGGPPIQVSLGRLDTLVPDPEGRLPEESLNASGLKKCFQSKGFSTQELVALSGAHTIGSKGFGSPISFDNSYYKVLLEKPWTSSGGMPSMIGLPSDHALVEDDECLRWIKKYADSENLFFEDFKNAYVKLVNSGVRRNSL

SEQ ID NO: 5493 - protein, 152 aa, Glycine max
  peptide (1)..(152): Ceres Seq. ID no. 15174696
  misc_feature (1)..(126): Pfam Name: Pfam Description:  Peroxidase
  misc_feature (1)..(152): NCBI GI NO: 30689347 NR Description: ascorbate peroxidase family [Arabidopsis thaliana]
  misc_feature (1)..(146): NCBI GI NO: 27817866 NR Description: OJ1081_B12.15
  misc_feature (1)..(94): NCBI GI NO: 7487935 NR Description: L-ascorbate peroxidase homolog F10M6
  misc_feature (120)..(152): NCBI GI NO: 7487935 NR Description: L-ascorbate peroxidase homolog F10M6
  misc_feature (1)..(146): NCBI GI NO: 7489542 NR Description: L-ascorbate peroxidase (EC 1.11.1.11)
  misc_feature (1)..(152): NCBI GI NO: 5442410 NR Description: ascorbate peroxidase [Zantedeschia aethiopica]
  misc_feature (1)..(146): NCBI GI NO: 6682242 NR Description: putative ascorbate peroxidase
  misc_feature (1)..(146): NCBI GI NO: 30680940 NR Description: ascorbate peroxidase (APX) [Arabidopsis thaliana]
  misc_feature (1)..(146): NCBI GI NO: 14210363 NR Description: ascorbate peroxidase [Zantedeschia aethiopica]
  misc_feature (1)..(146): NCBI GI NO: 15080682 NR Description: peroxisome type ascorbate peroxidase
MIAVAGAEAVEVCGGPPIQVSLGRLDTLVPDPEGRLPEESLNASGLKKCFQSKGFSTQELVALSGAHTIGSKGFGSPISFDNSYYKVLLEKPWTSSGGMPSMIGLPSDHALVEDDECLRWIKKYADSENLFFEDFKNAYVKLVNSGVRRNSL

SEQ ID NO: 5494 - DNA, 1109 bp, Glycine max
  misc_feature (1)..(1109): Ceres Seq. ID no. 14307018
gaaactgagcatctcattaagggataatttagtgaatatgtattttatcctcttaataaaaatgtctttttgtctgaatttttatatcaacaggtatggttacaaagatgttcggaaagaaaatcaccagacttttgagcagctgctgattgagagcctagagaagtttatacgtcgtgaggctcaggagaggtcactggagagtgatggggatggtgatactggttcagaggatgagtaccctaattctagggttctcatagctcccaatgggagcgtttactcacttggtgttcctcttcttgctggttttaaggatacaagcaaccccgttttagaagaaagcacattagacgtgataagcccggtatccactgatcccctggtgtttgatgctgagcagagccttgagagtgagttatcttttattcataaggctaaagaatctggtgttgtgtatcttcttggtcatggggatataagagcaaggaaggagtcgtggtttatcaagaagttagttataaactatttttatgcctttttgagaaagaactgcagaagggggatcacaactttaagtgtaccacactcacatttgatgcaagttagcatgacatacatggtttgaaaatcaatcaattttgcagcccaaataaaacgagtggcaattctcttgaaagctacagtttgatagcaatgaagggtccctggaaaggtcttattttggattgctcaatctgaaatgttcgatcctttctagccattttggatctccaaattgtttattgtccttccagcgcgagaatccggaagtagtcctgatgtttgttgtcgttgtggattcaccatctgcatatatgggattagaaaaaggctgataacaaagagaaaatgttaaaaactaacatccctccctatgcatacaatgcacatttgcgaatgtgtcaaattcaacttaaacgcaagaaccatggacatcgagtattgtacagtggcatgccattgcccttagttttcttattctatcacctttatttgttgtttaccttcccaactctgactaggcattttcttgattgaaacacaaatgagatcatatcttttttttc

SEQ ID NO: 5495 - protein, 208 aa, Glycine max
  peptide (1)..(208): Ceres Seq. ID no. 14307019
  misc_feature (29)..(208): Pfam Name: Pfam Description:  K+ potassium transporter
  misc_feature (29)..(208): NCBI GI NO: 9955527 NR Description: potassium transport protein-like
  misc_feature (29)..(208): NCBI GI NO: 22326688 NR Description: potassium transporter, putative
  misc_feature (29)..(208): NCBI GI NO: 7488157 NR Description: probable potassium transport protein KT5 -Arabidopsis thaliana
  misc_feature (29)..(208): NCBI GI NO: 25345483 NR Description: probable potassium transporter AtKT5p (AtKT5)
  misc_feature (29)..(208): NCBI GI NO: 22329125 NR Description: potassium transporter, putative (KUP5/KT5/POT13)
  misc_feature (29)..(208): NCBI GI NO: 18250714 NR Description: putative potasium transporter
  misc_feature (29)..(208): NCBI GI NO: 38345796 NR Description: OSJNBa0085I10.13
  misc_feature (29)..(208): NCBI GI NO: 18138061 NR Description: putative potassium transporter [Vicia faba]
  misc_feature (29)..(208): NCBI GI NO: 15219006 NR Description: potassium transporter, putative
  misc_feature (29)..(208): NCBI GI NO: 38502862 NR Description: Putative potassium transporter 12 (AtPOT12)
KLSISLRDNLVNMYFILLIKMSFCLNFYINRYGYKDVRKENHQTFEQLLIESLEKFIRREAQERSLESDGDGDTGSEDEYPNSRVLIAPNGSVYSLGVPLLAGFKDTSNPVLEESTLDVISPVSTDPLVFDAEQSLESELSFIHKAKESGVVYLLGHGDIRARKESWFIKKLVINYFYAFLRKNCRRGITTLSVPHSHLMQVSMTYMV

SEQ ID NO: 5496 - protein, 196 aa, Glycine max
  peptide (1)..(196): Ceres Seq. ID no. 14307020
  misc_feature (17)..(196): Pfam Name: Pfam Description:  K+ potassium transporter
  misc_feature (17)..(196): NCBI GI NO: 9955527 NR Description: potassium transport protein-like
  misc_feature (17)..(196): NCBI GI NO: 22326688 NR Description: potassium transporter, putative
  misc_feature (17)..(196): NCBI GI NO: 7488157 NR Description: probable potassium transport protein KT5 -Arabidopsis thaliana
  misc_feature (17)..(196): NCBI GI NO: 25345483 NR Description: probable potassium transporter AtKT5p (AtKT5)
  misc_feature (17)..(196): NCBI GI NO: 22329125 NR Description: potassium transporter, putative (KUP5/KT5/POT13)
  misc_feature (17)..(196): NCBI GI NO: 18250714 NR Description: putative potasium transporter
  misc_feature (17)..(196): NCBI GI NO: 38345796 NR Description: OSJNBa0085I10.13
  misc_feature (17)..(196): NCBI GI NO: 18138061 NR Description: putative potassium transporter [Vicia faba]
  misc_feature (17)..(196): NCBI GI NO: 15219006 NR Description: potassium transporter, putative
  misc_feature (17)..(196): NCBI GI NO: 38502862 NR Description: Putative potassium transporter 12 (AtPOT12)
MYFILLIKMSFCLNFYINRYGYKDVRKENHQTFEQLLIESLEKFIRREAQERSLESDGDGDTGSEDEYPNSRVLIAPNGSVYSLGVPLLAGFKDTSNPVLEESTLDVISPVSTDPLVFDAEQSLESELSFIHKAKESGVVYLLGHGDIRARKESWFIKKLVINYFYAFLRKNCRRGITTLSVPHSHLMQVSMTYMV

SEQ ID NO: 5497 - protein, 188 aa, Glycine max
  peptide (1)..(188): Ceres Seq. ID no. 14307021
  misc_feature (9)..(188): Pfam Name: Pfam Description:  K+ potassium transporter
  misc_feature (9)..(188): NCBI GI NO: 9955527 NR Description: potassium transport protein-like
  misc_feature (9)..(188): NCBI GI NO: 22326688 NR Description: potassium transporter, putative
  misc_feature (9)..(188): NCBI GI NO: 7488157 NR Description: probable potassium transport protein KT5 -Arabidopsis thaliana
  misc_feature (9)..(188): NCBI GI NO: 22329125 NR Description: potassium transporter, putative (KUP5/KT5/POT13)
  misc_feature (9)..(188): NCBI GI NO: 25345483 NR Description: probable potassium transporter AtKT5p (AtKT5)
  misc_feature (9)..(188): NCBI GI NO: 18250714 NR Description: putative potasium transporter
  misc_feature (9)..(188): NCBI GI NO: 38345796 NR Description: OSJNBa0085I10.13
  misc_feature (9)..(188): NCBI GI NO: 18138061 NR Description: putative potassium transporter [Vicia faba]
  misc_feature (9)..(188): NCBI GI NO: 15219006 NR Description: potassium transporter, putative
  misc_feature (9)..(188): NCBI GI NO: 38502862 NR Description: Putative potassium transporter 12 (AtPOT12)
MSFCLNFYINRYGYKDVRKENHQTFEQLLIESLEKFIRREAQERSLESDGDGDTGSEDEYPNSRVLIAPNGSVYSLGVPLLAGFKDTSNPVLEESTLDVISPVSTDPLVFDAEQSLESELSFIHKAKESGVVYLLGHGDIRARKESWFIKKLVINYFYAFLRKNCRRGITTLSVPHSHLMQVSMTYMV

SEQ ID NO: 5498 - DNA, 1513 bp, Glycine max
  misc_feature (1)..(1513): Ceres Seq. ID no. 14312333
gagaagaggatgaagggagagaagagttttgggagtggcggtgcgaagagtgggtccaaatttgggagtggaaagaaagggtttggtgggaaggcagggaaggatcatgatggtgaagttaaggagatgtgggatacaattgctgggggagattctgaggatgatcaagagggtctcaggaatgtggatgatgacaactttattgatgacactggagtggaacctgcttattatggtagtgatgaaccacgttctcccggtgatgctccccaggcagaggagggtgaagaggacgaagaaattaaggatcttttcaagataggtaagaaaaagaagaagaatgagagaagtcctgcagaaatagcttatttagttgagactgtcatggctgagcttgaggttacagctgaggaggatgctgaacttaatagacaggggaagcctgccgttaataaactcaagaagttgaatcttcttacagaagtcctctcaaagaaacagcttcaactggagtttttagatcatggagtgctaactttattgaagaattggcttgagccacttcctgatggaagcttgccaaatataaatatacgcacagaagttttgaagatattgaatgattttcctatagatctagagcagtatgatagaagagaacagctgaagaagagtggtcttgggaaggtcattatgtttctatcgaagtctgatgaagaaatcaatgtgaataggaaactagccaaggagctggttgataagtggagccggcctatatttaataagagtacccggtttgaagacatgagaaatgtggaggatgatagggttccttataggagattatcagttaaaaagccggcaaataaagctgcaggaatggaatctagagacagtgatcttgatttagaactttcacagcctaggtctggacagtcctcttctaggcagcatgcatcaaggccggaagcaacacctttggattttgtggtccggccccagtctaaaattgatccagaagaaattagagcacgagcaaaacaagctgcacaagatcagcagcgtatgaagatgaataagaaattgcagcaattgagggcaccaaaaaagaagcagcttcaggctacaaaattgagcgtggaaggtcgtggtatgatcaaatatttataaatgtgaccacgttgatactggatgggtttgtttgtcctgctgcaagcttttcatataatgtgctgcctgcattgatgtggattcttctaaaggtgggctattcgttcagtgatctacatggaaatttgatggagagggatgttatgaaaatacatccgtatgctgcatttgtgtattcatctagtgcagcaggaaatccaaaatacattggacggttatgcattcgtatatatagtcaagcttgtcatcagtttaatgaaaatgtggattttgcattcgtccttggtacaagtaatctttgtagtgcagcgctgcagcagtaataccaaccaaaatacactgg

SEQ ID NO: 5499 - protein, 389 aa, Glycine max
  peptide (1)..(389): Ceres Seq. ID no. 14312334
  misc_feature (124)..(385): Pfam Name: Pfam Description:  IWS1 C-terminus
  misc_feature (2)..(389): NCBI GI NO: 34895776 NR Description: P0434B04.3
  misc_feature (16)..(389): NCBI GI NO: 15222574 NR Description: expressed protein [Arabidopsis thaliana]
  misc_feature (90)..(389): NCBI GI NO: 15234085 NR Description: hypothetical protein [Arabidopsis thaliana]
  misc_feature (9)..(385): NCBI GI NO: 31203501 NR Description: ENSANGP00000010073 [Anopheles gambiae]
  misc_feature (1)..(385): NCBI GI NO: 16552402 NR Description: unnamed protein product [Homo sapiens]
  misc_feature (1)..(385): NCBI GI NO: 21739669 NR Description: hypothetical protein [Homo sapiens]
  misc_feature (1)..(385): NCBI GI NO: 24308177 NR Description: hypothetical protein FLJ10006 [Homo sapiens]
  misc_feature (108)..(385): NCBI GI NO: 7023152 NR Description: unnamed protein product [Homo sapiens]
  misc_feature (12)..(385): NCBI GI NO: 30352010 NR Description: hypothetical protein 3000008H23 [Mus musculus]
  misc_feature (115)..(358): NCBI GI NO: 31241925 NR Description: ENSANGP00000012213 [Anopheles gambiae]
EKRMKGEKSFGSGGAKSGSKFGSGKKGFGGKAGKDHDGEVKEMWDTIAGGDSEDDQEGLRNVDDDNFIDDTGVEPAYYGSDEPRSPGDAPQAEEGEEDEEIKDLFKIGKKKKKNERSPAEIAYLVETVMAELEVTAEEDAELNRQGKPAVNKLKKLNLLTEVLSKKQLQLEFLDHGVLTLLKNWLEPLPDGSLPNINIRTEVLKILNDFPIDLEQYDRREQLKKSGLGKVIMFLSKSDEEINVNRKLAKELVDKWSRPIFNKSTRFEDMRNVEDDRVPYRRLSVKKPANKAAGMESRDSDLDLELSQPRSGQSSSRQHASRPEATPLDFVVRPQSKIDPEEIRARAKQAAQDQQRMKMNKKLQQLRAPKKKQLQATKLSVEGRGMIKYL

SEQ ID NO: 5500 - protein, 386 aa, Glycine max
  peptide (1)..(386): Ceres Seq. ID no. 14312335
  misc_feature (121)..(382): Pfam Name: Pfam Description:  IWS1 C-terminus
  misc_feature (1)..(386): NCBI GI NO: 34895776 NR Description: P0434B04.3
  misc_feature (13)..(386): NCBI GI NO: 15222574 NR Description: expressed protein [Arabidopsis thaliana]
  misc_feature (87)..(386): NCBI GI NO: 15234085 NR Description: hypothetical protein [Arabidopsis thaliana]
  misc_feature (6)..(382): NCBI GI NO: 31203501 NR Description: ENSANGP00000010073 [Anopheles gambiae]
  misc_feature (1)..(382): NCBI GI NO: 16552402 NR Description: unnamed protein product [Homo sapiens]
  misc_feature (1)..(382): NCBI GI NO: 21739669 NR Description: hypothetical protein [Homo sapiens]
  misc_feature (1)..(382): NCBI GI NO: 24308177 NR Description: hypothetical protein FLJ10006 [Homo sapiens]
  misc_feature (105)..(382): NCBI GI NO: 7023152 NR Description: unnamed protein product [Homo sapiens]
  misc_feature (9)..(382): NCBI GI NO: 30352010 NR Description: hypothetical protein 3000008H23 [Mus musculus]
  misc_feature (112)..(355): NCBI GI NO: 31241925 NR Description: ENSANGP00000012213 [Anopheles gambiae]
MKGEKSFGSGGAKSGSKFGSGKKGFGGKAGKDHDGEVKEMWDTIAGGDSEDDQEGLRNVDDDNFIDDTGVEPAYYGSDEPRSPGDAPQAEEGEEDEEIKDLFKIGKKKKKNERSPAEIAYLVETVMAELEVTAEEDAELNRQGKPAVNKLKKLNLLTEVLSKKQLQLEFLDHGVLTLLKNWLEPLPDGSLPNINIRTEVLKILNDFPIDLEQYDRREQLKKSGLGKVIMFLSKSDEEINVNRKLAKELVDKWSRPIFNKSTRFEDMRNVEDDRVPYRRLSVKKPANKAAGMESRDSDLDLELSQPRSGQSSSRQHASRPEATPLDFVVRPQSKIDPEEIRARAKQAAQDQQRMKMNKKLQQLRAPKKKQLQATKLSVEGRGMIKYL

SEQ ID NO: 5501 - protein, 347 aa, Glycine max
  peptide (1)..(347): Ceres Seq. ID no. 14312336
  misc_feature (82)..(343): Pfam Name: Pfam Description:  IWS1 C-terminus
  misc_feature (1)..(347): NCBI GI NO: 34895776 NR Description: P0434B04.3
  misc_feature (1)..(347): NCBI GI NO: 15222574 NR Description: expressed protein [Arabidopsis thaliana]
  misc_feature (48)..(347): NCBI GI NO: 15234085 NR Description: hypothetical protein [Arabidopsis thaliana]
  misc_feature (1)..(343): NCBI GI NO: 31203501 NR Description: ENSANGP00000010073 [Anopheles gambiae]
  misc_feature (1)..(343): NCBI GI NO: 16552402 NR Description: unnamed protein product [Homo sapiens]
  misc_feature (1)..(343): NCBI GI NO: 21739669 NR Description: hypothetical protein [Homo sapiens]
  misc_feature (1)..(343): NCBI GI NO: 24308177 NR Description: hypothetical protein FLJ10006 [Homo sapiens]
  misc_feature (66)..(343): NCBI GI NO: 7023152 NR Description: unnamed protein product [Homo sapiens]
  misc_feature (1)..(343): NCBI GI NO: 30352010 NR Description: hypothetical protein 3000008H23 [Mus musculus]
  misc_feature (73)..(316): NCBI GI NO: 31241925 NR Description: ENSANGP00000012213 [Anopheles gambiae]
MWDTIAGGDSEDDQEGLRNVDDDNFIDDTGVEPAYYGSDEPRSPGDAPQAEEGEEDEEIKDLFKIGKKKKKNERSPAEIAYLVETVMAELEVTAEEDAELNRQGKPAVNKLKKLNLLTEVLSKKQLQLEFLDHGVLTLLKNWLEPLPDGSLPNINIRTEVLKILNDFPIDLEQYDRREQLKKSGLGKVIMFLSKSDEEINVNRKLAKELVDKWSRPIFNKSTRFEDMRNVEDDRVPYRRLSVKKPANKAAGMESRDSDLDLELSQPRSGQSSSRQHASRPEATPLDFVVRPQSKIDPEEIRARAKQAAQDQQRMKMNKKLQQLRAPKKKQLQATKLSVEGRGMIKYL

SEQ ID NO: 5502 - DNA, 1294 bp, Glycine max
  misc_feature (1)..(1294): Ceres Seq. ID no. 15176759
gaacagaggctctgtccattaaaaccactctccaaaatttctctctccattccttgcgcttccatccatcatggccatcgcaacagagactcagcctcaacaacacaaggattcttcggaggtttcgggttcagctgcggagcaaagaaggtggacgcttaacgatttcgatatcggaaagcctcttggaaggggaaaattcggtcacgtctatttggccagagagaagactagtaatcatattgttgctttgaaagtactcttcaagagtcaattgcaacaatcccaagttgtgcatcaacttcgacgtgaagttgaaatacagagtcatctccgacatccccacattttgcgcctctatggatacttttatgatcagaaacgagtttatttgattttagagtatgcacccaaaggtgaactttacaaggaattgcaaaaatgcaaatatttcagtgaaaggcgtgcagctacttatgttgcatcattggcccgagcccttatatattgccatggaaagcatgtaatacatagggatattaaaccagagaaccttcttattggttcacagggtgagttgaaaatagcagactttgggtggtcagtgcacacattcaatcgcaggcggaccatgtgtggcacactggattaccttcctcctgagatggtggagagtgtagaacatgatgcgagtgtggatatatggagccttggtgtcttgtgctatgagtttctttatggagtccctccttttgaggctaaagaacattctgatacttacaggaggataatacaagtggatctgaagttccctcctaaaccaattgtgtcttcagctgcaaaggatctcattagtcagatgctggtcaaggattcctctcaacgtctaccattgcacaaactcctcgaacacccttggattgttcagaatgccgagccctctggtgtatataggagctagtgcaccttatcattcttatattgtattttcttaatcgtggaaatcatcaaaatagcagctgcttctaagtatttgacaacattttggttttgagatgatgcaactatttgaagtaggttgctaggttaagagaaatcacttgttatatgattgtaaaccctactccttcaagggctatataaagaataactgatgtcacttgttatttgattgtaaaccctactccttcaagggctatataaagaataactgatgtcacttgttgattgtaatccggtatactccaaaaggaaccgcccgtgttatcaatactgattttttattcgcggtatt

SEQ ID NO: 5503 - protein, 296 aa, Glycine max
  peptide (1)..(296): Ceres Seq. ID no. 15176760
  misc_feature (33)..(284): Pfam Name: Pfam Description:  Protein kinase domain
  misc_feature (1)..(295): NCBI GI NO: 15233958 NR Description: protein kinase, putative [Arabidopsis thaliana]
  misc_feature (1)..(295): NCBI GI NO: 21592557 NR Description: putative serine/threonine protein kinase
  misc_feature (19)..(295): NCBI GI NO: 15225210 NR Description: serine/threonine protein kinase, putative
  misc_feature (11)..(295): NCBI GI NO: 34906424 NR Description: putative protein kinase
  misc_feature (15)..(289): NCBI GI NO: 27923860 NR Description: Serine/threonine protein kinase Eg2
  misc_feature (24)..(289): NCBI GI NO: 1079309 NR Description: protein kinase (EC 2
  misc_feature (24)..(289): NCBI GI NO: 27923859 NR Description: Serine/threonine protein kinase Eg2-like
  misc_feature (24)..(292): NCBI GI NO: 20862949 NR Description: serine/threonine kinase 6 [Mus musculus]
  misc_feature (24)..(292): NCBI GI NO: 27923856 NR Description: Serine/threonine kinase 6
  misc_feature (24)..(292): NCBI GI NO: 33355454 NR Description: serine/threonine protein kinase 6 [Mus musculus]
MAIATETQPQQHKDSSEVSGSAAEQRRWTLNDFDIGKPLGRGKFGHVYLAREKTSNHIVALKVLFKSQLQQSQVVHQLRREVEIQSHLRHPHILRLYGYFYDQKRVYLILEYAPKGELYKELQKCKYFSERRAATYVASLARALIYCHGKHVIHRDIKPENLLIGSQGELKIADFGWSVHTFNRRRTMCGTLDYLPPEMVESVEHDASVDIWSLGVLCYEFLYGVPPFEAKEHSDTYRRIIQVDLKFPPKPIVSSAAKDLISQMLVKDSSQRLPLHKLLEHPWIVQNAEPSGVYRS

SEQ ID NO: 5504 - DNA, 733 bp, Glycine max
  misc_feature (1)..(733): Ceres Seq. ID no. 12582039
  misc_feature (326)..(326): n is a, c, t, g, unknown, or other
aaatacaaataaaaactaataattgtttagctcctacaaagtatccaaatgaagaaagtcattatcatcttagctcttcttgcagtagcttttgcaggtttttccgatgattgtctctactctcacaaccaagctagatccgtccttgggcttccaaaaatgacttattcaagcaaattagcctctacagccctcaagtacgctaaagttctggctggaactaatcacttgaaacacagtagcggtagaaataatattggtgaaaatcttgctatgggaacaaagggatcttatgacaccgaaagacttatctctttatggactanggaaaagaagaactatattcccgcaaagaaattccccaacgtatctagaactggaaactggaaggatgtcgcacattacactcagatcgtttggagaaacactaaacaagttggttgtggtaccgctactaatagcaagaacattatcatagtttgtcactacagtggtgccggtaactgggttggttcatatccctattagataatagatgatataattaatgacagctaaacattatcgtgttttttgaacaaaagaacctgattaaaaagctcaacttattttttcatttgaatgcatttacaaagttatatattactaacttctaaacattgtatgtaagtacacacatactctatacttttttaataattcaaacctcaaatgtctttaagacattgagtcc

SEQ ID NO: 5505 - protein, 159 aa, Glycine max
  peptide (1)..(159): Ceres Seq. ID no. 12582040
  misc_feature (26)..(146): Pfam Name: Pfam Description:  SCP-like extracellular protein
  misc_feature (4)..(159): NCBI GI NO: 15222865 NR Description: branched-chain amino acid aminotransferase
  misc_feature (5)..(159): NCBI GI NO: 40646968 NR Description: cytoplasmic small heat shock protein class I
  misc_feature (1)..(159): NCBI GI NO: 34914926 NR Description: rice pathogenesis-related protein class 1
  misc_feature (5)..(159): NCBI GI NO: 15625250 NR Description: pathogenesis-related protein 1b precursor
  misc_feature (5)..(159): NCBI GI NO: 6066750 NR Description: pathogenesis related protein PR-1
  misc_feature (5)..(159): NCBI GI NO: 548586 NR Description: Pathogenesis-related leaf protein 4 precursor (P4)
  misc_feature (5)..(159): NCBI GI NO: 548587 NR Description: Pathogenesis-related leaf protein 6 precursor
  misc_feature (8)..(159): NCBI GI NO: 28201315 NR Description: putative pathogenesis-related protein 1
  misc_feature (21)..(159): NCBI GI NO: 15235056 NR Description: pathogenesis-related protein 1 precursor, 19
  misc_feature (1)..(159): NCBI GI NO: 2414525 NR Description: pathogenesis-related protein
  misc_feature (93)..(93): Xaa is any aa, unknown or other
MKKVIIILALLAVAFAGFSDDCLYSHNQARSVLGLPKMTYSSKLASTALKYAKVLAGTNHLKHSSGRNNIGENLAMGTKGSYDTERLISLWTXEKKNYIPAKKFPNVSRTGNWKDVAHYTQIVWRNTKQVGCGTATNSKNIIIVCHYSGAGNWVGSYPY

SEQ ID NO: 5506 - protein, 122 aa, Glycine max
  peptide (1)..(122): Ceres Seq. ID no. 12582041
  misc_feature (1)..(109): Pfam Name: Pfam Description:  SCP-like extracellular protein
  misc_feature (1)..(122): NCBI GI NO: 15222865 NR Description: branched-chain amino acid aminotransferase
  misc_feature (1)..(122): NCBI GI NO: 40646968 NR Description: cytoplasmic small heat shock protein class I
  misc_feature (1)..(122): NCBI GI NO: 34914926 NR Description: rice pathogenesis-related protein class 1
  misc_feature (1)..(122): NCBI GI NO: 15625250 NR Description: pathogenesis-related protein 1b precursor
  misc_feature (1)..(122): NCBI GI NO: 6066750 NR Description: pathogenesis related protein PR-1
  misc_feature (1)..(122): NCBI GI NO: 548586 NR Description: Pathogenesis-related leaf protein 4 precursor (P4)
  misc_feature (1)..(122): NCBI GI NO: 548587 NR Description: Pathogenesis-related leaf protein 6 precursor
  misc_feature (1)..(122): NCBI GI NO: 28201315 NR Description: putative pathogenesis-related protein 1
  misc_feature (1)..(122): NCBI GI NO: 15235056 NR Description: pathogenesis-related protein 1 precursor, 19
  misc_feature (1)..(122): NCBI GI NO: 2414525 NR Description: pathogenesis-related protein
  misc_feature (56)..(56): Xaa is any aa, unknown or other
MTYSSKLASTALKYAKVLAGTNHLKHSSGRNNIGENLAMGTKGSYDTERLISLWTXEKKNYIPAKKFPNVSRTGNWKDVAHYTQIVWRNTKQVGCGTATNSKNIIIVCHYSGAGNWVGSYPY

SEQ ID NO: 5507 - protein, 84 aa, Glycine max
  peptide (1)..(84): Ceres Seq. ID no. 12582042
  misc_feature (1)..(71): Pfam Name: Pfam Description:  SCP-like extracellular protein
  misc_feature (1)..(84): NCBI GI NO: 15222865 NR Description: branched-chain amino acid aminotransferase
  misc_feature (1)..(84): NCBI GI NO: 40646968 NR Description: cytoplasmic small heat shock protein class I
  misc_feature (1)..(84): NCBI GI NO: 34914926 NR Description: rice pathogenesis-related protein class 1
  misc_feature (1)..(84): NCBI GI NO: 15625250 NR Description: pathogenesis-related protein 1b precursor
  misc_feature (1)..(84): NCBI GI NO: 6066750 NR Description: pathogenesis related protein PR-1
  misc_feature (1)..(84): NCBI GI NO: 548586 NR Description: Pathogenesis-related leaf protein 4 precursor (P4)
  misc_feature (1)..(84): NCBI GI NO: 548587 NR Description: Pathogenesis-related leaf protein 6 precursor
  misc_feature (1)..(84): NCBI GI NO: 28201315 NR Description: putative pathogenesis-related protein 1
  misc_feature (1)..(84): NCBI GI NO: 15235056 NR Description: pathogenesis-related protein 1 precursor, 19
  misc_feature (1)..(84): NCBI GI NO: 2414525 NR Description: pathogenesis-related protein
  misc_feature (18)..(18): Xaa is any aa, unknown or other
MGTKGSYDTERLISLWTXEKKNYIPAKKFPNVSRTGNWKDVAHYTQIVWRNTKQVGCGTATNSKNIIIVCHYSGAGNWVGSYPY

SEQ ID NO: 5508 - DNA, 1229 bp, Glycine max
  misc_feature (1)..(1229): Ceres Seq. ID no. 14310369
acactacagccacttctatagcttcatttaagaatggcactttctcctattcgttcttctactttctcttcatcatcagctattgttacattagctgtgttacttcttcttacaaggacctcttcagctaccctctcaaagaacttctattctaagacatgtccaaacgttttcaacacggtaaaatctgtagtaaaatctgctgtggccaaagaacctcgcattggagcttctattgttcgcctcttcttccatgactgctttgttcaaggttgtgatggaccaatactacttgatgacactccaaccttccagggggagaagactgcagctgctaacaacaattcagtgagaggttatgaattaatcgatgatatcaagtctaaggtcgagaaaatatgccccggtgtggtctcatgtgctgatatcttggacattgcttctcgtgactctgttgttcttcttggaggaccattttggaatgttagacttggaagaagggattctagaagtgccaatttcactgctgcaaacactggtgttattccacctcccacatctaacctcaccaaccttatcacaaggtttcaagatcaaggactctctgctagggacatggttgccttatctggagctcacacatttggcaaagcaaggtgtactagtttcagagatcgcatatacaatcaaaccaacattgacagaacatttgcattggccaggcagaggaggtgccctaggaccaatggcacaggtgacaacaatctagcaaatctagacttcagaactccaaatcattttgacaacaactacttcaaaaaccttctcattaaaaggggactcctcaattctgatcaagtgcttttcaatggtggatccactgattcactggtcagaacatacagccagaataacaaggcctttgattctgactttgttaaagcaatgattaggatgggagatatcaaacccttaactgggtcacaaggggagattaggaagaactgcaggagagtgaattaattagaagtgacacataaatttgtttggtgtacactttgtacccttcaaaagggggaagttgtttggtgtgttgggttgtttaagtgatttctcatgacttggaaattgtgaattgtttgtttagttcagtttaaattgtacttgtgtaaccttataattgtattatggaataaattataaggcattttgccttttgtaccaaaaat

SEQ ID NO: 5509 - protein, 329 aa, Glycine max
  peptide (1)..(329): Ceres Seq. ID no. 14310370
  misc_feature (50)..(293): Pfam Name: Pfam Description:  Peroxidase
  misc_feature (8)..(329): NCBI GI NO: 39777536 NR Description: peroxidase precursor [Quercus suber]
  misc_feature (7)..(329): NCBI GI NO: 39777532 NR Description: peroxidase precursor [Quercus suber]
  misc_feature (9)..(329): NCBI GI NO: 32351452 NR Description: class III peroxidase [Gossypium hirsutum]
  misc_feature (15)..(329): NCBI GI NO: 5381253 NR Description: peroxidase [Nicotiana tabacum]
  misc_feature (12)..(329): NCBI GI NO: 19698446 NR Description: class III peroxidase [Gossypium hirsutum]
  misc_feature (17)..(329): NCBI GI NO: 15237187 NR Description: peroxidase, putative [Arabidopsis thaliana]
  misc_feature (17)..(329): NCBI GI NO: 21537247 NR Description: peroxidase [Arabidopsis thaliana]
  misc_feature (10)..(329): NCBI GI NO: 5002344 NR Description: peroxidase 3 precursor [Phaseolus vulgaris]
  misc_feature (13)..(329): NCBI GI NO: 28400798 NR Description: peroxidase [Asparagus officinalis]
  misc_feature (29)..(329): NCBI GI NO: 28400796 NR Description: peroxidase [Asparagus officinalis]
MALSPIRSSTFSSSSAIVTLAVLLLLTRTSSATLSKNFYSKTCPNVFNTVKSVVKSAVAKEPRIGASIVRLFFHDCFVQGCDGPILLDDTPTFQGEKTAAANNNSVRGYELIDDIKSKVEKICPGVVSCADILDIASRDSVVLLGGPFWNVRLGRRDSRSANFTAANTGVIPPPTSNLTNLITRFQDQGLSARDMVALSGAHTFGKARCTSFRDRIYNQTNIDRTFALARQRRCPRTNGTGDNNLANLDFRTPNHFDNNYFKNLLIKRGLLNSDQVLFNGGSTDSLVRTYSQNNKAFDSDFVKAMIRMGDIKPLTGSQGEIRKNCRRVN

SEQ ID NO: 5510 - DNA, 897 bp, Glycine max
  misc_feature (1)..(897): Ceres Seq. ID no. 13642436
aaggaccacatgaagatggttacaactggagaaaatatggtcagaaagacatccttggagccaaatatcccagaagttactataggtgcaccttccgcagcactcagggctgttgggcaacaaagcaagtgcagagatcagatgaagatcccacaatgtttgacataacttacagaggaaatcatacctgttctcagggaaacaatgccgttctgccacccaagtcaccagaaaaacatgagaaaccagcacacagtcataacattgacattcaccatgcacaggcatcacaagaaagccttgcaaagttcagaagtatcttgtctgtcaacacagataatctggacaatggagatatggcatatgctttcactttcccttccacttcatttggatgcatgaaacaagaaaaccacagcttgattcctatggccctggagaatgactccttcttaagcgacctataccaaacacacctgttatccccaacaacaccagaatcaaattatttcccatctccaactttccagatgaatgagtttgatgggatctacaacaggtcacattcgaaatccgatatcaatgagatcatttccaccaacacatcagcaaccaattctccaattcctgatttcaatttctcacttgatccggtggaaattgatccaaatttccctttcaataccccaggatttttgtgctgattgcactataaatggaatactataagaatgtagtcttcataaaacgggacaatttcagacagcagtagaattgtagaataaagaatgagcaactgcagcacttatgaacgtccttgtagtcaatatcagaattgcaattttggctccgtgttagcaattagcagtatgcactttcaaataaaatagtttctgc

SEQ ID NO: 5511 - protein, 233 aa, Glycine max
  peptide (1)..(233): Ceres Seq. ID no. 13642437
  misc_feature (1)..(136): NCBI GI NO: 15236622 NR Description: WRKY family transcription factor
  misc_feature (1)..(187): NCBI GI NO: 15237039 NR Description: WRKY family transcription factor
  misc_feature (1)..(187): NCBI GI NO: 30681651 NR Description: WRKY family transcription factor
  misc_feature (1)..(76): NCBI GI NO: 40253471 NR Description: putative transcription factor WRKY5
  misc_feature (1)..(66): NCBI GI NO: 34911952 NR Description: P0694A04.6
  misc_feature (4)..(185): NCBI GI NO: 18420751 NR Description: WRKY family transcription factor
  misc_feature (4)..(226): NCBI GI NO: 34898262 NR Description: WRKY family transcription factor-like protein
  misc_feature (1)..(167): NCBI GI NO: 15225975 NR Description: WRKY family transcription factor
  misc_feature (4)..(81): NCBI GI NO: 15228907 NR Description: WRKY family transcription factor
  misc_feature (4)..(81): NCBI GI NO: 21592990 NR Description: DNA-binding protein-like [Arabidopsis thaliana]
GPHEDGYNWRKYGQKDILGAKYPRSYYRCTFRSTQGCWATKQVQRSDEDPTMFDITYRGNHTCSQGNNAVLPPKSPEKHEKPAHSHNIDIHHAQASQESLAKFRSILSVNTDNLDNGDMAYAFTFPSTSFGCMKQENHSLIPMALENDSFLSDLYQTHLLSPTTPESNYFPSPTFQMNEFDGIYNRSHSKSDINEIISTNTSATNSPIPDFNFSLDPVEIDPNFPFNTPGFLC

SEQ ID NO: 5512 - protein, 182 aa, Glycine max
  peptide (1)..(182): Ceres Seq. ID no. 13642438
  misc_feature (1)..(85): NCBI GI NO: 15236622 NR Description: WRKY family transcription factor
  misc_feature (1)..(136): NCBI GI NO: 15237039 NR Description: WRKY family transcription factor
  misc_feature (1)..(136): NCBI GI NO: 30681651 NR Description: WRKY family transcription factor
  misc_feature (1)..(25): NCBI GI NO: 40253471 NR Description: putative transcription factor WRKY5
  misc_feature (1)..(15): NCBI GI NO: 34911952 NR Description: P0694A04.6
  misc_feature (1)..(134): NCBI GI NO: 18420751 NR Description: WRKY family transcription factor
  misc_feature (1)..(175): NCBI GI NO: 34898262 NR Description: WRKY family transcription factor-like protein
  misc_feature (1)..(116): NCBI GI NO: 15225975 NR Description: WRKY family transcription factor
  misc_feature (1)..(30): NCBI GI NO: 15228907 NR Description: WRKY family transcription factor
  misc_feature (1)..(30): NCBI GI NO: 21592990 NR Description: DNA-binding protein-like [Arabidopsis thaliana]
MFDITYRGNHTCSQGNNAVLPPKSPEKHEKPAHSHNIDIHHAQASQESLAKFRSILSVNTDNLDNGDMAYAFTFPSTSFGCMKQENHSLIPMALENDSFLSDLYQTHLLSPTTPESNYFPSPTFQMNEFDGIYNRSHSKSDINEIISTNTSATNSPIPDFNFSLDPVEIDPNFPFNTPGFLC

SEQ ID NO: 5513 - DNA, 1654 bp, Glycine max
  misc_feature (1)..(1654): Ceres Seq. ID no. 14311156
aattcagaacacagagagacctcgtcaaggctaaatacgagaaaatgcagaaaaatatcgagaaatttggttcagaccctaaaagtcgtcgtattgtgagtgacagacaacctcgtattgagattataaatgaccaaccgggaatgccacttattgtttatgtgtctcgcgaaagaaggccatcccttcctcacaaattcaaaggaggagccgtcaacacattgctcagagtctcaggtttaatcagtaatggaccttatgttctagtaatggactgtgatatgtatagcaatgatccaacctctgccaaacaagccatgtgcttctttcttgatcctgaaacgtccaaatatattgcatttgttcaattccctcaaatgtttcacaaccttagcaaaaaggacatttatgatagtcaagctagaactgcttttaagacaatgtggcaaggcatggatggactaagaggtccaggtctttctggcagcggcaattacttaagtagaagtgctttactatttggaagtccaaaccaaaaagatgactatctgcaagatgcacaaaagtacttcggcaagtctaccgcctacattgaatcactgaaggccatccgtggacagaaaagtagcaaaaagaatatttcaagagatgaaatgttaagagaagctcaagtagtggcctcttgttcctacgaaaataacacaaattggggcacagaggtgggattctcatatggcatattactagagagttctattactggctatattcttcacagcagaggatggaaatcagcatatctttacccgaaaacaccatgtttcttaggttgtgctcccactgacatcaaggaaggcatgcttcagttggttaagtggttgtctgaacttttgttgcttggtgtctcctccaaatacagcccattcacttatggattttcaagaatgtccatacttcacacattcacttattgcttcatcacaatgtcatccctttatgctgttgtcttcatcctctacggcattgtacctcaagtatgcctcctcaaaggaatccctgtgtttccaaaggccacagacccttggtttgccgtgtttgcatttgtgtatgtatctactcagattcaacatttgattgaggttctctctggggatggatctgtgacaatgtggtgggatgaacaaagaatttggattctgaagtcagttaccagcatatttgcaattatagatggaatcaagaagtggttggggttgagcaaggtgaaattcaacttgtcaaacaaagccattgacaaagagaagctcaagaaatatgagcaaggtagattcgatttccaaggtgcagctgtgttcatggctccattggttctattactcacagccaacattgttagcttcttagttggtatatggagactatttaatttcaatgtgaaggattttgaagaaatgtttggtcaacttttcctagttacctatgtaatggttcttagttatccacttcttgaggccatggtaacaatgaaaagcaagagtggatagtgaaatttggtcacaaataattaggctcattcaagagtctaaattgattatgtatcttgagatgaaattgcttaatgcaatcttgttcgttcagtttagattaatctaat

SEQ ID NO: 5514 - protein, 513 aa, Glycine max
  peptide (1)..(513): Ceres Seq. ID no. 14311157
  misc_feature (48)..(176): Pfam Name: Pfam Description:  Cellulose synthase
  misc_feature (189)..(506): NCBI GI NO: 2262115 NR Description: cellulose synthase isolog [Arabidopsis thaliana]
  misc_feature (189)..(506): NCBI GI NO: 30686386 NR Description: cellulose synthase - related
  misc_feature (43)..(176): NCBI GI NO: 2262115 NR Description: cellulose synthase isolog [Arabidopsis thaliana]
  misc_feature (43)..(176): NCBI GI NO: 30686386 NR Description: cellulose synthase - related
  misc_feature (197)..(509): NCBI GI NO: 2262114 NR Description: cellulose synthase isolog [Arabidopsis thaliana]
  misc_feature (48)..(176): NCBI GI NO: 2262114 NR Description: cellulose synthase isolog [Arabidopsis thaliana]
  misc_feature (204)..(509): NCBI GI NO: 16519225 NR Description: cellulose synthase-like protein OsCslE1
  misc_feature (30)..(180): NCBI GI NO: 16519225 NR Description: cellulose synthase-like protein OsCslE1
  misc_feature (197)..(509): NCBI GI NO: 15233653 NR Description: cellulose synthase - related
  misc_feature (75)..(176): NCBI GI NO: 15233653 NR Description: cellulose synthase - related
FRTQRDLVKAKYEKMQKNIEKFGSDPKSRRIVSDRQPRIEIINDQPGMPLIVYVSRERRPSLPHKFKGGAVNTLLRVSGLISNGPYVLVMDCDMYSNDPTSAKQAMCFFLDPETSKYIAFVQFPQMFHNLSKKDIYDSQARTAFKTMWQGMDGLRGPGLSGSGNYLSRSALLFGSPNQKDDYLQDAQKYFGKSTAYIESLKAIRGQKSSKKNISRDEMLREAQVVASCSYENNTNWGTEVGFSYGILLESSITGYILHSRGWKSAYLYPKTPCFLGCAPTDIKEGMLQLVKWLSELLLLGVSSKYSPFTYGFSRMSILHTFTYCFITMSSLYAVVFILYGIVPQVCLLKGIPVFPKATDPWFAVFAFVYVSTQIQHLIEVLSGDGSVTMWWDEQRIWILKSVTSIFAIIDGIKKWLGLSKVKFNLSNKAIDKEKLKKYEQGRFDFQGAAVFMAPLVLLLTANIVSFLVGIWRLFNFNVKDFEEMFGQLFLVTYVMVLSYPLLEAMVTMKSKSG

SEQ ID NO: 5515 - protein, 499 aa, Glycine max
  peptide (1)..(499): Ceres Seq. ID no. 14311158
  misc_feature (34)..(162): Pfam Name: Pfam Description:  Cellulose synthase
  misc_feature (175)..(492): NCBI GI NO: 2262115 NR Description: cellulose synthase isolog [Arabidopsis thaliana]
  misc_feature (175)..(492): NCBI GI NO: 30686386 NR Description: cellulose synthase - related
  misc_feature (29)..(162): NCBI GI NO: 2262115 NR Description: cellulose synthase isolog [Arabidopsis thaliana]
  misc_feature (29)..(162): NCBI GI NO: 30686386 NR Description: cellulose synthase - related
  misc_feature (183)..(495): NCBI GI NO: 2262114 NR Description: cellulose synthase isolog [Arabidopsis thaliana]
  misc_feature (34)..(162): NCBI GI NO: 2262114 NR Description: cellulose synthase isolog [Arabidopsis thaliana]
  misc_feature (190)..(495): NCBI GI NO: 16519225 NR Description: cellulose synthase-like protein OsCslE1
  misc_feature (16)..(166): NCBI GI NO: 16519225 NR Description: cellulose synthase-like protein OsCslE1
  misc_feature (183)..(495): NCBI GI NO: 15233653 NR Description: cellulose synthase - related
  misc_feature (61)..(162): NCBI GI NO: 15233653 NR Description: cellulose synthase - related
MQKNIEKFGSDPKSRRIVSDRQPRIEIINDQPGMPLIVYVSRERRPSLPHKFKGGAVNTLLRVSGLISNGPYVLVMDCDMYSNDPTSAKQAMCFFLDPETSKYIAFVQFPQMFHNLSKKDIYDSQARTAFKTMWQGMDGLRGPGLSGSGNYLSRSALLFGSPNQKDDYLQDAQKYFGKSTAYIESLKAIRGQKSSKKNISRDEMLREAQVVASCSYENNTNWGTEVGFSYGILLESSITGYILHSRGWKSAYLYPKTPCFLGCAPTDIKEGMLQLVKWLSELLLLGVSSKYSPFTYGFSRMSILHTFTYCFITMSSLYAVVFILYGIVPQVCLLKGIPVFPKATDPWFAVFAFVYVSTQIQHLIEVLSGDGSVTMWWDEQRIWILKSVTSIFAIIDGIKKWLGLSKVKFNLSNKAIDKEKLKKYEQGRFDFQGAAVFMAPLVLLLTANIVSFLVGIWRLFNFNVKDFEEMFGQLFLVTYVMVLSYPLLEAMVTMKSKSG

SEQ ID NO: 5516 - protein, 466 aa, Glycine max
  peptide (1)..(466): Ceres Seq. ID no. 14311159
  misc_feature (1)..(129): Pfam Name: Pfam Description:  Cellulose synthase
  misc_feature (142)..(459): NCBI GI NO: 2262115 NR Description: cellulose synthase isolog [Arabidopsis thaliana]
  misc_feature (142)..(459): NCBI GI NO: 30686386 NR Description: cellulose synthase - related
  misc_feature (1)..(129): NCBI GI NO: 2262115 NR Description: cellulose synthase isolog [Arabidopsis thaliana]
  misc_feature (1)..(129): NCBI GI NO: 30686386 NR Description: cellulose synthase - related
  misc_feature (150)..(462): NCBI GI NO: 2262114 NR Description: cellulose synthase isolog [Arabidopsis thaliana]
  misc_feature (1)..(129): NCBI GI NO: 2262114 NR Description: cellulose synthase isolog [Arabidopsis thaliana]
  misc_feature (157)..(462): NCBI GI NO: 16519225 NR Description: cellulose synthase-like protein OsCslE1
  misc_feature (1)..(133): NCBI GI NO: 16519225 NR Description: cellulose synthase-like protein OsCslE1
  misc_feature (150)..(462): NCBI GI NO: 15233653 NR Description: cellulose synthase - related
  misc_feature (28)..(129): NCBI GI NO: 15233653 NR Description: cellulose synthase - related
MPLIVYVSRERRPSLPHKFKGGAVNTLLRVSGLISNGPYVLVMDCDMYSNDPTSAKQAMCFFLDPETSKYIAFVQFPQMFHNLSKKDIYDSQARTAFKTMWQGMDGLRGPGLSGSGNYLSRSALLFGSPNQKDDYLQDAQKYFGKSTAYIESLKAIRGQKSSKKNISRDEMLREAQVVASCSYENNTNWGTEVGFSYGILLESSITGYILHSRGWKSAYLYPKTPCFLGCAPTDIKEGMLQLVKWLSELLLLGVSSKYSPFTYGFSRMSILHTFTYCFITMSSLYAVVFILYGIVPQVCLLKGIPVFPKATDPWFAVFAFVYVSTQIQHLIEVLSGDGSVTMWWDEQRIWILKSVTSIFAIIDGIKKWLGLSKVKFNLSNKAIDKEKLKKYEQGRFDFQGAAVFMAPLVLLLTANIVSFLVGIWRLFNFNVKDFEEMFGQLFLVTYVMVLSYPLLEAMVTMKSKSG

SEQ ID NO: 5517 - DNA, 1080 bp, Glycine max
  misc_feature (1)..(1080): Ceres Seq. ID no. 13581092
cagctacgtaggccccccccccaattgactagagagggaatagtgctgcacaatgggtctgaataaagctgtaaaattgcctgcttttttccctatggtggttgagctatcatagacttgggtttcacaaaaacaaaacccatggaaaaggaaatggaatcttggacaattcatgggtcttcagcataatatgtaggtacatttgtttgtgttaccatgccgatcatttaaattttgcatgcagtacacatcacaagttgcaagactttttaattgtactataaaataaaacttgaatccaaggttttaaatattggactgccgtggcaaacactgtcccaatttgcgttagaaaaccttgatgtcacggtccacgttaagatgcaaactgtttttttaaaaccttatttaaatcaaattcaacacaattgatttgattataatgttgtatatgtttttttttatgtgatcagatttttggtggatgaaacgccaataagggtgcacacgaacatggagcacaagggaattccatttcctaaggaccaacccatgggtgtgtacagttcattatggaatgctgatgattgggccacgcagggtggtcgtgtgaaaacagattggagccacgcacccttcattgccacatacaagaacttcgagataaatgcgtgtgagtgtcccgtgtcagtggctgcaatggataatgctaagaagtgcaccagcagtgaggggaataagtattggtgggatgagcctaatttggctgaactcaacttgcaccagagccaccagcttatgtgggttagggcaaggcacattttctatgactattgcactgacactgctaggttcccagtcacgcctgctgagtgtgtccatcaccgtcacacctgagcagacttagtgattagtctaaactttattttgttataacttatgggaagttatgaaaataggattggggcataagaaaaaaatggtgggtggtgaacaaagttgtggaacatgtccttcatgtttctgattgtaatatatattgccacaacattaatgtgaattgttggtttttcttcttgt

SEQ ID NO: 5518 - protein, 127 aa, Glycine max
  peptide (1)..(127): Ceres Seq. ID no. 13581093
  misc_feature (1)..(126): NCBI GI NO: 15236265 NR Description: xyloglucan endotransglycosylase, putative
  misc_feature (1)..(126): NCBI GI NO: 21553878 NR Description: putative xyloglucan endotransglycosylase
  misc_feature (1)..(125): NCBI GI NO: 541939 NR Description: xyloglucan endo-1,4-beta-D-glucanase (EC 3
  misc_feature (1)..(125): NCBI GI NO: 38605538 NR Description: Probable xyloglucan endotransglucosylase/hydrolaseprecursor
  misc_feature (1)..(125): NCBI GI NO: 950299 NR Description: xyloglucan endotransglycosylase precursor
  misc_feature (1)..(125): NCBI GI NO: 3043422 NR Description: endoxyloglucan transferase [Cicer arietinum]
  misc_feature (1)..(125): NCBI GI NO: 27228078 NR Description: xyloglucan endotransglycosylase precursor
  misc_feature (1)..(125): NCBI GI NO: 15240733 NR Description: xyloglucan endotransglycosylase (EXGT-A4)
  misc_feature (1)..(125): NCBI GI NO: 1885310 NR Description: Endoxyloglucan transferase (EXT)
  misc_feature (1)..(125): NCBI GI NO: 38605539 NR Description: Probable xyloglucan endotransglucosylase/hydrolaseprecursor
MEHKGIPFPKDQPMGVYSSLWNADDWATQGGRVKTDWSHAPFIATYKNFEINACECPVSVAAMDNAKKCTSSEGNKYWWDEPNLAELNLHQSHQLMWVRARHIFYDYCTDTARFPVTPAECVHHRHT

SEQ ID NO: 5519 - protein, 114 aa, Glycine max
  peptide (1)..(114): Ceres Seq. ID no. 13581094
  misc_feature (1)..(113): NCBI GI NO: 15236265 NR Description: xyloglucan endotransglycosylase, putative
  misc_feature (1)..(113): NCBI GI NO: 21553878 NR Description: putative xyloglucan endotransglycosylase
  misc_feature (1)..(112): NCBI GI NO: 541939 NR Description: xyloglucan endo-1,4-beta-D-glucanase (EC 3
  misc_feature (1)..(112): NCBI GI NO: 38605538 NR Description: Probable xyloglucan endotransglucosylase/hydrolaseprecursor
  misc_feature (1)..(112): NCBI GI NO: 950299 NR Description: xyloglucan endotransglycosylase precursor
  misc_feature (1)..(112): NCBI GI NO: 3043422 NR Description: endoxyloglucan transferase [Cicer arietinum]
  misc_feature (1)..(112): NCBI GI NO: 27228078 NR Description: xyloglucan endotransglycosylase precursor
  misc_feature (1)..(112): NCBI GI NO: 15240733 NR Description: xyloglucan endotransglycosylase (EXGT-A4)
  misc_feature (1)..(112): NCBI GI NO: 1885310 NR Description: Endoxyloglucan transferase (EXT)
  misc_feature (1)..(112): NCBI GI NO: 38605539 NR Description: Probable xyloglucan endotransglucosylase/hydrolaseprecursor
MGVYSSLWNADDWATQGGRVKTDWSHAPFIATYKNFEINACECPVSVAAMDNAKKCTSSEGNKYWWDEPNLAELNLHQSHQLMWVRARHIFYDYCTDTARFPVTPAECVHHRHT

SEQ ID NO: 5520 - protein, 79 aa, Glycine max
  peptide (1)..(79): Ceres Seq. ID no. 13581095
MRVSVPCQWLQWIMLRSAPAVRGISIGGMSLIWLNSTCTRATSLCGLGQGTFSMTIALTLLGSQSRLLSVSITVTPEQT

SEQ ID NO: 5521 - DNA, 979 bp, Glycine max
  misc_feature (1)..(979): Ceres Seq. ID no. 15176881
aattgttctgctccttttttttagtggtaagaatagaacaagctaaggaacattggaatcttttgccatgacccaaagtgggacctgtgaccggtgcacaggctaagctaactaaaataccacttagcctggtaaacctaaccaacatgaaacattttcaataagatcaaaactttcaaactagttatgcttaaaatctattgaaatttcaacagagtattatttcttgtgatttcaactaccaaaatgatcaaaacctattaagatctataaacaagacacaaaatatacaccagtttaatttgaaagtgtttaatacagccccaaaataacaatactgatttcctagtaacctgcaacttaactgattgatgatttggaaaaaggaataagaggtgagttacatatactctatgaggagataataatcataatgaataggaagggggaaattaaaataactcctgagtagtttgcaactatataaactagattgtaacatcttaaatcaatggaagcattttttatctaatcacaattttaatgagttcatttataatgccccttgatctaaatgagtgtgacacatctcaacttggactgggttgattttttttctttttcctcctttgctttattaatcctaatttacgatacttattatagctttgctttatatcgggtaacaggccacaggaatggttacaatgatgaaggaactacaaataccaatggtgggaagtcatcatcttggcattgatgacactaggaacatagcaagagtactgcagcacatgctactagatggtgcactcgtccagattactgcaaggaggaatcctagatctcttagagatgtcaagtttcttttcaagaaccgtattggatagtgtacttctcaatggactatgtaactttttctaatacttttaatcgtggaattagttaactcaatgaacagattatagattataatttc

SEQ ID NO: 5522 - protein, 63 aa, Glycine max
  peptide (1)..(63): Ceres Seq. ID no. 15176882
  misc_feature (1)..(62): NCBI GI NO: 18400647 NR Description: exonuclease protein family [Arabidopsis thaliana]
  misc_feature (1)..(63): NCBI GI NO: 11994503 NR Description: emb|CAB36829
MVTMMKELQIPMVGSHHLGIDDTRNIARVLQHMLLDGALVQITARRNPRSLRDVKFLFKNRIG

SEQ ID NO: 5523 - protein, 61 aa, Glycine max
  peptide (1)..(61): Ceres Seq. ID no. 15176883
MSVTHLNLDWVDFFSFSSFALLILIYDTYYSFALYRVTGHRNGYNDEGTTNTNGGKSSSWH

SEQ ID NO: 5524 - protein, 60 aa, Glycine max
  peptide (1)..(60): Ceres Seq. ID no. 15176884
  misc_feature (1)..(59): NCBI GI NO: 18400647 NR Description: exonuclease protein family [Arabidopsis thaliana]
  misc_feature (1)..(60): NCBI GI NO: 11994503 NR Description: emb|CAB36829
MMKELQIPMVGSHHLGIDDTRNIARVLQHMLLDGALVQITARRNPRSLRDVKFLFKNRIG

SEQ ID NO: 5525 - DNA, 1580 bp, Glycine max
  misc_feature (1)..(1580): Ceres Seq. ID no. 14307164
acttcacttcagttgactctctctctcctccaccagcccgccatttttctctctctaaaacacaaacacatgacatctccttatgctcctcgccggcgatccagctccgaccaccggaccacgcccggaagagcaccgccctcccccagcttcgcctcttccgagctgagcacctcctccaccgtctccacccaccggaaccccgtctccgccgtcgccaagtccttcgccggaatctttgccggctgcttcgctcggccggatttcgacaactccaagagcctcggggattccgaggagttcaagtcttcttcctctgtatcgaatgcttcaagagctggtagtcagagagggcgtggctcaaatcgaggtatcagcatcagttcatacaacatattgccagcgaaagaaccaggcattgtgaagttcaccatggaggaaatcttccgagtcacaaggaacttctccccttctttcaagattggccaaggtggttttggtgctgtctataaggccaaactcctagatgggactgttgttgcagtaaagcgtgctaagaagagtatgtatgagaagcatttgggggtggagttccaaagcgagatccaaacactatcacgggtggaacatttgaacttggtcaagttctttggatatttggagcaagaggatgaaaggatcattgttgtggagcatgttccaaatggaacccttagagaacatttagattgcattcatggaagcgttctggaccttgctgcacgtctagatatagcaattgatgtttctcatgctatcacctatcttcatatgtatatagatcatcctatcatccatagagacataaaatcttcaaacattcttctcactgaaaattttcgagctaaagtagcagactttggttttgctagacaagcccctgacagtgactctggcatgacacatatttccacccaaataaaaggaacagctggctacttggaccctgaatacctgaaaacttatcaactaactgaaaagagtgacgtgtattcatttggagttttgcttgttgaacttgtcacaggcagacgccccattgaaccaaaatttgaactcagggagcgaatcacggcaaaatgggtgggtattggtattgtgtactatctgccttcattttattcttctagtttgctatttagtagtttttcataatttcatgaaaaccaacaatatcttctatgacactccattttgctcagtagttaagcatcttttcttcatgattacacaatctcaatccattttgttccaagctttagttggtaagaatgatggagaaggcatttgaaaagacttacatgatgcttaataatgctcacaaaatgatgacatttctataagctccttttagcttattttagtaagagtttatcatacatgcattttctgtaaaggtttttacaatgtcaatcaataaaaaattattattattacttttaaggtaattattataaaatttggtaaacttataatacatcacagtttgtgattgaatgatgatataaaagaaaatgctaaccaatgcccttgggtcattg

SEQ ID NO: 5526 - protein, 397 aa, Glycine max
  peptide (1)..(397): Ceres Seq. ID no. 14307165
  misc_feature (155)..(359): Pfam Name: Pfam Description:  Protein kinase domain
  misc_feature (30)..(374): NCBI GI NO: 22328175 NR Description: protein kinase family [Arabidopsis thaliana]
  misc_feature (44)..(374): NCBI GI NO: 27261468 NR Description: Hypothetical protein
  misc_feature (145)..(374): NCBI GI NO: 34908354 NR Description: P0529H11.30
  misc_feature (90)..(374): NCBI GI NO: 9759225 NR Description: contains similarity to proteinkinase~gene_id:K19M22
  misc_feature (147)..(374): NCBI GI NO: 15237782 NR Description: protein kinase family [Arabidopsis thaliana]
  misc_feature (126)..(374): NCBI GI NO: 18397027 NR Description: protein kinase family [Arabidopsis thaliana]
  misc_feature (139)..(374): NCBI GI NO: 25287604 NR Description: probable protein kinase
  misc_feature (83)..(374): NCBI GI NO: 38345153 NR Description: OSJNBa0014K14.7
  misc_feature (197)..(374): NCBI GI NO: 7434312 NR Description: receptor-like protein kinase 5 homolog A_IG005I10
  misc_feature (52)..(374): NCBI GI NO: 34897358 NR Description: putative receptor kinase [Oryza sativa]
TSLQLTLSLLHQPAIFLSLKHKHMTSPYAPRRRSSSDHRTTPGRAPPSPSFASSELSTSSTVSTHRNPVSAVAKSFAGIFAGCFARPDFDNSKSLGDSEEFKSSSSVSNASRAGSQRGRGSNRGISISSYNILPAKEPGIVKFTMEEIFRVTRNFSPSFKIGQGGFGAVYKAKLLDGTVVAVKRAKKSMYEKHLGVEFQSEIQTLSRVEHLNLVKFFGYLEQEDERIIVVEHVPNGTLREHLDCIHGSVLDLAARLDIAIDVSHAITYLHMYIDHPIIHRDIKSSNILLTENFRAKVADFGFARQAPDSDSGMTHISTQIKGTAGYLDPEYLKTYQLTEKSDVYSFGVLLVELVTGRRPIEPKFELRERITAKWVGIGIVYYLPSFYSSSLLFSSFS

SEQ ID NO: 5527 - protein, 374 aa, Glycine max
  peptide (1)..(374): Ceres Seq. ID no. 14307166
  misc_feature (132)..(336): Pfam Name: Pfam Description:  Protein kinase domain
  misc_feature (7)..(351): NCBI GI NO: 22328175 NR Description: protein kinase family [Arabidopsis thaliana]
  misc_feature (21)..(351): NCBI GI NO: 27261468 NR Description: Hypothetical protein
  misc_feature (122)..(351): NCBI GI NO: 34908354 NR Description: P0529H11.30
  misc_feature (67)..(351): NCBI GI NO: 9759225 NR Description: contains similarity to proteinkinase~gene_id:K19M22
  misc_feature (124)..(351): NCBI GI NO: 15237782 NR Description: protein kinase family [Arabidopsis thaliana]
  misc_feature (103)..(351): NCBI GI NO: 18397027 NR Description: protein kinase family [Arabidopsis thaliana]
  misc_feature (116)..(351): NCBI GI NO: 25287604 NR Description: probable protein kinase
  misc_feature (60)..(351): NCBI GI NO: 38345153 NR Description: OSJNBa0014K14.7
  misc_feature (174)..(351): NCBI GI NO: 7434312 NR Description: receptor-like protein kinase 5 homolog A_IG005I10
  misc_feature (29)..(351): NCBI GI NO: 34897358 NR Description: putative receptor kinase [Oryza sativa]
MTSPYAPRRRSSSDHRTTPGRAPPSPSFASSELSTSSTVSTHRNPVSAVAKSFAGIFAGCFARPDFDNSKSLGDSEEFKSSSSVSNASRAGSQRGRGSNRGISISSYNILPAKEPGIVKFTMEEIFRVTRNFSPSFKIGQGGFGAVYKAKLLDGTVVAVKRAKKSMYEKHLGVEFQSEIQTLSRVEHLNLVKFFGYLEQEDERIIVVEHVPNGTLREHLDCIHGSVLDLAARLDIAIDVSHAITYLHMYIDHPIIHRDIKSSNILLTENFRAKVADFGFARQAPDSDSGMTHISTQIKGTAGYLDPEYLKTYQLTEKSDVYSFGVLLVELVTGRRPIEPKFELRERITAKWVGIGIVYYLPSFYSSSLLFSSFS

SEQ ID NO: 5528 - protein, 253 aa, Glycine max
  peptide (1)..(253): Ceres Seq. ID no. 14307167
  misc_feature (11)..(215): Pfam Name: Pfam Description:  Protein kinase domain
  misc_feature (1)..(230): NCBI GI NO: 22328175 NR Description: protein kinase family [Arabidopsis thaliana]
  misc_feature (1)..(230): NCBI GI NO: 27261468 NR Description: Hypothetical protein
  misc_feature (1)..(230): NCBI GI NO: 34908354 NR Description: P0529H11.30
  misc_feature (1)..(230): NCBI GI NO: 9759225 NR Description: contains similarity to proteinkinase~gene_id:K19M22
  misc_feature (3)..(230): NCBI GI NO: 15237782 NR Description: protein kinase family [Arabidopsis thaliana]
  misc_feature (1)..(230): NCBI GI NO: 18397027 NR Description: protein kinase family [Arabidopsis thaliana]
  misc_feature (1)..(230): NCBI GI NO: 25287604 NR Description: probable protein kinase
  misc_feature (1)..(230): NCBI GI NO: 38345153 NR Description: OSJNBa0014K14.7
  misc_feature (53)..(230): NCBI GI NO: 7434312 NR Description: receptor-like protein kinase 5 homolog A_IG005I10
  misc_feature (1)..(230): NCBI GI NO: 34897358 NR Description: putative receptor kinase [Oryza sativa]
MEEIFRVTRNFSPSFKIGQGGFGAVYKAKLLDGTVVAVKRAKKSMYEKHLGVEFQSEIQTLSRVEHLNLVKFFGYLEQEDERIIVVEHVPNGTLREHLDCIHGSVLDLAARLDIAIDVSHAITYLHMYIDHPIIHRDIKSSNILLTENFRAKVADFGFARQAPDSDSGMTHISTQIKGTAGYLDPEYLKTYQLTEKSDVYSFGVLLVELVTGRRPIEPKFELRERITAKWVGIGIVYYLPSFYSSSLLFSSFS

SEQ ID NO: 5529 - DNA, 1214 bp, Glycine max
  misc_feature (1)..(1214): Ceres Seq. ID no. 14307639
aaaaaatcatcaaagctcaaacccccctctctctactcaaactaaccactctgtttctcttgctctacttttaccctgtttccagtggaacaaatcttcatccaaattaggttttgttttggagaaatgtatgcagagactggtcttttcttcccatatttgcacaacgtctctcacggccttcatcagcttgaggagtactgcaaaacccagaagtccaatgcttcaatggatgaccttgttcagtcttctgccatgtcagagtatgatttggcagctgagggagatctgttcaaagctcctgaacctattattgaagagccaatcatggacatgtcagcggccatctcaatgatgtcttgtggggaagatgtctcgtcacagggactaaagtccactgatattgatattcttcaaaatgatcagtttctgagtgaggtgttctatgaatgtgaaaaggatctcttagaaaaggcagcaatagagtcaccattctctgagattctggaaatcaaggttccttttctgaacattgatgagaacacaattcaagaaaacaagccatttactgacatgcaattagcaaagagtgtcagctcaggaagtttgagctcaatggactggatgcgtggagctgcaatgaagcctgctttcattgatatctctgcaatagatttcaatgcagattatggcatgcggagatcatttagtgaaggagatataaagactcttggtaatggtaacatgaacatcgtccaatcaccccttgagaggccccttcttatcagcaactgcaccagtgaggaacgcttccaaaagctctccagatacaggaataagaagacaaagaggaattttgggaggaaaatcaagtatgcttgcaggaaggcacttgctgacagtcagccaagaatccgtggaagatttgcaaggactgaagaatctgatgtcaagagggaatgaatgacttaaaactgatttagtaggaagaaaatagagttgagtagctatatctgatcaagctatatggaaaaactcagcagtaatatgtgattagaacttatgtggggagtctctgtttgtttgagcagatatttgctgaataaaccaggcctcaaacttcttaggctagttcatctcttatctattgtattaacgtctctatagacggaaataaccttccagatatgtaaatagttttgttgaataatgga

SEQ ID NO: 5530 - protein, 278 aa, Glycine max
  peptide (1)..(278): Ceres Seq. ID no. 14307640
  misc_feature (233)..(272): Pfam Name: Pfam Description:  CCT motif
  misc_feature (1)..(272): NCBI GI NO: 18423511 NR Description: expressed protein [Arabidopsis thaliana]
  misc_feature (1)..(272): NCBI GI NO: 8843771 NR Description: gene_id:MYN8
  misc_feature (39)..(272): NCBI GI NO: 21536819 NR Description: unknown [Arabidopsis thaliana]
  misc_feature (1)..(272): NCBI GI NO: 15234310 NR Description: expressed protein [Arabidopsis thaliana]
  misc_feature (35)..(272): NCBI GI NO: 21593708 NR Description: unknown [Arabidopsis thaliana]
  misc_feature (184)..(272): NCBI GI NO: 15222540 NR Description: hypothetical protein [Arabidopsis thaliana]
  misc_feature (155)..(272): NCBI GI NO: 15238589 NR Description: hypothetical protein [Arabidopsis thaliana]
  misc_feature (190)..(272): NCBI GI NO: 15238070 NR Description: hypothetical protein [Arabidopsis thaliana]
  misc_feature (220)..(272): NCBI GI NO: 26451419 NR Description: unknown protein [Arabidopsis thaliana]
  misc_feature (220)..(272): NCBI GI NO: 15225838 NR Description: hypothetical protein [Arabidopsis thaliana]
MYAETGLFFPYLHNVSHGLHQLEEYCKTQKSNASMDDLVQSSAMSEYDLAAEGDLFKAPEPIIEEPIMDMSAAISMMSCGEDVSSQGLKSTDIDILQNDQFLSEVFYECEKDLLEKAAIESPFSEILEIKVPFLNIDENTIQENKPFTDMQLAKSVSSGSLSSMDWMRGAAMKPAFIDISAIDFNADYGMRRSFSEGDIKTLGNGNMNIVQSPLERPLLISNCTSEERFQKLSRYRNKKTKRNFGRKIKYACRKALADSQPRIRGRFARTEESDVKRE

SEQ ID NO: 5531 - protein, 244 aa, Glycine max
  peptide (1)..(244): Ceres Seq. ID no. 14307641
  misc_feature (199)..(238): Pfam Name: Pfam Description:  CCT motif
  misc_feature (1)..(238): NCBI GI NO: 18423511 NR Description: expressed protein [Arabidopsis thaliana]
  misc_feature (1)..(238): NCBI GI NO: 8843771 NR Description: gene_id:MYN8
  misc_feature (5)..(238): NCBI GI NO: 21536819 NR Description: unknown [Arabidopsis thaliana]
  misc_feature (1)..(238): NCBI GI NO: 15234310 NR Description: expressed protein [Arabidopsis thaliana]
  misc_feature (1)..(238): NCBI GI NO: 21593708 NR Description: unknown [Arabidopsis thaliana]
  misc_feature (150)..(238): NCBI GI NO: 15222540 NR Description: hypothetical protein [Arabidopsis thaliana]
  misc_feature (121)..(238): NCBI GI NO: 15238589 NR Description: hypothetical protein [Arabidopsis thaliana]
  misc_feature (156)..(238): NCBI GI NO: 15238070 NR Description: hypothetical protein [Arabidopsis thaliana]
  misc_feature (186)..(238): NCBI GI NO: 26451419 NR Description: unknown protein [Arabidopsis thaliana]
  misc_feature (186)..(238): NCBI GI NO: 15225838 NR Description: hypothetical protein [Arabidopsis thaliana]
MDDLVQSSAMSEYDLAAEGDLFKAPEPIIEEPIMDMSAAISMMSCGEDVSSQGLKSTDIDILQNDQFLSEVFYECEKDLLEKAAIESPFSEILEIKVPFLNIDENTIQENKPFTDMQLAKSVSSGSLSSMDWMRGAAMKPAFIDISAIDFNADYGMRRSFSEGDIKTLGNGNMNIVQSPLERPLLISNCTSEERFQKLSRYRNKKTKRNFGRKIKYACRKALADSQPRIRGRFARTEESDVKRE

SEQ ID NO: 5532 - protein, 235 aa, Glycine max
  peptide (1)..(235): Ceres Seq. ID no. 14307642
  misc_feature (190)..(229): Pfam Name: Pfam Description:  CCT motif
  misc_feature (1)..(229): NCBI GI NO: 18423511 NR Description: expressed protein [Arabidopsis thaliana]
  misc_feature (1)..(229): NCBI GI NO: 8843771 NR Description: gene_id:MYN8
  misc_feature (1)..(229): NCBI GI NO: 21536819 NR Description: unknown [Arabidopsis thaliana]
  misc_feature (1)..(229): NCBI GI NO: 15234310 NR Description: expressed protein [Arabidopsis thaliana]
  misc_feature (1)..(229): NCBI GI NO: 21593708 NR Description: unknown [Arabidopsis thaliana]
  misc_feature (141)..(229): NCBI GI NO: 15222540 NR Description: hypothetical protein [Arabidopsis thaliana]
  misc_feature (112)..(229): NCBI GI NO: 15238589 NR Description: hypothetical protein [Arabidopsis thaliana]
  misc_feature (147)..(229): NCBI GI NO: 15238070 NR Description: hypothetical protein [Arabidopsis thaliana]
  misc_feature (177)..(229): NCBI GI NO: 26451419 NR Description: unknown protein [Arabidopsis thaliana]
  misc_feature (177)..(229): NCBI GI NO: 15225838 NR Description: hypothetical protein [Arabidopsis thaliana]
MSEYDLAAEGDLFKAPEPIIEEPIMDMSAAISMMSCGEDVSSQGLKSTDIDILQNDQFLSEVFYECEKDLLEKAAIESPFSEILEIKVPFLNIDENTIQENKPFTDMQLAKSVSSGSLSSMDWMRGAAMKPAFIDISAIDFNADYGMRRSFSEGDIKTLGNGNMNIVQSPLERPLLISNCTSEERFQKLSRYRNKKTKRNFGRKIKYACRKALADSQPRIRGRFARTEESDVKRE

SEQ ID NO: 5533 - DNA, 1343 bp, Glycine max
  misc_feature (1)..(1343): Ceres Seq. ID no. 15171556
atcacccttttggcagttaccaattcaactaccgcatcacatttacaaataaaactcaaaatccaaacaccaccgccacacaccaccttgtctattgattatcatatttattgtgagccttaactctagtattactactacttccacctttcatcatcactctttcagtccaatggggtggtctttctcaatttccgttttgctgtttcttacctttctcattcagatacatggaagaggctttgcagagaattatggttgtaatttgttccaaggaagttgggtttatgatgaatcataccctctttatgcaacctcacagtgtccctttatagagaaagaatttgattgtcaaaacaatggcagaccggataagttctatctcaaatatagatggcagccagcaggctgcaacttaacaagattcaacggtgaagatttcttaagaagacatagagggaggagtctcatgtttgtgggggattctttgagtttgaatcaatggcaatcactcacttgcatgcttcacatagctgtgccactagccccttacaacttagtgaggaatggagatctctccattttcacgtttccgacctatggtgttaaggtgatgttctcacgcaatgcatttcttgtggacatagttagtgagagtattggtcgagtactgaaactagattcaattcaagctggccaaacgtggaaaggaatagatatattgatatttgactcttggcattggtggcttcacacaggaagaaaacaaccatgggatttgattcaagtaggaaatcgtactgttagagacatgaatcgcttggttgcatacgagatagcgctgaatacatgggccaaatggattgattataatattgaccctaccagaacaagggttttattccaaggagtgtctccagatcatcaaaatccagcgcaatggggtgagccaagagcaaacttttgtgcagggcaaactaagccaatatcgggattaaggtatcctggaggaccaaacccagcagaggtggtattagagaaagtgctaaaggccatgcaaaagcctgtgtatttgctggacattacaaccctatcccagctaaggatagatggccacccttctgtttatggacatggtgggcatttggacatggattgcagccactggtgccttgctggtgttcctgatacttggaatgagcttctatatgttagtctctttcaaaattaagatcctattcttattgttattgctgattataaataaaatgtgtcccaagaaaatatatatctcaaattaattcagacaataaaatacagcaagatatgtataggtctatcat

SEQ ID NO: 5534 - protein, 352 aa, Glycine max
  peptide (1)..(352): Ceres Seq. ID no. 15171557
  misc_feature (192)..(349): Pfam Name: Pfam Description:  Arabidopsis proteins of unknown function
  misc_feature (1)..(352): NCBI GI NO: 15224585 NR Description: expressed protein [Arabidopsis thaliana]
  misc_feature (1)..(352): NCBI GI NO: 30350855 NR Description: hypothetical protein At2g30900
  misc_feature (30)..(349): NCBI GI NO: 34911864 NR Description: OSJNBb0032K15.9
  misc_feature (10)..(352): NCBI GI NO: 15219157 NR Description: hypothetical protein [Arabidopsis thaliana]
  misc_feature (30)..(352): NCBI GI NO: 18406003 NR Description: expressed protein [Arabidopsis thaliana]
  misc_feature (29)..(349): NCBI GI NO: 18396930 NR Description: expressed protein [Arabidopsis thaliana]
  misc_feature (30)..(349): NCBI GI NO: 21593142 NR Description: unknown [Arabidopsis thaliana]
  misc_feature (30)..(349): NCBI GI NO: 28393769 NR Description: unknown protein [Arabidopsis thaliana]
  misc_feature (22)..(349): NCBI GI NO: 18403435 NR Description: expressed protein [Arabidopsis thaliana]
  misc_feature (10)..(251): NCBI GI NO: 11994596 NR Description: gb|AAD22996
MGWSFSISVLLFLTFLIQIHGRGFAENYGCNLFQGSWVYDESYPLYATSQCPFIEKEFDCQNNGRPDKFYLKYRWQPAGCNLTRFNGEDFLRRHRGRSLMFVGDSLSLNQWQSLTCMLHIAVPLAPYNLVRNGDLSIFTFPTYGVKVMFSRNAFLVDIVSESIGRVLKLDSIQAGQTWKGIDILIFDSWHWWLHTGRKQPWDLIQVGNRTVRDMNRLVAYEIALNTWAKWIDYNIDPTRTRVLFQGVSPDHQNPAQWGEPRANFCAGQTKPISGLRYPGGPNPAEVVLEKVLKAMQKPVYLLDITTLSQLRIDGHPSVYGHGGHLDMDCSHWCLAGVPDTWNELLYVSLFQN

SEQ ID NO: 5535 - protein, 253 aa, Glycine max
  peptide (1)..(253): Ceres Seq. ID no. 15171558
  misc_feature (93)..(250): Pfam Name: Pfam Description:  Arabidopsis proteins of unknown function
  misc_feature (1)..(253): NCBI GI NO: 15224585 NR Description: expressed protein [Arabidopsis thaliana]
  misc_feature (1)..(253): NCBI GI NO: 30350855 NR Description: hypothetical protein At2g30900
  misc_feature (1)..(250): NCBI GI NO: 34911864 NR Description: OSJNBb0032K15.9
  misc_feature (1)..(253): NCBI GI NO: 15219157 NR Description: hypothetical protein [Arabidopsis thaliana]
  misc_feature (1)..(253): NCBI GI NO: 18406003 NR Description: expressed protein [Arabidopsis thaliana]
  misc_feature (1)..(250): NCBI GI NO: 18396930 NR Description: expressed protein [Arabidopsis thaliana]
  misc_feature (1)..(250): NCBI GI NO: 21593142 NR Description: unknown [Arabidopsis thaliana]
  misc_feature (1)..(250): NCBI GI NO: 28393769 NR Description: unknown protein [Arabidopsis thaliana]
  misc_feature (1)..(250): NCBI GI NO: 18403435 NR Description: expressed protein [Arabidopsis thaliana]
  misc_feature (1)..(152): NCBI GI NO: 11994596 NR Description: gb|AAD22996
MFVGDSLSLNQWQSLTCMLHIAVPLAPYNLVRNGDLSIFTFPTYGVKVMFSRNAFLVDIVSESIGRVLKLDSIQAGQTWKGIDILIFDSWHWWLHTGRKQPWDLIQVGNRTVRDMNRLVAYEIALNTWAKWIDYNIDPTRTRVLFQGVSPDHQNPAQWGEPRANFCAGQTKPISGLRYPGGPNPAEVVLEKVLKAMQKPVYLLDITTLSQLRIDGHPSVYGHGGHLDMDCSHWCLAGVPDTWNELLYVSLFQN

SEQ ID NO: 5536 - protein, 236 aa, Glycine max
  peptide (1)..(236): Ceres Seq. ID no. 15171559
  misc_feature (76)..(233): Pfam Name: Pfam Description:  Arabidopsis proteins of unknown function
  misc_feature (1)..(236): NCBI GI NO: 15224585 NR Description: expressed protein [Arabidopsis thaliana]
  misc_feature (1)..(236): NCBI GI NO: 30350855 NR Description: hypothetical protein At2g30900
  misc_feature (1)..(233): NCBI GI NO: 34911864 NR Description: OSJNBb0032K15.9
  misc_feature (1)..(236): NCBI GI NO: 15219157 NR Description: hypothetical protein [Arabidopsis thaliana]
  misc_feature (1)..(236): NCBI GI NO: 18406003 NR Description: expressed protein [Arabidopsis thaliana]
  misc_feature (1)..(233): NCBI GI NO: 18396930 NR Description: expressed protein [Arabidopsis thaliana]
  misc_feature (1)..(233): NCBI GI NO: 21593142 NR Description: unknown [Arabidopsis thaliana]
  misc_feature (1)..(233): NCBI GI NO: 28393769 NR Description: unknown protein [Arabidopsis thaliana]
  misc_feature (1)..(233): NCBI GI NO: 18403435 NR Description: expressed protein [Arabidopsis thaliana]
  misc_feature (1)..(135): NCBI GI NO: 11994596 NR Description: gb|AAD22996
MLHIAVPLAPYNLVRNGDLSIFTFPTYGVKVMFSRNAFLVDIVSESIGRVLKLDSIQAGQTWKGIDILIFDSWHWWLHTGRKQPWDLIQVGNRTVRDMNRLVAYEIALNTWAKWIDYNIDPTRTRVLFQGVSPDHQNPAQWGEPRANFCAGQTKPISGLRYPGGPNPAEVVLEKVLKAMQKPVYLLDITTLSQLRIDGHPSVYGHGGHLDMDCSHWCLAGVPDTWNELLYVSLFQN

SEQ ID NO: 5537 - DNA, 1531 bp, Glycine max
  misc_feature (1)..(1531): Ceres Seq. ID no. 14307253
gaataaatagtaactctaatctaacacgctttctctgctgtgtctttgcagtgagtttcattgcaaagctacttttctctgtttggggataaataaaatgggttgcttttcatgtttcgattcgagttccaaggaggatcacaatctccgtcctcagcaccaacccaatcaacctctcccttctcagatttccagattgccctctggagcagacaagttacggtccagaagtaatggaggttccaaaagagaactgcaacagcctcctcccaccgtccaaattgctgctcaaacatttactttccgtgaacttgccgctgcaactaaaaactttagaccagagtcctttgttggggaaggtggttttggaagggtctacaaaggcaggcttgaaaccactgctcagattgttgctgtcaaacagttagacaaaaatggtcttcagggtaatcgggaattccttgtagaggttctcatgctcagtcttctacatcaccctaaccttgtcaatctcattggatactgtgcggatggggatcaacgcctcctcgtttatgaatttatgcctttgggatcattggaagatcaccttcatgatcttccccctgataaggaaccactagattggaacactagaatgaaaattgctgttggtgctgcaaaaggattagaataccttcacgataaggcaaatcctcctgtcatctacagagacttcaagtcatctaacatattacttgatgaaggataccacccaaaactttctgactttggtcttgcgaagcttggtcctgttggtgacaaatcacatgtttctacccgtgtcatgggaacttatggttactgtgctcctgagtatgctatgactggacagctgactgtgaagtctgatgtatatagttttggggtggtcttcttagagctgattactggccgtaaagcaattgacagcacccagccgcagggagaacagaaccttgtcacatgggcacgtccactttttaatgaccgcaggaagttttcaaagttggctgatcccaggctgcaggggcgatttcccatgcggggtctttaccaggctcttgctgtggcatcaatgtgcattcaagaatcagctgcaacgcgtcctctaattggagatgtggtgacagccctctcttatctggccaaccaggcatatgaccccaatggttatagggggtctagtgatgataaaaggaacagagatgataaaggtggaagaatatccaaaaatgatgaagctgggggatctggacgcagatgggacttggaaggatccgagaaagatgactccccacgagaaactgcaaggattttaaacagagatctagatagagaacgagctgtggctgaagccaagatgtggggagagaacttgagacaaaaaagaaaacaaagtttgcagcagggcagtcttgatgcttaattttctgccttgaggctatggaagatggaagaaaatatggggagcttatctagagaaacaactcaaacagccagccatttaggc

SEQ ID NO: 5538 - protein, 449 aa, Glycine max
  peptide (1)..(449): Ceres Seq. ID no. 14307254
  misc_feature (1)..(449): NCBI GI NO: 15240038 NR Description: protein kinase family [Arabidopsis thaliana]
  misc_feature (2)..(446): NCBI GI NO: 15238886 NR Description: protein kinase family [Arabidopsis thaliana]
  misc_feature (42)..(297): NCBI GI NO: 21740745 NR Description: OSJNBa0072K14.3
  misc_feature (298)..(446): NCBI GI NO: 21740745 NR Description: OSJNBa0072K14.3
  misc_feature (31)..(434): NCBI GI NO: 34907210 NR Description: putative serine/threonine kinase PBS1 protein
  misc_feature (1)..(364): NCBI GI NO: 34395193 NR Description: putative protein serine/threonine kinase
  misc_feature (61)..(366): NCBI GI NO: 34394036 NR Description: putative protein serine/threonine kinase BNK1
  misc_feature (1)..(364): NCBI GI NO: 34899302 NR Description: putative protein serine/threonine kinase
  misc_feature (1)..(363): NCBI GI NO: 30679773 NR Description: protein kinase family [Arabidopsis thaliana]
  misc_feature (62)..(379): NCBI GI NO: 15232294 NR Description: protein kinase family [Arabidopsis thaliana]
MGCFSCFDSSSKEDHNLRPQHQPNQPLPSQISRLPSGADKLRSRSNGGSKRELQQPPPTVQIAAQTFTFRELAAATKNFRPESFVGEGGFGRVYKGRLETTAQIVAVKQLDKNGLQGNREFLVEVLMLSLLHHPNLVNLIGYCADGDQRLLVYEFMPLGSLEDHLHDLPPDKEPLDWNTRMKIAVGAAKGLEYLHDKANPPVIYRDFKSSNILLDEGYHPKLSDFGLAKLGPVGDKSHVSTRVMGTYGYCAPEYAMTGQLTVKSDVYSFGVVFLELITGRKAIDSTQPQGEQNLVTWARPLFNDRRKFSKLADPRLQGRFPMRGLYQALAVASMCIQESAATRPLIGDVVTALSYLANQAYDPNGYRGSSDDKRNRDDKGGRISKNDEAGGSGRRWDLEGSEKDDSPRETARILNRDLDRERAVAEAKMWGENLRQKRKQSLQQGSLDA

SEQ ID NO: 5539 - protein, 323 aa, Glycine max
  peptide (1)..(323): Ceres Seq. ID no. 14307255
  misc_feature (1)..(323): NCBI GI NO: 15240038 NR Description: protein kinase family [Arabidopsis thaliana]
  misc_feature (1)..(320): NCBI GI NO: 15238886 NR Description: protein kinase family [Arabidopsis thaliana]
  misc_feature (1)..(171): NCBI GI NO: 21740745 NR Description: OSJNBa0072K14.3
  misc_feature (172)..(320): NCBI GI NO: 21740745 NR Description: OSJNBa0072K14.3
  misc_feature (1)..(308): NCBI GI NO: 34907210 NR Description: putative serine/threonine kinase PBS1 protein
  misc_feature (1)..(238): NCBI GI NO: 34395193 NR Description: putative protein serine/threonine kinase
  misc_feature (1)..(240): NCBI GI NO: 34394036 NR Description: putative protein serine/threonine kinase BNK1
  misc_feature (1)..(238): NCBI GI NO: 34899302 NR Description: putative protein serine/threonine kinase
  misc_feature (1)..(237): NCBI GI NO: 30679773 NR Description: protein kinase family [Arabidopsis thaliana]
  misc_feature (1)..(253): NCBI GI NO: 15232294 NR Description: protein kinase family [Arabidopsis thaliana]
MLSLLHHPNLVNLIGYCADGDQRLLVYEFMPLGSLEDHLHDLPPDKEPLDWNTRMKIAVGAAKGLEYLHDKANPPVIYRDFKSSNILLDEGYHPKLSDFGLAKLGPVGDKSHVSTRVMGTYGYCAPEYAMTGQLTVKSDVYSFGVVFLELITGRKAIDSTQPQGEQNLVTWARPLFNDRRKFSKLADPRLQGRFPMRGLYQALAVASMCIQESAATRPLIGDVVTALSYLANQAYDPNGYRGSSDDKRNRDDKGGRISKNDEAGGSGRRWDLEGSEKDDSPRETARILNRDLDRERAVAEAKMWGENLRQKRKQSLQQGSLDA

SEQ ID NO: 5540 - protein, 294 aa, Glycine max
  peptide (1)..(294): Ceres Seq. ID no. 14307256
  misc_feature (1)..(294): NCBI GI NO: 15240038 NR Description: protein kinase family [Arabidopsis thaliana]
  misc_feature (1)..(291): NCBI GI NO: 15238886 NR Description: protein kinase family [Arabidopsis thaliana]
  misc_feature (1)..(142): NCBI GI NO: 21740745 NR Description: OSJNBa0072K14.3
  misc_feature (143)..(291): NCBI GI NO: 21740745 NR Description: OSJNBa0072K14.3
  misc_feature (1)..(279): NCBI GI NO: 34907210 NR Description: putative serine/threonine kinase PBS1 protein
  misc_feature (1)..(209): NCBI GI NO: 34395193 NR Description: putative protein serine/threonine kinase
  misc_feature (1)..(211): NCBI GI NO: 34394036 NR Description: putative protein serine/threonine kinase BNK1
  misc_feature (1)..(209): NCBI GI NO: 34899302 NR Description: putative protein serine/threonine kinase
  misc_feature (1)..(208): NCBI GI NO: 30679773 NR Description: protein kinase family [Arabidopsis thaliana]
  misc_feature (1)..(224): NCBI GI NO: 15232294 NR Description: protein kinase family [Arabidopsis thaliana]
MPLGSLEDHLHDLPPDKEPLDWNTRMKIAVGAAKGLEYLHDKANPPVIYRDFKSSNILLDEGYHPKLSDFGLAKLGPVGDKSHVSTRVMGTYGYCAPEYAMTGQLTVKSDVYSFGVVFLELITGRKAIDSTQPQGEQNLVTWARPLFNDRRKFSKLADPRLQGRFPMRGLYQALAVASMCIQESAATRPLIGDVVTALSYLANQAYDPNGYRGSSDDKRNRDDKGGRISKNDEAGGSGRRWDLEGSEKDDSPRETARILNRDLDRERAVAEAKMWGENLRQKRKQSLQQGSLDA

SEQ ID NO: 5541 - DNA, 1029 bp, Glycine max
  misc_feature (1)..(1029): Ceres Seq. ID no. 14307057
agcttatgccagaaaaatatcgatgttttattttatttcatttcttggttgtagttgaatcctctcactttgccaaaaaatcaaacaacataaccttaaattttcttgagggattgagttgttctgcattaagttctcagcacattctagccactgcataccatagcccgttctagattgtaacaaacccaactccctataataatctatgtgtggtccaccaagtgtggtccgtacttactctttcatgactgactttggtgcagacagtatgctcacaacaactaacatattagggagttgggcatctttatatttagttcatgactcttatgctttgatcaggttgtacattcatgcttaattatatgataattgggatatggtttgttcactaccatagtaataaggtgtagttatgtatattaattgatagttgttcaaatttatgttataccaagctaatgcattgagtaacactgcactgagtctagtgttgaaactcaggtagacaaatccactatgcctgcaaatacaaaggatgcattatatcaaagcttgcctcctaatataaaattagctctacgttccaaattaccatccctccgtgctgtagaagagataagtgtagcctatatcacatatgagatgcataaaaaattacattggttggttcccatggccattaacacatccaaagcacataagagatttggttggctaggggagtgggcatactcagggtatgaagtaaaaaagaagactggtgtaatgtggattgagacattctaccatgcagatagagagaaagtggaacattgtattcttgaacttctcttatggcttcatcgcttggccatcagaagtaaggctcacagtgatgctattgctggctaagtaaggtctgccacttgcgaagaaaatggaatgataaaactgaatttggtctcttttgattcaaccttaataaaggaaataattgcttaattagctctctaaataaatctcttgatttaagggattgcccgt

SEQ ID NO: 5542 - protein, 124 aa, Glycine max
  peptide (1)..(124): Ceres Seq. ID no. 14307058
  misc_feature (1)..(59): Pfam Name: DUF668 Pfam Description: Protein of unknown function
  misc_feature (1)..(117): NCBI GI NO: 25403424 NR Description: protein F23M19.3 [imported] - Arabidopsis thaliana
  misc_feature (1)..(117): NCBI GI NO: 15218580 NR Description: expressed protein [Arabidopsis thaliana]
  misc_feature (1)..(124): NCBI GI NO: 30682523 NR Description: expressed protein [Arabidopsis thaliana]
  misc_feature (1)..(122): NCBI GI NO: 18397646 NR Description: expressed protein [Arabidopsis thaliana]
  misc_feature (1)..(124): NCBI GI NO: 34908726 NR Description: P0491F11.23
  misc_feature (1)..(121): NCBI GI NO: 38345368 NR Description: OSJNBa0088K19.7
  misc_feature (1)..(59): NCBI GI NO: 25513510 NR Description: T5I8.21 protein - Arabidopsis thaliana
MPANTKDALYQSLPPNIKLALRSKLPSLRAVEEISVAYITYEMHKKLHWLVPMAINTSKAHKRFGWLGEWAYSGYEVKKKTGVMWIETFYHADREKVEHCILELLLWLHRLAIRSKAHSDAIAG

SEQ ID NO: 5543 - protein, 82 aa, Glycine max
  peptide (1)..(82): Ceres Seq. ID no. 14307059
  misc_feature (1)..(75): NCBI GI NO: 25403424 NR Description: protein F23M19.3 [imported] - Arabidopsis thaliana
  misc_feature (1)..(75): NCBI GI NO: 15218580 NR Description: expressed protein [Arabidopsis thaliana]
  misc_feature (1)..(82): NCBI GI NO: 30682523 NR Description: expressed protein [Arabidopsis thaliana]
  misc_feature (1)..(80): NCBI GI NO: 18397646 NR Description: expressed protein [Arabidopsis thaliana]
  misc_feature (1)..(82): NCBI GI NO: 34908726 NR Description: P0491F11.23
  misc_feature (1)..(79): NCBI GI NO: 38345368 NR Description: OSJNBa0088K19.7
  misc_feature (1)..(17): NCBI GI NO: 25513510 NR Description: T5I8.21 protein - Arabidopsis thaliana
MHKKLHWLVPMAINTSKAHKRFGWLGEWAYSGYEVKKKTGVMWIETFYHADREKVEHCILELLLWLHRLAIRSKAHSDAIAG

SEQ ID NO: 5544 - protein, 72 aa, Glycine max
  peptide (1)..(72): Ceres Seq. ID no. 14307060
  misc_feature (1)..(65): NCBI GI NO: 25403424 NR Description: protein F23M19.3 [imported] - Arabidopsis thaliana
  misc_feature (1)..(65): NCBI GI NO: 15218580 NR Description: expressed protein [Arabidopsis thaliana]
  misc_feature (1)..(72): NCBI GI NO: 30682523 NR Description: expressed protein [Arabidopsis thaliana]
  misc_feature (1)..(70): NCBI GI NO: 18397646 NR Description: expressed protein [Arabidopsis thaliana]
  misc_feature (1)..(72): NCBI GI NO: 34908726 NR Description: P0491F11.23
  misc_feature (1)..(69): NCBI GI NO: 38345368 NR Description: OSJNBa0088K19.7
MAINTSKAHKRFGWLGEWAYSGYEVKKKTGVMWIETFYHADREKVEHCILELLLWLHRLAIRSKAHSDAIAG

SEQ ID NO: 5545 - DNA, 1217 bp, Glycine max
  misc_feature (1)..(1217): Ceres Seq. ID no. 15178042
gggaaaagggttttacattttattcgttctccggtgagaaacagaaacacacagaagacagagtgagacgcttctcacgatggagggaggagtatcctacgcgcgcatgcctcgggtcaaaatccgcgagctgaaggacgactacgccaagttcgagctccgcgacaccgacgcgagcatcgccaacgcgctgcggcgcgtgatgatcgcggaggtgccgacggtcgccatcgacctcgtggagatcgaggtcaactcctcggtgctcaatgacgagtttatcgctcacaggctgggcctcatccccctcactagcgagcgcgccatgtccatgcgcttctcacgtgactgcgacgcgtgcgacggtgacggacagtgcgagttttgctccgtcgagtttcatcttagggttaagtgcatgactgatcagaccctcgatgttacgagcaaggacctctacagttctgaccctactgtcagtcccgttgatttctctgacccctctgccactgactccgacaacaacagggggattatcattgtgaagttgcggcgcggacaagagctgaagctgagagcgatagctaggaaggggattgggaaggatcatgctaaatggtcacctgctgcaactgtcactttcatgtatgaaccggagattcatataaatgaggatttgatggaaaccttgactctggaagagaaaagagaatgggttgacagtagtccaacccgtgtctttgaaattgatccagtgacacaacaggtgatggtggttgatgctgaggcatacacatatgatgatgaggtgcttaagaaagcagaagctatgggcaagcctgggcttgtagaaatcattgcgaggcaggatagcttcatattcactgtggagtctactggagcggttaaagcttctcaattggttctaaatgccatagaaattctcaagcagaagctggatgctgtgaggctatctgaagatacagtggaggctgatgatcagtttggcgagcttggtgcacatatgcgaggaggttgattaatttgttagaaggatatcagacttgtttcccacaacttgtttcccggaacttgtttcttacttgtctttaactgaatacctgcagaacgtattaacttgttgagccaaggatgctaattagtaattactgtgattaccatttgaagatagatagttatctttcacattttatttc

SEQ ID NO: 5546 - protein, 319 aa, Glycine max
  peptide (1)..(319): Ceres Seq. ID no. 15178043
  misc_feature (54)..(181): Pfam Name: Pfam Description:  RNA polymerase Rpb3/RpoA insert domain
  misc_feature (4)..(319): NCBI GI NO: 15226523 NR Description: DNA-directed RNA polymerase II
  misc_feature (4)..(319): NCBI GI NO: 21593370 NR Description: DNA-directed RNA polymerase II
  misc_feature (4)..(319): NCBI GI NO: 15226509 NR Description: DNA-directed RNA polymerase II
  misc_feature (4)..(319): NCBI GI NO: 2129725 NR Description: DNA-directed RNA polymerase (EC 2
  misc_feature (7)..(222): NCBI GI NO: 40645083 NR Description: homologue of DNA-directed RNA polymerase II subunit
  misc_feature (261)..(293): NCBI GI NO: 40645083 NR Description: homologue of DNA-directed RNA polymerase II subunit
  misc_feature (7)..(220): NCBI GI NO: 17137650 NR Description: RNA polymerase II 33kD subunit CG7885-PA
  misc_feature (261)..(293): NCBI GI NO: 17137650 NR Description: RNA polymerase II 33kD subunit CG7885-PA
  misc_feature (7)..(220): NCBI GI NO: 31229547 NR Description: ENSANGP00000017124 [Anopheles gambiae]
  misc_feature (262)..(302): NCBI GI NO: 31229547 NR Description: ENSANGP00000017124 [Anopheles gambiae]
MEGGVSYARMPRVKIRELKDDYAKFELRDTDASIANALRRVMIAEVPTVAIDLVEIEVNSSVLNDEFIAHRLGLIPLTSERAMSMRFSRDCDACDGDGQCEFCSVEFHLRVKCMTDQTLDVTSKDLYSSDPTVSPVDFSDPSATDSDNNRGIIIVKLRRGQELKLRAIARKGIGKDHAKWSPAATVTFMYEPEIHINEDLMETLTLEEKREWVDSSPTRVFEIDPVTQQVMVVDAEAYTYDDEVLKKAEAMGKPGLVEIIARQDSFIFTVESTGAVKASQLVLNAIEILKQKLDAVRLSEDTVEADDQFGELGAHMRGG

SEQ ID NO: 5547 - protein, 310 aa, Glycine max
  peptide (1)..(310): Ceres Seq. ID no. 15178044
  misc_feature (45)..(172): Pfam Name: Pfam Description:  RNA polymerase Rpb3/RpoA insert domain
  misc_feature (1)..(310): NCBI GI NO: 15226523 NR Description: DNA-directed RNA polymerase II
  misc_feature (1)..(310): NCBI GI NO: 21593370 NR Description: DNA-directed RNA polymerase II
  misc_feature (1)..(310): NCBI GI NO: 15226509 NR Description: DNA-directed RNA polymerase II
  misc_feature (1)..(310): NCBI GI NO: 2129725 NR Description: DNA-directed RNA polymerase (EC 2
  misc_feature (1)..(213): NCBI GI NO: 40645083 NR Description: homologue of DNA-directed RNA polymerase II subunit
  misc_feature (252)..(284): NCBI GI NO: 40645083 NR Description: homologue of DNA-directed RNA polymerase II subunit
  misc_feature (1)..(211): NCBI GI NO: 17137650 NR Description: RNA polymerase II 33kD subunit CG7885-PA
  misc_feature (252)..(284): NCBI GI NO: 17137650 NR Description: RNA polymerase II 33kD subunit CG7885-PA
  misc_feature (1)..(211): NCBI GI NO: 31229547 NR Description: ENSANGP00000017124 [Anopheles gambiae]
  misc_feature (253)..(293): NCBI GI NO: 31229547 NR Description: ENSANGP00000017124 [Anopheles gambiae]
MPRVKIRELKDDYAKFELRDTDASIANALRRVMIAEVPTVAIDLVEIEVNSSVLNDEFIAHRLGLIPLTSERAMSMRFSRDCDACDGDGQCEFCSVEFHLRVKCMTDQTLDVTSKDLYSSDPTVSPVDFSDPSATDSDNNRGIIIVKLRRGQELKLRAIARKGIGKDHAKWSPAATVTFMYEPEIHINEDLMETLTLEEKREWVDSSPTRVFEIDPVTQQVMVVDAEAYTYDDEVLKKAEAMGKPGLVEIIARQDSFIFTVESTGAVKASQLVLNAIEILKQKLDAVRLSEDTVEADDQFGELGAHMRGG

SEQ ID NO: 5548 - protein, 278 aa, Glycine max
  peptide (1)..(278): Ceres Seq. ID no. 15178045
  misc_feature (13)..(140): Pfam Name: Pfam Description:  RNA polymerase Rpb3/RpoA insert domain
  misc_feature (1)..(278): NCBI GI NO: 15226523 NR Description: DNA-directed RNA polymerase II
  misc_feature (1)..(278): NCBI GI NO: 21593370 NR Description: DNA-directed RNA polymerase II
  misc_feature (1)..(278): NCBI GI NO: 15226509 NR Description: DNA-directed RNA polymerase II
  misc_feature (1)..(278): NCBI GI NO: 2129725 NR Description: DNA-directed RNA polymerase (EC 2
  misc_feature (1)..(181): NCBI GI NO: 40645083 NR Description: homologue of DNA-directed RNA polymerase II subunit
  misc_feature (220)..(252): NCBI GI NO: 40645083 NR Description: homologue of DNA-directed RNA polymerase II subunit
  misc_feature (1)..(179): NCBI GI NO: 17137650 NR Description: RNA polymerase II 33kD subunit CG7885-PA
  misc_feature (220)..(252): NCBI GI NO: 17137650 NR Description: RNA polymerase II 33kD subunit CG7885-PA
  misc_feature (1)..(179): NCBI GI NO: 31229547 NR Description: ENSANGP00000017124 [Anopheles gambiae]
  misc_feature (221)..(261): NCBI GI NO: 31229547 NR Description: ENSANGP00000017124 [Anopheles gambiae]
MIAEVPTVAIDLVEIEVNSSVLNDEFIAHRLGLIPLTSERAMSMRFSRDCDACDGDGQCEFCSVEFHLRVKCMTDQTLDVTSKDLYSSDPTVSPVDFSDPSATDSDNNRGIIIVKLRRGQELKLRAIARKGIGKDHAKWSPAATVTFMYEPEIHINEDLMETLTLEEKREWVDSSPTRVFEIDPVTQQVMVVDAEAYTYDDEVLKKAEAMGKPGLVEIIARQDSFIFTVESTGAVKASQLVLNAIEILKQKLDAVRLSEDTVEADDQFGELGAHMRGG

SEQ ID NO: 5549 - DNA, 1539 bp, Glycine max
  misc_feature (1)..(1539): Ceres Seq. ID no. 14313863
acatacatacactgattcgaatgcatcatctcctagtgcaaacacagctatcttaggattggttgtagttgataatagagacaaggaaaaagtagtagatttgagttcttctctgtcaaaggaagacaaaagattgaacaatatgcaccaagattttgttcttccctctccaaaagaaatttctgtgtgcatgacaggaaacagtacaagtagttctagaaccttgaagttgagccgaagtagaagttgtatagcaagtatcatgaggaatttatcttcagattggtttgaagatgaagacgtaattcagaacactcctccaatagggaatgaaaaagccttccctggaagaccagagggctttccgaagaacatttatgcactaaattacaatgccaatgcagagaggctttcatgtaatggccatgggaattctgtgcaaaattcttctgttcatgatgttcagaatgtgaaatcctccactaacaaggaaagagagggtaatggtcccttggctccaaaaggaaaggaaacagaaaatcttaacaggttgagtttactggctgaccatgaggttccggggacaggattggatcccatcttgtctgcaaagaatgtcaaagatattggcttggatcccatgcaagctgatggagaaactcactcacactcacattggccttcaaaattccagaggctacaaagagagatcattgaattctgggatgcgtgtaatgtttcattggttcacaggacttactttttccttctattcaaaggggaaccatcagattctatttatatggaggtagagttgagaagactatcataccttacgcaaactttttcccaaggcaatcaaactgtggaagatggacgaaccctcacacctgagttaagcatgagatatcttagaaaagagaggcaaatgctgagcaagcaaatgcataagcgactgtctaaatatgatagacagaacctgtacttgaaatggggccttcgtttgagttcaaagcataggagtttgcagttggcccatcaattgtggagtgacacaaaagacatggaccacgttagagacagtgcatcaattgttgcaaagctggttggtttagtagagccagaacaggcatttaaggagatgtttggactcaactttaccccacaacccacgagtagaaaatcttttagttggacagccagtgtgaggcatattttgtgactttggattactttttaggtagtagcttggtatggccatgtgaaaatgtagataattcttttctccccttatcttagaaacaaattgctttctgctgtatgcttctaactctgattgctattgattgtaaagaatgtgcaattctatggttgcagatttgttcatctgtcctaggttggttccaggtagaacatcatgaatagttcaatatggattgttacctgggaaaaaatatgcaatgtgattttttacgtgtgtgctttattgtaacagtccattctttagttaacattaagaatcataaaacctagacgaac

SEQ ID NO: 5550 - protein, 406 aa, Glycine max
  peptide (1)..(406): Ceres Seq. ID no. 14313864
  misc_feature (29)..(402): NCBI GI NO: 30693419 NR Description: expressed protein [Arabidopsis thaliana]
  misc_feature (66)..(398): NCBI GI NO: 38567877 NR Description: OSJNBa0091D06.23
  misc_feature (66)..(398): NCBI GI NO: 38344976 NR Description: OSJNBa0011L07.1
  misc_feature (66)..(398): NCBI GI NO: 15208467 NR Description: kinesin heavy chain [Zea mays]
  misc_feature (91)..(398): NCBI GI NO: 15208447 NR Description: kinesin heavy chain [Zea mays]
  misc_feature (53)..(402): NCBI GI NO: 30698217 NR Description: kinesin heavy chain DNA binding protein-related
  misc_feature (202)..(402): NCBI GI NO: 15234898 NR Description: kinesin like protein [Arabidopsis thaliana]
  misc_feature (228)..(398): NCBI GI NO: 15238979 NR Description: kinesin heavy chain-related protein
  misc_feature (53)..(380): NCBI GI NO: 10177425 NR Description: kinesin heavy chain DNA binding protein-like
  misc_feature (228)..(401): NCBI GI NO: 18416291 NR Description: hypothetical protein [Arabidopsis thaliana]
HTYTDSNASSPSANTAILGLVVVDNRDKEKVVDLSSSLSKEDKRLNNMHQDFVLPSPKEISVCMTGNSTSSSRTLKLSRSRSCIASIMRNLSSDWFEDEDVIQNTPPIGNEKAFPGRPEGFPKNIYALNYNANAERLSCNGHGNSVQNSSVHDVQNVKSSTNKEREGNGPLAPKGKETENLNRLSLLADHEVPGTGLDPILSAKNVKDIGLDPMQADGETHSHSHWPSKFQRLQREIIEFWDACNVSLVHRTYFFLLFKGEPSDSIYMEVELRRLSYLTQTFSQGNQTVEDGRTLTPELSMRYLRKERQMLSKQMHKRLSKYDRQNLYLKWGLRLSSKHRSLQLAHQLWSDTKDMDHVRDSASIVAKLVGLVEPEQAFKEMFGLNFTPQPTSRKSFSWTASVRHIL

SEQ ID NO: 5551 - protein, 359 aa, Glycine max
  peptide (1)..(359): Ceres Seq. ID no. 14313865
  misc_feature (1)..(355): NCBI GI NO: 30693419 NR Description: expressed protein [Arabidopsis thaliana]
  misc_feature (19)..(351): NCBI GI NO: 38567877 NR Description: OSJNBa0091D06.23
  misc_feature (19)..(351): NCBI GI NO: 38344976 NR Description: OSJNBa0011L07.1
  misc_feature (19)..(351): NCBI GI NO: 15208467 NR Description: kinesin heavy chain [Zea mays]
  misc_feature (44)..(351): NCBI GI NO: 15208447 NR Description: kinesin heavy chain [Zea mays]
  misc_feature (6)..(355): NCBI GI NO: 30698217 NR Description: kinesin heavy chain DNA binding protein-related
  misc_feature (155)..(355): NCBI GI NO: 15234898 NR Description: kinesin like protein [Arabidopsis thaliana]
  misc_feature (181)..(351): NCBI GI NO: 15238979 NR Description: kinesin heavy chain-related protein
  misc_feature (6)..(333): NCBI GI NO: 10177425 NR Description: kinesin heavy chain DNA binding protein-like
  misc_feature (181)..(354): NCBI GI NO: 18416291 NR Description: hypothetical protein [Arabidopsis thaliana]
MHQDFVLPSPKEISVCMTGNSTSSSRTLKLSRSRSCIASIMRNLSSDWFEDEDVIQNTPPIGNEKAFPGRPEGFPKNIYALNYNANAERLSCNGHGNSVQNSSVHDVQNVKSSTNKEREGNGPLAPKGKETENLNRLSLLADHEVPGTGLDPILSAKNVKDIGLDPMQADGETHSHSHWPSKFQRLQREIIEFWDACNVSLVHRTYFFLLFKGEPSDSIYMEVELRRLSYLTQTFSQGNQTVEDGRTLTPELSMRYLRKERQMLSKQMHKRLSKYDRQNLYLKWGLRLSSKHRSLQLAHQLWSDTKDMDHVRDSASIVAKLVGLVEPEQAFKEMFGLNFTPQPTSRKSFSWTASVRHIL

SEQ ID NO: 5552 - protein, 343 aa, Glycine max
  peptide (1)..(343): Ceres Seq. ID no. 14313866
  misc_feature (1)..(339): NCBI GI NO: 30693419 NR Description: expressed protein [Arabidopsis thaliana]
  misc_feature (3)..(335): NCBI GI NO: 38567877 NR Description: OSJNBa0091D06.23
  misc_feature (3)..(335): NCBI GI NO: 38344976 NR Description: OSJNBa0011L07.1
  misc_feature (3)..(335): NCBI GI NO: 15208467 NR Description: kinesin heavy chain [Zea mays]
  misc_feature (28)..(335): NCBI GI NO: 15208447 NR Description: kinesin heavy chain [Zea mays]
  misc_feature (1)..(339): NCBI GI NO: 30698217 NR Description: kinesin heavy chain DNA binding protein-related
  misc_feature (139)..(339): NCBI GI NO: 15234898 NR Description: kinesin like protein [Arabidopsis thaliana]
  misc_feature (165)..(335): NCBI GI NO: 15238979 NR Description: kinesin heavy chain-related protein
  misc_feature (1)..(317): NCBI GI NO: 10177425 NR Description: kinesin heavy chain DNA binding protein-like
  misc_feature (165)..(338): NCBI GI NO: 18416291 NR Description: hypothetical protein [Arabidopsis thaliana]
MTGNSTSSSRTLKLSRSRSCIASIMRNLSSDWFEDEDVIQNTPPIGNEKAFPGRPEGFPKNIYALNYNANAERLSCNGHGNSVQNSSVHDVQNVKSSTNKEREGNGPLAPKGKETENLNRLSLLADHEVPGTGLDPILSAKNVKDIGLDPMQADGETHSHSHWPSKFQRLQREIIEFWDACNVSLVHRTYFFLLFKGEPSDSIYMEVELRRLSYLTQTFSQGNQTVEDGRTLTPELSMRYLRKERQMLSKQMHKRLSKYDRQNLYLKWGLRLSSKHRSLQLAHQLWSDTKDMDHVRDSASIVAKLVGLVEPEQAFKEMFGLNFTPQPTSRKSFSWTASVRHIL

SEQ ID NO: 5553 - DNA, 1654 bp, Glycine max
  misc_feature (1)..(1654): Ceres Seq. ID no. 14313897
gtgcttcgttgtgctacgccacgaaagaatttcttgttttctgctttcgaataaacgaataagaagccttcacaccgcttcgttgtgctgtgcttgcttctcttttattctttctattagtattcgtttcgttttctccgccgtttccgtagctcggcttcagcagcaccagaaccaggtgtctactatctgactacacatgtgctgttattgtcttccaattgggtgaagtctgattgaagagcaatgcagaaggatactagtaccaccgccccatcaaccacaagtggtcgggttaggcaccgaaaacgctcaaatgaggttattccggaagttagtaaagcaaatgggaccaagttactggttaatgacaaaagcaaatacaagtctatgctaattcgagcatattcatctgtatggatgattggcggctttgttttgatcatttatatgggtcacctctacatcactgcaatggtggttgttatccaaatcttcatggcaagggagctgttcaatctactcaggagagctcatgaagataggcagctgccaggatttaggctattaaattggcattttttcttcactgcaatgttatttgtttatggacgaattctgagtcaatgcctggttaacacagtaacttcagacatggttttatattggctagtgagcaatcttataaagtatcacatggttatctgctactccctgtacattgcaggatttatgtggttcattctcacgttgaagaagaagatgtacaagtaccaatttggccagtatgcttggacacacatgattctaattgttgtatttggccagtcctccttcaccgtggcaagcatttttgaagggattttctggtttcttctcccagcaacacttattgtcattaatgatattgctgcttatatctttggtttcttctttggaagaacccctttgatcaagttatctccaaagaaaacttgggagggttttataggggcatctgttaccaccatcatctctgcatttatgcttgctaacatcatgggtcgctctcagtggctaacgtgtccaaggaaggatttgtcaactggttggcttcactgtgatcctggtccactgtttaagccagaatcttatcccttacctggatgtatttctcactggttttcttggaaagagatatcaatcctaccaattcaatggcattctttatgtctaggcttgtttgcttcaattattgcaccttttggaggcttctttgcaagtggctttaaaagggcttttaaaataaaggactttggtgatagtattccgggacatggtggaattaccgacagaatggattgccagatggttatggccgtgtttgcatacatatatcatcagtcatttgttgtgccgcaaactctctcggttgaaatgattttggaccagatatcgatgaacctaacattcgatgagcaacaagctctatattggaggcttggggaaattttacaacaggggtttgctaggatgtcttagattcatggcgaggtgtatttgttctgtcaccttctattgtattccttcacatacaggggaaaaggaaaagatactatgtacatgtgtttgttttctatcttttgagtgaaacaaattaaaggttcagaagctg

SEQ ID NO: 5554 - protein, 424 aa, Glycine max
  peptide (1)..(424): Ceres Seq. ID no. 14313898
  misc_feature (1)..(418): NCBI GI NO: 3121837 NR Description: Phosphatidate cytidylyltransferase
  misc_feature (1)..(418): NCBI GI NO: 15235611 NR Description: phosphatidate cytidylyltransferase, putative
  misc_feature (1)..(417): NCBI GI NO: 30696710 NR Description: phosphatidate cytidylyltransferase (CDS)
  misc_feature (1)..(417): NCBI GI NO: 7484839 NR Description: CDP-diacylglycerol synthetase homolog F24O1
  misc_feature (4)..(419): NCBI GI NO: 20303635 NR Description: putative CDP-diacylglycerol synthetase
  misc_feature (3)..(417): NCBI GI NO: 15236874 NR Description: phosphatidate cytidylyltransferase, putative
  misc_feature (4)..(138): NCBI GI NO: 37532798 NR Description: putative phosphatidate cytidylyltransferase
  misc_feature (277)..(367): NCBI GI NO: 37532798 NR Description: putative phosphatidate cytidylyltransferase
  misc_feature (385)..(419): NCBI GI NO: 37532798 NR Description: putative phosphatidate cytidylyltransferase
  misc_feature (5)..(408): NCBI GI NO: 32419699 NR Description: hypothetical protein [Neurospora crassa]
MQKDTSTTAPSTTSGRVRHRKRSNEVIPEVSKANGTKLLVNDKSKYKSMLIRAYSSVWMIGGFVLIIYMGHLYITAMVVVIQIFMARELFNLLRRAHEDRQLPGFRLLNWHFFFTAMLFVYGRILSQCLVNTVTSDMVLYWLVSNLIKYHMVICYSLYIAGFMWFILTLKKKMYKYQFGQYAWTHMILIVVFGQSSFTVASIFEGIFWFLLPATLIVINDIAAYIFGFFFGRTPLIKLSPKKTWEGFIGASVTTIISAFMLANIMGRSQWLTCPRKDLSTGWLHCDPGPLFKPESYPLPGCISHWFSWKEISILPIQWHSLCLGLFASIIAPFGGFFASGFKRAFKIKDFGDSIPGHGGITDRMDCQMVMAVFAYIYHQSFVVPQTLSVEMILDQISMNLTFDEQQALYWRLGEILQQGFARMS

SEQ ID NO: 5555 - protein, 376 aa, Glycine max
  peptide (1)..(376): Ceres Seq. ID no. 14313899
  misc_feature (1)..(370): NCBI GI NO: 3121837 NR Description: Phosphatidate cytidylyltransferase
  misc_feature (1)..(370): NCBI GI NO: 15235611 NR Description: phosphatidate cytidylyltransferase, putative
  misc_feature (1)..(369): NCBI GI NO: 30696710 NR Description: phosphatidate cytidylyltransferase (CDS)
  misc_feature (1)..(369): NCBI GI NO: 7484839 NR Description: CDP-diacylglycerol synthetase homolog F24O1
  misc_feature (1)..(371): NCBI GI NO: 20303635 NR Description: putative CDP-diacylglycerol synthetase
  misc_feature (1)..(369): NCBI GI NO: 15236874 NR Description: phosphatidate cytidylyltransferase, putative
  misc_feature (1)..(90): NCBI GI NO: 37532798 NR Description: putative phosphatidate cytidylyltransferase
  misc_feature (229)..(319): NCBI GI NO: 37532798 NR Description: putative phosphatidate cytidylyltransferase
  misc_feature (337)..(371): NCBI GI NO: 37532798 NR Description: putative phosphatidate cytidylyltransferase
  misc_feature (1)..(360): NCBI GI NO: 32419699 NR Description: hypothetical protein [Neurospora crassa]
MLIRAYSSVWMIGGFVLIIYMGHLYITAMVVVIQIFMARELFNLLRRAHEDRQLPGFRLLNWHFFFTAMLFVYGRILSQCLVNTVTSDMVLYWLVSNLIKYHMVICYSLYIAGFMWFILTLKKKMYKYQFGQYAWTHMILIVVFGQSSFTVASIFEGIFWFLLPATLIVINDIAAYIFGFFFGRTPLIKLSPKKTWEGFIGASVTTIISAFMLANIMGRSQWLTCPRKDLSTGWLHCDPGPLFKPESYPLPGCISHWFSWKEISILPIQWHSLCLGLFASIIAPFGGFFASGFKRAFKIKDFGDSIPGHGGITDRMDCQMVMAVFAYIYHQSFVVPQTLSVEMILDQISMNLTFDEQQALYWRLGEILQQGFARMS

SEQ ID NO: 5556 - protein, 366 aa, Glycine max
  peptide (1)..(366): Ceres Seq. ID no. 14313900
  misc_feature (1)..(360): NCBI GI NO: 3121837 NR Description: Phosphatidate cytidylyltransferase
  misc_feature (1)..(360): NCBI GI NO: 15235611 NR Description: phosphatidate cytidylyltransferase, putative
  misc_feature (1)..(359): NCBI GI NO: 30696710 NR Description: phosphatidate cytidylyltransferase (CDS)
  misc_feature (1)..(359): NCBI GI NO: 7484839 NR Description: CDP-diacylglycerol synthetase homolog F24O1
  misc_feature (1)..(361): NCBI GI NO: 20303635 NR Description: putative CDP-diacylglycerol synthetase
  misc_feature (1)..(359): NCBI GI NO: 15236874 NR Description: phosphatidate cytidylyltransferase, putative
  misc_feature (1)..(80): NCBI GI NO: 37532798 NR Description: putative phosphatidate cytidylyltransferase
  misc_feature (219)..(309): NCBI GI NO: 37532798 NR Description: putative phosphatidate cytidylyltransferase
  misc_feature (327)..(361): NCBI GI NO: 37532798 NR Description: putative phosphatidate cytidylyltransferase
  misc_feature (1)..(350): NCBI GI NO: 32419699 NR Description: hypothetical protein [Neurospora crassa]
MIGGFVLIIYMGHLYITAMVVVIQIFMARELFNLLRRAHEDRQLPGFRLLNWHFFFTAMLFVYGRILSQCLVNTVTSDMVLYWLVSNLIKYHMVICYSLYIAGFMWFILTLKKKMYKYQFGQYAWTHMILIVVFGQSSFTVASIFEGIFWFLLPATLIVINDIAAYIFGFFFGRTPLIKLSPKKTWEGFIGASVTTIISAFMLANIMGRSQWLTCPRKDLSTGWLHCDPGPLFKPESYPLPGCISHWFSWKEISILPIQWHSLCLGLFASIIAPFGGFFASGFKRAFKIKDFGDSIPGHGGITDRMDCQMVMAVFAYIYHQSFVVPQTLSVEMILDQISMNLTFDEQQALYWRLGEILQQGFARMS

SEQ ID NO: 5557 - DNA, 1716 bp, Glycine max
  misc_feature (1)..(1716): Ceres Seq. ID no. 14303430
aaggtcccgagtaagatgtttagatccattaatcataacaaggattttgaagtttcacttgcttatgaaagtgagaatcatttgcctcctggtgttacctctcctgaaattgctcgataccagatatctggtttgacagatgcaagtgagaaatactcatctcggaatctgtcatcccccatcaagacaaacatacatttttctcttagtagaagtggaattctttcactggatcgggctgatgctgttattgaaataacagagtgggtggaagttcctagaaagaatttgaccatagagaattcaaccgtttcatcaaatgtttcagctgaatctgctgcgggtaatagttctgaagaaaacaacgaaagcgtgcaaactgatagtgggattaataagacatccaacattagttcagaggagcaagctgctgctgagcctgctacagagaaaaagctgaaaaagcggacctttagggtaccattaaagattgtagagaagataactggatttggaatgtctctatcacaagattttcttgctgaagccaaaagaaaactacaagtactagataaaaaagatgcagacagaaaaagaacagctgagttaaaaaataatttagaaggatatatatatacaactaaggaaaagattgaaactcttgaggagtttgaaaaagtttctacaagtgaggaacgccagtccttcattgagaagcttgatcaggtgcaagattggttgtatacagatggtgaagatgccaatgccacagagtttcaagagcgtctagatcagttaaaagctgttggagatccaattttcttcaggttaaaagagcttacagctcggccagcagcagttgagcatgctaataaatacattgatgagttgaaacagattgttgaggagtggaaagcaaagaagtcttggcttccacaagaacgagtagacgaggtcataaaaagttctgaaaaattgaagaattggttggatgagaaagaagctgagcaaacaaagacttctggattcagtaagccagcatttacatctgaagaagtatatttgaaggtgcttgatctgcaaaccaaggttgccagtattaatagaattcccaagcccaaacctaaggttcagaagcccgtaaaaaatgaaaccgaaagcagtgagcagaatacagagaattctgattctaactcagctgatagttcctcttcaagtgattcatccgttaacagttcagaaggcacaagcgaagagacggtaactgagcaaactgaaggtcatgatgagctatgattaacctggcatacatgttaggccggtttgaatcatctacctgcaacgtttttatagtcagagatgtagactggtaatggtagaattaataggtgaaaaggaggcagtgtcggttctcggcgagcaggagaatagagttgaggcaacatttgctggttgagttctaaaattttgaggttagatggctactactgtagtagatgatttattacccttttatatttaagggggcaacttgtaatttgcagtcatatgaaagcttgtatttgccgaaacacaatgtgataggggaagaaaaaaaaagaaaaactcacgagatttgatttgctcagaacatataggaattttgcttgagtgactcgtagttctaaacgatttttgtttttaattaatttagcagatacatcttatcttattttt

SEQ ID NO: 5558 - protein, 431 aa, Glycine max
  peptide (1)..(431): Ceres Seq. ID no. 14303431
  misc_feature (1)..(279): Pfam Name: Pfam Description:  Hsp70 protein
  misc_feature (1)..(407): NCBI GI NO: 18414718 NR Description: heat shock protein hsp70, putative
  misc_feature (1)..(407): NCBI GI NO: 15293149 NR Description: putative HSP protein [Arabidopsis thaliana]
  misc_feature (75)..(407): NCBI GI NO: 25407544 NR Description: HSP like protein [imported] - Arabidopsis thaliana
  misc_feature (75)..(368): NCBI GI NO: 7488120 NR Description: probable heat shock protein 110 - Arabidopsisthaliana
  misc_feature (5)..(430): NCBI GI NO: 28828809 NR Description: similar to heat shock protein
  misc_feature (16)..(412): NCBI GI NO: 2495342 NR Description: Heat shock 70-related protein APG-2
  misc_feature (16)..(412): NCBI GI NO: 31982275 NR Description: heat shock protein 4
  misc_feature (16)..(391): NCBI GI NO: 24025637 NR Description: heat shock 70 kDa protein 4 [Rattus norvegicus]
  misc_feature (16)..(418): NCBI GI NO: 28856138 NR Description: Similar to heat shock protein 4 [Danio rerio]
  misc_feature (2)..(417): NCBI GI NO: 17473863 NR Description: putative heat-shock protein [Arabidopsis thaliana]
KVPSKMFRSINHNKDFEVSLAYESENHLPPGVTSPEIARYQISGLTDASEKYSSRNLSSPIKTNIHFSLSRSGILSLDRADAVIEITEWVEVPRKNLTIENSTVSSNVSAESAAGNSSEENNESVQTDSGINKTSNISSEEQAAAEPATEKKLKKRTFRVPLKIVEKITGFGMSLSQDFLAEAKRKLQVLDKKDADRKRTAELKNNLEGYIYTTKEKIETLEEFEKVSTSEERQSFIEKLDQVQDWLYTDGEDANATEFQERLDQLKAVGDPIFFRLKELTARPAAVEHANKYIDELKQIVEEWKAKKSWLPQERVDEVIKSSEKLKNWLDEKEAEQTKTSGFSKPAFTSEEVYLKVLDLQTKVASINRIPKPKPKVQKPVKNETESSEQNTENSDSNSADSSSSSDSSVNSSEGTSEETVTEQTEGHDEL

SEQ ID NO: 5559 - protein, 426 aa, Glycine max
  peptide (1)..(426): Ceres Seq. ID no. 14303432
  misc_feature (1)..(274): Pfam Name: Pfam Description:  Hsp70 protein
  misc_feature (1)..(402): NCBI GI NO: 18414718 NR Description: heat shock protein hsp70, putative
  misc_feature (1)..(402): NCBI GI NO: 15293149 NR Description: putative HSP protein [Arabidopsis thaliana]
  misc_feature (70)..(402): NCBI GI NO: 25407544 NR Description: HSP like protein [imported] - Arabidopsis thaliana
  misc_feature (70)..(363): NCBI GI NO: 7488120 NR Description: probable heat shock protein 110 - Arabidopsisthaliana
  misc_feature (1)..(425): NCBI GI NO: 28828809 NR Description: similar to heat shock protein
  misc_feature (11)..(407): NCBI GI NO: 2495342 NR Description: Heat shock 70-related protein APG-2
  misc_feature (11)..(407): NCBI GI NO: 31982275 NR Description: heat shock protein 4
  misc_feature (11)..(386): NCBI GI NO: 24025637 NR Description: heat shock 70 kDa protein 4 [Rattus norvegicus]
  misc_feature (11)..(413): NCBI GI NO: 28856138 NR Description: Similar to heat shock protein 4 [Danio rerio]
  misc_feature (1)..(412): NCBI GI NO: 17473863 NR Description: putative heat-shock protein [Arabidopsis thaliana]
MFRSINHNKDFEVSLAYESENHLPPGVTSPEIARYQISGLTDASEKYSSRNLSSPIKTNIHFSLSRSGILSLDRADAVIEITEWVEVPRKNLTIENSTVSSNVSAESAAGNSSEENNESVQTDSGINKTSNISSEEQAAAEPATEKKLKKRTFRVPLKIVEKITGFGMSLSQDFLAEAKRKLQVLDKKDADRKRTAELKNNLEGYIYTTKEKIETLEEFEKVSTSEERQSFIEKLDQVQDWLYTDGEDANATEFQERLDQLKAVGDPIFFRLKELTARPAAVEHANKYIDELKQIVEEWKAKKSWLPQERVDEVIKSSEKLKNWLDEKEAEQTKTSGFSKPAFTSEEVYLKVLDLQTKVASINRIPKPKPKVQKPVKNETESSEQNTENSDSNSADSSSSSDSSVNSSEGTSEETVTEQTEGHDEL

SEQ ID NO: 5560 - protein, 259 aa, Glycine max
  peptide (1)..(259): Ceres Seq. ID no. 14303433
  misc_feature (1)..(107): Pfam Name: Pfam Description:  Hsp70 protein
  misc_feature (1)..(235): NCBI GI NO: 18414718 NR Description: heat shock protein hsp70, putative
  misc_feature (1)..(235): NCBI GI NO: 15293149 NR Description: putative HSP protein [Arabidopsis thaliana]
  misc_feature (1)..(235): NCBI GI NO: 25407544 NR Description: HSP like protein [imported] - Arabidopsis thaliana
  misc_feature (1)..(196): NCBI GI NO: 7488120 NR Description: probable heat shock protein 110 - Arabidopsisthaliana
  misc_feature (1)..(258): NCBI GI NO: 28828809 NR Description: similar to heat shock protein
  misc_feature (1)..(240): NCBI GI NO: 2495342 NR Description: Heat shock 70-related protein APG-2
  misc_feature (1)..(240): NCBI GI NO: 31982275 NR Description: heat shock protein 4
  misc_feature (1)..(219): NCBI GI NO: 24025637 NR Description: heat shock 70 kDa protein 4 [Rattus norvegicus]
  misc_feature (1)..(246): NCBI GI NO: 28856138 NR Description: Similar to heat shock protein 4 [Danio rerio]
  misc_feature (1)..(245): NCBI GI NO: 17473863 NR Description: putative heat-shock protein [Arabidopsis thaliana]
MSLSQDFLAEAKRKLQVLDKKDADRKRTAELKNNLEGYIYTTKEKIETLEEFEKVSTSEERQSFIEKLDQVQDWLYTDGEDANATEFQERLDQLKAVGDPIFFRLKELTARPAAVEHANKYIDELKQIVEEWKAKKSWLPQERVDEVIKSSEKLKNWLDEKEAEQTKTSGFSKPAFTSEEVYLKVLDLQTKVASINRIPKPKPKVQKPVKNETESSEQNTENSDSNSADSSSSSDSSVNSSEGTSEETVTEQTEGHDEL

SEQ ID NO: 5561 - DNA, 1371 bp, Glycine max
  misc_feature (1)..(1371): Ceres Seq. ID no. 14303427
gaacaggagaagagaaaatgttgaggaaggaggagtggaggggaacggatctgctgggtgggactagataaagtgaagcaagctgacaagactaagggaagattggatggtggaaatggaatcggcagctgaaaaccctaattacccggcggtggactacaagcgaccttccatcttgtcatttcctcggaggcccgccctcagagttacatccgagttcgatagtgaaagcgcagtcttcttccataagatttcctgcaagttgttggacagccttgccaagttcaagttttcgttcaaccacagcggtaagggcggcgacatctccgaacctcaattcagctttgtctccaagcaccttagcctccactacgacctcgaagaccataatgctctcgttaagacctccatcgatcttgctcccagtttgcaactcactgcttctcatgatctcaaggctcaacaaggagaggttaccgtgcttgcaaacctcgccgatcctgcctattcacttcaactatctactccacttccatccgttggattgccaaaagctaccttcagatttcctctgggtgaactttcgctgcaggagaaacaagaggaggaagtcaataatttgttgtcagtcgatggggttcttaaaggacaattgtttaatgggctctgctctgcccattacaaggacgaagaactgaaattaagatatggctataaggacgatgaaatctcatttcttccaatactttcacttccttcaaatgccctgtcatttgcatttaagcgtcggtttggtccttccgacaaattaagttactggtacaattgcgattccaactattggagtgctgtctacaagcgcacctatggtaaagatttcaaatttaaagctggttatgattcagagattcgccttggctgggcatctctttgggttggagatgaaggtgggaaagccaaaacagctccgatgcagatgaaagttcaattcatgctacaagtgccacaggacgacataaaatcttctgctttgatgtttcggattaagaaaagatgggacttttaaggctctactggtgactttacctgttttttatatataaaaaatgggtatttgactttgggcagttccattgtgttttagtttgttgcatccacagtccactctttgcaaaagggggtattgactatttgacaggttgatatttctccaagtcagctaattgcttcgtggtgtgacaagtaagaacaattttcaatcgtacaaaatttgtaaagatgattttctgatttgtaagttggcagattatggttatcgaatgcagacagtgctgaaattggttatgcatttggctaaaggccattcaactt

SEQ ID NO: 5562 - protein, 319 aa, Glycine max
  peptide (1)..(319): Ceres Seq. ID no. 14303428
  misc_feature (22)..(318): NCBI GI NO: 18406405 NR Description: expressed protein [Arabidopsis thaliana]
  misc_feature (22)..(214): NCBI GI NO: 7486492 NR Description: hypothetical protein At2g43950
  misc_feature (204)..(318): NCBI GI NO: 7486492 NR Description: hypothetical protein At2g43950
  misc_feature (22)..(255): NCBI GI NO: 30689554 NR Description: expressed protein [Arabidopsis thaliana]
MVEMESAAENPNYPAVDYKRPSILSFPRRPALRVTSEFDSESAVFFHKISCKLLDSLAKFKFSFNHSGKGGDISEPQFSFVSKHLSLHYDLEDHNALVKTSIDLAPSLQLTASHDLKAQQGEVTVLANLADPAYSLQLSTPLPSVGLPKATFRFPLGELSLQEKQEEEVNNLLSVDGVLKGQLFNGLCSAHYKDEELKLRYGYKDDEISFLPILSLPSNALSFAFKRRFGPSDKLSYWYNCDSNYWSAVYKRTYGKDFKFKAGYDSEIRLGWASLWVGDEGGKAKTAPMQMKVQFMLQVPQDDIKSSALMFRIKKRWDF

SEQ ID NO: 5563 - protein, 316 aa, Glycine max
  peptide (1)..(316): Ceres Seq. ID no. 14303429
  misc_feature (19)..(315): NCBI GI NO: 18406405 NR Description: expressed protein [Arabidopsis thaliana]
  misc_feature (19)..(211): NCBI GI NO: 7486492 NR Description: hypothetical protein At2g43950
  misc_feature (201)..(315): NCBI GI NO: 7486492 NR Description: hypothetical protein At2g43950
  misc_feature (19)..(252): NCBI GI NO: 30689554 NR Description: expressed protein [Arabidopsis thaliana]
MESAAENPNYPAVDYKRPSILSFPRRPALRVTSEFDSESAVFFHKISCKLLDSLAKFKFSFNHSGKGGDISEPQFSFVSKHLSLHYDLEDHNALVKTSIDLAPSLQLTASHDLKAQQGEVTVLANLADPAYSLQLSTPLPSVGLPKATFRFPLGELSLQEKQEEEVNNLLSVDGVLKGQLFNGLCSAHYKDEELKLRYGYKDDEISFLPILSLPSNALSFAFKRRFGPSDKLSYWYNCDSNYWSAVYKRTYGKDFKFKAGYDSEIRLGWASLWVGDEGGKAKTAPMQMKVQFMLQVPQDDIKSSALMFRIKKRWDF

SEQ ID NO: 5564 - DNA, 1339 bp, Glycine max
  misc_feature (1)..(1339): Ceres Seq. ID no. 15176095
atctaccactctagtctgccacatattaataataataattaataccatgccttaagctatgcctactttggggtttgcactatactatatggacataccattctatatttgcaatcagaatatatggattgctattaaacttataatttgtgatagttggtattttttttagcaatacaaagatcccaatatgataatcatgaatctcagtttttcaacttgaacttgactactttaaatttatgtattgttaggttcccagtggcatatattacacatccaaagactcaattggatactaagccagccccatttatggcagcattttcatcaaaaggaccaaatactatggtgccagagatcctaaagcctgatatcactgcaccaggcgtgtcagttatagcagcctatactgaggcccaaggaccaaccaatcaagtgttcgacaagcgcaggattccgtttaactcagtctcaggcacatcaatgtcatgccctcatgtttcaggcattgtgggactgttgagagccttatatcctacgtggagtaccgctgcaattaaatcagcaatcatgaccacagctacaacactagacaatgaggtggagccactactgaatgctactgatggcaaggcgacaccattcagttacggggcagggcatgttcaaccaaacagagcaatggatcccgggctagtttatgacataacaattgatgattacctcaacttcttatgtgctttaggatacaacgagacacagatctcagtgttcacagaaggtccatataaatgccgcaagaaatttagtctcctcaacctgaactatccctcaatcacagtcccaaaactctctgggtcagtgacagttacaaggacattgaaaaatgttggttctccagggacttacattgctcatgttcaaaacccgtatggaatcaccgtttctgtgaagccaagcatcttgaagttcaaaaatgttggtgaagagaagagctttaaattaaccttcaaggccatgcaaggaaaggccacaaataactacgcgtttggaaaactgatatggtcagatggcaagcattacgtcacgagtccaatagttgtgaaggccctcttaactagaaattgaagtaattggtgcaatttagctcatttgcatttctaattgattgttagcctattctaaattgtatgatatatcttctaaaatagggcttctttgagagttatctctgacattgattgataacaaagaaaccaacaagtggctttctttgggtgtacttttactatgattccaaggagaaataaaacctaacacgtccattctcctagtc

SEQ ID NO: 5565 - protein, 271 aa, Glycine max
  peptide (1)..(271): Ceres Seq. ID no. 15176096
  misc_feature (162)..(264): Pfam Name: DUF1034 Pfam Description: Domain of Unknown Function
  misc_feature (26)..(266): NCBI GI NO: 28912766 NR Description: subtilisin-like seed-specific protein
  misc_feature (1)..(265): NCBI GI NO: 15010692 NR Description: At2g04160/T16B23.1 [Arabidopsis thaliana]
  misc_feature (1)..(265): NCBI GI NO: 20198169 NR Description: subtilisin-like serine protease AIR3
  misc_feature (1)..(265): NCBI GI NO: 22325457 NR Description: subtilisin-like serine protease AIR3
  misc_feature (1)..(265): NCBI GI NO: 11358862 NR Description: subtilisin-like proteinase AIR3, auxin-induced
  misc_feature (1)..(265): NCBI GI NO: 9757901 NR Description: serine protease-like protein
  misc_feature (1)..(265): NCBI GI NO: 30697281 NR Description: subtilisin-like serine protease
  misc_feature (1)..(249): NCBI GI NO: 20198252 NR Description: subtilisin-like serine protease AIR3
  misc_feature (1)..(246): NCBI GI NO: 26451139 NR Description: putative subtilisin-like protease
  misc_feature (1)..(267): NCBI GI NO: 24414066 NR Description: OJ1136_A10.14
MAAFSSKGPNTMVPEILKPDITAPGVSVIAAYTEAQGPTNQVFDKRRIPFNSVSGTSMSCPHVSGIVGLLRALYPTWSTAAIKSAIMTTATTLDNEVEPLLNATDGKATPFSYGAGHVQPNRAMDPGLVYDITIDDYLNFLCALGYNETQISVFTEGPYKCRKKFSLLNLNYPSITVPKLSGSVTVTRTLKNVGSPGTYIAHVQNPYGITVSVKPSILKFKNVGEEKSFKLTFKAMQGKATNNYAFGKLIWSDGKHYVTSPIVVKALLTRN

SEQ ID NO: 5566 - protein, 260 aa, Glycine max
  peptide (1)..(260): Ceres Seq. ID no. 15176097
  misc_feature (151)..(253): Pfam Name: DUF1034 Pfam Description: Domain of Unknown Function
  misc_feature (15)..(255): NCBI GI NO: 28912766 NR Description: subtilisin-like seed-specific protein
  misc_feature (1)..(254): NCBI GI NO: 15010692 NR Description: At2g04160/T16B23.1 [Arabidopsis thaliana]
  misc_feature (1)..(254): NCBI GI NO: 20198169 NR Description: subtilisin-like serine protease AIR3
  misc_feature (1)..(254): NCBI GI NO: 22325457 NR Description: subtilisin-like serine protease AIR3
  misc_feature (1)..(254): NCBI GI NO: 11358862 NR Description: subtilisin-like proteinase AIR3, auxin-induced
  misc_feature (1)..(254): NCBI GI NO: 9757901 NR Description: serine protease-like protein
  misc_feature (1)..(254): NCBI GI NO: 30697281 NR Description: subtilisin-like serine protease
  misc_feature (1)..(238): NCBI GI NO: 20198252 NR Description: subtilisin-like serine protease AIR3
  misc_feature (1)..(235): NCBI GI NO: 26451139 NR Description: putative subtilisin-like protease
  misc_feature (1)..(256): NCBI GI NO: 24414066 NR Description: OJ1136_A10.14
MVPEILKPDITAPGVSVIAAYTEAQGPTNQVFDKRRIPFNSVSGTSMSCPHVSGIVGLLRALYPTWSTAAIKSAIMTTATTLDNEVEPLLNATDGKATPFSYGAGHVQPNRAMDPGLVYDITIDDYLNFLCALGYNETQISVFTEGPYKCRKKFSLLNLNYPSITVPKLSGSVTVTRTLKNVGSPGTYIAHVQNPYGITVSVKPSILKFKNVGEEKSFKLTFKAMQGKATNNYAFGKLIWSDGKHYVTSPIVVKALLTRN

SEQ ID NO: 5567 - protein, 214 aa, Glycine max
  peptide (1)..(214): Ceres Seq. ID no. 15176098
  misc_feature (105)..(207): Pfam Name: DUF1034 Pfam Description: Domain of Unknown Function
  misc_feature (1)..(209): NCBI GI NO: 28912766 NR Description: subtilisin-like seed-specific protein
  misc_feature (1)..(208): NCBI GI NO: 15010692 NR Description: At2g04160/T16B23.1 [Arabidopsis thaliana]
  misc_feature (1)..(208): NCBI GI NO: 22325457 NR Description: subtilisin-like serine protease AIR3
  misc_feature (1)..(208): NCBI GI NO: 20198169 NR Description: subtilisin-like serine protease AIR3
  misc_feature (1)..(208): NCBI GI NO: 11358862 NR Description: subtilisin-like proteinase AIR3, auxin-induced
  misc_feature (1)..(208): NCBI GI NO: 9757901 NR Description: serine protease-like protein
  misc_feature (1)..(208): NCBI GI NO: 30697281 NR Description: subtilisin-like serine protease
  misc_feature (1)..(192): NCBI GI NO: 20198252 NR Description: subtilisin-like serine protease AIR3
  misc_feature (1)..(189): NCBI GI NO: 26451139 NR Description: putative subtilisin-like protease
  misc_feature (1)..(210): NCBI GI NO: 24414066 NR Description: OJ1136_A10.14
MSCPHVSGIVGLLRALYPTWSTAAIKSAIMTTATTLDNEVEPLLNATDGKATPFSYGAGHVQPNRAMDPGLVYDITIDDYLNFLCALGYNETQISVFTEGPYKCRKKFSLLNLNYPSITVPKLSGSVTVTRTLKNVGSPGTYIAHVQNPYGITVSVKPSILKFKNVGEEKSFKLTFKAMQGKATNNYAFGKLIWSDGKHYVTSPIVVKALLTRN

SEQ ID NO: 5568 - DNA, 1117 bp, Glycine max
  misc_feature (1)..(1117): Ceres Seq. ID no. 14307797
gacacgcatctatacttgtccagaagaagtaagatccatgaactaacattcccacacgctcgcttcaccatatttgccacccttttaacctcacttcttagggttattttgctcccttttccttgtttgggaattgggtttggtttggtttttcttggttgtaaaaggaaacaaagaaagaactaagatgggaagaggtagggtacagctgaagaggatagagaacaagatcaatcgccaggtaactttctccaaaaggagaggtgggttgctcaagaaagctcatgaaatatctgtactctgtgatgctgaggtagctttgattatcttctctcacaaaggaaagctctttgagtatgctactgattcatgcatggagaagatactggaacgccatgaaaggtatgcctatgcagagaggcagctagtagcaaatgattctgagacacaggaaaactggaccattgaatacactagactgaaggcaaaaattgaccttttacagagaaaccacaggcactatatgggagaagatttggcttcaatgagcctcaaagagcttcagagtttggagcagcagttggttactggtatcaaaaacatccgcacaaggaggaatgatctcatgtccgagtccatttctgagcttcagaaaaaggagaaaaggatacaagaggagaataacacccttgcaaagaagatcaaggagaaagagcaggctgtagcacagcaagctgcacaatgggagcagccaaactacagggttgatacatctttcatgccacagcagcaaccccttcccaccagtttgaacatatgtggcaataattactgccaggaagctgcaccagaactaggaaggaacggtctagacctgaccctggaaccactctattcttgcaaccttggatgcttctgaaaagttgtttcttctgagttggattatattatataagtgctggcatatatgaactactataagtagtctgtttgaatgttttatatgtattttggtctatggcttttccctctactttgaagacattattttgaattgcttctgttgtaaacaaattgaatttgaaatctaattgtgtatttttgaaatatgttaaag

SEQ ID NO: 5569 - protein, 243 aa, Glycine max
  peptide (1)..(243): Ceres Seq. ID no. 14307798
  misc_feature (75)..(174): Pfam Name: Pfam Description:  K-box region
  misc_feature (1)..(243): NCBI GI NO: 13446154 NR Description: MADS-box transcription factor [Pisum sativum]
  misc_feature (1)..(243): NCBI GI NO: 1483228 NR Description: MADS3 protein [Betula pendula]
  misc_feature (1)..(243): NCBI GI NO: 82313 NR Description: MADS box protein squa - garden snapdragon
  misc_feature (1)..(243): NCBI GI NO: 3646320 NR Description: MADS-box protein [Malus x domestica]
  misc_feature (1)..(243): NCBI GI NO: 37542848 NR Description: AP1-like protein [Malus x domestica]
  misc_feature (1)..(243): NCBI GI NO: 22091473 NR Description: MADS box transcription factor
  misc_feature (1)..(243): NCBI GI NO: 28381537 NR Description: PTM2 [Populus tremuloides]
  misc_feature (6)..(243): NCBI GI NO: 32478021 NR Description: euAP1 APETALA1-like MADS-box [Heuchera americana]
  misc_feature (1)..(243): NCBI GI NO: 4102113 NR Description: NAP1-2 [Nicotiana tabacum]
  misc_feature (1)..(243): NCBI GI NO: 5070140 NR Description: MADS-box protein MADS5 [Nicotiana tabacum]
MGRGRVQLKRIENKINRQVTFSKRRGGLLKKAHEISVLCDAEVALIIFSHKGKLFEYATDSCMEKILERHERYAYAERQLVANDSETQENWTIEYTRLKAKIDLLQRNHRHYMGEDLASMSLKELQSLEQQLVTGIKNIRTRRNDLMSESISELQKKEKRIQEENNTLAKKIKEKEQAVAQQAAQWEQPNYRVDTSFMPQQQPLPTSLNICGNNYCQEAAPELGRNGLDLTLEPLYSCNLGCF

SEQ ID NO: 5570 - protein, 181 aa, Glycine max
  peptide (1)..(181): Ceres Seq. ID no. 14307799
  misc_feature (13)..(112): Pfam Name: Pfam Description:  K-box region
  misc_feature (1)..(181): NCBI GI NO: 13446154 NR Description: MADS-box transcription factor [Pisum sativum]
  misc_feature (1)..(181): NCBI GI NO: 1483228 NR Description: MADS3 protein [Betula pendula]
  misc_feature (1)..(181): NCBI GI NO: 82313 NR Description: MADS box protein squa - garden snapdragon
  misc_feature (1)..(181): NCBI GI NO: 3646320 NR Description: MADS-box protein [Malus x domestica]
  misc_feature (1)..(181): NCBI GI NO: 37542848 NR Description: AP1-like protein [Malus x domestica]
  misc_feature (1)..(181): NCBI GI NO: 22091473 NR Description: MADS box transcription factor
  misc_feature (1)..(181): NCBI GI NO: 28381537 NR Description: PTM2 [Populus tremuloides]
  misc_feature (1)..(181): NCBI GI NO: 32478021 NR Description: euAP1 APETALA1-like MADS-box [Heuchera americana]
  misc_feature (1)..(181): NCBI GI NO: 4102113 NR Description: NAP1-2 [Nicotiana tabacum]
  misc_feature (1)..(181): NCBI GI NO: 5070140 NR Description: MADS-box protein MADS5 [Nicotiana tabacum]
MEKILERHERYAYAERQLVANDSETQENWTIEYTRLKAKIDLLQRNHRHYMGEDLASMSLKELQSLEQQLVTGIKNIRTRRNDLMSESISELQKKEKRIQEENNTLAKKIKEKEQAVAQQAAQWEQPNYRVDTSFMPQQQPLPTSLNICGNNYCQEAAPELGRNGLDLTLEPLYSCNLGCF

SEQ ID NO: 5571 - protein, 131 aa, Glycine max
  peptide (1)..(131): Ceres Seq. ID no. 14307800
  misc_feature (1)..(62): Pfam Name: Pfam Description:  K-box region
  misc_feature (1)..(131): NCBI GI NO: 13446154 NR Description: MADS-box transcription factor [Pisum sativum]
  misc_feature (1)..(131): NCBI GI NO: 1483228 NR Description: MADS3 protein [Betula pendula]
  misc_feature (1)..(131): NCBI GI NO: 82313 NR Description: MADS box protein squa - garden snapdragon
  misc_feature (1)..(131): NCBI GI NO: 3646320 NR Description: MADS-box protein [Malus x domestica]
  misc_feature (1)..(131): NCBI GI NO: 37542848 NR Description: AP1-like protein [Malus x domestica]
  misc_feature (1)..(131): NCBI GI NO: 22091473 NR Description: MADS box transcription factor
  misc_feature (1)..(131): NCBI GI NO: 28381537 NR Description: PTM2 [Populus tremuloides]
  misc_feature (1)..(131): NCBI GI NO: 32478021 NR Description: euAP1 APETALA1-like MADS-box [Heuchera americana]
  misc_feature (1)..(131): NCBI GI NO: 4102113 NR Description: NAP1-2 [Nicotiana tabacum]
  misc_feature (1)..(131): NCBI GI NO: 5070140 NR Description: MADS-box protein MADS5 [Nicotiana tabacum]
MGEDLASMSLKELQSLEQQLVTGIKNIRTRRNDLMSESISELQKKEKRIQEENNTLAKKIKEKEQAVAQQAAQWEQPNYRVDTSFMPQQQPLPTSLNICGNNYCQEAAPELGRNGLDLTLEPLYSCNLGCF

SEQ ID NO: 5572 - DNA, 1097 bp, Glycine max
  misc_feature (1)..(1097): Ceres Seq. ID no. 14307186
agcctcctcaatttctctctctctctctctctctaacacggagtgatggctgtgcagctgtgggaaaccctgaaggaagccatcgtagcctacactggcttctctccttccaccttcttcacggtgctggcgcttctttttgccgtttactacgtcgtcacgggtctctttggctcctccgacgatcaccatcaccgccaccgccacgtcgaggaggaggaggagatgccgcctctgcgccccccggttcagctcggcgagatcacagcggaggagctcaaggcctacgacggcaccgatcccgagaagcccttgctcatggccatcaaggcccagatctatgatgtctcccagagcaggatgttttatggacctggtggaccttatgccctatttgctggcaaggatgctagcagagccttagcaaagatgtcttttgaagagaaagatctgactggggatatttctggtcttggcccgtttgagcttgatgccttacaagactgggaatataagtttatgagcaagtatgtgaaggttggaactgttaaaagtgaagaagttccagtaactgaaccagagtccattggtgaaccattagaatctacttcccgtgatattgatgctgctgccaagcctactgatactgaagatggcaaattagaaactccagctgttaaaagtgatgaaaccccttcaaatgttgatgccgataaagagtaatggctgagttgtgccacaaatacccctgcagaaaatggagaaaaaaagaacttcatagtaaagactgaccaaatgtaaggcaagttttcgaagatagtctaggccacctcttctgcaccgtgcctttgcttgaatatttagtctcataaataatgaattgccgggtcaatttatgtgtggatccaaaaaaaaggggagtaactttaagttagatcttcttttagaattccgtagtatgtataccatttaaatgcaacagagcaatgacatttggggtcttatcttacttaggctgagtaatgaatgatcttttgtttaattgaataatacgttgctctatggcaagaataaatgaagggtaagtcttttgaacc

SEQ ID NO: 5573 - protein, 225 aa, Glycine max
  peptide (1)..(225): Ceres Seq. ID no. 14307187
  misc_feature (72)..(169): Pfam Name: Pfam Description:  Cytochrome b5-like Heme/Steroid binding domain
  misc_feature (1)..(225): NCBI GI NO: 15242943 NR Description: cytochrome b5 domain-containing protein
  misc_feature (1)..(225): NCBI GI NO: 4960156 NR Description: putative progesterone-binding protein homolog
  misc_feature (1)..(216): NCBI GI NO: 15229044 NR Description: cytochrome b5 domain-containing protein
  misc_feature (1)..(202): NCBI GI NO: 4960154 NR Description: putative progesterone-binding protein homolog
  misc_feature (4)..(222): NCBI GI NO: 37535798 NR Description: putative steroid membrane binding protein
  misc_feature (20)..(191): NCBI GI NO: 37535794 NR Description: putative steroid membrane binding protein
  misc_feature (58)..(224): NCBI GI NO: 18859969 NR Description: CG9066-PA [Drosophila melanogaster]
  misc_feature (72)..(170): NCBI GI NO: 15224648 NR Description: cytochrome b5 domain-containing protein
  misc_feature (72)..(170): NCBI GI NO: 40889041 NR Description: Chain A
  misc_feature (20)..(193): NCBI GI NO: 6647578 NR Description: Membrane associated progesterone receptor component1
MAVQLWETLKEAIVAYTGFSPSTFFTVLALLFAVYYVVTGLFGSSDDHHHRHRHVEEEEEMPPLRPPVQLGEITAEELKAYDGTDPEKPLLMAIKAQIYDVSQSRMFYGPGGPYALFAGKDASRALAKMSFEEKDLTGDISGLGPFELDALQDWEYKFMSKYVKVGTVKSEEVPVTEPESIGEPLESTSRDIDAAAKPTDTEDGKLETPAVKSDETPSNVDADKE

SEQ ID NO: 5574 - protein, 165 aa, Glycine max
  peptide (1)..(165): Ceres Seq. ID no. 14307188
  misc_feature (12)..(109): Pfam Name: Pfam Description:  Cytochrome b5-like Heme/Steroid binding domain
  misc_feature (1)..(165): NCBI GI NO: 15242943 NR Description: cytochrome b5 domain-containing protein
  misc_feature (1)..(165): NCBI GI NO: 4960156 NR Description: putative progesterone-binding protein homolog
  misc_feature (1)..(156): NCBI GI NO: 15229044 NR Description: cytochrome b5 domain-containing protein
  misc_feature (1)..(142): NCBI GI NO: 4960154 NR Description: putative progesterone-binding protein homolog
  misc_feature (1)..(162): NCBI GI NO: 37535798 NR Description: putative steroid membrane binding protein
  misc_feature (1)..(131): NCBI GI NO: 37535794 NR Description: putative steroid membrane binding protein
  misc_feature (1)..(164): NCBI GI NO: 18859969 NR Description: CG9066-PA [Drosophila melanogaster]
  misc_feature (12)..(110): NCBI GI NO: 15224648 NR Description: cytochrome b5 domain-containing protein
  misc_feature (12)..(110): NCBI GI NO: 40889041 NR Description: Chain A
  misc_feature (1)..(133): NCBI GI NO: 6647578 NR Description: Membrane associated progesterone receptor component1
MPPLRPPVQLGEITAEELKAYDGTDPEKPLLMAIKAQIYDVSQSRMFYGPGGPYALFAGKDASRALAKMSFEEKDLTGDISGLGPFELDALQDWEYKFMSKYVKVGTVKSEEVPVTEPESIGEPLESTSRDIDAAAKPTDTEDGKLETPAVKSDETPSNVDADKE

SEQ ID NO: 5575 - protein, 134 aa, Glycine max
  peptide (1)..(134): Ceres Seq. ID no. 14307189
  misc_feature (1)..(78): Pfam Name: Pfam Description:  Cytochrome b5-like Heme/Steroid binding domain
  misc_feature (1)..(134): NCBI GI NO: 15242943 NR Description: cytochrome b5 domain-containing protein
  misc_feature (1)..(134): NCBI GI NO: 4960156 NR Description: putative progesterone-binding protein homolog
  misc_feature (1)..(125): NCBI GI NO: 15229044 NR Description: cytochrome b5 domain-containing protein
  misc_feature (1)..(111): NCBI GI NO: 4960154 NR Description: putative progesterone-binding protein homolog
  misc_feature (1)..(131): NCBI GI NO: 37535798 NR Description: putative steroid membrane binding protein
  misc_feature (1)..(100): NCBI GI NO: 37535794 NR Description: putative steroid membrane binding protein
  misc_feature (1)..(133): NCBI GI NO: 18859969 NR Description: CG9066-PA [Drosophila melanogaster]
  misc_feature (1)..(79): NCBI GI NO: 15224648 NR Description: cytochrome b5 domain-containing protein
  misc_feature (1)..(79): NCBI GI NO: 40889041 NR Description: Chain A
  misc_feature (1)..(102): NCBI GI NO: 6647578 NR Description: Membrane associated progesterone receptor component1
MAIKAQIYDVSQSRMFYGPGGPYALFAGKDASRALAKMSFEEKDLTGDISGLGPFELDALQDWEYKFMSKYVKVGTVKSEEVPVTEPESIGEPLESTSRDIDAAAKPTDTEDGKLETPAVKSDETPSNVDADKE

SEQ ID NO: 5576 - DNA, 1687 bp, Glycine max
  misc_feature (1)..(1687): Ceres Seq. ID no. 15172274
aaagctcaaagatatacacaaaaataaatcaccaatattttagaagaataaataaaagggttgtctcatggctgaggagtttcaagctaggatttgtggtgaaaactggtggagtagtaccactattgattcaacaagaagtactgtgttgttccctctaagttcatcatcatcatcatcatctatatcttcttctccttgttccgtggcagctaataattatgatgcaggaaactatagcactaggggaactagtgacatggatttgaaggcaacaaagtgttgtgctgaagagactaataacagtttggtttctgacactacttacctgggttttgttgatgcacacaagccacataagagtgaatcagcagctagtggaagtggtggcatgttgaccgattccaccttgcagatgatgggttttggcctcacatcatcatcagagaattggaatcagcctctattatttcgatgtaatggaagggcagagagcaatttccactccttgattcaggaagaaacgggaatagattcttctaattcacaaatccatagggattggatcccaaagagcttctcctctgacggtggcaaacaacaaattgatgataataatttcaagccattattattgaaccaacaagaattttcattagatgaccatagtctaagttctttaaccaccgctgggttatcatcaaaccgtggattccccaatggatcagcctcatcatatggtaacccttcaacgttgcaaagtttatatgaccctaattataatcctcatccacaacactcacttttcaccaaccgtccgatgtcctattcatcaaaagcatgttatgggacaccatgcactgaactgccaacattgtctaaagcttccactttttttaagcccacaaccacaacaattgcaaagcagcaacaccctaatattggacttcacttttcaaacaacactcctttctggaatgcttccgccgaggcacttcacgacataagagtaggtacctttgcttcaacacaatcacaatatcaaaggccaacctttgatgatgaagagaaacccaatttcccaattactctattaaacaggctcaatagtgaagaaattctagagttggcatcaatggctaagaaaaatgtttgtgaaccagcattaaagaggccaagaattgaaactccatctccattaccaactttcaaggttcggaaagagaagctaggggaccgggtcactgctcttcagcaattggtttcacctttcggaaagaccgacacagcatccgttcttcacgaagccatcgagtacattaagttccttcatgatcaagtcaatgttttgagtacttcatatatgaaaaatggagctcccactcaacagcagcagggctgtgatgatctgaaagactcagaaggaccacaacaagatttaaaaagcaaagggctgtgtctggtaccgatttcaagcacatttccagtggcaacaggagccactagtgctgatcaattgtggacgcctacattcagaggcgcactcttaaggtagagaagggctaataaagccaaagagactcaaccagtggagaaaaattgatgacgtattattaactattgcatgtgtaaaaggatggtgaagcaaatgtgaagccacagtttgatgatgagaaaaaagctgaat

SEQ ID NO: 5577 - protein, 495 aa, Glycine max
  peptide (1)..(495): Ceres Seq. ID no. 15172275
  misc_feature (384)..(421): Pfam Name: Pfam Description:  Helix-loop-helix DNA-binding domain
  misc_feature (296)..(491): NCBI GI NO: 18407276 NR Description: expressed protein [Arabidopsis thaliana]
  misc_feature (296)..(491): NCBI GI NO: 21553730 NR Description: unknown [Arabidopsis thaliana]
  misc_feature (120)..(491): NCBI GI NO: 9294343 NR Description: gene_id:F3H11.2~unknown protein
  misc_feature (120)..(491): NCBI GI NO: 15232315 NR Description: bHLH transcription factor (bHLH123) -related
  misc_feature (296)..(443): NCBI GI NO: 30696595 NR Description: expressed protein [Arabidopsis thaliana]
  misc_feature (296)..(480): NCBI GI NO: 25404333 NR Description: hypothetical protein T13M11.1
  misc_feature (367)..(484): NCBI GI NO: 15234636 NR Description: hypothetical protein [Arabidopsis thaliana]
  misc_feature (325)..(485): NCBI GI NO: 22328848 NR Description: expressed protein [Arabidopsis thaliana]
  misc_feature (341)..(444): NCBI GI NO: 34910130 NR Description: B1070A12.8
  misc_feature (364)..(495): NCBI GI NO: 22093671 NR Description: bHLH transcription factor-like protein
MAEEFQARICGENWWSSTTIDSTRSTVLFPLSSSSSSSSISSSPCSVAANNYDAGNYSTRGTSDMDLKATKCCAEETNNSLVSDTTYLGFVDAHKPHKSESAASGSGGMLTDSTLQMMGFGLTSSSENWNQPLLFRCNGRAESNFHSLIQEETGIDSSNSQIHRDWIPKSFSSDGGKQQIDDNNFKPLLLNQQEFSLDDHSLSSLTTAGLSSNRGFPNGSASSYGNPSTLQSLYDPNYNPHPQHSLFTNRPMSYSSKACYGTPCTELPTLSKASTFFKPTTTTIAKQQHPNIGLHFSNNTPFWNASAEALHDIRVGTFASTQSQYQRPTFDDEEKPNFPITLLNRLNSEEILELASMAKKNVCEPALKRPRIETPSPLPTFKVRKEKLGDRVTALQQLVSPFGKTDTASVLHEAIEYIKFLHDQVNVLSTSYMKNGAPTQQQQGCDDLKDSEGPQQDLKSKGLCLVPISSTFPVATGATSADQLWTPTFRGALLR

SEQ ID NO: 5578 - protein, 431 aa, Glycine max
  peptide (1)..(431): Ceres Seq. ID no. 15172276
  misc_feature (320)..(357): Pfam Name: Pfam Description:  Helix-loop-helix DNA-binding domain
  misc_feature (232)..(427): NCBI GI NO: 18407276 NR Description: expressed protein [Arabidopsis thaliana]
  misc_feature (232)..(427): NCBI GI NO: 21553730 NR Description: unknown [Arabidopsis thaliana]
  misc_feature (56)..(427): NCBI GI NO: 9294343 NR Description: gene_id:F3H11.2~unknown protein
  misc_feature (56)..(427): NCBI GI NO: 15232315 NR Description: bHLH transcription factor (bHLH123) -related
  misc_feature (232)..(379): NCBI GI NO: 30696595 NR Description: expressed protein [Arabidopsis thaliana]
  misc_feature (232)..(416): NCBI GI NO: 25404333 NR Description: hypothetical protein T13M11.1
  misc_feature (303)..(420): NCBI GI NO: 15234636 NR Description: hypothetical protein [Arabidopsis thaliana]
  misc_feature (261)..(421): NCBI GI NO: 22328848 NR Description: expressed protein [Arabidopsis thaliana]
  misc_feature (277)..(380): NCBI GI NO: 34910130 NR Description: B1070A12.8
  misc_feature (300)..(431): NCBI GI NO: 22093671 NR Description: bHLH transcription factor-like protein
MDLKATKCCAEETNNSLVSDTTYLGFVDAHKPHKSESAASGSGGMLTDSTLQMMGFGLTSSSENWNQPLLFRCNGRAESNFHSLIQEETGIDSSNSQIHRDWIPKSFSSDGGKQQIDDNNFKPLLLNQQEFSLDDHSLSSLTTAGLSSNRGFPNGSASSYGNPSTLQSLYDPNYNPHPQHSLFTNRPMSYSSKACYGTPCTELPTLSKASTFFKPTTTTIAKQQHPNIGLHFSNNTPFWNASAEALHDIRVGTFASTQSQYQRPTFDDEEKPNFPITLLNRLNSEEILELASMAKKNVCEPALKRPRIETPSPLPTFKVRKEKLGDRVTALQQLVSPFGKTDTASVLHEAIEYIKFLHDQVNVLSTSYMKNGAPTQQQQGCDDLKDSEGPQQDLKSKGLCLVPISSTFPVATGATSADQLWTPTFRGALLR

SEQ ID NO: 5579 - protein, 387 aa, Glycine max
  peptide (1)..(387): Ceres Seq. ID no. 15172277
  misc_feature (276)..(313): Pfam Name: Pfam Description:  Helix-loop-helix DNA-binding domain
  misc_feature (188)..(383): NCBI GI NO: 18407276 NR Description: expressed protein [Arabidopsis thaliana]
  misc_feature (188)..(383): NCBI GI NO: 21553730 NR Description: unknown [Arabidopsis thaliana]
  misc_feature (12)..(383): NCBI GI NO: 9294343 NR Description: gene_id:F3H11.2~unknown protein
  misc_feature (12)..(383): NCBI GI NO: 15232315 NR Description: bHLH transcription factor (bHLH123) -related
  misc_feature (188)..(335): NCBI GI NO: 30696595 NR Description: expressed protein [Arabidopsis thaliana]
  misc_feature (188)..(372): NCBI GI NO: 25404333 NR Description: hypothetical protein T13M11.1
  misc_feature (259)..(376): NCBI GI NO: 15234636 NR Description: hypothetical protein [Arabidopsis thaliana]
  misc_feature (217)..(377): NCBI GI NO: 22328848 NR Description: expressed protein [Arabidopsis thaliana]
  misc_feature (233)..(336): NCBI GI NO: 34910130 NR Description: B1070A12.8
  misc_feature (256)..(387): NCBI GI NO: 22093671 NR Description: bHLH transcription factor-like protein
MLTDSTLQMMGFGLTSSSENWNQPLLFRCNGRAESNFHSLIQEETGIDSSNSQIHRDWIPKSFSSDGGKQQIDDNNFKPLLLNQQEFSLDDHSLSSLTTAGLSSNRGFPNGSASSYGNPSTLQSLYDPNYNPHPQHSLFTNRPMSYSSKACYGTPCTELPTLSKASTFFKPTTTTIAKQQHPNIGLHFSNNTPFWNASAEALHDIRVGTFASTQSQYQRPTFDDEEKPNFPITLLNRLNSEEILELASMAKKNVCEPALKRPRIETPSPLPTFKVRKEKLGDRVTALQQLVSPFGKTDTASVLHEAIEYIKFLHDQVNVLSTSYMKNGAPTQQQQGCDDLKDSEGPQQDLKSKGLCLVPISSTFPVATGATSADQLWTPTFRGALLR

SEQ ID NO: 5580 - DNA, 1285 bp, Glycine max
  misc_feature (1)..(1285): Ceres Seq. ID no. 15170866
gagagtcagtgtacgcagaagagtaaaatcgattggcgatgatggagttgaaagagattcagagactcgaaggccacaccgataaggtttggagcttggcctggaacccgaccaccggtcacgccggtatcccactcgtcttcgcttcttgcagcggcgacaaaaccgtccgaatctgggagcagaacctctcctctggcctctgggcctgcacggcggttctggatgaaacgcacactcgaactgttcgatcttgtgcttggtcaccgtcgggtaagctattggccactgcaagcttcgatgccaccactgccatttgggaaaatgttggtggtgattttgagtgtgtttctactttggagggacacgaaaatgaagtcaagtgtgtgtcttggaacgcggctgggacgttgcttgcaacttgtagtagagataagtctgtttggatatgggaagtgctgcctgggaatgagtttgagtgtgtgtcagtgctgcaaggacactcgcaggatgtgaaaatggtgaagtggcatcccacagaggatatcttgttttcatgtagctacgataatagtgttaaggtttgggcggatgaaggtgatagtgatgattggcagtgtgttcaaacgcttggggaacccaataacggtcatacttccactgtttgggccctctccttcaatgtgagtggtgacaaaatggttacgtgtagtgatgatcttacactgaaggtatgggaaacagaaagtgtagggacgcaatctggtggtggatttgcaccttggacacatctttgcactctttcagggtatcatgatcggacaatattctcagttcattggtcaagagaaggtatctttgccagtggagccgcagataatgctatacggctttttgtggatgacaatgaaagtcaggttggtggtcctctctacaagttgctgctgaagaaggagaaggcccatgacatggatataaattctgtgcagtggagccctggggagaagccggtactagcctctgcaagcgatgatgggacaatcaaggtgtgggagttgacatcatactagttttccacatttgctgtatgagtagcagatattttatactggaggagcctaatagaagtgctagatgtgcaggcatcctcatagctatttttcttttcttagttatatttactaaaattttacaacagacattgaatattatatttttttaggggagtcagtagtgtgactgtaaattgtaattactgtcacaactaaactttacatttttgctc

SEQ ID NO: 5581 - protein, 343 aa, Glycine max
  peptide (1)..(343): Ceres Seq. ID no. 15170867
  misc_feature (102)..(139): Pfam Name: Pfam Description:  WD domain, G-beta repeat
  misc_feature (2)..(342): NCBI GI NO: 18401018 NR Description: transducin / WD-40 repeat protein family
  misc_feature (4)..(340): NCBI GI NO: 34394959 NR Description: putative WD40 protein Ciao1
  misc_feature (2)..(263): NCBI GI NO: 7446121 NR Description: hypothetical protein At2g26060
  misc_feature (271)..(342): NCBI GI NO: 7446121 NR Description: hypothetical protein At2g26060
  misc_feature (86)..(320): NCBI GI NO: 22329107 NR Description: transducin / WD-40 repeat protein family
  misc_feature (4)..(58): NCBI GI NO: 22329107 NR Description: transducin / WD-40 repeat protein family
  misc_feature (10)..(341): NCBI GI NO: 19922278 NR Description: CG12797-PA [Drosophila melanogaster]
  misc_feature (6)..(342): NCBI GI NO: 28279952 NR Description: Similar to WD40 protein Ciao1 [Danio rerio]
  misc_feature (9)..(339): NCBI GI NO: 31542399 NR Description: WD40 protein Ciao1 [Mus musculus]
  misc_feature (9)..(339): NCBI GI NO: 4757988 NR Description: WD40 protein Ciao1 [Homo sapiens]
MMELKEIQRLEGHTDKVWSLAWNPTTGHAGIPLVFASCSGDKTVRIWEQNLSSGLWACTAVLDETHTRTVRSCAWSPSGKLLATASFDATTAIWENVGGDFECVSTLEGHENEVKCVSWNAAGTLLATCSRDKSVWIWEVLPGNEFECVSVLQGHSQDVKMVKWHPTEDILFSCSYDNSVKVWADEGDSDDWQCVQTLGEPNNGHTSTVWALSFNVSGDKMVTCSDDLTLKVWETESVGTQSGGGFAPWTHLCTLSGYHDRTIFSVHWSREGIFASGAADNAIRLFVDDNESQVGGPLYKLLLKKEKAHDMDINSVQWSPGEKPVLASASDDGTIKVWELTSY

SEQ ID NO: 5582 - protein, 342 aa, Glycine max
  peptide (1)..(342): Ceres Seq. ID no. 15170868
  misc_feature (101)..(138): Pfam Name: Pfam Description:  WD domain, G-beta repeat
  misc_feature (1)..(341): NCBI GI NO: 18401018 NR Description: transducin / WD-40 repeat protein family
  misc_feature (3)..(339): NCBI GI NO: 34394959 NR Description: putative WD40 protein Ciao1
  misc_feature (1)..(262): NCBI GI NO: 7446121 NR Description: hypothetical protein At2g26060
  misc_feature (270)..(341): NCBI GI NO: 7446121 NR Description: hypothetical protein At2g26060
  misc_feature (85)..(319): NCBI GI NO: 22329107 NR Description: transducin / WD-40 repeat protein family
  misc_feature (3)..(57): NCBI GI NO: 22329107 NR Description: transducin / WD-40 repeat protein family
  misc_feature (9)..(340): NCBI GI NO: 19922278 NR Description: CG12797-PA [Drosophila melanogaster]
  misc_feature (5)..(341): NCBI GI NO: 28279952 NR Description: Similar to WD40 protein Ciao1 [Danio rerio]
  misc_feature (8)..(338): NCBI GI NO: 31542399 NR Description: WD40 protein Ciao1 [Mus musculus]
  misc_feature (8)..(338): NCBI GI NO: 4757988 NR Description: WD40 protein Ciao1 [Homo sapiens]
MELKEIQRLEGHTDKVWSLAWNPTTGHAGIPLVFASCSGDKTVRIWEQNLSSGLWACTAVLDETHTRTVRSCAWSPSGKLLATASFDATTAIWENVGGDFECVSTLEGHENEVKCVSWNAAGTLLATCSRDKSVWIWEVLPGNEFECVSVLQGHSQDVKMVKWHPTEDILFSCSYDNSVKVWADEGDSDDWQCVQTLGEPNNGHTSTVWALSFNVSGDKMVTCSDDLTLKVWETESVGTQSGGGFAPWTHLCTLSGYHDRTIFSVHWSREGIFASGAADNAIRLFVDDNESQVGGPLYKLLLKKEKAHDMDINSVQWSPGEKPVLASASDDGTIKVWELTSY

SEQ ID NO: 5583 - protein, 183 aa, Glycine max
  peptide (1)..(183): Ceres Seq. ID no. 15170869
  misc_feature (1)..(182): NCBI GI NO: 18401018 NR Description: transducin / WD-40 repeat protein family
  misc_feature (1)..(180): NCBI GI NO: 34394959 NR Description: putative WD40 protein Ciao1
  misc_feature (1)..(103): NCBI GI NO: 7446121 NR Description: hypothetical protein At2g26060
  misc_feature (111)..(182): NCBI GI NO: 7446121 NR Description: hypothetical protein At2g26060
  misc_feature (1)..(160): NCBI GI NO: 22329107 NR Description: transducin / WD-40 repeat protein family
  misc_feature (1)..(181): NCBI GI NO: 19922278 NR Description: CG12797-PA [Drosophila melanogaster]
  misc_feature (1)..(182): NCBI GI NO: 28279952 NR Description: Similar to WD40 protein Ciao1 [Danio rerio]
  misc_feature (1)..(179): NCBI GI NO: 31542399 NR Description: WD40 protein Ciao1 [Mus musculus]
  misc_feature (1)..(179): NCBI GI NO: 4757988 NR Description: WD40 protein Ciao1 [Homo sapiens]
  misc_feature (1)..(179): NCBI GI NO: 12832206 NR Description: unnamed protein product [Mus musculus]
MVKWHPTEDILFSCSYDNSVKVWADEGDSDDWQCVQTLGEPNNGHTSTVWALSFNVSGDKMVTCSDDLTLKVWETESVGTQSGGGFAPWTHLCTLSGYHDRTIFSVHWSREGIFASGAADNAIRLFVDDNESQVGGPLYKLLLKKEKAHDMDINSVQWSPGEKPVLASASDDGTIKVWELTSY

SEQ ID NO: 5584 - DNA, 1507 bp, Glycine max
  misc_feature (1)..(1507): Ceres Seq. ID no. 15170420
agaagaatcgtggaatcttcatgcaatgcttcttcccattttcacactttgttaacacttaattttctgatcccaatctcgttaagcttcttagcaacaacacaaaatgagcgccatctctttcagttccatccattttcacacttggaaaaaccccaaggggtttggaaaggtgagaaaacaaccacatgggaagctacttgtaaagtgttccagccagagtgggaacccatcttcttcgcaaaatgcggttcgtgttggtgttgttggagctagtggctacactggttctgaggttctgcgactcttggcaaatcatccacagtttgggattgcactgatgactgcggataggaaagctgggcagccaatctcttctgtgttcccacatttgagcacttgggacttgccagatttgatttcaataaaggatgcaaacttttctgatgtggatgctgtattctgttgtttgcctcatggaactactcaggaaattattaaaggcctaccaaagcacctgaagattgttgatctttctgcagattttcgtctaaaagatctttctgagtatgaagaatggtatggtcagccgcatagagcaccagatttacagaaagaagctatatacggattgacagaggttttaagggaggaaatacagaatgctcgtctagttgctaatcctggttgttatccaacttctgttcaacttcctcttgtcccattgataaaggctagtcttattgagcttaaaaatattatcattgatgctaaatctggtgtgagtggagcaggacgcagtgccaaagaaaatttattgttcactgaagtaactgaaggtctcaattcttatggtgttacccggcatcgccatgttcctgaaattgaacagggacttgctgatgcttcaggttcaaaagtaactgttagttttacaccacacctaattccaatgagccgtggtatgcaatcaactatttatgtggaaatggctccaggagtgagaattgaggacctgtaccagcaactgaagctctcatatgaggacgaagaatttgttgttgtgttggaaaatggagccattcctcgaactcacagcgttaaagggactaattactgtttaatcaatgtttttccagaccgaattcctggaagagcaatcattatatctgttattgataatttagtgaagggagcttcaggtcaagctttacaaaaccttaatttgttaatgggatttccagaaaatttgggacttcattacctgcctctttttccttagagtagttgtcttgtccaactagagctccaaatctgaagccacagttccaccaaaatacttgatggagcagaggaaatattttcaagttatgtattttcattctctagattgtaatgtgagattcttcaagaatttagaagggaattggttatgacattggcagggatattaaagcaatttctgttttttttaaaaaaaaaaaaaaaaaaaaaaaaaaaaaaaaat

SEQ ID NO: 5585 - protein, 391 aa, Glycine max
  peptide (1)..(391): Ceres Seq. ID no. 15170421
  misc_feature (204)..(362): Pfam Name: Pfam Description:  Semialdehyde dehydrogenase, dimerisation domain
  misc_feature (2)..(391): NCBI GI NO: 16604368 NR Description: At2g19940/F6F22.3 [Arabidopsis thaliana]
  misc_feature (49)..(391): NCBI GI NO: 18399202 NR Description: N-acetyl-gamma- glutamyl-phosphate reductase -related
  misc_feature (36)..(391): NCBI GI NO: 37535658 NR Description: putative N-acetyl-gamma-glutamyl-phosphatereductase
  misc_feature (29)..(391): NCBI GI NO: 25284367 NR Description: hypothetical protein At2g19940
  misc_feature (49)..(391): NCBI GI NO: 22968389 NR Description: hypothetical protein [Rhodospirillum rubrum]
  misc_feature (117)..(391): NCBI GI NO: 23013472 NR Description: hypothetical protein
  misc_feature (50)..(391): NCBI GI NO: 6714965 NR Description: N-acetyl-gamma-glutamyl-phosphate reductase
  misc_feature (50)..(391): NCBI GI NO: 28376951 NR Description: N-acetyl-gamma-glutamyl-phosphate reductase
  misc_feature (51)..(391): NCBI GI NO: 22956652 NR Description: hypothetical protein [Rhodobacter sphaeroides]
  misc_feature (1)..(391): NCBI GI NO: 15805987 NR Description: N-acetyl-gamma-glutamyl-phosphate reductase
MSAISFSSIHFHTWKNPKGFGKVRKQPHGKLLVKCSSQSGNPSSSQNAVRVGVVGASGYTGSEVLRLLANHPQFGIALMTADRKAGQPISSVFPHLSTWDLPDLISIKDANFSDVDAVFCCLPHGTTQEIIKGLPKHLKIVDLSADFRLKDLSEYEEWYGQPHRAPDLQKEAIYGLTEVLREEIQNARLVANPGCYPTSVQLPLVPLIKASLIELKNIIIDAKSGVSGAGRSAKENLLFTEVTEGLNSYGVTRHRHVPEIEQGLADASGSKVTVSFTPHLIPMSRGMQSTIYVEMAPGVRIEDLYQQLKLSYEDEEFVVVLENGAIPRTHSVKGTNYCLINVFPDRIPGRAIIISVIDNLVKGASGQALQNLNLLMGFPENLGLHYLPLFP

SEQ ID NO: 5586 - protein, 313 aa, Glycine max
  peptide (1)..(313): Ceres Seq. ID no. 15170422
  misc_feature (126)..(284): Pfam Name: Pfam Description:  Semialdehyde dehydrogenase, dimerisation domain
  misc_feature (1)..(313): NCBI GI NO: 16604368 NR Description: At2g19940/F6F22.3 [Arabidopsis thaliana]
  misc_feature (1)..(313): NCBI GI NO: 18399202 NR Description: N-acetyl-gamma- glutamyl-phosphate reductase -related
  misc_feature (1)..(313): NCBI GI NO: 37535658 NR Description: putative N-acetyl-gamma-glutamyl-phosphatereductase
  misc_feature (1)..(313): NCBI GI NO: 25284367 NR Description: hypothetical protein At2g19940
  misc_feature (1)..(313): NCBI GI NO: 22968389 NR Description: hypothetical protein [Rhodospirillum rubrum]
  misc_feature (39)..(313): NCBI GI NO: 23013472 NR Description: hypothetical protein
  misc_feature (1)..(313): NCBI GI NO: 6714965 NR Description: N-acetyl-gamma-glutamyl-phosphate reductase
  misc_feature (1)..(313): NCBI GI NO: 28376951 NR Description: N-acetyl-gamma-glutamyl-phosphate reductase
  misc_feature (1)..(313): NCBI GI NO: 22956652 NR Description: hypothetical protein [Rhodobacter sphaeroides]
  misc_feature (1)..(313): NCBI GI NO: 15805987 NR Description: N-acetyl-gamma-glutamyl-phosphate reductase
MTADRKAGQPISSVFPHLSTWDLPDLISIKDANFSDVDAVFCCLPHGTTQEIIKGLPKHLKIVDLSADFRLKDLSEYEEWYGQPHRAPDLQKEAIYGLTEVLREEIQNARLVANPGCYPTSVQLPLVPLIKASLIELKNIIIDAKSGVSGAGRSAKENLLFTEVTEGLNSYGVTRHRHVPEIEQGLADASGSKVTVSFTPHLIPMSRGMQSTIYVEMAPGVRIEDLYQQLKLSYEDEEFVVVLENGAIPRTHSVKGTNYCLINVFPDRIPGRAIIISVIDNLVKGASGQALQNLNLLMGFPENLGLHYLPLFP

SEQ ID NO: 5587 - DNA, 1392 bp, Glycine max
  misc_feature (1)..(1392): Ceres Seq. ID no. 14307131
aaacaatttggaactccatgttaatcttcactcaattagattcagaataactttctgtctctcctacatactagcacatctctcatatttgtatgttaactacattcagaaaccatgaaatgtagtttcctggaaggaaaaacaatggaaattttcttagattttgagttgcagacagaactggctgggattctaaaagattatgttggccgggagagtcctctttattttgctgaaaggttgacggagcattacaagaggcctaatggtgaaggacctcacatttatctgaagagggaagatctcaatcacactggggctcacaaaattaataatgctgttgctcaagctttgcttgctaagagattgggcaaaaaacgcattattgctgaaactggagcgggtcagcatggagttgccactgctactgtatgtgctcgatttggtttagaatgcattatttatatgggtgcgcaggatatggaaaggcaggctctcaatgttttcagaatgcgtcttctcggtgctgaggtgagaccagtccattctgggactgctacacttaaggatgcgacatcagaggctataagggactgggtgactaatgtggagacaactcattatattttggggtctgttgctgggccgcatccatatccaatgatggtaagagagtttcatgctgtgattggcaaggagaccagaaagcaagctttggagaagtggggagggaaaccagatgtcttgattgcatgtgttggtggaggttcaaatgccataggacttttcaatgaatttgttgatgacaaagatgtaaggctaattggtgtggaggctgctggatttggcctggacagcggcaagcatgctgcaaccttaacaaaaggagaagttggggttttgcatggagctatgagctatctgctgcaggatgatgatggacaaatagttgagcctcactctattagtgcaggcttggactaccctggtgtgggtccggaacatagctttttgaaagatttagggcgtgctgaatatcatagtatcacagatgaagaagcattggaagcttttaagagagtttcgcgacttgaaggcataattcctgcactggaaacatctcatgcattggcatatctagagaaagtgtgtccaacccttgctaatggagccaaggttgtggttaacttcagtggccggggtgataaggatgttcaaactgctatcaagtacttgaagctttgaaaggatcaaaacttgctgagtgagcttcattttcatacttagagacataattaatacaatttattattagaccaagttaaatagtcatgtatatttgcatcagagaactgttgctattcaatcctcaataaacttagtttatgttac

SEQ ID NO: 5588 - protein, 376 aa, Glycine max
  peptide (1)..(376): Ceres Seq. ID no. 14307132
  misc_feature (28)..(362): Pfam Name: Pfam Description:  Pyridoxal-phosphate dependent enzyme
  misc_feature (4)..(374): NCBI GI NO: 15239755 NR Description: tryptophan synthase, beta subunit 1 (TSB1)
  misc_feature (4)..(376): NCBI GI NO: 81661 NR Description: tryptophan synthase (EC 4
  misc_feature (4)..(376): NCBI GI NO: 15236977 NR Description: tryptophan synthase, beta subunit 2 (TSB2)
  misc_feature (6)..(376): NCBI GI NO: 3915165 NR Description: Tryptophan synthase beta chain 2
  misc_feature (6)..(374): NCBI GI NO: 18481702 NR Description: tryptophan synthase beta-subunit [Sorghum bicolor]
  misc_feature (6)..(374): NCBI GI NO: 1174780 NR Description: Tryptophan synthase beta chain 2
  misc_feature (6)..(374): NCBI GI NO: 1174778 NR Description: Tryptophan synthase beta chain 1
  misc_feature (4)..(374): NCBI GI NO: 7437014 NR Description: probable tryptophan synthase (EC 4
  misc_feature (20)..(374): NCBI GI NO: 17231286 NR Description: tryptophan synthase beta subunit
  misc_feature (16)..(374): NCBI GI NO: 17227906 NR Description: tryptophan synthase beta subunit
MKCSFLEGKTMEIFLDFELQTELAGILKDYVGRESPLYFAERLTEHYKRPNGEGPHIYLKREDLNHTGAHKINNAVAQALLAKRLGKKRIIAETGAGQHGVATATVCARFGLECIIYMGAQDMERQALNVFRMRLLGAEVRPVHSGTATLKDATSEAIRDWVTNVETTHYILGSVAGPHPYPMMVREFHAVIGKETRKQALEKWGGKPDVLIACVGGGSNAIGLFNEFVDDKDVRLIGVEAAGFGLDSGKHAATLTKGEVGVLHGAMSYLLQDDDGQIVEPHSISAGLDYPGVGPEHSFLKDLGRAEYHSITDEEALEAFKRVSRLEGIIPALETSHALAYLEKVCPTLANGAKVVVNFSGRGDKDVQTAIKYLKL

SEQ ID NO: 5589 - protein, 366 aa, Glycine max
  peptide (1)..(366): Ceres Seq. ID no. 14307133
  misc_feature (18)..(352): Pfam Name: Pfam Description:  Pyridoxal-phosphate dependent enzyme
  misc_feature (1)..(364): NCBI GI NO: 15239755 NR Description: tryptophan synthase, beta subunit 1 (TSB1)
  misc_feature (1)..(366): NCBI GI NO: 81661 NR Description: tryptophan synthase (EC 4
  misc_feature (1)..(366): NCBI GI NO: 15236977 NR Description: tryptophan synthase, beta subunit 2 (TSB2)
  misc_feature (1)..(366): NCBI GI NO: 3915165 NR Description: Tryptophan synthase beta chain 2
  misc_feature (1)..(364): NCBI GI NO: 18481702 NR Description: tryptophan synthase beta-subunit [Sorghum bicolor]
  misc_feature (1)..(364): NCBI GI NO: 1174780 NR Description: Tryptophan synthase beta chain 2
  misc_feature (1)..(364): NCBI GI NO: 1174778 NR Description: Tryptophan synthase beta chain 1
  misc_feature (1)..(364): NCBI GI NO: 7437014 NR Description: probable tryptophan synthase (EC 4
  misc_feature (10)..(364): NCBI GI NO: 17231286 NR Description: tryptophan synthase beta subunit
  misc_feature (6)..(364): NCBI GI NO: 17227906 NR Description: tryptophan synthase beta subunit
MEIFLDFELQTELAGILKDYVGRESPLYFAERLTEHYKRPNGEGPHIYLKREDLNHTGAHKINNAVAQALLAKRLGKKRIIAETGAGQHGVATATVCARFGLECIIYMGAQDMERQALNVFRMRLLGAEVRPVHSGTATLKDATSEAIRDWVTNVETTHYILGSVAGPHPYPMMVREFHAVIGKETRKQALEKWGGKPDVLIACVGGGSNAIGLFNEFVDDKDVRLIGVEAAGFGLDSGKHAATLTKGEVGVLHGAMSYLLQDDDGQIVEPHSISAGLDYPGVGPEHSFLKDLGRAEYHSITDEEALEAFKRVSRLEGIIPALETSHALAYLEKVCPTLANGAKVVVNFSGRGDKDVQTAIKYLKL

SEQ ID NO: 5590 - protein, 259 aa, Glycine max
  peptide (1)..(259): Ceres Seq. ID no. 14307134
  misc_feature (1)..(245): Pfam Name: Pfam Description:  Pyridoxal-phosphate dependent enzyme
  misc_feature (1)..(257): NCBI GI NO: 15239755 NR Description: tryptophan synthase, beta subunit 1 (TSB1)
  misc_feature (1)..(259): NCBI GI NO: 81661 NR Description: tryptophan synthase (EC 4
  misc_feature (1)..(259): NCBI GI NO: 15236977 NR Description: tryptophan synthase, beta subunit 2 (TSB2)
  misc_feature (1)..(259): NCBI GI NO: 3915165 NR Description: Tryptophan synthase beta chain 2
  misc_feature (1)..(257): NCBI GI NO: 18481702 NR Description: tryptophan synthase beta-subunit [Sorghum bicolor]
  misc_feature (1)..(257): NCBI GI NO: 1174780 NR Description: Tryptophan synthase beta chain 2
  misc_feature (1)..(257): NCBI GI NO: 1174778 NR Description: Tryptophan synthase beta chain 1
  misc_feature (1)..(257): NCBI GI NO: 7437014 NR Description: probable tryptophan synthase (EC 4
  misc_feature (1)..(257): NCBI GI NO: 17231286 NR Description: tryptophan synthase beta subunit
  misc_feature (1)..(257): NCBI GI NO: 17227906 NR Description: tryptophan synthase beta subunit
MGAQDMERQALNVFRMRLLGAEVRPVHSGTATLKDATSEAIRDWVTNVETTHYILGSVAGPHPYPMMVREFHAVIGKETRKQALEKWGGKPDVLIACVGGGSNAIGLFNEFVDDKDVRLIGVEAAGFGLDSGKHAATLTKGEVGVLHGAMSYLLQDDDGQIVEPHSISAGLDYPGVGPEHSFLKDLGRAEYHSITDEEALEAFKRVSRLEGIIPALETSHALAYLEKVCPTLANGAKVVVNFSGRGDKDVQTAIKYLKL

SEQ ID NO: 5591 - DNA, 1562 bp, Glycine max
  misc_feature (1)..(1562): Ceres Seq. ID no. 14307879
tcctttaagccagcacgccaaaaagaacttctttgcaaaacacgactgaggaccttgcaacaccggcgtctccctccttcctctcctctctctgcctttacctttgattgtaggtttttcattatttggcggcgaaacagggttgaatatttttgttttagcgtctgagctttgaattacagagcaaagtgaagcgtgaacatggtgatgcatctaaacgggacaccgtgcgctctcggattccacatgcctgcggagtgggaaacccacgcgcagtgctggatgggttggcctgaacgtgccgataactggcgtgacggcgccgttcacgcccaacgcgtgtttgcgagggtagcgtcagcaatctcaagattcgagtctgtaacagtttgtgttagttctgcacagtgggagaacgcgcggagtcagctaccggagcatatcagggtcgttgagatgaacatgaacgattcttggttccgtgatattggacctacttttgttatgagaagaagcaccacgccggaatctggtgatgcagtgagcaggattgcagggattgactggaattttaatagttggggaggcttagaagatggatgttactgtgattggagtcttgatttgcttgtggctaagaagattttgggaattgagaagattcctagattttcacattcgatggtgcttgaaggtggaagcatccatgtggatggagaaggaacttgtcttaccacagaagagtgcctcttgaacaagaacaggaaccctcacttgagtaagaaccaaatagaggatgaacttaagacatatcttggaatccggaaggttatatggttgcctcgtggattatatggagatgatgacacaaatggtcatattgataacatgtgctgttttgtgaggcctggtgtggttatgctgtcttggattgatgatgaaactgatcctcagtatgaaagatctgtagaagcatattctttgctttcaaatgaaacagatgctaatggtagaaagtttgaaatcattaaactccatgttcccagtccactctatatgacagaggacgaggctgctggggtttctctggataatgaggctaagccaagacttccaggtactaggcttgctgcttcctatgtaaacttttacattgcaaataaagctatcattgcaccacaatttggagataaaaagtgggatgatgaagctgtccgagtcctatctaaggccttccctcatcatgaagttgtgggaattgaaggtgccagggagattgttttggccggtggaaatatacattgcattactcagcaacaaccagccatttgagcggcggcactctcgatattcgttgataggtgttgtattgttgcttatgggtttccagaataaattgatttggttaaattgcttggttagttagttggtttgctccaattgggcatgtatgctaatttttggagattagcaaaatccaataattgcagcctggatgaaagtgtatgcaaatagatggaaaaccgttgaaaatataaaacctaatttatatttaaattggc

SEQ ID NO: 5592 - protein, 376 aa, Glycine max
  peptide (1)..(376): Ceres Seq. ID no. 14307880
  misc_feature (14)..(374): Pfam Name: Pfam Description:  Porphyromonas-type peptidyl-arginine deiminase
  misc_feature (8)..(375): NCBI GI NO: 15241536 NR Description: expressed protein [Arabidopsis thaliana]
  misc_feature (8)..(375): NCBI GI NO: 26452202 NR Description: unknown protein [Arabidopsis thaliana]
  misc_feature (8)..(375): NCBI GI NO: 14289303 NR Description: hypothetical protein [Arabidopsis thaliana]
  misc_feature (5)..(351): NCBI GI NO: 38606518 NR Description: OSJNBa0016O02.3
  misc_feature (8)..(375): NCBI GI NO: 15595489 NR Description: conserved hypothetical protein
  misc_feature (5)..(375): NCBI GI NO: 28872501 NR Description: conserved hypothetical protein
  misc_feature (5)..(375): NCBI GI NO: 23472721 NR Description: hypothetical protein
  misc_feature (13)..(374): NCBI GI NO: 16802086 NR Description: conserved hypothetical protein
  misc_feature (5)..(375): NCBI GI NO: 23105724 NR Description: hypothetical protein [Azotobacter vinelandii]
  misc_feature (5)..(375): NCBI GI NO: 26987008 NR Description: conserved hypothetical protein
MVMHLNGTPCALGFHMPAEWETHAQCWMGWPERADNWRDGAVHAQRVFARVASAISRFESVTVCVSSAQWENARSQLPEHIRVVEMNMNDSWFRDIGPTFVMRRSTTPESGDAVSRIAGIDWNFNSWGGLEDGCYCDWSLDLLVAKKILGIEKIPRFSHSMVLEGGSIHVDGEGTCLTTEECLLNKNRNPHLSKNQIEDELKTYLGIRKVIWLPRGLYGDDDTNGHIDNMCCFVRPGVVMLSWIDDETDPQYERSVEAYSLLSNETDANGRKFEIIKLHVPSPLYMTEDEAAGVSLDNEAKPRLPGTRLAASYVNFYIANKAIIAPQFGDKKWDDEAVRVLSKAFPHHEVVGIEGAREIVLAGGNIHCITQQQPAI

SEQ ID NO: 5593 - protein, 374 aa, Glycine max
  peptide (1)..(374): Ceres Seq. ID no. 14307881
  misc_feature (12)..(372): Pfam Name: Pfam Description:  Porphyromonas-type peptidyl-arginine deiminase
  misc_feature (6)..(373): NCBI GI NO: 15241536 NR Description: expressed protein [Arabidopsis thaliana]
  misc_feature (6)..(373): NCBI GI NO: 26452202 NR Description: unknown protein [Arabidopsis thaliana]
  misc_feature (6)..(373): NCBI GI NO: 14289303 NR Description: hypothetical protein [Arabidopsis thaliana]
  misc_feature (3)..(349): NCBI GI NO: 38606518 NR Description: OSJNBa0016O02.3
  misc_feature (6)..(373): NCBI GI NO: 15595489 NR Description: conserved hypothetical protein
  misc_feature (3)..(373): NCBI GI NO: 28872501 NR Description: conserved hypothetical protein
  misc_feature (3)..(373): NCBI GI NO: 23472721 NR Description: hypothetical protein
  misc_feature (11)..(372): NCBI GI NO: 16802086 NR Description: conserved hypothetical protein
  misc_feature (3)..(373): NCBI GI NO: 23105724 NR Description: hypothetical protein [Azotobacter vinelandii]
  misc_feature (3)..(373): NCBI GI NO: 26987008 NR Description: conserved hypothetical protein
MHLNGTPCALGFHMPAEWETHAQCWMGWPERADNWRDGAVHAQRVFARVASAISRFESVTVCVSSAQWENARSQLPEHIRVVEMNMNDSWFRDIGPTFVMRRSTTPESGDAVSRIAGIDWNFNSWGGLEDGCYCDWSLDLLVAKKILGIEKIPRFSHSMVLEGGSIHVDGEGTCLTTEECLLNKNRNPHLSKNQIEDELKTYLGIRKVIWLPRGLYGDDDTNGHIDNMCCFVRPGVVMLSWIDDETDPQYERSVEAYSLLSNETDANGRKFEIIKLHVPSPLYMTEDEAAGVSLDNEAKPRLPGTRLAASYVNFYIANKAIIAPQFGDKKWDDEAVRVLSKAFPHHEVVGIEGAREIVLAGGNIHCITQQQPAI

SEQ ID NO: 5594 - protein, 361 aa, Glycine max
  peptide (1)..(361): Ceres Seq. ID no. 14307882
  misc_feature (1)..(359): Pfam Name: Pfam Description:  Porphyromonas-type peptidyl-arginine deiminase
  misc_feature (1)..(360): NCBI GI NO: 15241536 NR Description: expressed protein [Arabidopsis thaliana]
  misc_feature (1)..(360): NCBI GI NO: 26452202 NR Description: unknown protein [Arabidopsis thaliana]
  misc_feature (1)..(360): NCBI GI NO: 14289303 NR Description: hypothetical protein [Arabidopsis thaliana]
  misc_feature (1)..(336): NCBI GI NO: 38606518 NR Description: OSJNBa0016O02.3
  misc_feature (1)..(360): NCBI GI NO: 15595489 NR Description: conserved hypothetical protein
  misc_feature (1)..(360): NCBI GI NO: 28872501 NR Description: conserved hypothetical protein
  misc_feature (1)..(360): NCBI GI NO: 23472721 NR Description: hypothetical protein
  misc_feature (1)..(359): NCBI GI NO: 16802086 NR Description: conserved hypothetical protein
  misc_feature (1)..(360): NCBI GI NO: 23105724 NR Description: hypothetical protein [Azotobacter vinelandii]
  misc_feature (1)..(360): NCBI GI NO: 26987008 NR Description: conserved hypothetical protein
MPAEWETHAQCWMGWPERADNWRDGAVHAQRVFARVASAISRFESVTVCVSSAQWENARSQLPEHIRVVEMNMNDSWFRDIGPTFVMRRSTTPESGDAVSRIAGIDWNFNSWGGLEDGCYCDWSLDLLVAKKILGIEKIPRFSHSMVLEGGSIHVDGEGTCLTTEECLLNKNRNPHLSKNQIEDELKTYLGIRKVIWLPRGLYGDDDTNGHIDNMCCFVRPGVVMLSWIDDETDPQYERSVEAYSLLSNETDANGRKFEIIKLHVPSPLYMTEDEAAGVSLDNEAKPRLPGTRLAASYVNFYIANKAIIAPQFGDKKWDDEAVRVLSKAFPHHEVVGIEGAREIVLAGGNIHCITQQQPAI

SEQ ID NO: 5595 - DNA, 1415 bp, Glycine max
  misc_feature (1)..(1415): Ceres Seq. ID no. 15169316
aaatacttgctattcgggatcatggcgatgtttgtttgaaacaacagcaacggagaggatgagaagagagtgaagtttgtgaaagagatggcactcgtaacaacaaacccaaccatcaatgaggggcctctgttcgccgaagttgacatgggttccgacttcaacgccccaacggttcgagctaccgttgttcaagcctccaccatcttctacgacacaccagccaccttagataaggctgagaggttgttggctgaagctactagctatgggtcccagcttgtggtgtttccagaagcctttgtgggtggctacccgcgtggttcagcttttggtctttcgatcggaaatcgcactgttaagggtagagaggagtttcgcaagtatcattctgcagccattgatgtgcctggtcctgaagttgatagattggcagcaatggcagggaagtataaagtacatttagtgatgggtgtgatagagagggacggctacacactttattgcaccgttctgttctttgattctcagggtcattacctaggaaagcacaggaaaatcatgccaactgcattggagcgggttatctggggatttggggatggatcaaccattccagtgtttgaaactcccgttggaaaaataggtgctgccatttgttgggagaacagaatgccactattaaggacagcaatgtatgccaaaggtgtggagatatattgtgctccaacagctgatgccagggatgtgtggcaggcatcaatgacccatattgcacttgaaggtggatgttttgttttgtcagcaaaccagttttgtcggagaagggattacccaccccctccagagtatgtttttgctggcacagaagtggacctgacaccggattctgttgtgtgcgccggaggtagtgtcattatatcaccattaggggctgttctggctggaccaaattatgacggggaggcgctaatctcagcagaccttgatcttggagaaattgcaagagctaagtttgattttgatgtggttggacactattcaaggcctgaagtgcttagcttaactgtaaaggaccatccaacgaaccccgttacttttacatcaacatcgacaaaaattgaagacaagaccaagtagtttcttcctttcatggcttgcaacttccaaacctccagttctggacctgtccacatagccttatttgaccccttgtatgttaactcttgtgtccatatatgaaaggttatttgggcattttgtcgtggtttatatcaccacattaaaatgacattggaactcatatttgctatttttcacataatttcataagctaaaaattaagcttatgaaagtaaccttgcacgaaagcttaagcaaatcaactggttgttttaattatcgagtttttactg

SEQ ID NO: 5596 - protein, 350 aa, Glycine max
  peptide (1)..(350): Ceres Seq. ID no. 15169317
  misc_feature (1)..(350): NCBI GI NO: 7435980 NR Description: nitrilase (EC 3.5.5.1) 4B - common tobacco
  misc_feature (1)..(350): NCBI GI NO: 3914163 NR Description: NITRILASE 4
  misc_feature (1)..(349): NCBI GI NO: 15242205 NR Description: Nitrilase 4 (sp P46011) [Arabidopsis thaliana]
  misc_feature (4)..(349): NCBI GI NO: 21593970 NR Description: Nitrilase 4 (sp P46011) [Arabidopsis thaliana]
  misc_feature (14)..(344): NCBI GI NO: 25290269 NR Description: nitrilase-like protein [imported] - rice
  misc_feature (1)..(344): NCBI GI NO: 37654214 NR Description: nitrilase 2 [Zea mays]
  misc_feature (1)..(347): NCBI GI NO: 37654216 NR Description: nitrilase 1 [Zea mays]
  misc_feature (30)..(347): NCBI GI NO: 25290266 NR Description: nitrilase (EC 3.5.5.1) 2
  misc_feature (30)..(347): NCBI GI NO: 15229932 NR Description: nitrilase 2 [Arabidopsis thaliana]
  misc_feature (30)..(347): NCBI GI NO: 25290267 NR Description: nitrilase (EC 3.5.5.1) 2
MALVTTNPTINEGPLFAEVDMGSDFNAPTVRATVVQASTIFYDTPATLDKAERLLAEATSYGSQLVVFPEAFVGGYPRGSAFGLSIGNRTVKGREEFRKYHSAAIDVPGPEVDRLAAMAGKYKVHLVMGVIERDGYTLYCTVLFFDSQGHYLGKHRKIMPTALERVIWGFGDGSTIPVFETPVGKIGAAICWENRMPLLRTAMYAKGVEIYCAPTADARDVWQASMTHIALEGGCFVLSANQFCRRRDYPPPPEYVFAGTEVDLTPDSVVCAGGSVIISPLGAVLAGPNYDGEALISADLDLGEIARAKFDFDVVGHYSRPEVLSLTVKDHPTNPVTFTSTSTKIEDKTK

SEQ ID NO: 5597 - protein, 330 aa, Glycine max
  peptide (1)..(330): Ceres Seq. ID no. 15169318
  misc_feature (1)..(330): NCBI GI NO: 7435980 NR Description: nitrilase (EC 3.5.5.1) 4B - common tobacco
  misc_feature (1)..(330): NCBI GI NO: 3914163 NR Description: NITRILASE 4
  misc_feature (1)..(329): NCBI GI NO: 15242205 NR Description: Nitrilase 4 (sp P46011) [Arabidopsis thaliana]
  misc_feature (1)..(329): NCBI GI NO: 21593970 NR Description: Nitrilase 4 (sp P46011) [Arabidopsis thaliana]
  misc_feature (1)..(324): NCBI GI NO: 25290269 NR Description: nitrilase-like protein [imported] - rice
  misc_feature (1)..(324): NCBI GI NO: 37654214 NR Description: nitrilase 2 [Zea mays]
  misc_feature (1)..(327): NCBI GI NO: 37654216 NR Description: nitrilase 1 [Zea mays]
  misc_feature (10)..(327): NCBI GI NO: 25290266 NR Description: nitrilase (EC 3.5.5.1) 2
  misc_feature (10)..(327): NCBI GI NO: 15229932 NR Description: nitrilase 2 [Arabidopsis thaliana]
  misc_feature (10)..(327): NCBI GI NO: 25290267 NR Description: nitrilase (EC 3.5.5.1) 2
MGSDFNAPTVRATVVQASTIFYDTPATLDKAERLLAEATSYGSQLVVFPEAFVGGYPRGSAFGLSIGNRTVKGREEFRKYHSAAIDVPGPEVDRLAAMAGKYKVHLVMGVIERDGYTLYCTVLFFDSQGHYLGKHRKIMPTALERVIWGFGDGSTIPVFETPVGKIGAAICWENRMPLLRTAMYAKGVEIYCAPTADARDVWQASMTHIALEGGCFVLSANQFCRRRDYPPPPEYVFAGTEVDLTPDSVVCAGGSVIISPLGAVLAGPNYDGEALISADLDLGEIARAKFDFDVVGHYSRPEVLSLTVKDHPTNPVTFTSTSTKIEDKTK

SEQ ID NO: 5598 - protein, 233 aa, Glycine max
  peptide (1)..(233): Ceres Seq. ID no. 15169319
  misc_feature (1)..(233): NCBI GI NO: 7435980 NR Description: nitrilase (EC 3.5.5.1) 4B - common tobacco
  misc_feature (1)..(233): NCBI GI NO: 3914163 NR Description: NITRILASE 4
  misc_feature (1)..(232): NCBI GI NO: 15242205 NR Description: Nitrilase 4 (sp P46011) [Arabidopsis thaliana]
  misc_feature (1)..(232): NCBI GI NO: 21593970 NR Description: Nitrilase 4 (sp P46011) [Arabidopsis thaliana]
  misc_feature (1)..(227): NCBI GI NO: 25290269 NR Description: nitrilase-like protein [imported] - rice
  misc_feature (1)..(227): NCBI GI NO: 37654214 NR Description: nitrilase 2 [Zea mays]
  misc_feature (1)..(230): NCBI GI NO: 37654216 NR Description: nitrilase 1 [Zea mays]
  misc_feature (1)..(230): NCBI GI NO: 25290266 NR Description: nitrilase (EC 3.5.5.1) 2
  misc_feature (1)..(230): NCBI GI NO: 15229932 NR Description: nitrilase 2 [Arabidopsis thaliana]
  misc_feature (1)..(230): NCBI GI NO: 25290267 NR Description: nitrilase (EC 3.5.5.1) 2
MAGKYKVHLVMGVIERDGYTLYCTVLFFDSQGHYLGKHRKIMPTALERVIWGFGDGSTIPVFETPVGKIGAAICWENRMPLLRTAMYAKGVEIYCAPTADARDVWQASMTHIALEGGCFVLSANQFCRRRDYPPPPEYVFAGTEVDLTPDSVVCAGGSVIISPLGAVLAGPNYDGEALISADLDLGEIARAKFDFDVVGHYSRPEVLSLTVKDHPTNPVTFTSTSTKIEDKTK

SEQ ID NO: 5599 - DNA, 965 bp, Glycine max
  misc_feature (1)..(965): Ceres Seq. ID no. 15169786
agtacagcaaatgccaaaagccaagttaattccctttctccactcttcacaaacacaaacacacgtattctcttgcaaaactaagaatgaaggaggagttggtggttgaagaagggtaccttttcaaagaagagactcacttcacagtgctcaaaacctctctcttcttcaacggtgatggcttcgctgtctacgattgcaaaggccaactcgttttccgcttcgactcctacggtccccgcgcgcgtgacaaggacgagctcgttctcatggatccccatggccgttctcttctcactctccgccgaaagaaaccgagtcttcatcaacgctgggaaggcttcaaaggggagagaacggagggtcataaacccattttcagcgtcaagagatcgtcgatcatcggacggtcgaggaccagcgtggcggtggaggtgtacgatagccccggtgtggagtacctcatcgaaggttgcttcccgcagcgctgctgcaaggttttcaatgccgctaaggaacttgtggctgagattcgtcgcaaagtggaccccaccaccagcgttatgctcgggaaggaagtcttttggctctgcgtgaagcctggtttcgatgcggcctttgccatgggattggtattggtacttgatcagatcaacggtgagaattactttgatgatagaatcttggagccctcggtgcaccctgctgcagaagatctgggatttgtttcaccggttccagtttgagattatcagatttgtcttgttttctgattctgacgttttactcactgatcgttggagtgttccctctcaaagggttttctttctctctgcccttttttttttatggctcatctcgttttttttttgtaaaaaaaaaaataatgatgatgttctggatcataatcactatgcgatcttgtacattctatatgcattgaaagttaaagataaacttatctt

SEQ ID NO: 5600 - protein, 219 aa, Glycine max
  peptide (1)..(219): Ceres Seq. ID no. 15169787
  misc_feature (5)..(185): Pfam Name: DUF567 Pfam Description: Protein of unknown function
  misc_feature (1)..(210): NCBI GI NO: 18400907 NR Description: expressed protein [Arabidopsis thaliana]
  misc_feature (1)..(210): NCBI GI NO: 21554362 NR Description: unknown [Arabidopsis thaliana]
  misc_feature (1)..(211): NCBI GI NO: 15220064 NR Description: expressed protein [Arabidopsis thaliana]
  misc_feature (6)..(138): NCBI GI NO: 34909922 NR Description: P0665A11.21
  misc_feature (127)..(192): NCBI GI NO: 34909922 NR Description: P0665A11.21
  misc_feature (1)..(189): NCBI GI NO: 15224921 NR Description: expressed protein [Arabidopsis thaliana]
  misc_feature (20)..(189): NCBI GI NO: 27542769 NR Description: hypothetical protein-like protein
  misc_feature (17)..(189): NCBI GI NO: 27542765 NR Description: hypothetical protein-like protein
  misc_feature (14)..(191): NCBI GI NO: 34909256 NR Description: B1148D12.16
  misc_feature (11)..(172): NCBI GI NO: 18404685 NR Description: hypothetical protein [Arabidopsis thaliana]
MKEELVVEEGYLFKEETHFTVLKTSLFFNGDGFAVYDCKGQLVFRFDSYGPRARDKDELVLMDPHGRSLLTLRRKKPSLHQRWEGFKGERTEGHKPIFSVKRSSIIGRSRTSVAVEVYDSPGVEYLIEGCFPQRCCKVFNAAKELVAEIRRKVDPTTSVMLGKEVFWLCVKPGFDAAFAMGLVLVLDQINGENYFDDRILEPSVHPAAEDLGFVSPVPV

SEQ ID NO: 5601 - protein, 158 aa, Glycine max
  peptide (1)..(158): Ceres Seq. ID no. 15169788
  misc_feature (1)..(124): Pfam Name: DUF567 Pfam Description: Protein of unknown function
  misc_feature (1)..(149): NCBI GI NO: 18400907 NR Description: expressed protein [Arabidopsis thaliana]
  misc_feature (1)..(149): NCBI GI NO: 21554362 NR Description: unknown [Arabidopsis thaliana]
  misc_feature (1)..(150): NCBI GI NO: 15220064 NR Description: expressed protein [Arabidopsis thaliana]
  misc_feature (1)..(77): NCBI GI NO: 34909922 NR Description: P0665A11.21
  misc_feature (66)..(131): NCBI GI NO: 34909922 NR Description: P0665A11.21
  misc_feature (1)..(128): NCBI GI NO: 15224921 NR Description: expressed protein [Arabidopsis thaliana]
  misc_feature (1)..(128): NCBI GI NO: 27542769 NR Description: hypothetical protein-like protein
  misc_feature (1)..(128): NCBI GI NO: 27542765 NR Description: hypothetical protein-like protein
  misc_feature (1)..(130): NCBI GI NO: 34909256 NR Description: B1148D12.16
  misc_feature (1)..(111): NCBI GI NO: 18404685 NR Description: hypothetical protein [Arabidopsis thaliana]
MDPHGRSLLTLRRKKPSLHQRWEGFKGERTEGHKPIFSVKRSSIIGRSRTSVAVEVYDSPGVEYLIEGCFPQRCCKVFNAAKELVAEIRRKVDPTTSVMLGKEVFWLCVKPGFDAAFAMGLVLVLDQINGENYFDDRILEPSVHPAAEDLGFVSPVPV

SEQ ID NO: 5602 - protein, 139 aa, Glycine max
  peptide (1)..(139): Ceres Seq. ID no. 15169789
MASLSTIAKANSFSASTPTVPARVTRTSSFSWIPMAVLFSLSAERNRVFINAGKASKGRERRVINPFSASRDRRSSDGRGPAWRWRCTIAPVWSTSSKVASRSAAARFSMPLRNLWLRFVAKWTPPPALCSGRKSFGSA

SEQ ID NO: 5603 - DNA, 1440 bp, Glycine max
  misc_feature (1)..(1440): Ceres Seq. ID no. 13639469
agatgtttctataatggaggttggattaggtggaaaatatgatgcaacgaatgtggtcccaacacctattgtgtgtggtataacctcccttgggtatgaccacatggagattcttgggaatactcttggagaaattgctggtgagaaagctggtatcttcaagcatcggattccagcatttactgtgcctcaacctgatgaagcaatgcatgtactcagagagaaggcttctcagttaaatgtacctcttcaagtggtaaccccattagatgccaaattgctaaatggttcaagactagcgcttggaggtgaacaccaatatataaatgctggtcttgctattgcattatgctctacgtggctgaaaatgaatgggcatcttgaagactcgtacttgaaacatatatgactcatctgcctgtatgaagcaacacactttaccagagaagttcataaaagggttaacaactgcaagtttgcaaggaagggctcagattgttcctgatcagttcatcaatgatgaaataccaaatgaacttgtcttctttttagatggggctcatagtcctgaaagcatggaagcatgtgccaggtggttttctcttgctattaaagatcaagaccagattttgtttcatcagaaacttgataattctaacttctcaaaccaagtagtgaagatgcacaatggtgaaactgtacagaagaaatccacacagattttgctgttcaattgtatgtctgagcgaaaccctcagttgcttcttccccacttgatgaaaacatgtgctgatcatggtgtctacttcaagaaggcactctttgtacctggtttatcagtgtatcacaaagttggatcccatgctttaccagcgacagattctgatgttgacctgtcgtggcagcttactctacaaagagtgtgggaaaatctcatgcaagggaacaaagaaggcaagagtaataattctgctcctgaagaattaaacatggaaatgagtgccagcaattgtgaacacagtgccgtgttttcctcattgccactggttctcaaatggcttagggacacggtgcaacaaaaccagtcaactcgttttcaggtccttgttactggttctatacatcttattggtgacatgttgaaattagtcaagaagtgattcgttgggctacttgaaagattggctttcattcagattttttaagtaccactatttgagtccatgaaagtgctgttacacttggttcaaaagctgttgacagaaggttatcaatataataactacattcttgattgtagacattgatgcatccattacattggtttaaatcagcatcactctggctacttcgtgggtctttcaactttcatttcactgtaattgaaaataaaggtggattaagggacatgaataaagaataacatctatcaattttctt

SEQ ID NO: 5604 - protein, 245 aa, Glycine max
  peptide (1)..(245): Ceres Seq. ID no. 13639470
  misc_feature (6)..(245): NCBI GI NO: 30681208 NR Description: folylpolyglutamate synthase (fpgs2)
  misc_feature (6)..(245): NCBI GI NO: 17976705 NR Description: dihydrofolate synthetase / folylpolyglutamatesynthetase
  misc_feature (100)..(228): NCBI GI NO: 10177571 NR Description: tetrahydrofolylpolyglutamate synthase-like protein
  misc_feature (6)..(68): NCBI GI NO: 10177571 NR Description: tetrahydrofolylpolyglutamate synthase-like protein
  misc_feature (80)..(245): NCBI GI NO: 21592378 NR Description: tetrahydrofolylpolyglutamate synthase precursor-like
  misc_feature (80)..(245): NCBI GI NO: 30694284 NR Description: folylpolyglutamate-dihydrofolate synthase
  misc_feature (80)..(245): NCBI GI NO: 30694288 NR Description: folylpolyglutamate-dihydrofolate synthase
  misc_feature (1)..(68): NCBI GI NO: 21592378 NR Description: tetrahydrofolylpolyglutamate synthase precursor-like
  misc_feature (1)..(68): NCBI GI NO: 30694284 NR Description: folylpolyglutamate-dihydrofolate synthase
  misc_feature (1)..(68): NCBI GI NO: 30694288 NR Description: folylpolyglutamate-dihydrofolate synthase
MKQHTLPEKFIKGLTTASLQGRAQIVPDQFINDEIPNELVFFLDGAHSPESMEACARWFSLAIKDQDQILFHQKLDNSNFSNQVVKMHNGETVQKKSTQILLFNCMSERNPQLLLPHLMKTCADHGVYFKKALFVPGLSVYHKVGSHALPATDSDVDLSWQLTLQRVWENLMQGNKEGKSNNSAPEELNMEMSASNCEHSAVFSSLPLVLKWLRDTVQQNQSTRFQVLVTGSIHLIGDMLKLVKK

SEQ ID NO: 5605 - protein, 194 aa, Glycine max
  peptide (1)..(194): Ceres Seq. ID no. 13639471
  misc_feature (1)..(194): NCBI GI NO: 30681208 NR Description: folylpolyglutamate synthase (fpgs2)
  misc_feature (1)..(194): NCBI GI NO: 17976705 NR Description: dihydrofolate synthetase / folylpolyglutamatesynthetase
  misc_feature (49)..(177): NCBI GI NO: 10177571 NR Description: tetrahydrofolylpolyglutamate synthase-like protein
  misc_feature (1)..(17): NCBI GI NO: 10177571 NR Description: tetrahydrofolylpolyglutamate synthase-like protein
  misc_feature (29)..(194): NCBI GI NO: 21592378 NR Description: tetrahydrofolylpolyglutamate synthase precursor-like
  misc_feature (29)..(194): NCBI GI NO: 30694284 NR Description: folylpolyglutamate-dihydrofolate synthase
  misc_feature (29)..(194): NCBI GI NO: 30694288 NR Description: folylpolyglutamate-dihydrofolate synthase
  misc_feature (1)..(17): NCBI GI NO: 21592378 NR Description: tetrahydrofolylpolyglutamate synthase precursor-like
  misc_feature (1)..(17): NCBI GI NO: 30694288 NR Description: folylpolyglutamate-dihydrofolate synthase
  misc_feature (1)..(17): NCBI GI NO: 30694284 NR Description: folylpolyglutamate-dihydrofolate synthase
MEACARWFSLAIKDQDQILFHQKLDNSNFSNQVVKMHNGETVQKKSTQILLFNCMSERNPQLLLPHLMKTCADHGVYFKKALFVPGLSVYHKVGSHALPATDSDVDLSWQLTLQRVWENLMQGNKEGKSNNSAPEELNMEMSASNCEHSAVFSSLPLVLKWLRDTVQQNQSTRFQVLVTGSIHLIGDMLKLVKK

SEQ ID NO: 5606 - protein, 159 aa, Glycine max
  peptide (1)..(159): Ceres Seq. ID no. 13639472
  misc_feature (1)..(159): NCBI GI NO: 30681208 NR Description: folylpolyglutamate synthase (fpgs2)
  misc_feature (1)..(159): NCBI GI NO: 17976705 NR Description: dihydrofolate synthetase / folylpolyglutamatesynthetase
  misc_feature (14)..(142): NCBI GI NO: 10177571 NR Description: tetrahydrofolylpolyglutamate synthase-like protein
  misc_feature (1)..(159): NCBI GI NO: 21592378 NR Description: tetrahydrofolylpolyglutamate synthase precursor-like
  misc_feature (1)..(159): NCBI GI NO: 30694288 NR Description: folylpolyglutamate-dihydrofolate synthase
  misc_feature (1)..(159): NCBI GI NO: 30694284 NR Description: folylpolyglutamate-dihydrofolate synthase
  misc_feature (1)..(159): NCBI GI NO: 30694286 NR Description: folylpolyglutamate-dihydrofolate synthase
  misc_feature (1)..(141): NCBI GI NO: 11358877 NR Description: tetrahydrofolylpolyglutamate synthase-like proteinF1I16
  misc_feature (1)..(98): NCBI GI NO: 37535812 NR Description: putative folylpolyglutamate synthetase
  misc_feature (11)..(159): NCBI GI NO: 37535812 NR Description: putative folylpolyglutamate synthetase
MHNGETVQKKSTQILLFNCMSERNPQLLLPHLMKTCADHGVYFKKALFVPGLSVYHKVGSHALPATDSDVDLSWQLTLQRVWENLMQGNKEGKSNNSAPEELNMEMSASNCEHSAVFSSLPLVLKWLRDTVQQNQSTRFQVLVTGSIHLIGDMLKLVKK

SEQ ID NO: 5607 - DNA, 1111 bp, Glycine max
  misc_feature (1)..(1111): Ceres Seq. ID no. 15169781
gaacaagtaaaataaacaaaagccaaaggaacaaatgaataatgttttatgttacattacatagtattataatattctcacgctattcactactctccatttggcctcagttgatcatacacactcttcttcttcttcttcttctctcttcttgcttgcaatatggacatgaattcctcaggtggtgcctgcggttggctttatgattatggctttgatatccctgttgctggttctgacttcatggcttcagactctggtggtttcagttgggggccccagagttacaacttcaagggtccttcaaatatgagcttggaaatggaatactcactggattcaactgtcatggaaaatggtccttcaaagcggttaaggactgaatcatgtgcatctggctccaaggcatgtcgtgagaaattgcgaagggataaacttaatgagaggtttctggaattgagttcgatcttggagcctggtagacagcccaaaacagacaaagttgcattattaagcgatgcggctcgagtggtaatccaattgagaaatgaagccgagaggctgaaggaaatgaatgatgaattacaggcaaaagttaaagaattgaagggtgagaagaatgagcttcgtgatgagaagaataggctgaaggaagagaaagaaaagttggagaagcaagtgaaactgacaaatatacaacccagcttcctacctcaagccccagatgctaaagggcaagttggtagccacaagctgatacctttcattggataccctggaattgccatgtggcagtttatgtcccctgctgcagttgatacttcaaaggatcatctgcttcgacctccagttgcataaagtggttagcaatagcatccacttctttgttgtatgtgttctttacatgtgttatatttttgtgtttaagttatccatcctgtctaatgtgtgttttctaaagtcactggtagaaagtgtgctcggaaactggttaatagtataagtttgtgctgttgctgtctgaactatgataagaaagtgctacatgtcatggctacaaagtgtgttgcattattaaaaataaaagtgagtttaagtggttctttgctgc

SEQ ID NO: 5608 - protein, 231 aa, Glycine max
  peptide (1)..(231): Ceres Seq. ID no. 15169782
  misc_feature (79)..(128): Pfam Name: Pfam Description:  Helix-loop-helix DNA-binding domain
  misc_feature (34)..(231): NCBI GI NO: 15239706 NR Description: bHLH protein [Arabidopsis thaliana]
  misc_feature (34)..(231): NCBI GI NO: 21592325 NR Description: bHLH transcription factor, putative
  misc_feature (12)..(231): NCBI GI NO: 15223710 NR Description: bHLH protein [Arabidopsis thaliana]
  misc_feature (7)..(231): NCBI GI NO: 38636768 NR Description: helix-loop-helix-like protein
  misc_feature (49)..(231): NCBI GI NO: 32352190 NR Description: hypothetical protein
  misc_feature (33)..(231): NCBI GI NO: 29367409 NR Description: helix-loop-helix-like protein
  misc_feature (69)..(231): NCBI GI NO: 18414212 NR Description: bHLH protein [Arabidopsis thaliana]
  misc_feature (69)..(231): NCBI GI NO: 30682847 NR Description: bHLH protein [Arabidopsis thaliana]
  misc_feature (64)..(231): NCBI GI NO: 20127030 NR Description: putative bHLH transcription factor
  misc_feature (64)..(231): NCBI GI NO: 22331274 NR Description: bHLH protein [Arabidopsis thaliana]
MDMNSSGGACGWLYDYGFDIPVAGSDFMASDSGGFSWGPQSYNFKGPSNMSLEMEYSLDSTVMENGPSKRLRTESCASGSKACREKLRRDKLNERFLELSSILEPGRQPKTDKVALLSDAARVVIQLRNEAERLKEMNDELQAKVKELKGEKNELRDEKNRLKEEKEKLEKQVKLTNIQPSFLPQAPDAKGQVGSHKLIPFIGYPGIAMWQFMSPAAVDTSKDHLLRPPVA

SEQ ID NO: 5609 - protein, 229 aa, Glycine max
  peptide (1)..(229): Ceres Seq. ID no. 15169783
  misc_feature (77)..(126): Pfam Name: Pfam Description:  Helix-loop-helix DNA-binding domain
  misc_feature (32)..(229): NCBI GI NO: 15239706 NR Description: bHLH protein [Arabidopsis thaliana]
  misc_feature (32)..(229): NCBI GI NO: 21592325 NR Description: bHLH transcription factor, putative
  misc_feature (10)..(229): NCBI GI NO: 15223710 NR Description: bHLH protein [Arabidopsis thaliana]
  misc_feature (5)..(229): NCBI GI NO: 38636768 NR Description: helix-loop-helix-like protein
  misc_feature (47)..(229): NCBI GI NO: 32352190 NR Description: hypothetical protein
  misc_feature (31)..(229): NCBI GI NO: 29367409 NR Description: helix-loop-helix-like protein
  misc_feature (67)..(229): NCBI GI NO: 18414212 NR Description: bHLH protein [Arabidopsis thaliana]
  misc_feature (67)..(229): NCBI GI NO: 30682847 NR Description: bHLH protein [Arabidopsis thaliana]
  misc_feature (62)..(229): NCBI GI NO: 20127030 NR Description: putative bHLH transcription factor
  misc_feature (62)..(229): NCBI GI NO: 22331274 NR Description: bHLH protein [Arabidopsis thaliana]
MNSSGGACGWLYDYGFDIPVAGSDFMASDSGGFSWGPQSYNFKGPSNMSLEMEYSLDSTVMENGPSKRLRTESCASGSKACREKLRRDKLNERFLELSSILEPGRQPKTDKVALLSDAARVVIQLRNEAERLKEMNDELQAKVKELKGEKNELRDEKNRLKEEKEKLEKQVKLTNIQPSFLPQAPDAKGQVGSHKLIPFIGYPGIAMWQFMSPAAVDTSKDHLLRPPVA

SEQ ID NO: 5610 - protein, 204 aa, Glycine max
  peptide (1)..(204): Ceres Seq. ID no. 15169784
  misc_feature (52)..(101): Pfam Name: Pfam Description:  Helix-loop-helix DNA-binding domain
  misc_feature (7)..(204): NCBI GI NO: 15239706 NR Description: bHLH protein [Arabidopsis thaliana]
  misc_feature (7)..(204): NCBI GI NO: 21592325 NR Description: bHLH transcription factor, putative
  misc_feature (1)..(204): NCBI GI NO: 15223710 NR Description: bHLH protein [Arabidopsis thaliana]
  misc_feature (1)..(204): NCBI GI NO: 38636768 NR Description: helix-loop-helix-like protein
  misc_feature (22)..(204): NCBI GI NO: 32352190 NR Description: hypothetical protein
  misc_feature (6)..(204): NCBI GI NO: 29367409 NR Description: helix-loop-helix-like protein
  misc_feature (42)..(204): NCBI GI NO: 18414212 NR Description: bHLH protein [Arabidopsis thaliana]
  misc_feature (42)..(204): NCBI GI NO: 30682847 NR Description: bHLH protein [Arabidopsis thaliana]
  misc_feature (37)..(204): NCBI GI NO: 20127030 NR Description: putative bHLH transcription factor
  misc_feature (37)..(204): NCBI GI NO: 22331274 NR Description: bHLH protein [Arabidopsis thaliana]
MASDSGGFSWGPQSYNFKGPSNMSLEMEYSLDSTVMENGPSKRLRTESCASGSKACREKLRRDKLNERFLELSSILEPGRQPKTDKVALLSDAARVVIQLRNEAERLKEMNDELQAKVKELKGEKNELRDEKNRLKEEKEKLEKQVKLTNIQPSFLPQAPDAKGQVGSHKLIPFIGYPGIAMWQFMSPAAVDTSKDHLLRPPVA

SEQ ID NO: 5611 - DNA, 1346 bp, Glycine max
  misc_feature (1)..(1346): Ceres Seq. ID no. 14310390
gaaatgagtttcttcgatttcatcgtgttgatgatagggtcgctctttctgttcaaagctttcgattttactttctgtgtctttcttctgcttcttttgattcccccaaatcttcagttttaaaaaccctaatctgctgccatgaggaagaagctcgatacccgtttccctgctgctcggataaagaagataatgcaggcagatgaggatgttggaaagatagcactggctgtgcctgttttagtttctaaagctctagaactatttttgcaagatctttgtgaccgcacttatgaaataactcttcaaagaggagcgaagaccatgaattcattgcatttaaaacattgtgtacaaagctataatgtctttgactttctgagggacgttgttagcagggttcctgactacggccatggccatggccatgctgaggctggtcctgatgatcgggtcattacaaaaagaaggaaagctattggtgatgatggtaatgacagcgatgaagaggctaagaggagcaagatgcttgagttgggccacactggcagtactggtaggggaagaggccgaggtagaggaagaggccgtggccgagggcgaccacctttaaatagagagacatatcatcaagatgctgaatctgagccttgcacttctgttcagccgagcaacccacaaaatacaaacacaagtatagcaatggataatggttctgagtcaaaggagataccaaaggaggagaatattgcagctcccgttgttcctgttgtaagcacggattccctccggaacattgatctgaatgccatcacgaatgaaaacgatgacaaaaaggctagtgcagaagctgatgcctccgcctcggtgcctgaacctgatgcctcattgcctgaacccccaacagagagcaagcatgaagaaattccggggtggtcactttctgatgtggacaagatggccattgattcactgcagcttgcacaacttggtaggccactagaagaggaggaggaagactatgatgaagaggaggggtaaatattattagtctttggtgattagattagtgaaaagttcatcatgataactgtagaataagtacatactagtgttatgattatgagtatccactagctgtcaatgcatgtaccatgttgttggctgaagaaagatctgaatgccccttttcattaatctggtttgtatgtggagctgatttatcttccccttgaccagtaatgttagcttcgtgtacttttaggcctacaatgtatatcacaattctagattgagttaaatttttgcatgcaaactttgtttaatattgctgcaaataactatac

SEQ ID NO: 5612 - protein, 299 aa, Glycine max
  peptide (1)..(299): Ceres Seq. ID no. 14310391
  misc_feature (7)..(71): Pfam Name: CBF/NF-Y Pfam Description: Histone-like transcription factor
  misc_feature (1)..(297): NCBI GI NO: 30682195 NR Description: transcription factor Hap5a, putative
  misc_feature (12)..(297): NCBI GI NO: 12321975 NR Description: unknown protein; 69004-67516
  misc_feature (1)..(223): NCBI GI NO: 18481626 NR Description: repressor protein [Zea mays]
  misc_feature (1)..(160): NCBI GI NO: 18481624 NR Description: repressor protein [Oryza sativa]
  misc_feature (29)..(276): NCBI GI NO: 15239766 NR Description: hypothetical protein [Arabidopsis thaliana]
  misc_feature (2)..(137): NCBI GI NO: 27661225 NR Description: similar to RIKEN cDNA 2310074H19
  misc_feature (2)..(179): NCBI GI NO: 21313424 NR Description: Dr1 associated protein 1
  misc_feature (2)..(137): NCBI GI NO: 18426973 NR Description: DR1-associated protein 1
  misc_feature (2)..(129): NCBI GI NO: 28279647 NR Description: Similar to Dr1 associated protein 1
  misc_feature (2)..(173): NCBI GI NO: 10242351 NR Description: NC2alpha [Drosophila melanogaster]
MRKKLDTRFPAARIKKIMQADEDVGKIALAVPVLVSKALELFLQDLCDRTYEITLQRGAKTMNSLHLKHCVQSYNVFDFLRDVVSRVPDYGHGHGHAEAGPDDRVITKRRKAIGDDGNDSDEEAKRSKMLELGHTGSTGRGRGRGRGRGRGRGRPPLNRETYHQDAESEPCTSVQPSNPQNTNTSIAMDNGSESKEIPKEENIAAPVVPVVSTDSLRNIDLNAITNENDDKKASAEADASASVPEPDASLPEPPTESKHEEIPGWSLSDVDKMAIDSLQLAQLGRPLEEEEEDYDEEEG

SEQ ID NO: 5613 - protein, 282 aa, Glycine max
  peptide (1)..(282): Ceres Seq. ID no. 14310392
  misc_feature (1)..(54): Pfam Name: CBF/NF-Y Pfam Description: Histone-like transcription factor
  misc_feature (1)..(280): NCBI GI NO: 30682195 NR Description: transcription factor Hap5a, putative
  misc_feature (1)..(280): NCBI GI NO: 12321975 NR Description: unknown protein; 69004-67516
  misc_feature (1)..(206): NCBI GI NO: 18481626 NR Description: repressor protein [Zea mays]
  misc_feature (1)..(143): NCBI GI NO: 18481624 NR Description: repressor protein [Oryza sativa]
  misc_feature (12)..(259): NCBI GI NO: 15239766 NR Description: hypothetical protein [Arabidopsis thaliana]
  misc_feature (1)..(120): NCBI GI NO: 27661225 NR Description: similar to RIKEN cDNA 2310074H19
  misc_feature (1)..(162): NCBI GI NO: 21313424 NR Description: Dr1 associated protein 1
  misc_feature (1)..(120): NCBI GI NO: 18426973 NR Description: DR1-associated protein 1
  misc_feature (1)..(112): NCBI GI NO: 28279647 NR Description: Similar to Dr1 associated protein 1
  misc_feature (1)..(156): NCBI GI NO: 10242351 NR Description: NC2alpha [Drosophila melanogaster]
MQADEDVGKIALAVPVLVSKALELFLQDLCDRTYEITLQRGAKTMNSLHLKHCVQSYNVFDFLRDVVSRVPDYGHGHGHAEAGPDDRVITKRRKAIGDDGNDSDEEAKRSKMLELGHTGSTGRGRGRGRGRGRGRGRPPLNRETYHQDAESEPCTSVQPSNPQNTNTSIAMDNGSESKEIPKEENIAAPVVPVVSTDSLRNIDLNAITNENDDKKASAEADASASVPEPDASLPEPPTESKHEEIPGWSLSDVDKMAIDSLQLAQLGRPLEEEEEDYDEEEG

SEQ ID NO: 5614 - protein, 238 aa, Glycine max
  peptide (1)..(238): Ceres Seq. ID no. 14310393
  misc_feature (1)..(236): NCBI GI NO: 30682195 NR Description: transcription factor Hap5a, putative
  misc_feature (1)..(236): NCBI GI NO: 12321975 NR Description: unknown protein; 69004-67516
  misc_feature (1)..(162): NCBI GI NO: 18481626 NR Description: repressor protein [Zea mays]
  misc_feature (1)..(99): NCBI GI NO: 18481624 NR Description: repressor protein [Oryza sativa]
  misc_feature (1)..(215): NCBI GI NO: 15239766 NR Description: hypothetical protein [Arabidopsis thaliana]
  misc_feature (1)..(76): NCBI GI NO: 27661225 NR Description: similar to RIKEN cDNA 2310074H19
  misc_feature (1)..(118): NCBI GI NO: 21313424 NR Description: Dr1 associated protein 1
  misc_feature (1)..(76): NCBI GI NO: 18426973 NR Description: DR1-associated protein 1
  misc_feature (1)..(68): NCBI GI NO: 28279647 NR Description: Similar to Dr1 associated protein 1
  misc_feature (1)..(112): NCBI GI NO: 10242351 NR Description: NC2alpha [Drosophila melanogaster]
MNSLHLKHCVQSYNVFDFLRDVVSRVPDYGHGHGHAEAGPDDRVITKRRKAIGDDGNDSDEEAKRSKMLELGHTGSTGRGRGRGRGRGRGRGRPPLNRETYHQDAESEPCTSVQPSNPQNTNTSIAMDNGSESKEIPKEENIAAPVVPVVSTDSLRNIDLNAITNENDDKKASAEADASASVPEPDASLPEPPTESKHEEIPGWSLSDVDKMAIDSLQLAQLGRPLEEEEEDYDEEEG

SEQ ID NO: 5615 - DNA, 1239 bp, Glycine max
  misc_feature (1)..(1239): Ceres Seq. ID no. 14307210
agccaatcaaatccattgttttctcttctcctcctccttcaatggattctctgacttccatcaacggcgatttcggcttcgccggcggcaccgatcgcagattcgcgttttcgcgccaagcctccttccaacagcctcacacgccgatagacattccggcgcacggccaccactactggtccgcgcgtgacgataaaccctcctccgcctcgctccaaagatcctctctgtcctccttcgttttctccgttttccgaaacgttaggtccggccacaggtacatgaagaggctctttctcttgatctcgctcaatgtcgcgtactccaccgccgaattgctctttggactcttcaccggtcgcgtaggtttggtgtctgatgcggttcacttgacttttggatgtggtcttcttacattttcgttatttgttatggccgcgtctaggaagaaagccgatcgagagtatacttatgggtataaaaggctagaagtcttgtctgcatttacaaatgccctatttcttttgtttatgtcattctccctagcagttgaggcacttcatgcattcatacaagatgaatcagagcacaagcattacttgattgtttctgcagtgaccaatttatttgtgaatcttgttggtgtatggttcttcagaaactatgctcggattaatcttgcttacagaaatgccgaagatatgaatcaccactctgttttcctgcatgttcttgcagattccattcgcagtgcaggtctgatattggcatcctggttattgtcaatcggggttcagaatgcagaagtcttgtgtttaggacttgtttctgttgcagtttttatgcttgttctgcctctctttagggcaactggtggtatcttgctccaaatggcacctcccagcatcccaactactgctttgaacaaatgcttgagacagatttctgctcgggaagatgtaatggaagtctcccaggctcgtttttgggaattagtgcctggttatgtggttggttcacttataatacaggtaaagaaagggacgaacgatcggccaatactagaatttgtgcatggtctataccatgatttgggtgtacaggacctcacggtgcaaactgatgatgcatgagactatcttaacacttttatgctaatagttattaccaaggattgtatacgcattaatgtcattgtttattactggtggaatagatggttaacgtgatttctcattt

SEQ ID NO: 5616 - protein, 376 aa, Glycine max
  peptide (1)..(376): Ceres Seq. ID no. 14307211
  misc_feature (97)..(374): Pfam Name: Pfam Description:  Cation efflux family
  misc_feature (21)..(374): NCBI GI NO: 15229954 NR Description: cation efflux family protein/metal toleranceprotein
  misc_feature (180)..(374): NCBI GI NO: 9294107 NR Description: contains similarity to cationtransporter~gene_id:T23B7
  misc_feature (71)..(264): NCBI GI NO: 9294107 NR Description: contains similarity to cationtransporter~gene_id:T23B7
  misc_feature (60)..(240): NCBI GI NO: 39645387 NR Description: Unknown (protein for MGC:76189)
  misc_feature (239)..(376): NCBI GI NO: 39645387 NR Description: Unknown (protein for MGC:76189)
  misc_feature (60)..(240): NCBI GI NO: 28278399 NR Description: Similar to RIKEN cDNA 1810059J10 gene
  misc_feature (239)..(376): NCBI GI NO: 28278399 NR Description: Similar to RIKEN cDNA 1810059J10 gene
  misc_feature (239)..(374): NCBI GI NO: 31209583 NR Description: ENSANGP00000017072 [Anopheles gambiae]
  misc_feature (92)..(220): NCBI GI NO: 31209583 NR Description: ENSANGP00000017072 [Anopheles gambiae]
  misc_feature (84)..(240): NCBI GI NO: 12963579 NR Description: zinc transporter like 2 [Mus musculus]
PIKSIVFSSPPPSMDSLTSINGDFGFAGGTDRRFAFSRQASFQQPHTPIDIPAHGHHYWSARDDKPSSASLQRSSLSSFVFSVFRNVRSGHRYMKRLFLLISLNVAYSTAELLFGLFTGRVGLVSDAVHLTFGCGLLTFSLFVMAASRKKADREYTYGYKRLEVLSAFTNALFLLFMSFSLAVEALHAFIQDESEHKHYLIVSAVTNLFVNLVGVWFFRNYARINLAYRNAEDMNHHSVFLHVLADSIRSAGLILASWLLSIGVQNAEVLCLGLVSVAVFMLVLPLFRATGGILLQMAPPSIPTTALNKCLRQISAREDVMEVSQARFWELVPGYVVGSLIIQVKKGTNDRPILEFVHGLYHDLGVQDLTVQTDDA

SEQ ID NO: 5617 - protein, 363 aa, Glycine max
  peptide (1)..(363): Ceres Seq. ID no. 14307212
  misc_feature (84)..(361): Pfam Name: Pfam Description:  Cation efflux family
  misc_feature (8)..(361): NCBI GI NO: 15229954 NR Description: cation efflux family protein/metal toleranceprotein
  misc_feature (167)..(361): NCBI GI NO: 9294107 NR Description: contains similarity to cationtransporter~gene_id:T23B7
  misc_feature (58)..(251): NCBI GI NO: 9294107 NR Description: contains similarity to cationtransporter~gene_id:T23B7
  misc_feature (47)..(227): NCBI GI NO: 39645387 NR Description: Unknown (protein for MGC:76189)
  misc_feature (226)..(363): NCBI GI NO: 39645387 NR Description: Unknown (protein for MGC:76189)
  misc_feature (47)..(227): NCBI GI NO: 28278399 NR Description: Similar to RIKEN cDNA 1810059J10 gene
  misc_feature (226)..(363): NCBI GI NO: 28278399 NR Description: Similar to RIKEN cDNA 1810059J10 gene
  misc_feature (226)..(361): NCBI GI NO: 31209583 NR Description: ENSANGP00000017072 [Anopheles gambiae]
  misc_feature (79)..(207): NCBI GI NO: 31209583 NR Description: ENSANGP00000017072 [Anopheles gambiae]
  misc_feature (71)..(227): NCBI GI NO: 12963579 NR Description: zinc transporter like 2 [Mus musculus]
MDSLTSINGDFGFAGGTDRRFAFSRQASFQQPHTPIDIPAHGHHYWSARDDKPSSASLQRSSLSSFVFSVFRNVRSGHRYMKRLFLLISLNVAYSTAELLFGLFTGRVGLVSDAVHLTFGCGLLTFSLFVMAASRKKADREYTYGYKRLEVLSAFTNALFLLFMSFSLAVEALHAFIQDESEHKHYLIVSAVTNLFVNLVGVWFFRNYARINLAYRNAEDMNHHSVFLHVLADSIRSAGLILASWLLSIGVQNAEVLCLGLVSVAVFMLVLPLFRATGGILLQMAPPSIPTTALNKCLRQISAREDVMEVSQARFWELVPGYVVGSLIIQVKKGTNDRPILEFVHGLYHDLGVQDLTVQTDDA

SEQ ID NO: 5618 - protein, 283 aa, Glycine max
  peptide (1)..(283): Ceres Seq. ID no. 14307213
  misc_feature (4)..(281): Pfam Name: Pfam Description:  Cation efflux family
  misc_feature (1)..(281): NCBI GI NO: 15229954 NR Description: cation efflux family protein/metal toleranceprotein
  misc_feature (87)..(281): NCBI GI NO: 9294107 NR Description: contains similarity to cationtransporter~gene_id:T23B7
  misc_feature (1)..(171): NCBI GI NO: 9294107 NR Description: contains similarity to cationtransporter~gene_id:T23B7
  misc_feature (1)..(147): NCBI GI NO: 39645387 NR Description: Unknown (protein for MGC:76189)
  misc_feature (146)..(283): NCBI GI NO: 39645387 NR Description: Unknown (protein for MGC:76189)
  misc_feature (1)..(147): NCBI GI NO: 28278399 NR Description: Similar to RIKEN cDNA 1810059J10 gene
  misc_feature (146)..(283): NCBI GI NO: 28278399 NR Description: Similar to RIKEN cDNA 1810059J10 gene
  misc_feature (146)..(281): NCBI GI NO: 31209583 NR Description: ENSANGP00000017072 [Anopheles gambiae]
  misc_feature (1)..(127): NCBI GI NO: 31209583 NR Description: ENSANGP00000017072 [Anopheles gambiae]
  misc_feature (1)..(147): NCBI GI NO: 12963579 NR Description: zinc transporter like 2 [Mus musculus]
MKRLFLLISLNVAYSTAELLFGLFTGRVGLVSDAVHLTFGCGLLTFSLFVMAASRKKADREYTYGYKRLEVLSAFTNALFLLFMSFSLAVEALHAFIQDESEHKHYLIVSAVTNLFVNLVGVWFFRNYARINLAYRNAEDMNHHSVFLHVLADSIRSAGLILASWLLSIGVQNAEVLCLGLVSVAVFMLVLPLFRATGGILLQMAPPSIPTTALNKCLRQISAREDVMEVSQARFWELVPGYVVGSLIIQVKKGTNDRPILEFVHGLYHDLGVQDLTVQTDDA

SEQ ID NO: 5619 - DNA, 1618 bp, Glycine max
  misc_feature (1)..(1618): Ceres Seq. ID no. 14304851
acaagaacaagtaccagaacaataggagcatcatggttaggctatggtgctcttctctctcaattacacttttattccaacagctcatcagattgtgcatttcttggagtgtgcaaaccccaacacccccattgccaatcctccctctcccaatatattcccagttgaaatggcaacaaagggagatcataatgtttttccattttggtgtgaacacattcagtgacagagaatggggcactggccaggaaaacccagcaatcttcaatccaacggggctcaacaccacccagtgggccactgtggcagcagatgcaggagtttcattgatgatattaactgcaaaacaccatgatggcttctgcctctggccttccaagtacactgaccattctgtcattagcagcccctggcaaggtggcaagggtgatgtggttcaagactttgtcaatgcagccactgcacaaggaattgatgtaggggtctacctttcaccttgggatagacatgaccctagatatggcaatgatttgctctacaaccaatactacttggctcaactacaagagttgctcaagaaatatccaaatgttagagagatttggttcgatggagcaaagggtgccaatgcaaaaaatatgacgtattacttttcagattggttttccatggtgaaggagctgcagagtttcatcaacatcttctctgatgcaggtcctgatgttaggtgggtgggagatgaaacaggttctgcagggtatacatgttggtctaccattaatcgaacctctctatccattggaagtccagacatcattcagtatataaacactggtgatccaaaagggacagattggctaccggcggaatgtgatgtatccattcgaaaaggatggttttggcacaaatcagaatcaccaaaaaagctaagcgagctacttgacatttattacaattcggttgggagaaattgtgtgttacttctcaatgtgcctcctaatacaagtggccttataactgaagttgatgccaatagattgaaagagtttagaagtgcaatcaagacaattttccatcagaatcttgctgaggattgttttgttaaagttagtagccaaagagggggtttcgggccagaaaagatgctagacagtgaccacttgtggtcatactgggccccaagggacgatgatgatgaaaaggaccattgggttgaaatttgggccaaggaagggagattgagattcaatgtggttagaatacaagaggcaattggtcttggtcaaaggatcaaacggcatgaaatctatgtggatggtaaattgatcatcaaagccacaacggttggttataagaggcttcataggcttgatgggggtgaagtgcacgctcgtggtgtgaggataagaattagaaaggcaagaggagtgcctcttatctcttctattggcttgcattatgatcctttctggcactcaaagtttactgtatcctgaagagttaagtaagtttaggtaaaggagcataactgcaataaattaagtagagccttaagaagaatattgaaatattgttctatcagtaaagaacaaaaaataaatttactttaaatttctac

SEQ ID NO: 5620 - protein, 497 aa, Glycine max
  peptide (1)..(497): Ceres Seq. ID no. 14304852
  misc_feature (88)..(336): Pfam Name: Pfam Description:  Alpha-L-fucosidase
  misc_feature (17)..(489): NCBI GI NO: 30683758 NR Description: glycosyl hydrolase family 29 (alpha-L-fucosidase)
  misc_feature (17)..(489): NCBI GI NO: 26453078 NR Description: unknown protein [Arabidopsis thaliana]
  misc_feature (40)..(489): NCBI GI NO: 38345843 NR Description: OSJNBa0084K11.7
  misc_feature (49)..(488): NCBI GI NO: 18310858 NR Description: conserved hypothetical protein
  misc_feature (48)..(488): NCBI GI NO: 15901959 NR Description: conserved hypothetical protein
  misc_feature (48)..(488): NCBI GI NO: 15903995 NR Description: Hypothetical protein [Streptococcus pneumoniae R6]
  misc_feature (19)..(485): NCBI GI NO: 29347602 NR Description: conserved hypothetical protein
  misc_feature (73)..(488): NCBI GI NO: 29350121 NR Description: conserved hypothetical protein
  misc_feature (85)..(357): NCBI GI NO: 23119502 NR Description: hypothetical protein
  misc_feature (40)..(485): NCBI GI NO: 23107703 NR Description: hypothetical protein
KNKYQNNRSIMVRLWCSSLSITLLFQQLIRLCISWSVQTPTPPLPILPLPIYSQLKWQQREIIMFFHFGVNTFSDREWGTGQENPAIFNPTGLNTTQWATVAADAGVSLMILTAKHHDGFCLWPSKYTDHSVISSPWQGGKGDVVQDFVNAATAQGIDVGVYLSPWDRHDPRYGNDLLYNQYYLAQLQELLKKYPNVREIWFDGAKGANAKNMTYYFSDWFSMVKELQSFINIFSDAGPDVRWVGDETGSAGYTCWSTINRTSLSIGSPDIIQYINTGDPKGTDWLPAECDVSIRKGWFWHKSESPKKLSELLDIYYNSVGRNCVLLLNVPPNTSGLITEVDANRLKEFRSAIKTIFHQNLAEDCFVKVSSQRGGFGPEKMLDSDHLWSYWAPRDDDDEKDHWVEIWAKEGRLRFNVVRIQEAIGLGQRIKRHEIYVDGKLIIKATTVGYKRLHRLDGGEVHARGVRIRIRKARGVPLISSIGLHYDPFWHSKFTVS

SEQ ID NO: 5621 - protein, 487 aa, Glycine max
  peptide (1)..(487): Ceres Seq. ID no. 14304853
  misc_feature (78)..(326): Pfam Name: Pfam Description:  Alpha-L-fucosidase
  misc_feature (7)..(479): NCBI GI NO: 30683758 NR Description: glycosyl hydrolase family 29 (alpha-L-fucosidase)
  misc_feature (7)..(479): NCBI GI NO: 26453078 NR Description: unknown protein [Arabidopsis thaliana]
  misc_feature (30)..(479): NCBI GI NO: 38345843 NR Description: OSJNBa0084K11.7
  misc_feature (39)..(478): NCBI GI NO: 18310858 NR Description: conserved hypothetical protein
  misc_feature (38)..(478): NCBI GI NO: 15901959 NR Description: conserved hypothetical protein
  misc_feature (38)..(478): NCBI GI NO: 15903995 NR Description: Hypothetical protein [Streptococcus pneumoniae R6]
  misc_feature (9)..(475): NCBI GI NO: 29347602 NR Description: conserved hypothetical protein
  misc_feature (63)..(478): NCBI GI NO: 29350121 NR Description: conserved hypothetical protein
  misc_feature (75)..(347): NCBI GI NO: 23119502 NR Description: hypothetical protein
  misc_feature (30)..(475): NCBI GI NO: 23107703 NR Description: hypothetical protein
MVRLWCSSLSITLLFQQLIRLCISWSVQTPTPPLPILPLPIYSQLKWQQREIIMFFHFGVNTFSDREWGTGQENPAIFNPTGLNTTQWATVAADAGVSLMILTAKHHDGFCLWPSKYTDHSVISSPWQGGKGDVVQDFVNAATAQGIDVGVYLSPWDRHDPRYGNDLLYNQYYLAQLQELLKKYPNVREIWFDGAKGANAKNMTYYFSDWFSMVKELQSFINIFSDAGPDVRWVGDETGSAGYTCWSTINRTSLSIGSPDIIQYINTGDPKGTDWLPAECDVSIRKGWFWHKSESPKKLSELLDIYYNSVGRNCVLLLNVPPNTSGLITEVDANRLKEFRSAIKTIFHQNLAEDCFVKVSSQRGGFGPEKMLDSDHLWSYWAPRDDDDEKDHWVEIWAKEGRLRFNVVRIQEAIGLGQRIKRHEIYVDGKLIIKATTVGYKRLHRLDGGEVHARGVRIRIRKARGVPLISSIGLHYDPFWHSKFTVS

SEQ ID NO: 5622 - protein, 434 aa, Glycine max
  peptide (1)..(434): Ceres Seq. ID no. 14304854
  misc_feature (25)..(273): Pfam Name: Pfam Description:  Alpha-L-fucosidase
  misc_feature (1)..(426): NCBI GI NO: 30683758 NR Description: glycosyl hydrolase family 29 (alpha-L-fucosidase)
  misc_feature (1)..(426): NCBI GI NO: 26453078 NR Description: unknown protein [Arabidopsis thaliana]
  misc_feature (1)..(426): NCBI GI NO: 38345843 NR Description: OSJNBa0084K11.7
  misc_feature (1)..(425): NCBI GI NO: 18310858 NR Description: conserved hypothetical protein
  misc_feature (1)..(425): NCBI GI NO: 15901959 NR Description: conserved hypothetical protein
  misc_feature (1)..(425): NCBI GI NO: 15903995 NR Description: Hypothetical protein [Streptococcus pneumoniae R6]
  misc_feature (1)..(422): NCBI GI NO: 29347602 NR Description: conserved hypothetical protein
  misc_feature (10)..(425): NCBI GI NO: 29350121 NR Description: conserved hypothetical protein
  misc_feature (22)..(294): NCBI GI NO: 23119502 NR Description: hypothetical protein
  misc_feature (1)..(422): NCBI GI NO: 23107703 NR Description: hypothetical protein
MFFHFGVNTFSDREWGTGQENPAIFNPTGLNTTQWATVAADAGVSLMILTAKHHDGFCLWPSKYTDHSVISSPWQGGKGDVVQDFVNAATAQGIDVGVYLSPWDRHDPRYGNDLLYNQYYLAQLQELLKKYPNVREIWFDGAKGANAKNMTYYFSDWFSMVKELQSFINIFSDAGPDVRWVGDETGSAGYTCWSTINRTSLSIGSPDIIQYINTGDPKGTDWLPAECDVSIRKGWFWHKSESPKKLSELLDIYYNSVGRNCVLLLNVPPNTSGLITEVDANRLKEFRSAIKTIFHQNLAEDCFVKVSSQRGGFGPEKMLDSDHLWSYWAPRDDDDEKDHWVEIWAKEGRLRFNVVRIQEAIGLGQRIKRHEIYVDGKLIIKATTVGYKRLHRLDGGEVHARGVRIRIRKARGVPLISSIGLHYDPFWHSKFTVS

SEQ ID NO: 5623 - DNA, 1407 bp, Glycine max
  misc_feature (1)..(1407): Ceres Seq. ID no. 15176751
aagacttgtatatgtctcccaggtaagtaagctcctcatcacatatctaaaacaaacccttccaaaaccaagacaatacttcaaaggttcattccaatggcatcctcgtcaagttttgttcatttggtaaatctaggtttagttttagtactacttggctttattgtccctagaagtgaagccaggccaagagcattctttgtgtttggagattcgcttgttgacaatggaaacaacaactatttgcaaaccattgctcgtgctaatgcccctccttatggaattgactacccaactcatagagcaactggacgcttctctaacggcttcaacattcctgattttatcagtcaggaacttggtgctgagtctacaatgccttacttgagcccggacttaacgagagagaatctcttagttggtgccaattttgcttccgctggcgttggaatccttaacgatacaggagatcagtttatgaacataattaaaatgcatcaacaactagaatattttaaagagtaccaacaacgactgagtgctctaattggtgtcccacgaactaaaagactcgtgaatcaagcgttgattctcatcaccgttggtggcaatgactttgtaaacaactacttcctagtggattctactgcaaggtctcgtcaatattcactcccggactatgtcaagtttctcatcactcgctatagcaagcacttgcagaggctatatgatctgggagctcggcgagttcttgtgacagggacagggccattgggttgtgcccctgcagaattggctatgcgaggcaaaaatggagaatgttctgctgatctacaacgtgctgcagcattgtacaaccctcaattagagcaaatgctacttgaactcaacaagaaacttggcagcgacgttttcattgctgcaaatacagcactcatgcacaatgactacatcaccaatcccaatgcttatggatttaatacatcaaaagtagcttgttgtggacaaggaccctacaatggtatggggctatgcttgccagtctccaacctatgccccaaccgagaattgcatgcattttgggatccattccatccaactgaaaaggcaaacaaacttgttgtagaacaaattatgtcaggttctacaaagtatatgaagcctatgaacctcagcacaattctggccttggatgctcgagcacattcgtgaagattaattacaaattaacctaataatgaatagtttgttatcactaacttggtcctcaatgccaatgcatgatagctcttactgtaattggatttgttgtttgtatggaatcaattaacttgtgtaattttcgtaatgtatccatgattggagcttgaaatctcatcaagctattacttaattgttttgactttc

SEQ ID NO: 5624 - protein, 371 aa, Glycine max
  peptide (1)..(371): Ceres Seq. ID no. 15176752
  misc_feature (34)..(346): Pfam Name: Pfam Description:  GDSL-like Lipase/Acylhydrolase
  misc_feature (4)..(367): NCBI GI NO: 15242808 NR Description: GDSL-motif lipase/hydrolase protein
  misc_feature (13)..(367): NCBI GI NO: 15229265 NR Description: GDSL-motif lipase/hydrolase protein
  misc_feature (15)..(367): NCBI GI NO: 28071322 NR Description: P0705A05.30
  misc_feature (4)..(368): NCBI GI NO: 32489520 NR Description: OSJNBa0043L24.11
  misc_feature (5)..(365): NCBI GI NO: 15238814 NR Description: GDSL-motif lipase/hydrolase protein
  misc_feature (13)..(367): NCBI GI NO: 22758315 NR Description: putative early nodulin gene (Enod) related protein
  misc_feature (13)..(367): NCBI GI NO: 37535146 NR Description: putative early nodulin gene (Enod) related protein
  misc_feature (22)..(368): NCBI GI NO: 15235421 NR Description: GDSL-motif lipase/hydrolase protein
  misc_feature (34)..(342): NCBI GI NO: 7485419 NR Description: hypothetical protein F13C5
  misc_feature (33)..(347): NCBI GI NO: 18394825 NR Description: lipase, putative [Arabidopsis thaliana]
MASSSSFVHLVNLGLVLVLLGFIVPRSEARPRAFFVFGDSLVDNGNNNYLQTIARANAPPYGIDYPTHRATGRFSNGFNIPDFISQELGAESTMPYLSPDLTRENLLVGANFASAGVGILNDTGDQFMNIIKMHQQLEYFKEYQQRLSALIGVPRTKRLVNQALILITVGGNDFVNNYFLVDSTARSRQYSLPDYVKFLITRYSKHLQRLYDLGARRVLVTGTGPLGCAPAELAMRGKNGECSADLQRAAALYNPQLEQMLLELNKKLGSDVFIAANTALMHNDYITNPNAYGFNTSKVACCGQGPYNGMGLCLPVSNLCPNRELHAFWDPFHPTEKANKLVVEQIMSGSTKYMKPMNLSTILALDARAHS

SEQ ID NO: 5625 - protein, 278 aa, Glycine max
  peptide (1)..(278): Ceres Seq. ID no. 15176753
  misc_feature (1)..(253): Pfam Name: Pfam Description:  GDSL-like Lipase/Acylhydrolase
  misc_feature (1)..(274): NCBI GI NO: 15242808 NR Description: GDSL-motif lipase/hydrolase protein
  misc_feature (1)..(274): NCBI GI NO: 15229265 NR Description: GDSL-motif lipase/hydrolase protein
  misc_feature (1)..(274): NCBI GI NO: 28071322 NR Description: P0705A05.30
  misc_feature (1)..(275): NCBI GI NO: 32489520 NR Description: OSJNBa0043L24.11
  misc_feature (1)..(272): NCBI GI NO: 15238814 NR Description: GDSL-motif lipase/hydrolase protein
  misc_feature (1)..(274): NCBI GI NO: 22758315 NR Description: putative early nodulin gene (Enod) related protein
  misc_feature (1)..(274): NCBI GI NO: 37535146 NR Description: putative early nodulin gene (Enod) related protein
  misc_feature (1)..(275): NCBI GI NO: 15235421 NR Description: GDSL-motif lipase/hydrolase protein
  misc_feature (1)..(249): NCBI GI NO: 7485419 NR Description: hypothetical protein F13C5
  misc_feature (1)..(254): NCBI GI NO: 18394825 NR Description: lipase, putative [Arabidopsis thaliana]
MPYLSPDLTRENLLVGANFASAGVGILNDTGDQFMNIIKMHQQLEYFKEYQQRLSALIGVPRTKRLVNQALILITVGGNDFVNNYFLVDSTARSRQYSLPDYVKFLITRYSKHLQRLYDLGARRVLVTGTGPLGCAPAELAMRGKNGECSADLQRAAALYNPQLEQMLLELNKKLGSDVFIAANTALMHNDYITNPNAYGFNTSKVACCGQGPYNGMGLCLPVSNLCPNRELHAFWDPFHPTEKANKLVVEQIMSGSTKYMKPMNLSTILALDARAHS

SEQ ID NO: 5626 - protein, 244 aa, Glycine max
  peptide (1)..(244): Ceres Seq. ID no. 15176754
  misc_feature (1)..(219): Pfam Name: Pfam Description:  GDSL-like Lipase/Acylhydrolase
  misc_feature (1)..(240): NCBI GI NO: 15242808 NR Description: GDSL-motif lipase/hydrolase protein
  misc_feature (1)..(240): NCBI GI NO: 15229265 NR Description: GDSL-motif lipase/hydrolase protein
  misc_feature (1)..(240): NCBI GI NO: 28071322 NR Description: P0705A05.30
  misc_feature (1)..(241): NCBI GI NO: 32489520 NR Description: OSJNBa0043L24.11
  misc_feature (1)..(238): NCBI GI NO: 15238814 NR Description: GDSL-motif lipase/hydrolase protein
  misc_feature (1)..(240): NCBI GI NO: 22758315 NR Description: putative early nodulin gene (Enod) related protein
  misc_feature (1)..(240): NCBI GI NO: 37535146 NR Description: putative early nodulin gene (Enod) related protein
  misc_feature (1)..(241): NCBI GI NO: 15235421 NR Description: GDSL-motif lipase/hydrolase protein
  misc_feature (1)..(215): NCBI GI NO: 7485419 NR Description: hypothetical protein F13C5
  misc_feature (1)..(220): NCBI GI NO: 18394825 NR Description: lipase, putative [Arabidopsis thaliana]
MNIIKMHQQLEYFKEYQQRLSALIGVPRTKRLVNQALILITVGGNDFVNNYFLVDSTARSRQYSLPDYVKFLITRYSKHLQRLYDLGARRVLVTGTGPLGCAPAELAMRGKNGECSADLQRAAALYNPQLEQMLLELNKKLGSDVFIAANTALMHNDYITNPNAYGFNTSKVACCGQGPYNGMGLCLPVSNLCPNRELHAFWDPFHPTEKANKLVVEQIMSGSTKYMKPMNLSTILALDARAHS

SEQ ID NO: 5627 - DNA, 1056 bp, Glycine max
  misc_feature (1)..(1056): Ceres Seq. ID no. 14313014
aaatctgaaccaaaccacaaacacttaatttctcatctcatcatttctaattctacctcttttctcttgcactaacaatccaagatgaataccaacaacgacaccgaaaaaaaccaatcatttccagaagcacaaggagcatcatcatcatcatcttctccacccaatgttgggactgagaattggggaactcacataatgggcacccctgctgttccaagcagccacccagataacaaaaaagcagctttacaaagtggacaacctcaaccagttcaatactaccatgaccaacatcaacatccctacgtgcaacatagcccagttgacaaaccaagcaacagtcccatggagtcaatccttaacatgttcgattcatggagcaaaaaagctgaagccaccgcacacaacgtctggcacaaccttaaaactggtccatcagtgtcttcagctgcactggggaagatgaatctgactgtgaaagcaatatcagagggtggatttgagtccctctacaagcaaacattcacaacctatccaaacgagaagctcaagaagagctttgcttgttacctttcaacatcaacaggtcctgttgcaggaaccctttacctgtccaatattcatgtagcgttttgcagcgatcgccctttgtgtttcactgcaccctctggccaagaaacttggacatactacaaggtaatggtgcctttgggaaaggttggagtggtcaacccagtgaccatgagggaaaacccatcagaaaagtacattcaggttgtaacggtggaagggcatgatttttggttcatgggttttgttaattttgacaaagcagttaagaacatctcagaaggtatctcacattttgtagcgccaggagtggccgtgccatccactagtggttcggaagctaatcgaaagaactttcagtgatttctagtttttggagtactatgatgtatactaattttgtttagaatttgactttgcggtttgtgtcgtatactagaacaatactttgttgtaaaaaaacttaggagtgtatgctataag

SEQ ID NO: 5628 - protein, 283 aa, Glycine max
  peptide (1)..(283): Ceres Seq. ID no. 14313015
  misc_feature (142)..(219): Pfam Name: Pfam Description:  GRAM domain
  misc_feature (6)..(262): NCBI GI NO: 15240044 NR Description: GRAM domain-containing protein
  misc_feature (17)..(239): NCBI GI NO: 11281146 NR Description: ABA-responsive protein - barley
  misc_feature (16)..(259): NCBI GI NO: 34902414 NR Description: Putative FH protein interacting protein FIP1
  misc_feature (73)..(261): NCBI GI NO: 15217869 NR Description: GRAM domain-containing protein
  misc_feature (6)..(259): NCBI GI NO: 18399985 NR Description: GRAM domain-containing protein
  misc_feature (7)..(259): NCBI GI NO: 21592789 NR Description: unknown [Arabidopsis thaliana]
  misc_feature (6)..(259): NCBI GI NO: 26452129 NR Description: unknown protein [Arabidopsis thaliana]
  misc_feature (96)..(259): NCBI GI NO: 34906818 NR Description: contains EST C91668
  misc_feature (73)..(259): NCBI GI NO: 29788871 NR Description: putative ABA-responsive protein
  misc_feature (125)..(259): NCBI GI NO: 33146631 NR Description: putative FH protein interacting protein FIP1
MNTNNDTEKNQSFPEAQGASSSSSSPPNVGTENWGTHIMGTPAVPSSHPDNKKAALQSGQPQPVQYYHDQHQHPYVQHSPVDKPSNSPMESILNMFDSWSKKAEATAHNVWHNLKTGPSVSSAALGKMNLTVKAISEGGFESLYKQTFTTYPNEKLKKSFACYLSTSTGPVAGTLYLSNIHVAFCSDRPLCFTAPSGQETWTYYKVMVPLGKVGVVNPVTMRENPSEKYIQVVTVEGHDFWFMGFVNFDKAVKNISEGISHFVAPGVAVPSTSGSEANRKNFQ

SEQ ID NO: 5629 - protein, 245 aa, Glycine max
  peptide (1)..(245): Ceres Seq. ID no. 14313016
  misc_feature (104)..(181): Pfam Name: Pfam Description:  GRAM domain
  misc_feature (1)..(224): NCBI GI NO: 15240044 NR Description: GRAM domain-containing protein
  misc_feature (1)..(201): NCBI GI NO: 11281146 NR Description: ABA-responsive protein - barley
  misc_feature (1)..(221): NCBI GI NO: 34902414 NR Description: Putative FH protein interacting protein FIP1
  misc_feature (35)..(223): NCBI GI NO: 15217869 NR Description: GRAM domain-containing protein
  misc_feature (1)..(221): NCBI GI NO: 18399985 NR Description: GRAM domain-containing protein
  misc_feature (1)..(221): NCBI GI NO: 21592789 NR Description: unknown [Arabidopsis thaliana]
  misc_feature (1)..(221): NCBI GI NO: 26452129 NR Description: unknown protein [Arabidopsis thaliana]
  misc_feature (58)..(221): NCBI GI NO: 34906818 NR Description: contains EST C91668
  misc_feature (35)..(221): NCBI GI NO: 29788871 NR Description: putative ABA-responsive protein
  misc_feature (87)..(221): NCBI GI NO: 33146631 NR Description: putative FH protein interacting protein FIP1
MGTPAVPSSHPDNKKAALQSGQPQPVQYYHDQHQHPYVQHSPVDKPSNSPMESILNMFDSWSKKAEATAHNVWHNLKTGPSVSSAALGKMNLTVKAISEGGFESLYKQTFTTYPNEKLKKSFACYLSTSTGPVAGTLYLSNIHVAFCSDRPLCFTAPSGQETWTYYKVMVPLGKVGVVNPVTMRENPSEKYIQVVTVEGHDFWFMGFVNFDKAVKNISEGISHFVAPGVAVPSTSGSEANRKNFQ

SEQ ID NO: 5630 - protein, 195 aa, Glycine max
  peptide (1)..(195): Ceres Seq. ID no. 14313017
  misc_feature (54)..(131): Pfam Name: Pfam Description:  GRAM domain
  misc_feature (1)..(174): NCBI GI NO: 15240044 NR Description: GRAM domain-containing protein
  misc_feature (1)..(151): NCBI GI NO: 11281146 NR Description: ABA-responsive protein - barley
  misc_feature (1)..(171): NCBI GI NO: 34902414 NR Description: Putative FH protein interacting protein FIP1
  misc_feature (1)..(173): NCBI GI NO: 15217869 NR Description: GRAM domain-containing protein
  misc_feature (1)..(171): NCBI GI NO: 18399985 NR Description: GRAM domain-containing protein
  misc_feature (1)..(171): NCBI GI NO: 21592789 NR Description: unknown [Arabidopsis thaliana]
  misc_feature (1)..(171): NCBI GI NO: 26452129 NR Description: unknown protein [Arabidopsis thaliana]
  misc_feature (8)..(171): NCBI GI NO: 34906818 NR Description: contains EST C91668
  misc_feature (1)..(171): NCBI GI NO: 29788871 NR Description: putative ABA-responsive protein
  misc_feature (37)..(171): NCBI GI NO: 33146631 NR Description: putative FH protein interacting protein FIP1
MESILNMFDSWSKKAEATAHNVWHNLKTGPSVSSAALGKMNLTVKAISEGGFESLYKQTFTTYPNEKLKKSFACYLSTSTGPVAGTLYLSNIHVAFCSDRPLCFTAPSGQETWTYYKVMVPLGKVGVVNPVTMRENPSEKYIQVVTVEGHDFWFMGFVNFDKAVKNISEGISHFVAPGVAVPSTSGSEANRKNFQ

SEQ ID NO: 5631 - DNA, 1340 bp, Glycine max
  misc_feature (1)..(1340): Ceres Seq. ID no. 14312208
gggagaaagaaagaaggaaagcaaagtagacgagtgattgcgttgcgattgacgacgacgaggaatcatgtcttccggcggcggcggtggtaagccgttcttctgccacgtgtgcagtcagaggattacgtgctccgatgagtcggaaccattctgcccgatgtgtatggaaagtttcgtagaagaatgcaaccctaacaatcccaaccctaatctcttccccgacagtgatgaatcttcggatcccgaactccccttccaccgcttctcacttctccctctcttgctctcatcagtctctaggtcccgatccgaacccgacgtgttcgacccgatggtcttcctccagaaccaccttcaggaccttcgcgccgacggtgccaacattcaagttgactttgaccatccttccaacgagaatcaaggctttcgccttgcgaacatcggcgactactttatgggccccggcctcgagcagtttattcagcagcttgccgacaacgaccccaaccgctacggaacgccgcccgccgccaaggacgccgtcgagaatctccccaccgttaccgtcgacgacgacttgctgaactccgagctgaaccagtgcgctgtctgccaggacgagttcgaaaagggttctaaggtgacacagatgccctgcaagcacgcgtatcacggcgactgcttgattccgtggcttcggctgcataattcatgccctgtgtgccgctatgaattgcccacggacgacgccgattacgagaacgaggttcacggtggtgatgctgggtcgaggacaggtgggagcgacggtggaggtgggagtaatagaccttttcgcaggactgttaggatatatttgcgccatcctgatgctggtgactctgcgcaggacggtgctgaaagggaatggagatggagaagttgagattgaaatttatgttttgtttcatgttgaaaaactggaaactatcttgtgcagctctgagcttccgtgaatagattgtagcattgcaatgtttacagaagtccttgtgaggaatgcaagaaatgttatttcccgtggcaaggaactttgttcgatcaaaggtctttgtttgttatggtagtagatagctggaacatgggaatgcacgaaaacacaactattgagattttaggtactgtgttaatgagcgttgataagaaacttcccgttacttttgtacagatcatcttccaaacatccaatattgattatcgtccttttgtacaatatgaactagtcatggtctatattgctcctgtgtgtgtgtataaaacgttttaatttagaaaaatgttcttttgacctatttaag

SEQ ID NO: 5632 - protein, 253 aa, Glycine max
  peptide (1)..(253): Ceres Seq. ID no. 14312209
  misc_feature (147)..(187): Pfam Name: RING finger Pfam Description: Zinc finger, C3HC4 type
  misc_feature (1)..(226): NCBI GI NO: 11994207 NR Description: gene_id:MPN9.20~unknown protein
  misc_feature (1)..(226): NCBI GI NO: 15231003 NR Description: expressed protein [Arabidopsis thaliana]
  misc_feature (50)..(242): NCBI GI NO: 37535546 NR Description: putative zinc finger protein
  misc_feature (81)..(201): NCBI GI NO: 15241188 NR Description: expressed protein [Arabidopsis thaliana]
  misc_feature (1)..(48): NCBI GI NO: 15241188 NR Description: expressed protein [Arabidopsis thaliana]
  misc_feature (92)..(222): NCBI GI NO: 18405411 NR Description: expressed protein [Arabidopsis thaliana]
  misc_feature (1)..(73): NCBI GI NO: 18405411 NR Description: expressed protein [Arabidopsis thaliana]
  misc_feature (65)..(202): NCBI GI NO: 22328949 NR Description: expressed protein [Arabidopsis thaliana]
  misc_feature (1)..(48): NCBI GI NO: 22328949 NR Description: expressed protein [Arabidopsis thaliana]
  misc_feature (39)..(197): NCBI GI NO: 15231238 NR Description: expressed protein [Arabidopsis thaliana]
MESFVEECNPNNPNPNLFPDSDESSDPELPFHRFSLLPLLLSSVSRSRSEPDVFDPMVFLQNHLQDLRADGANIQVDFDHPSNENQGFRLANIGDYFMGPGLEQFIQQLADNDPNRYGTPPAAKDAVENLPTVTVDDDLLNSELNQCAVCQDEFEKGSKVTQMPCKHAYHGDCLIPWLRLHNSCPVCRYELPTDDADYENEVHGGDAGSRTGGSDGGGGSNRPFRRTVRIYLRHPDAGDSAQDGAEREWRWRS

SEQ ID NO: 5633 - protein, 286 aa, Glycine max
  peptide (1)..(286): Ceres Seq. ID no. 14312210
  misc_feature (180)..(220): Pfam Name: RING finger Pfam Description: Zinc finger, C3HC4 type
  misc_feature (1)..(259): NCBI GI NO: 11994207 NR Description: gene_id:MPN9.20~unknown protein
  misc_feature (1)..(259): NCBI GI NO: 15231003 NR Description: expressed protein [Arabidopsis thaliana]
  misc_feature (83)..(275): NCBI GI NO: 37535546 NR Description: putative zinc finger protein
  misc_feature (114)..(234): NCBI GI NO: 15241188 NR Description: expressed protein [Arabidopsis thaliana]
  misc_feature (11)..(81): NCBI GI NO: 15241188 NR Description: expressed protein [Arabidopsis thaliana]
  misc_feature (125)..(255): NCBI GI NO: 18405411 NR Description: expressed protein [Arabidopsis thaliana]
  misc_feature (11)..(106): NCBI GI NO: 18405411 NR Description: expressed protein [Arabidopsis thaliana]
  misc_feature (98)..(235): NCBI GI NO: 22328949 NR Description: expressed protein [Arabidopsis thaliana]
  misc_feature (11)..(81): NCBI GI NO: 22328949 NR Description: expressed protein [Arabidopsis thaliana]
  misc_feature (72)..(230): NCBI GI NO: 15231238 NR Description: expressed protein [Arabidopsis thaliana]
MSSGGGGGKPFFCHVCSQRITCSDESEPFCPMCMESFVEECNPNNPNPNLFPDSDESSDPELPFHRFSLLPLLLSSVSRSRSEPDVFDPMVFLQNHLQDLRADGANIQVDFDHPSNENQGFRLANIGDYFMGPGLEQFIQQLADNDPNRYGTPPAAKDAVENLPTVTVDDDLLNSELNQCAVCQDEFEKGSKVTQMPCKHAYHGDCLIPWLRLHNSCPVCRYELPTDDADYENEVHGGDAGSRTGGSDGGGGSNRPFRRTVRIYLRHPDAGDSAQDGAEREWRWRS

SEQ ID NO: 5634 - protein, 255 aa, Glycine max
  peptide (1)..(255): Ceres Seq. ID no. 14312211
  misc_feature (149)..(189): Pfam Name: RING finger Pfam Description: Zinc finger, C3HC4 type
  misc_feature (1)..(228): NCBI GI NO: 11994207 NR Description: gene_id:MPN9.20~unknown protein
  misc_feature (1)..(228): NCBI GI NO: 15231003 NR Description: expressed protein [Arabidopsis thaliana]
  misc_feature (52)..(244): NCBI GI NO: 37535546 NR Description: putative zinc finger protein
  misc_feature (83)..(203): NCBI GI NO: 15241188 NR Description: expressed protein [Arabidopsis thaliana]
  misc_feature (1)..(50): NCBI GI NO: 15241188 NR Description: expressed protein [Arabidopsis thaliana]
  misc_feature (94)..(224): NCBI GI NO: 18405411 NR Description: expressed protein [Arabidopsis thaliana]
  misc_feature (1)..(75): NCBI GI NO: 18405411 NR Description: expressed protein [Arabidopsis thaliana]
  misc_feature (67)..(204): NCBI GI NO: 22328949 NR Description: expressed protein [Arabidopsis thaliana]
  misc_feature (1)..(50): NCBI GI NO: 22328949 NR Description: expressed protein [Arabidopsis thaliana]
  misc_feature (41)..(199): NCBI GI NO: 15231238 NR Description: expressed protein [Arabidopsis thaliana]
MCMESFVEECNPNNPNPNLFPDSDESSDPELPFHRFSLLPLLLSSVSRSRSEPDVFDPMVFLQNHLQDLRADGANIQVDFDHPSNENQGFRLANIGDYFMGPGLEQFIQQLADNDPNRYGTPPAAKDAVENLPTVTVDDDLLNSELNQCAVCQDEFEKGSKVTQMPCKHAYHGDCLIPWLRLHNSCPVCRYELPTDDADYENEVHGGDAGSRTGGSDGGGGSNRPFRRTVRIYLRHPDAGDSAQDGAEREWRWRS

SEQ ID NO: 5635 - DNA, 688 bp, Glycine max
  misc_feature (1)..(688): Ceres Seq. ID no. 15226533
ctcggggcccccctcgagtcacagctacgtaggccccccccccccgtccatgtttaacaactaatacaagtcactatgattttggtctgtacgtaatacaattgtgatatattacaaactccccatttgttgaggttatcctcgacaatcaagtctctctgctctctcttgctctatctatcttaggttyttgatctgdtattcactgtatcctaagtttttggacggtttttatttctctctatatgcattatcagatttttgaactgaggaagctaattccaacatctttggcatatgacttcaatatccacataatggattttcaacctggagaatttcttaatgtgaaggaggtccattataaccagcatggtttgctgctactggaagggcaaggcatttatcgtttgggtgatagttggtacccagttcaggctggtgatgtcatttggatggcaccattcgtcccacaatggtatgctgccctgggaaaaacaagaacacgttatcttatatacaaagacgcgaacagaagcccactgtaaccaacgttgatggacttcagatgaatgatatggatgatagtgacccccttctaatgatgtaatgatttaaataaagtgctaaatacatttagatggttgtattggactaagattttaaaagattatttttgtttattaac

SEQ ID NO: 5636 - protein, 100 aa, Glycine max
  peptide (1)..(100): Ceres Seq. ID no. 15226534
  misc_feature (4)..(100): Pfam Name: DUF923 Pfam Description: Protein of unknown function
  misc_feature (4)..(100): NCBI GI NO: 34393580 NR Description: putative glyoxylate induced protein
  misc_feature (4)..(100): NCBI GI NO: 22328740 NR Description: expressed protein [Arabidopsis thaliana]
  misc_feature (4)..(94): NCBI GI NO: 7485211 NR Description: hypothetical protein - Arabidopsis thaliana
  misc_feature (9)..(100): NCBI GI NO: 15806172 NR Description: conserved hypothetical protein
  misc_feature (8)..(97): NCBI GI NO: 23113628 NR Description: COG3257: Uncharacterized protein
  misc_feature (9)..(97): NCBI GI NO: 15891725 NR Description: AGR_L_3212p [Agrobacterium tumefaciens]
  misc_feature (9)..(97): NCBI GI NO: 17936916 NR Description: conserved hypothetical protein
  misc_feature (8)..(99): NCBI GI NO: 29377458 NR Description: conserved hypothetical protein
  misc_feature (9)..(97): NCBI GI NO: 27375364 NR Description: blr0253 [Bradyrhizobium japonicum]
  misc_feature (13)..(97): NCBI GI NO: 22958253 NR Description: COG3257: Uncharacterized protein
MHYQIFELRKLIPTSLAYDFNIHIMDFQPGEFLNVKEVHYNQHGLLLLEGQGIYRLGDSWYPVQAGDVIWMAPFVPQWYAALGKTRTRYLIYKDANRSPL

SEQ ID NO: 5637 - protein, 76 aa, Glycine max
  peptide (1)..(76): Ceres Seq. ID no. 15226535
  misc_feature (1)..(76): Pfam Name: DUF923 Pfam Description: Protein of unknown function
  misc_feature (1)..(76): NCBI GI NO: 34393580 NR Description: putative glyoxylate induced protein
  misc_feature (1)..(76): NCBI GI NO: 22328740 NR Description: expressed protein [Arabidopsis thaliana]
  misc_feature (1)..(70): NCBI GI NO: 7485211 NR Description: hypothetical protein - Arabidopsis thaliana
  misc_feature (1)..(76): NCBI GI NO: 15806172 NR Description: conserved hypothetical protein
  misc_feature (1)..(73): NCBI GI NO: 23113628 NR Description: COG3257: Uncharacterized protein
  misc_feature (1)..(73): NCBI GI NO: 15891725 NR Description: AGR_L_3212p [Agrobacterium tumefaciens]
  misc_feature (1)..(73): NCBI GI NO: 17936916 NR Description: conserved hypothetical protein
  misc_feature (1)..(75): NCBI GI NO: 29377458 NR Description: conserved hypothetical protein
  misc_feature (1)..(73): NCBI GI NO: 27375364 NR Description: blr0253 [Bradyrhizobium japonicum]
  misc_feature (1)..(73): NCBI GI NO: 22958253 NR Description: COG3257: Uncharacterized protein
MDFQPGEFLNVKEVHYNQHGLLLLEGQGIYRLGDSWYPVQAGDVIWMAPFVPQWYAALGKTRTRYLIYKDANRSPL

SEQ ID NO: 5638 - protein, 61 aa, Glycine max
  peptide (1)..(61): Ceres Seq. ID no. 15226536
  misc_feature (7)..(56): NCBI GI NO: 34901774 NR Description: OJ1058_B11.16
MVCCYWKGKAFIVWVIVGTQFRLVMSFGWHHSSHNGMLPWEKQEHVILYTKTRTEAHCNQR

SEQ ID NO: 5639 - DNA, 1137 bp, Glycine max
  misc_feature (1)..(1137): Ceres Seq. ID no. 14302047
aaagaatccttcatcacattaatcagtccagacagagaactgagagaagaccctcacttcctgtttggctcgacgaagacctcacttcgcccaacctccgtctccggcggcgtctcttatcctaacggctccttccctcaccgtcactgaaacggcgtccctgaactcgcaacactgccctccctctgactctgatttcgttcgaacttcgaactcattcccacttcgcagtcctcgccatgcttcgttgtcggcgactcctcgcagtggcaaacctcaaacgacatagctagagatacagggtgcgatttgtttccattttccagtcaatcctatactccttaggctattgtaatcttctgctaataaggaggaattattattgggttctgaaaacatgttgaaacaagcaattggcagaatcttcagaaccggtgtttatgcttgtgaaggaaatagagttttgccttggatttatgtgccttcgagctttttccaccatggacaagcgcacatggcacctagaagcttttttggggtagaggatttccttgatgatgacaatagccgaccttacacataccaaaaagggaagaagtcaaagaatccaaataagcacatatcattcaaacaaagaacaattgcctacatggaaccttttacacttgatgtgtttatctcaaagcgctttgtatcggcttcactcactcatagggtaacaagcaaacaggttgcagttgccgggaccaactccaaggacataaaagctgttcttaggtctcgttcagacataccagcatgcatagcaattggtaggattttagctgaaagagcaaaagaagctgatgtttacactggttcttatactccaagggacagggacaagtttgaagggaaaatcagagctgtagttcaatcacttattgacaatgggattgatatcaaggtttatcttgattgagtttagtcactcaagtttgtgggactatcagttaaggtgttgatattttggttgaagcagtaggccccttgtgtgtttgaacatgtccatttagtttggttttgatgataatgggaatatcattattcgaattacagatttggtaatttagttttatgaatgagttatgttgtcgc

SEQ ID NO: 5640 - protein, 187 aa, Glycine max
  peptide (1)..(187): Ceres Seq. ID no. 14302048
  misc_feature (80)..(181): Pfam Name: Pfam Description:  Ribosomal L18p/L5e family
  misc_feature (1)..(187): NCBI GI NO: 30680844 NR Description: expressed protein [Arabidopsis thaliana]
  misc_feature (1)..(187): NCBI GI NO: 37536826 NR Description: hypothetical protein
  misc_feature (69)..(186): NCBI GI NO: 15229493 NR Description: hypothetical protein [Arabidopsis thaliana]
  misc_feature (64)..(180): NCBI GI NO: 18402538 NR Description: expressed protein [Arabidopsis thaliana]
  misc_feature (76)..(186): NCBI GI NO: 22094358 NR Description: hypothetical protein
  misc_feature (80)..(182): NCBI GI NO: 15241056 NR Description: ribosomal protein L18p family
MLKQAIGRIFRTGVYACEGNRVLPWIYVPSSFFHHGQAHMAPRSFFGVEDFLDDDNSRPYTYQKGKKSKNPNKHISFKQRTIAYMEPFTLDVFISKRFVSASLTHRVTSKQVAVAGTNSKDIKAVLRSRSDIPACIAIGRILAERAKEADVYTGSYTPRDRDKFEGKIRAVVQSLIDNGIDIKVYLD

SEQ ID NO: 5641 - protein, 148 aa, Glycine max
  peptide (1)..(148): Ceres Seq. ID no. 14302049
  misc_feature (41)..(142): Pfam Name: Pfam Description:  Ribosomal L18p/L5e family
  misc_feature (1)..(148): NCBI GI NO: 30680844 NR Description: expressed protein [Arabidopsis thaliana]
  misc_feature (1)..(148): NCBI GI NO: 37536826 NR Description: hypothetical protein
  misc_feature (30)..(147): NCBI GI NO: 15229493 NR Description: hypothetical protein [Arabidopsis thaliana]
  misc_feature (25)..(141): NCBI GI NO: 18402538 NR Description: expressed protein [Arabidopsis thaliana]
  misc_feature (37)..(147): NCBI GI NO: 22094358 NR Description: hypothetical protein
  misc_feature (41)..(143): NCBI GI NO: 15241056 NR Description: ribosomal protein L18p family
MAPRSFFGVEDFLDDDNSRPYTYQKGKKSKNPNKHISFKQRTIAYMEPFTLDVFISKRFVSASLTHRVTSKQVAVAGTNSKDIKAVLRSRSDIPACIAIGRILAERAKEADVYTGSYTPRDRDKFEGKIRAVVQSLIDNGIDIKVYLD

SEQ ID NO: 5642 - protein, 103 aa, Glycine max
  peptide (1)..(103): Ceres Seq. ID no. 14302050
  misc_feature (1)..(97): Pfam Name: Pfam Description:  Ribosomal L18p/L5e family
  misc_feature (1)..(103): NCBI GI NO: 30680844 NR Description: expressed protein [Arabidopsis thaliana]
  misc_feature (1)..(103): NCBI GI NO: 37536826 NR Description: hypothetical protein
  misc_feature (1)..(102): NCBI GI NO: 15229493 NR Description: hypothetical protein [Arabidopsis thaliana]
  misc_feature (1)..(96): NCBI GI NO: 18402538 NR Description: expressed protein [Arabidopsis thaliana]
  misc_feature (1)..(102): NCBI GI NO: 22094358 NR Description: hypothetical protein
  misc_feature (1)..(98): NCBI GI NO: 15241056 NR Description: ribosomal protein L18p family
MEPFTLDVFISKRFVSASLTHRVTSKQVAVAGTNSKDIKAVLRSRSDIPACIAIGRILAERAKEADVYTGSYTPRDRDKFEGKIRAVVQSLIDNGIDIKVYLD

SEQ ID NO: 5643 - DNA, 1471 bp, Glycine max
  misc_feature (1)..(1471): Ceres Seq. ID no. 14306986
gatccaagaccatatttaatttgccaaccgcgccagatcgccattactacaacaacatagactagtgcggtgcattccctcgtttaccatgctttcctaagagaaagagaaaagtaaaacccctcactactgatagattttcattcctccgaggaaaaaaaaaacatgtcggatgctttgatcaatggattggccggagctggaggagggatcattgctcagctcatcacatacccacttcaaactgtaaacactcgccaacaaaccgagcgtgatccgaagaaagacacgaggagtcaaggggccctcgaacgaatgtgccaggttgtaaaagaagaggggtgggaacggttgtatggaggcttgatgccatcggtagtgggtacagctgcgtctcagggagtttactattatttctatcaaatattcaggaacaaagctgaagcagctgcactacaacaaaagaaaatgggcgttggtgatggatcagttgggatgctctcctctcttgttgttgctgctttatctgggtgtgttaacgtgctcttgacaaatcccatatgggtagttgttacgcgtatgcagacacatagaaaagagtcgaacagaactccagctgatcagggtttgtttgttgccactgagcagccaattctttctgcagttgagcctcttccttatggaactagtcatgtgattcaagaaatctacggtgaagctggaatttggggtttctggaaaggtgtattaccaacattaatcatggtaagcaatccttccatacagttcatgctgtatgaagccatgttggcaaagttaagaaaaagacgtgcttggagtaagaagggtagcaacggggtaactgctttagagatatttcttattggagctttagctaagcttggagctactgttgtaacttatccgatcctagttgtgaaggcaaggctccaagctagacaggataaaactggagacaggagacaccattacaaaggtacatgggatgctattattaaaatgatccgctatgaggggtttaatgggttttacaaaggcatgggcacaaaaatcgtacaaagtgtgctggctgctgctgttttgttcatgatgaaggaagaattagttaggggggttcgtttcttgcttgccaaggatgctgtaaagccaaagaatctgtgattggaggccactagcttgatcaagatttcatgtaccatcttcagttagcaaattagttcaaatggtaggggaattagagtgattcaaacaacatattgaaatatggctttaactgtatcttgattattttcatcaggttagtttccatagaggaaattcatgccaaaaattacacactgggttcattggtttgtttcatgaacaagacagggttgtagatttgaagtatgctgctgaaacaaatattctttttacgaacgaatatcactatctgatttcattggcagcc

SEQ ID NO: 5644 - protein, 338 aa, Glycine max
  peptide (1)..(338): Ceres Seq. ID no. 14306987
  misc_feature (1)..(329): NCBI GI NO: 15225602 NR Description: peroxisomal membrane protein (PMP36)
  misc_feature (1)..(329): NCBI GI NO: 21593883 NR Description: putative peroxisomal membrane carrier protein
  misc_feature (1)..(338): NCBI GI NO: 34901996 NR Description: unknown protein
  misc_feature (1)..(140): NCBI GI NO: 28828484 NR Description: hypothetical protein [Dictyostelium discoideum]
  misc_feature (186)..(321): NCBI GI NO: 28828484 NR Description: hypothetical protein [Dictyostelium discoideum]
  misc_feature (2)..(320): NCBI GI NO: 38105196 NR Description: hypothetical protein MG03247.4
  misc_feature (169)..(320): NCBI GI NO: 40739628 NR Description: hypothetical protein AN4280.2
  misc_feature (2)..(146): NCBI GI NO: 40739628 NR Description: hypothetical protein AN4280.2
  misc_feature (53)..(320): NCBI GI NO: 32404402 NR Description: hypothetical protein [Neurospora crassa]
  misc_feature (173)..(320): NCBI GI NO: 19921888 NR Description: CG8026-PB [Drosophila melanogaster]
MSDALINGLAGAGGGIIAQLITYPLQTVNTRQQTERDPKKDTRSQGALERMCQVVKEEGWERLYGGLMPSVVGTAASQGVYYYFYQIFRNKAEAAALQQKKMGVGDGSVGMLSSLVVAALSGCVNVLLTNPIWVVVTRMQTHRKESNRTPADQGLFVATEQPILSAVEPLPYGTSHVIQEIYGEAGIWGFWKGVLPTLIMVSNPSIQFMLYEAMLAKLRKRRAWSKKGSNGVTALEIFLIGALAKLGATVVTYPILVVKARLQARQDKTGDRRHHYKGTWDAIIKMIRYEGFNGFYKGMGTKIVQSVLAAAVLFMMKEELVRGVRFLLAKDAVKPKNL

SEQ ID NO: 5645 - protein, 288 aa, Glycine max
  peptide (1)..(288): Ceres Seq. ID no. 14306988
  misc_feature (1)..(279): NCBI GI NO: 15225602 NR Description: peroxisomal membrane protein (PMP36)
  misc_feature (1)..(279): NCBI GI NO: 21593883 NR Description: putative peroxisomal membrane carrier protein
  misc_feature (1)..(288): NCBI GI NO: 34901996 NR Description: unknown protein
  misc_feature (1)..(90): NCBI GI NO: 28828484 NR Description: hypothetical protein [Dictyostelium discoideum]
  misc_feature (136)..(271): NCBI GI NO: 28828484 NR Description: hypothetical protein [Dictyostelium discoideum]
  misc_feature (1)..(270): NCBI GI NO: 38105196 NR Description: hypothetical protein MG03247.4
  misc_feature (119)..(270): NCBI GI NO: 40739628 NR Description: hypothetical protein AN4280.2
  misc_feature (1)..(96): NCBI GI NO: 40739628 NR Description: hypothetical protein AN4280.2
  misc_feature (3)..(270): NCBI GI NO: 32404402 NR Description: hypothetical protein [Neurospora crassa]
  misc_feature (123)..(270): NCBI GI NO: 19921888 NR Description: CG8026-PB [Drosophila melanogaster]
MCQVVKEEGWERLYGGLMPSVVGTAASQGVYYYFYQIFRNKAEAAALQQKKMGVGDGSVGMLSSLVVAALSGCVNVLLTNPIWVVVTRMQTHRKESNRTPADQGLFVATEQPILSAVEPLPYGTSHVIQEIYGEAGIWGFWKGVLPTLIMVSNPSIQFMLYEAMLAKLRKRRAWSKKGSNGVTALEIFLIGALAKLGATVVTYPILVVKARLQARQDKTGDRRHHYKGTWDAIIKMIRYEGFNGFYKGMGTKIVQSVLAAAVLFMMKEELVRGVRFLLAKDAVKPKNL

SEQ ID NO: 5646 - protein, 271 aa, Glycine max
  peptide (1)..(271): Ceres Seq. ID no. 14306989
  misc_feature (1)..(262): NCBI GI NO: 15225602 NR Description: peroxisomal membrane protein (PMP36)
  misc_feature (1)..(262): NCBI GI NO: 21593883 NR Description: putative peroxisomal membrane carrier protein
  misc_feature (1)..(271): NCBI GI NO: 34901996 NR Description: unknown protein
  misc_feature (1)..(73): NCBI GI NO: 28828484 NR Description: hypothetical protein [Dictyostelium discoideum]
  misc_feature (119)..(254): NCBI GI NO: 28828484 NR Description: hypothetical protein [Dictyostelium discoideum]
  misc_feature (1)..(253): NCBI GI NO: 38105196 NR Description: hypothetical protein MG03247.4
  misc_feature (102)..(253): NCBI GI NO: 40739628 NR Description: hypothetical protein AN4280.2
  misc_feature (1)..(79): NCBI GI NO: 40739628 NR Description: hypothetical protein AN4280.2
  misc_feature (1)..(253): NCBI GI NO: 32404402 NR Description: hypothetical protein [Neurospora crassa]
  misc_feature (106)..(253): NCBI GI NO: 19921888 NR Description: CG8026-PB [Drosophila melanogaster]
MPSVVGTAASQGVYYYFYQIFRNKAEAAALQQKKMGVGDGSVGMLSSLVVAALSGCVNVLLTNPIWVVVTRMQTHRKESNRTPADQGLFVATEQPILSAVEPLPYGTSHVIQEIYGEAGIWGFWKGVLPTLIMVSNPSIQFMLYEAMLAKLRKRRAWSKKGSNGVTALEIFLIGALAKLGATVVTYPILVVKARLQARQDKTGDRRHHYKGTWDAIIKMIRYEGFNGFYKGMGTKIVQSVLAAAVLFMMKEELVRGVRFLLAKDAVKPKNL

SEQ ID NO: 5647 - DNA, 1337 bp, Glycine max
  misc_feature (1)..(1337): Ceres Seq. ID no. 14312357
ggcgaccacgtttgcaatttataaccttcctatccactctcttcaatttgttctgccatttggtaacactgttttcaccctttttctaatgctagtggttttctctctccctctctgcctctagtagttacaatttgcaaatagagtcatcatcatcatgtcacacccaaagggataaaaaaaaaaaaaaccaaaacttgtaacacatgggagttgttgaacaagaaatggaagaggaagagaaagaaaaacatacaaacaaccaagaccaaaacaaccataaccacccttcttctctccacccaattaaggaagagtgtgttagtgtgagaaaaccctttagtggtgatagagtgaagagagatgaatggagtgaaggggcagtgtcaaccctccttgaggcttatgaggccaaatgggtgctaagaaacagagccaaactcaagggccatgattgggaggatgtggcacggcacgtgtcggcacgtgccaactgcaccaaatcaccaaagacttcaacgcagtgtaagaacaaggttgagtccatgaagaagagatacagatcagaatcagcagcaacagcagatcatgcatcatcatcatggcctctttattcacggcttgatcttcttcttaggggaactggacccgtgttgtcgtcgccgccgccgccgccaccggcgatgatgccggcggcgatgccggttctgtctccggtggagccgtcgcaaccgccgcagctgtcgccgcctccggcggctccttcagggccacttgctaatgcacaaaactcgcatggatccaacggaattgatgagaagcttgctaaggaagatgggttaggaactaagtcatctgatcaagtatctagcaagaatccattggactcagatagcagcacgccagcactttatagcaagaaggacgggttaagatgcaacaagaggaagaagaaaacaattgacaacacagggcgaagaaggaaagagtgtgtggagatagcagaaagcttaagatggcttacagaagctatgataaggtctgaacaagcaagaatggacacaatgaaggagatagagaggatgagagttgaagctgaggccaaaagaggggaaatggaccttaagagaactgaaataattgccaatacacagttagagattgctaggatctttgcaagtgtcaacaataaaggtgttgattcatctctaagaattggaagaagttaagggtaggttatggaagataattaataaaaatgttattattgtatatgcacataaagttatcaaataatgctattaatataataaaatttgagtaaataacttatttcc

SEQ ID NO: 5648 - protein, 340 aa, Glycine max
  peptide (1)..(340): Ceres Seq. ID no. 14312358
  misc_feature (22)..(303): NCBI GI NO: 15232501 NR Description: expressed protein [Arabidopsis thaliana]
  misc_feature (162)..(340): NCBI GI NO: 15232501 NR Description: expressed protein [Arabidopsis thaliana]
  misc_feature (52)..(321): NCBI GI NO: 18404771 NR Description: expressed protein [Arabidopsis thaliana]
  misc_feature (43)..(340): NCBI GI NO: 11357442 NR Description: hypothetical protein F14P22
  misc_feature (46)..(317): NCBI GI NO: 37536908 NR Description: hypothetical protein
  misc_feature (43)..(334): NCBI GI NO: 30694843 NR Description: expressed protein [Arabidopsis thaliana]
  misc_feature (187)..(312): NCBI GI NO: 26451533 NR Description: unknown protein [Arabidopsis thaliana]
  misc_feature (49)..(149): NCBI GI NO: 26451533 NR Description: unknown protein [Arabidopsis thaliana]
  misc_feature (33)..(150): NCBI GI NO: 10178132 NR Description: gb|AAF01512
  misc_feature (33)..(150): NCBI GI NO: 18414919 NR Description: expressed protein [Arabidopsis thaliana]
MGVVEQEMEEEEKEKHTNNQDQNNHNHPSSLHPIKEECVSVRKPFSGDRVKRDEWSEGAVSTLLEAYEAKWVLRNRAKLKGHDWEDVARHVSARANCTKSPKTSTQCKNKVESMKKRYRSESAATADHASSSWPLYSRLDLLLRGTGPVLSSPPPPPPAMMPAAMPVLSPVEPSQPPQLSPPPAAPSGPLANAQNSHGSNGIDEKLAKEDGLGTKSSDQVSSKNPLDSDSSTPALYSKKDGLRCNKRKKKTIDNTGRRRKECVEIAESLRWLTEAMIRSEQARMDTMKEIERMRVEAEAKRGEMDLKRTEIIANTQLEIARIFASVNNKGVDSSLRIGRS

SEQ ID NO: 5649 - protein, 333 aa, Glycine max
  peptide (1)..(333): Ceres Seq. ID no. 14312359
  misc_feature (15)..(296): NCBI GI NO: 15232501 NR Description: expressed protein [Arabidopsis thaliana]
  misc_feature (155)..(333): NCBI GI NO: 15232501 NR Description: expressed protein [Arabidopsis thaliana]
  misc_feature (45)..(314): NCBI GI NO: 18404771 NR Description: expressed protein [Arabidopsis thaliana]
  misc_feature (36)..(333): NCBI GI NO: 11357442 NR Description: hypothetical protein F14P22
  misc_feature (39)..(310): NCBI GI NO: 37536908 NR Description: hypothetical protein
  misc_feature (36)..(327): NCBI GI NO: 30694843 NR Description: expressed protein [Arabidopsis thaliana]
  misc_feature (180)..(305): NCBI GI NO: 26451533 NR Description: unknown protein [Arabidopsis thaliana]
  misc_feature (42)..(142): NCBI GI NO: 26451533 NR Description: unknown protein [Arabidopsis thaliana]
  misc_feature (26)..(143): NCBI GI NO: 10178132 NR Description: gb|AAF01512
  misc_feature (26)..(143): NCBI GI NO: 18414919 NR Description: expressed protein [Arabidopsis thaliana]
MEEEEKEKHTNNQDQNNHNHPSSLHPIKEECVSVRKPFSGDRVKRDEWSEGAVSTLLEAYEAKWVLRNRAKLKGHDWEDVARHVSARANCTKSPKTSTQCKNKVESMKKRYRSESAATADHASSSWPLYSRLDLLLRGTGPVLSSPPPPPPAMMPAAMPVLSPVEPSQPPQLSPPPAAPSGPLANAQNSHGSNGIDEKLAKEDGLGTKSSDQVSSKNPLDSDSSTPALYSKKDGLRCNKRKKKTIDNTGRRRKECVEIAESLRWLTEAMIRSEQARMDTMKEIERMRVEAEAKRGEMDLKRTEIIANTQLEIARIFASVNNKGVDSSLRIGRS

SEQ ID NO: 5650 - protein, 227 aa, Glycine max
  peptide (1)..(227): Ceres Seq. ID no. 14312360
  misc_feature (1)..(190): NCBI GI NO: 15232501 NR Description: expressed protein [Arabidopsis thaliana]
  misc_feature (49)..(227): NCBI GI NO: 15232501 NR Description: expressed protein [Arabidopsis thaliana]
  misc_feature (1)..(208): NCBI GI NO: 18404771 NR Description: expressed protein [Arabidopsis thaliana]
  misc_feature (1)..(227): NCBI GI NO: 11357442 NR Description: hypothetical protein F14P22
  misc_feature (1)..(204): NCBI GI NO: 37536908 NR Description: hypothetical protein
  misc_feature (1)..(221): NCBI GI NO: 30694843 NR Description: expressed protein [Arabidopsis thaliana]
  misc_feature (74)..(199): NCBI GI NO: 26451533 NR Description: unknown protein [Arabidopsis thaliana]
  misc_feature (1)..(36): NCBI GI NO: 26451533 NR Description: unknown protein [Arabidopsis thaliana]
  misc_feature (1)..(37): NCBI GI NO: 10178132 NR Description: gb|AAF01512
  misc_feature (1)..(37): NCBI GI NO: 30680994 NR Description: expressed protein [Arabidopsis thaliana]
MKKRYRSESAATADHASSSWPLYSRLDLLLRGTGPVLSSPPPPPPAMMPAAMPVLSPVEPSQPPQLSPPPAAPSGPLANAQNSHGSNGIDEKLAKEDGLGTKSSDQVSSKNPLDSDSSTPALYSKKDGLRCNKRKKKTIDNTGRRRKECVEIAESLRWLTEAMIRSEQARMDTMKEIERMRVEAEAKRGEMDLKRTEIIANTQLEIARIFASVNNKGVDSSLRIGRS

SEQ ID NO: 5651 - DNA, 808 bp, Glycine max
  misc_feature (1)..(808): Ceres Seq. ID no. 14301742
acagcagttgttgagtcagcggttctgggttggagacagagagagagaagttttcagtttcagaaagaaagcaaaagcaatagcaatgggttggatcggtgagactgttgattccatcaaatctcttcagatccgccaggtcctcacccaggctgtgagcctaggcatgattgttacgtctgcactgataatatggaaggcattgatgtgcgttactggcagtgaatctcccgttgttgttgttctttctggaagcatggaacccggattcaagcggggagacatcttgttcttgcacatgagtaaagatcctattcgggcaggggagattgttgtgtttaatgttgatggacgtgagattccaattgttcatcgtgtaattaaggtacatgaaagggaagatactggggaggttgatgttctcacaaaaggagacaacaattatggggatgacaggctactgtatgctcatggtcaactttggctgcaaaggcaccacattatgggtagagccgtcgggttcttaccatacgtaggctgggtgaccatcattatgactgaaaagcctattatcaagtatattctcattggtgctttggggttgctcgtgataacttcgaaagattaaatgatgaatatgaagtcaaaactgcggtctaacttcggatggtagggtgagcagaatataatggtaagattaaaagatgaatctgaaatcattttgtaccattcatagtatatgggggacaatatgatgttaaggatttatgcaaaatagttgaattttggtatattcttacttcttcct

SEQ ID NO: 5652 - protein, 208 aa, Glycine max
  peptide (1)..(208): Ceres Seq. ID no. 14301743
  misc_feature (29)..(185): Pfam Name: Pfam Description:  Signal peptidase I
  misc_feature (29)..(208): NCBI GI NO: 15219044 NR Description: signal peptidase subunit -related
  misc_feature (29)..(208): NCBI GI NO: 18400874 NR Description: signal peptidase 21kDa subunit -related
  misc_feature (7)..(208): NCBI GI NO: 31195617 NR Description: ENSANGP00000013674 [Anopheles gambiae]
  misc_feature (39)..(208): NCBI GI NO: 31207577 NR Description: ENSANGP00000020448 [Anopheles gambiae]
  misc_feature (36)..(208): NCBI GI NO: 9910550 NR Description: signal peptidase complex
  misc_feature (36)..(208): NCBI GI NO: 34784421 NR Description: Spc18-pending protein [Mus musculus]
  misc_feature (36)..(208): NCBI GI NO: 32484220 NR Description: Unknown (protein for MGC:64284) [Xenopus laevis]
  misc_feature (39)..(208): NCBI GI NO: 15150809 NR Description: similar to signal peptidase complex (18kD)
  misc_feature (36)..(208): NCBI GI NO: 38511785 NR Description: Signal peptidase complex (18kD)
  misc_feature (39)..(208): NCBI GI NO: 24025634 NR Description: signal peptidase 21kDa subunit [Rattus norvegicus]
QQLLSQRFWVGDREREVFSFRKKAKAIAMGWIGETVDSIKSLQIRQVLTQAVSLGMIVTSALIIWKALMCVTGSESPVVVVLSGSMEPGFKRGDILFLHMSKDPIRAGEIVVFNVDGREIPIVHRVIKVHEREDTGEVDVLTKGDNNYGDDRLLYAHGQLWLQRHHIMGRAVGFLPYVGWVTIIMTEKPIIKYILIGALGLLVITSKD

SEQ ID NO: 5653 - protein, 180 aa, Glycine max
  peptide (1)..(180): Ceres Seq. ID no. 14301744
  misc_feature (1)..(157): Pfam Name: Pfam Description:  Signal peptidase I
  misc_feature (1)..(180): NCBI GI NO: 15219044 NR Description: signal peptidase subunit -related
  misc_feature (1)..(180): NCBI GI NO: 18400874 NR Description: signal peptidase 21kDa subunit -related
  misc_feature (1)..(180): NCBI GI NO: 31195617 NR Description: ENSANGP00000013674 [Anopheles gambiae]
  misc_feature (11)..(180): NCBI GI NO: 31207577 NR Description: ENSANGP00000020448 [Anopheles gambiae]
  misc_feature (8)..(180): NCBI GI NO: 9910550 NR Description: signal peptidase complex
  misc_feature (8)..(180): NCBI GI NO: 34784421 NR Description: Spc18-pending protein [Mus musculus]
  misc_feature (8)..(180): NCBI GI NO: 32484220 NR Description: Unknown (protein for MGC:64284) [Xenopus laevis]
  misc_feature (11)..(180): NCBI GI NO: 15150809 NR Description: similar to signal peptidase complex (18kD)
  misc_feature (8)..(180): NCBI GI NO: 38511785 NR Description: Signal peptidase complex (18kD)
  misc_feature (11)..(180): NCBI GI NO: 24025634 NR Description: signal peptidase 21kDa subunit [Rattus norvegicus]
MGWIGETVDSIKSLQIRQVLTQAVSLGMIVTSALIIWKALMCVTGSESPVVVVLSGSMEPGFKRGDILFLHMSKDPIRAGEIVVFNVDGREIPIVHRVIKVHEREDTGEVDVLTKGDNNYGDDRLLYAHGQLWLQRHHIMGRAVGFLPYVGWVTIIMTEKPIIKYILIGALGLLVITSKD

SEQ ID NO: 5654 - protein, 153 aa, Glycine max
  peptide (1)..(153): Ceres Seq. ID no. 14301745
  misc_feature (1)..(130): Pfam Name: Pfam Description:  Signal peptidase I
  misc_feature (1)..(153): NCBI GI NO: 15219044 NR Description: signal peptidase subunit -related
  misc_feature (1)..(153): NCBI GI NO: 18400874 NR Description: signal peptidase 21kDa subunit -related
  misc_feature (1)..(153): NCBI GI NO: 31195617 NR Description: ENSANGP00000013674 [Anopheles gambiae]
  misc_feature (1)..(153): NCBI GI NO: 31207577 NR Description: ENSANGP00000020448 [Anopheles gambiae]
  misc_feature (1)..(153): NCBI GI NO: 9910550 NR Description: signal peptidase complex
  misc_feature (1)..(153): NCBI GI NO: 34784421 NR Description: Spc18-pending protein [Mus musculus]
  misc_feature (1)..(153): NCBI GI NO: 32484220 NR Description: Unknown (protein for MGC:64284) [Xenopus laevis]
  misc_feature (1)..(153): NCBI GI NO: 15150809 NR Description: similar to signal peptidase complex (18kD)
  misc_feature (1)..(153): NCBI GI NO: 38511785 NR Description: Signal peptidase complex (18kD)
  misc_feature (1)..(153): NCBI GI NO: 24025634 NR Description: signal peptidase 21kDa subunit [Rattus norvegicus]
MIVTSALIIWKALMCVTGSESPVVVVLSGSMEPGFKRGDILFLHMSKDPIRAGEIVVFNVDGREIPIVHRVIKVHEREDTGEVDVLTKGDNNYGDDRLLYAHGQLWLQRHHIMGRAVGFLPYVGWVTIIMTEKPIIKYILIGALGLLVITSKD

SEQ ID NO: 5655 - DNA, 1349 bp, Glycine max
  misc_feature (1)..(1349): Ceres Seq. ID no. 15176437
atggtgacggaccaagatatagcgaaaggggtggagtccctactgcgtcactctgacccaaactccataactacggtaaacggcgtcgttcagcagctggaggccaaactagggttagacctctctcacaaggccagtttcatcagagaccagatcgatcatcttctccggtcacagccacagacatttgctcctcaccctcctccacttcacaaagactattttgcccctcacacccaactgcacttcccaaccacccactttgctccccattttgccctccatgacgagatcaacttcctgcagcacccccaccctcctccaccgcgtaaagtcgagacctttcctcctcaaaatgttgcccctcctcaagtgcccaaagaaagtgtgcaaactggaagcaaaagaagaggtggtgctggtggtctaaacaaagtttgtggtgtttctcctgaacttcaggcggttgttggtgagccggcaatgccaagaactgaaattgtgaggcagctgtgggcatacataaagaaaaacaacctccaagatcctggtaacaaaagaaagataatttgtgatgatgccctgcgtttggtatttgagacagactgcaccgatatgttcaagatgaatcagttgctagctaaacacattatcccacttggtcctacaaaggagtcacaggctaaacgagtgaaggtggatactgaaattaagactgaaagtgctgaacctgctccatctaccgtggcaatatctgaagcgcttgccaaatttttgggcactgagggaagagagatgcaacagtctgaagccataagacttgtttgggagtacatcaagcttcaccatttggaggatcctttaaattcaatggtgatattatgcgatgcaaagcttcaagagctacttggatgtgaaagcatttctgctttaggaataccagagatgttagcacgtcatcatctatttaaacagtctgacacccgttagtgctgatcaattattgccatataagggtatgatctgcacaaaacgctggttatatgtttctgctcgttgctagatcgtataggaactttttacttattcctgtcacttcatttatctctttgttcactgacgtatgtaaactgtatgttgtctgacggttattaggttggttgtttagaatgacaatgtataccttgagctaggcaagaagtatattgtatttaatatatgccctttaggttacccgtgcattttattttatcagttctcaatgtctaacctcaactggctgatcgaattagtgatacttttgtacattgagatacaccaactactctgaaatgcaccttgtttttact

SEQ ID NO: 5656 - protein, 329 aa, Glycine max
  peptide (1)..(329): Ceres Seq. ID no. 15176438
  misc_feature (17)..(326): NCBI GI NO: 21537175 NR Description: unknown [Arabidopsis thaliana]
  misc_feature (17)..(326): NCBI GI NO: 18415906 NR Description: expressed protein [Arabidopsis thaliana]
  misc_feature (17)..(285): NCBI GI NO: 7486830 NR Description: hypothetical protein T10I14
  misc_feature (68)..(326): NCBI GI NO: 32488657 NR Description: OSJNBa0087O24.7
  misc_feature (126)..(322): NCBI GI NO: 15230276 NR Description: hypothetical protein [Arabidopsis thaliana]
  misc_feature (1)..(58): NCBI GI NO: 15230276 NR Description: hypothetical protein [Arabidopsis thaliana]
  misc_feature (135)..(240): NCBI GI NO: 15222765 NR Description: hypothetical protein [Arabidopsis thaliana]
  misc_feature (1)..(58): NCBI GI NO: 15222765 NR Description: hypothetical protein [Arabidopsis thaliana]
  misc_feature (135)..(238): NCBI GI NO: 25405318 NR Description: hypothetical protein F13F21.4
  misc_feature (1)..(58): NCBI GI NO: 25405318 NR Description: hypothetical protein F13F21.4
MVTDQDIAKGVESLLRHSDPNSITTVNGVVQQLEAKLGLDLSHKASFIRDQIDHLLRSQPQTFAPHPPPLHKDYFAPHTQLHFPTTHFAPHFALHDEINFLQHPHPPPPRKVETFPPQNVAPPQVPKESVQTGSKRRGGAGGLNKVCGVSPELQAVVGEPAMPRTEIVRQLWAYIKKNNLQDPGNKRKIICDDALRLVFETDCTDMFKMNQLLAKHIIPLGPTKESQAKRVKVDTEIKTESAEPAPSTVAISEALAKFLGTEGREMQQSEAIRLVWEYIKLHHLEDPLNSMVILCDAKLQELLGCESISALGIPEMLARHHLFKQSDTR

SEQ ID NO: 5657 - protein, 168 aa, Glycine max
  peptide (1)..(168): Ceres Seq. ID no. 15176439
  misc_feature (1)..(165): NCBI GI NO: 21537175 NR Description: unknown [Arabidopsis thaliana]
  misc_feature (1)..(165): NCBI GI NO: 18415906 NR Description: expressed protein [Arabidopsis thaliana]
  misc_feature (1)..(124): NCBI GI NO: 7486830 NR Description: hypothetical protein T10I14
  misc_feature (1)..(165): NCBI GI NO: 32488657 NR Description: OSJNBa0087O24.7
  misc_feature (1)..(161): NCBI GI NO: 15230276 NR Description: hypothetical protein [Arabidopsis thaliana]
  misc_feature (1)..(79): NCBI GI NO: 15222765 NR Description: hypothetical protein [Arabidopsis thaliana]
  misc_feature (1)..(77): NCBI GI NO: 25405318 NR Description: hypothetical protein F13F21.4
  misc_feature (1)..(83): NCBI GI NO: 9280327 NR Description: gb|AAD43149
  misc_feature (1)..(112): NCBI GI NO: 15222765 NR Description: hypothetical protein [Arabidopsis thaliana]
  misc_feature (1)..(112): NCBI GI NO: 25405318 NR Description: hypothetical protein F13F21.4
MPRTEIVRQLWAYIKKNNLQDPGNKRKIICDDALRLVFETDCTDMFKMNQLLAKHIIPLGPTKESQAKRVKVDTEIKTESAEPAPSTVAISEALAKFLGTEGREMQQSEAIRLVWEYIKLHHLEDPLNSMVILCDAKLQELLGCESISALGIPEMLARHHLFKQSDTR

SEQ ID NO: 5658 - DNA, 1261 bp, Glycine max
  misc_feature (1)..(1261): Ceres Seq. ID no. 15177596
gaagtgtcagctcttccatcctacttcaccctctcacaataaaatcattgcaatagagaagtcccttaaataaatctgaatttccctgctttgcttcaccaccccccttgcttgcgtgggtagaaatgcaagaagcagggctgggaatgggaatgggaatgatgagcggagaagtatccgccgccggggaccaccaccgtcaagtgaaggcggagatagccaaccacccactctatgaacagcttctatctgcacacgtgtcatgcctccgcgtcgccacacctatcgatcagttgccgctcatcgacggacagttatcgcagtcccaccatctcctccgctcttatgcctcacaccattcccattccctctcgccccatgaccgacaagaactcgacaacttcatggcacaatatttgattgtgttatgtacgttcaaagagcagcttcagcaacatgtgagggtgcatgccgtggaggctgtgatggcctgccgtgatattgaaagtaccttgcaagctctgacaggagtcagtttgggagaaggaacaggtgcaacaatgtcagatgatgaagatgatttgcagatggatggctctttagatcagtctagcgctgacgggcatgacatgatgggatttggtccattgcttcctacagaatctgaaaggtccctgatggaaagagttcgtcaggagcttaagattgagctcaagcagggttttaagtcaagaattgaagatgttagggaggaaatattaaggaagcggagagctgggaaattaccaggtgacacaacatcggttttaaaggcctggtggcagcaacatgctaagtggccctacccaactgaagatgacaaggcaaaacttgtggaggagacagggttgcagctgaagcaaatcaataattggttcatcaatcaaaggaaacgcaactggcacagcaactctcaatcggttaactctctgaagtccaagcgcaagagagagtatgcccactaaggattccagtctggtgcagaagataacaggtgatgcactacaacataagatggcttacaatagtgatggttgtaaattcttggaatacataacggatacaaactattcttgttgtgcacggtcgcctccatttctttcaagtgtttttttatttgtaaatttgtttgctatgatttgactggctgaagaagtatttttagcagctgaaagcctgaaagtgtttcctatacttgatatgtttgcatgtactattatgt

SEQ ID NO: 5659 - protein, 292 aa, Glycine max
  peptide (1)..(292): Ceres Seq. ID no. 15177597
  misc_feature (80)..(135): Pfam Name: Pfam Description:  KNOX2 domain
  misc_feature (7)..(288): NCBI GI NO: 4098246 NR Description: homeobox 2 protein [Lycopersicon esculentum]
  misc_feature (1)..(287): NCBI GI NO: 1170191 NR Description: Homeobox protein HD1
  misc_feature (1)..(287): NCBI GI NO: 18407708 NR Description: homeodomain-containing protein HD1 -related
  misc_feature (15)..(287): NCBI GI NO: 25386223 NR Description: hypothetical protein F16P17.16
  misc_feature (15)..(287): NCBI GI NO: 26451690 NR Description: putative homeodomain transcription factor KNAT6
  misc_feature (6)..(287): NCBI GI NO: 21618231 NR Description: homeodomain-containing protein HD1, putative
  misc_feature (18)..(288): NCBI GI NO: 14149141 NR Description: KNOX family class 2 homeodomain protein
  misc_feature (28)..(288): NCBI GI NO: 3023961 NR Description: Homeobox protein knotted-1 like 3 (KNAP3)
  misc_feature (7)..(292): NCBI GI NO: 15238743 NR Description: KNAT3 homeodomain protein [Arabidopsis thaliana]
  misc_feature (7)..(292): NCBI GI NO: 21554222 NR Description: KNAT3 homeodomain protein [Arabidopsis thaliana]
MQEAGLGMGMGMMSGEVSAAGDHHRQVKAEIANHPLYEQLLSAHVSCLRVATPIDQLPLIDGQLSQSHHLLRSYASHHSHSLSPHDRQELDNFMAQYLIVLCTFKEQLQQHVRVHAVEAVMACRDIESTLQALTGVSLGEGTGATMSDDEDDLQMDGSLDQSSADGHDMMGFGPLLPTESERSLMERVRQELKIELKQGFKSRIEDVREEILRKRRAGKLPGDTTSVLKAWWQQHAKWPYPTEDDKAKLVEETGLQLKQINNWFINQRKRNWHSNSQSVNSLKSKRKREYAH

SEQ ID NO: 5660 - protein, 285 aa, Glycine max
  peptide (1)..(285): Ceres Seq. ID no. 15177598
  misc_feature (73)..(128): Pfam Name: Pfam Description:  KNOX2 domain
  misc_feature (1)..(281): NCBI GI NO: 4098246 NR Description: homeobox 2 protein [Lycopersicon esculentum]
  misc_feature (1)..(280): NCBI GI NO: 1170191 NR Description: Homeobox protein HD1
  misc_feature (1)..(280): NCBI GI NO: 18407708 NR Description: homeodomain-containing protein HD1 -related
  misc_feature (8)..(280): NCBI GI NO: 25386223 NR Description: hypothetical protein F16P17.16
  misc_feature (8)..(280): NCBI GI NO: 26451690 NR Description: putative homeodomain transcription factor KNAT6
  misc_feature (1)..(280): NCBI GI NO: 21618231 NR Description: homeodomain-containing protein HD1, putative
  misc_feature (11)..(281): NCBI GI NO: 14149141 NR Description: KNOX family class 2 homeodomain protein
  misc_feature (21)..(281): NCBI GI NO: 3023961 NR Description: Homeobox protein knotted-1 like 3 (KNAP3)
  misc_feature (1)..(285): NCBI GI NO: 15238743 NR Description: KNAT3 homeodomain protein [Arabidopsis thaliana]
  misc_feature (1)..(285): NCBI GI NO: 21554222 NR Description: KNAT3 homeodomain protein [Arabidopsis thaliana]
MGMGMMSGEVSAAGDHHRQVKAEIANHPLYEQLLSAHVSCLRVATPIDQLPLIDGQLSQSHHLLRSYASHHSHSLSPHDRQELDNFMAQYLIVLCTFKEQLQQHVRVHAVEAVMACRDIESTLQALTGVSLGEGTGATMSDDEDDLQMDGSLDQSSADGHDMMGFGPLLPTESERSLMERVRQELKIELKQGFKSRIEDVREEILRKRRAGKLPGDTTSVLKAWWQQHAKWPYPTEDDKAKLVEETGLQLKQINNWFINQRKRNWHSNSQSVNSLKSKRKREYAH

SEQ ID NO: 5661 - protein, 283 aa, Glycine max
  peptide (1)..(283): Ceres Seq. ID no. 15177599
  misc_feature (71)..(126): Pfam Name: Pfam Description:  KNOX2 domain
  misc_feature (1)..(279): NCBI GI NO: 4098246 NR Description: homeobox 2 protein [Lycopersicon esculentum]
  misc_feature (1)..(278): NCBI GI NO: 1170191 NR Description: Homeobox protein HD1
  misc_feature (1)..(278): NCBI GI NO: 18407708 NR Description: homeodomain-containing protein HD1 -related
  misc_feature (6)..(278): NCBI GI NO: 25386223 NR Description: hypothetical protein F16P17.16
  misc_feature (6)..(278): NCBI GI NO: 26451690 NR Description: putative homeodomain transcription factor KNAT6
  misc_feature (1)..(278): NCBI GI NO: 21618231 NR Description: homeodomain-containing protein HD1, putative
  misc_feature (9)..(279): NCBI GI NO: 14149141 NR Description: KNOX family class 2 homeodomain protein
  misc_feature (19)..(279): NCBI GI NO: 3023961 NR Description: Homeobox protein knotted-1 like 3 (KNAP3)
  misc_feature (1)..(283): NCBI GI NO: 15238743 NR Description: KNAT3 homeodomain protein [Arabidopsis thaliana]
  misc_feature (1)..(283): NCBI GI NO: 21554222 NR Description: KNAT3 homeodomain protein [Arabidopsis thaliana]
MGMMSGEVSAAGDHHRQVKAEIANHPLYEQLLSAHVSCLRVATPIDQLPLIDGQLSQSHHLLRSYASHHSHSLSPHDRQELDNFMAQYLIVLCTFKEQLQQHVRVHAVEAVMACRDIESTLQALTGVSLGEGTGATMSDDEDDLQMDGSLDQSSADGHDMMGFGPLLPTESERSLMERVRQELKIELKQGFKSRIEDVREEILRKRRAGKLPGDTTSVLKAWWQQHAKWPYPTEDDKAKLVEETGLQLKQINNWFINQRKRNWHSNSQSVNSLKSKRKREYAH

SEQ ID NO: 5662 - DNA, 1950 bp, Glycine max
  misc_feature (1)..(1950): Ceres Seq. ID no. 14303351
tttttgagaaaagaggaagccgtttgtgtctgtgtgtgtttgtgaaatagtgtgttaatatgagtaactggttggggttctctctcactccacacttgaggattgatgaagaatttgagagagaaaaccaagagcgtggaggagggtaccatcatccttctccttcttgtcaccctcacttgtctgttatgccccttcgctctgatggctctctctgtgttgctgactcctttagtcactctgctgcatctcaagaatggagatatgatagtgcaataggtggagggaattccaatgaagaaggtccaaagcttgaagactttttgggttgctactcaaactcccccgctaaggtcttttgccaagactctcagcctgaccaaaaccaaagccagaacaatgtttccaaaatcaatgttaatgtggcaccaagcttttgcaccaacaattcagagattgaaactggggataatctcacaaatccttcttccttgctccattctttccatgcatataatgataactcacatgctcttatccccaccaatggcatgtacaagtcctggttggcacaaacccagttttcttctgatggaaaaccttcaaatgaggctaatgggtgcaatttccaatctttgtccctcactatgagccccagtgtgcaaaatggggtgggtgcaatttcctctgttcaagtgaatgaggatagtaggaaacgggtcatggcgaaatctcatgctagagaaccagttcctcgcaaatctattgacacttttgggcaaagaacatctcaatatcgtggtgttacaaggcatagatggactggaagatatgaggcccatttgtgggataatagttgcagaaaggaagggcaaacaaggaaaggaaggcaagtttaccttggtggttatgataaggaagaaaaagcagcaaaggcttacgacttagctgcactcaagtattggggtccaacaactcacataaatttccctttaagcacttatgagaaggaacttgaagagatgaagcacatgaccaggcaagaatttgtcgccaatttaagaaggaagagcagtggattttcaagaggggcatctgtgtatagaggtgtgacaagacaccatcaacatggaaggtggcaggcccgaataggaagggttgcaggaaacaaggacttgtatcttggtacatttagcacacaagaagaagctgctgaagcatatgatatagcagcaatcaagttcagaggaacaagtgctgtgaccaactttgacataagtaggtatgatgtgaagagaatctgctcaagctccactcttattgcaggagatcttgcaaaacggtctcctaaagaatcaccagctccggttcctgcctctgacttcaattcgtgcggttcatcgccgatgccgctggtgtctcagccacctcctttggctataactgatggtgaacattctgatgagttgtccaacatgatgtggaatgccaacaacagtgatgagcaagcacagaatgagagtggtggtgctgaattcaacaacaatgtaactgaatcatcatcatcacaacaggtttcaccaagcagcaacaaggatgctttgaaccctcaaagccccaatgagtttggagtcagtggagcagattatggacatggctacttcacccttgatggaccaaaatatgatgatgggaacaatgaaaatgaccacatgagcaccaacaggcttggaaatttgggattggttaatcaagttcccatgtttgctttgtggaatgaatgaagggaatgttatgttgatgagttgagattacaaaaaacattagcttagaaaaaaaaactaagatcagatggcagaattattgaatgattattatattgtagcttggtatggtaactttttattttatgttgaaagaaaggggatatgtcagtagtgctgattcctt

SEQ ID NO: 5663 - protein, 574 aa, Glycine max
  peptide (1)..(574): Ceres Seq. ID no. 14303352
  misc_feature (243)..(316): Pfam Name: Pfam Description:  AP2 domain
  misc_feature (29)..(441): NCBI GI NO: 38492172 NR Description: ANT-like protein [Nicotiana tabacum]
  misc_feature (1)..(435): NCBI GI NO: 15218529 NR Description: ovule development protein, putative
  misc_feature (32)..(429): NCBI GI NO: 1171429 NR Description: CKC
  misc_feature (32)..(429): NCBI GI NO: 15235690 NR Description: ovule development protein aintegumenta (ANT)
  misc_feature (165)..(439): NCBI GI NO: 21069057 NR Description: BABY BOOM [Arabidopsis thaliana]
  misc_feature (165)..(439): NCBI GI NO: 21069051 NR Description: AP2/EREBP transcription factor BABY BOOM1
  misc_feature (165)..(439): NCBI GI NO: 21069053 NR Description: AP2/EREBP transcription factor BABY BOOM2
  misc_feature (196)..(463): NCBI GI NO: 28201307 NR Description: putative ovule development protein antitegumenta
  misc_feature (191)..(440): NCBI GI NO: 32490266 NR Description: OSJNBb0116K07.8
  misc_feature (76)..(436): NCBI GI NO: 20330778 NR Description: Putative ovule development protein antitegumenta
MSNWLGFSLTPHLRIDEEFERENQERGGGYHHPSPSCHPHLSVMPLRSDGSLCVADSFSHSAASQEWRYDSAIGGGNSNEEGPKLEDFLGCYSNSPAKVFCQDSQPDQNQSQNNVSKINVNVAPSFCTNNSEIETGDNLTNPSSLLHSFHAYNDNSHALIPTNGMYKSWLAQTQFSSDGKPSNEANGCNFQSLSLTMSPSVQNGVGAISSVQVNEDSRKRVMAKSHAREPVPRKSIDTFGQRTSQYRGVTRHRWTGRYEAHLWDNSCRKEGQTRKGRQVYLGGYDKEEKAAKAYDLAALKYWGPTTHINFPLSTYEKELEEMKHMTRQEFVANLRRKSSGFSRGASVYRGVTRHHQHGRWQARIGRVAGNKDLYLGTFSTQEEAAEAYDIAAIKFRGTSAVTNFDISRYDVKRICSSSTLIAGDLAKRSPKESPAPVPASDFNSCGSSPMPLVSQPPPLAITDGEHSDELSNMMWNANNSDEQAQNESGGAEFNNNVTESSSSQQVSPSSNKDALNPQSPNEFGVSGADYGHGYFTLDGPKYDDGNNENDHMSTNRLGNLGLVNQVPMFALWNE

SEQ ID NO: 5664 - protein, 531 aa, Glycine max
  peptide (1)..(531): Ceres Seq. ID no. 14303353
  misc_feature (200)..(273): Pfam Name: Pfam Description:  AP2 domain
  misc_feature (1)..(398): NCBI GI NO: 38492172 NR Description: ANT-like protein [Nicotiana tabacum]
  misc_feature (1)..(392): NCBI GI NO: 15218529 NR Description: ovule development protein, putative
  misc_feature (1)..(386): NCBI GI NO: 1171429 NR Description: CKC
  misc_feature (1)..(386): NCBI GI NO: 15235690 NR Description: ovule development protein aintegumenta (ANT)
  misc_feature (122)..(396): NCBI GI NO: 21069057 NR Description: BABY BOOM [Arabidopsis thaliana]
  misc_feature (122)..(396): NCBI GI NO: 21069051 NR Description: AP2/EREBP transcription factor BABY BOOM1
  misc_feature (122)..(396): NCBI GI NO: 21069053 NR Description: AP2/EREBP transcription factor BABY BOOM2
  misc_feature (153)..(420): NCBI GI NO: 28201307 NR Description: putative ovule development protein antitegumenta
  misc_feature (148)..(397): NCBI GI NO: 32490266 NR Description: OSJNBb0116K07.8
  misc_feature (33)..(393): NCBI GI NO: 20330778 NR Description: Putative ovule development protein antitegumenta
MPLRSDGSLCVADSFSHSAASQEWRYDSAIGGGNSNEEGPKLEDFLGCYSNSPAKVFCQDSQPDQNQSQNNVSKINVNVAPSFCTNNSEIETGDNLTNPSSLLHSFHAYNDNSHALIPTNGMYKSWLAQTQFSSDGKPSNEANGCNFQSLSLTMSPSVQNGVGAISSVQVNEDSRKRVMAKSHAREPVPRKSIDTFGQRTSQYRGVTRHRWTGRYEAHLWDNSCRKEGQTRKGRQVYLGGYDKEEKAAKAYDLAALKYWGPTTHINFPLSTYEKELEEMKHMTRQEFVANLRRKSSGFSRGASVYRGVTRHHQHGRWQARIGRVAGNKDLYLGTFSTQEEAAEAYDIAAIKFRGTSAVTNFDISRYDVKRICSSSTLIAGDLAKRSPKESPAPVPASDFNSCGSSPMPLVSQPPPLAITDGEHSDELSNMMWNANNSDEQAQNESGGAEFNNNVTESSSSQQVSPSSNKDALNPQSPNEFGVSGADYGHGYFTLDGPKYDDGNNENDHMSTNRLGNLGLVNQVPMFALWNE

SEQ ID NO: 5665 - protein, 410 aa, Glycine max
  peptide (1)..(410): Ceres Seq. ID no. 14303354
  misc_feature (79)..(152): Pfam Name: Pfam Description:  AP2 domain
  misc_feature (1)..(277): NCBI GI NO: 38492172 NR Description: ANT-like protein [Nicotiana tabacum]
  misc_feature (1)..(271): NCBI GI NO: 15218529 NR Description: ovule development protein, putative
  misc_feature (1)..(265): NCBI GI NO: 1171429 NR Description: CKC
  misc_feature (1)..(265): NCBI GI NO: 15235690 NR Description: ovule development protein aintegumenta (ANT)
  misc_feature (1)..(275): NCBI GI NO: 21069057 NR Description: BABY BOOM [Arabidopsis thaliana]
  misc_feature (1)..(275): NCBI GI NO: 21069051 NR Description: AP2/EREBP transcription factor BABY BOOM1
  misc_feature (1)..(275): NCBI GI NO: 21069053 NR Description: AP2/EREBP transcription factor BABY BOOM2
  misc_feature (32)..(299): NCBI GI NO: 28201307 NR Description: putative ovule development protein antitegumenta
  misc_feature (27)..(276): NCBI GI NO: 32490266 NR Description: OSJNBb0116K07.8
  misc_feature (1)..(272): NCBI GI NO: 20330778 NR Description: Putative ovule development protein antitegumenta
MYKSWLAQTQFSSDGKPSNEANGCNFQSLSLTMSPSVQNGVGAISSVQVNEDSRKRVMAKSHAREPVPRKSIDTFGQRTSQYRGVTRHRWTGRYEAHLWDNSCRKEGQTRKGRQVYLGGYDKEEKAAKAYDLAALKYWGPTTHINFPLSTYEKELEEMKHMTRQEFVANLRRKSSGFSRGASVYRGVTRHHQHGRWQARIGRVAGNKDLYLGTFSTQEEAAEAYDIAAIKFRGTSAVTNFDISRYDVKRICSSSTLIAGDLAKRSPKESPAPVPASDFNSCGSSPMPLVSQPPPLAITDGEHSDELSNMMWNANNSDEQAQNESGGAEFNNNVTESSSSQQVSPSSNKDALNPQSPNEFGVSGADYGHGYFTLDGPKYDDGNNENDHMSTNRLGNLGLVNQVPMFALWNE

SEQ ID NO: 5666 - DNA, 1902 bp, Glycine max
  misc_feature (1)..(1902): Ceres Seq. ID no. 15176911
tcacacacttgaccagcatctcattcccgtccccggcgactgagtagcggtctcttcccaactcggaactcagtccattccgcatttcaattttctcttcacttggcaaagcccaaaccaaaccctggctgaagaagagaattgactgagaagaagaacacagaaatgggctccgaactgattttcagagggcacgagacccagcccgtggacgacgcgtactcaccaaagccccacaaaccctggctcaccgtgactcgcccgattcactacatgctccgtgagcagcgactcctcttcgttctcctcggcgtcatcatagcaaccctcttcttcacattcgtcccttcctcttccccttccgcttcctcctcaagcgtttcgtacgagtctctcccgatctcctacttcgagcgcgagtcaaagattccggcgtaccaccaccgcgtggctgcggcggtgcattcggtggggaaggtgccgctggggattaagaggaagggactccggatcgtagtgacgggcggcgcggggttcgtggggtcgcacctggtggatcggttgattgcgagaggggacagcgtgatcgtggtggacaatttcttcacgggaagaaaagagaacgtgatgcaccattttgggaaccctagattcgagctcatccgacacgacgtcgttgagcctctcctgctcgaggttgatcagatctaccatctggcttgccctgcttcccctgtccactacaagttcaaccccgtcaagactatcaagacgaatgtggtggggaccttgaacatgctggggcttgcaaagagagtgggcgcgaggttcttgttgacgagtaccagtgaggtttatggagatcctctgcagcaccctcagaaggagacttactggggcaacgtcaacccaattggtgtccgaagctgctacgacgagggaaagcgtacggccgagacgttgaccatggactaccaccgaggtgccggcgtcgaggttagaattgctagaatctttaacacctacgggcctagaatgtgcttagatgatggtcgtgttgttagtaacttcgttgctcaggcactaaggaaggagcctctgaccgtttatggagatgggaagcagacaagaagtttccaatatgtctctgatttggtggagggtctaatccgccttatggaaggagaacacgtgggacctttcaatcttggaaatccgggagaatttacaatgctagaacttgccaaggtggttcaagaaacaatcgaccctgatgctaggatagagtacaggccgaacacagaggatgatccgcacaagagaaagcctgatataagtagggctaaggatcaacttggctgggaattcaaggttgatctgcgcaagggcctcccactaatggtttctgacttccggcaacgcatttttggtgaccagaaggaaaaggcaaccgtagcctaattcttgcgtgtcatgtatcttagagtgagaaagggatataagataataatagttcgaggataaccctggcccgccaaaggtcccattagtcatcacaggattatatgagctctactaaaatgtccctttgtcgtttgttctccgtcaatctttacatgccgggttatttaccctctttcaagattgaccaccacccctgattccatttttcaaattcctgccatctatattctatttctttctctttttttttggatgtaattggtatgtgcaacagtgcaagaggctacagttatagttatttcaacattttaccttctcacttgttctatttttatttaaacttcattacttctccacttatttgcaatttgatctctgaatttgtagagtttgctacactcttgttgaaattattactatcatcatcattcgttgttt

SEQ ID NO: 5667 - protein, 431 aa, Glycine max
  peptide (1)..(431): Ceres Seq. ID no. 15176912
  misc_feature (116)..(420): Pfam Name: Pfam Description:  NAD dependent epimerase/dehydratase family
  misc_feature (1)..(431): NCBI GI NO: 15229334 NR Description: NAD-dependent epimerase/dehydratase family
  misc_feature (1)..(431): NCBI GI NO: 2129578 NR Description: dTDP-glucose 4-6-dehydratase homolog D18 -Arabidopsis thaliana
  misc_feature (1)..(429): NCBI GI NO: 15227109 NR Description: NAD-dependent epimerase/dehydratase family
  misc_feature (8)..(427): NCBI GI NO: 17473549 NR Description: dTDP-glucose 4-6-dehydratase-like protein
  misc_feature (8)..(427): NCBI GI NO: 11270116 NR Description: dTDP-glucose 4-6-dehydratase-like protein -Arabidopsis thaliana
  misc_feature (8)..(427): NCBI GI NO: 30693847 NR Description: NAD-dependent epimerase/dehydratase family
  misc_feature (34)..(423): NCBI GI NO: 25396402 NR Description: UDP-glucuronic acid decarboxylase
  misc_feature (203)..(423): NCBI GI NO: 34908082 NR Description: P0506B12.30
  misc_feature (34)..(161): NCBI GI NO: 34908082 NR Description: P0506B12.30
  misc_feature (111)..(425): NCBI GI NO: 13591616 NR Description: UDP-D-glucuronate carboxy-lyase [Pisum sativum]
MGSELIFRGHETQPVDDAYSPKPHKPWLTVTRPIHYMLREQRLLFVLLGVIIATLFFTFVPSSSPSASSSSVSYESLPISYFERESKIPAYHHRVAAAVHSVGKVPLGIKRKGLRIVVTGGAGFVGSHLVDRLIARGDSVIVVDNFFTGRKENVMHHFGNPRFELIRHDVVEPLLLEVDQIYHLACPASPVHYKFNPVKTIKTNVVGTLNMLGLAKRVGARFLLTSTSEVYGDPLQHPQKETYWGNVNPIGVRSCYDEGKRTAETLTMDYHRGAGVEVRIARIFNTYGPRMCLDDGRVVSNFVAQALRKEPLTVYGDGKQTRSFQYVSDLVEGLIRLMEGEHVGPFNLGNPGEFTMLELAKVVQETIDPDARIEYRPNTEDDPHKRKPDISRAKDQLGWEFKVDLRKGLPLMVSDFRQRIFGDQKEKATVA

SEQ ID NO: 5668 - protein, 395 aa, Glycine max
  peptide (1)..(395): Ceres Seq. ID no. 15176913
  misc_feature (80)..(384): Pfam Name: Pfam Description:  NAD dependent epimerase/dehydratase family
  misc_feature (1)..(395): NCBI GI NO: 15229334 NR Description: NAD-dependent epimerase/dehydratase family
  misc_feature (1)..(395): NCBI GI NO: 2129578 NR Description: dTDP-glucose 4-6-dehydratase homolog D18 -Arabidopsis thaliana
  misc_feature (1)..(393): NCBI GI NO: 15227109 NR Description: NAD-dependent epimerase/dehydratase family
  misc_feature (1)..(391): NCBI GI NO: 17473549 NR Description: dTDP-glucose 4-6-dehydratase-like protein
  misc_feature (1)..(391): NCBI GI NO: 11270116 NR Description: dTDP-glucose 4-6-dehydratase-like protein -Arabidopsis thaliana
  misc_feature (1)..(391): NCBI GI NO: 30693847 NR Description: NAD-dependent epimerase/dehydratase family
  misc_feature (1)..(387): NCBI GI NO: 25396402 NR Description: UDP-glucuronic acid decarboxylase
  misc_feature (167)..(387): NCBI GI NO: 34908082 NR Description: P0506B12.30
  misc_feature (1)..(125): NCBI GI NO: 34908082 NR Description: P0506B12.30
  misc_feature (75)..(389): NCBI GI NO: 13591616 NR Description: UDP-D-glucuronate carboxy-lyase [Pisum sativum]
MLREQRLLFVLLGVIIATLFFTFVPSSSPSASSSSVSYESLPISYFERESKIPAYHHRVAAAVHSVGKVPLGIKRKGLRIVVTGGAGFVGSHLVDRLIARGDSVIVVDNFFTGRKENVMHHFGNPRFELIRHDVVEPLLLEVDQIYHLACPASPVHYKFNPVKTIKTNVVGTLNMLGLAKRVGARFLLTSTSEVYGDPLQHPQKETYWGNVNPIGVRSCYDEGKRTAETLTMDYHRGAGVEVRIARIFNTYGPRMCLDDGRVVSNFVAQALRKEPLTVYGDGKQTRSFQYVSDLVEGLIRLMEGEHVGPFNLGNPGEFTMLELAKVVQETIDPDARIEYRPNTEDDPHKRKPDISRAKDQLGWEFKVDLRKGLPLMVSDFRQRIFGDQKEKATVA

SEQ ID NO: 5669 - protein, 277 aa, Glycine max
  peptide (1)..(277): Ceres Seq. ID no. 15176914
  misc_feature (1)..(266): Pfam Name: Pfam Description:  NAD dependent epimerase/dehydratase family
  misc_feature (1)..(277): NCBI GI NO: 15229334 NR Description: NAD-dependent epimerase/dehydratase family
  misc_feature (1)..(277): NCBI GI NO: 2129578 NR Description: dTDP-glucose 4-6-dehydratase homolog D18 -Arabidopsis thaliana
  misc_feature (1)..(275): NCBI GI NO: 15227109 NR Description: NAD-dependent epimerase/dehydratase family
  misc_feature (1)..(273): NCBI GI NO: 17473549 NR Description: dTDP-glucose 4-6-dehydratase-like protein
  misc_feature (1)..(273): NCBI GI NO: 11270116 NR Description: dTDP-glucose 4-6-dehydratase-like protein -Arabidopsis thaliana
  misc_feature (1)..(273): NCBI GI NO: 30693847 NR Description: NAD-dependent epimerase/dehydratase family
  misc_feature (1)..(269): NCBI GI NO: 25396402 NR Description: UDP-glucuronic acid decarboxylase
  misc_feature (49)..(269): NCBI GI NO: 34908082 NR Description: P0506B12.30
  misc_feature (1)..(271): NCBI GI NO: 13591616 NR Description: UDP-D-glucuronate carboxy-lyase [Pisum sativum]
  misc_feature (1)..(266): NCBI GI NO: 22761003 NR Description: unnamed protein product [Homo sapiens]
MHHFGNPRFELIRHDVVEPLLLEVDQIYHLACPASPVHYKFNPVKTIKTNVVGTLNMLGLAKRVGARFLLTSTSEVYGDPLQHPQKETYWGNVNPIGVRSCYDEGKRTAETLTMDYHRGAGVEVRIARIFNTYGPRMCLDDGRVVSNFVAQALRKEPLTVYGDGKQTRSFQYVSDLVEGLIRLMEGEHVGPFNLGNPGEFTMLELAKVVQETIDPDARIEYRPNTEDDPHKRKPDISRAKDQLGWEFKVDLRKGLPLMVSDFRQRIFGDQKEKATVA

SEQ ID NO: 5670 - DNA, 1433 bp, Glycine max
  misc_feature (1)..(1433): Ceres Seq. ID no. 15176379
aaaaaataaggatgtaaatattttgttttgggtactgtgatatattgtctaatggataatttggttttatttacaaaaatattggcttatgccattaaaaattgtgcttatctattaggtgtactaaatgtctaaatcatattgaaattgatttttggatctttacttggatcaagaacattgaattatgaagtaatgacttaacttaatcaatagttgatgaccctaaggaataattttatgagtccttctgaagggtgtttaaagtgacttttcctcttagaattaagcggagtttattaaatgaatttctgtaaggaatcaaaagatgcatgtgcaatatcttttatgctagtatgtccctatagaattctaaggaaatgcaaagtagtgaatttaaatgttctatgttatagaaacaaagaaagagtgagaaaaactgcatttttatgctctttcatctcttgctccctatccttgccatctatgatcccaaaattctatacaatcttcgggaacgaatttcagtaagatagttcaactctactacatcttttgcacaatcgagcaacatatgcataattgcataactgaacaagcaaaatgagattgtcgtgcttgacactgttggcatttggcaccctgtaaatacaagaaagatgacaacaagatgggtgatattaatccaatggtgctattggcatttgagaatctttatcatgtgctgtaaatacctgcatgtgctttgaccagaataatatgatttgtgttgggaaagcaaaattggctaactagccaatgatcctgaaaaagacatacaatgtagtggaggaaaattgtgtgggtttttatcaatatattattggatgcagttaaatggtctaaatatctacagcactgtaggttgattatgtttgtccctgggtcatttatgttaactatttggtcttcttttcatccagattacttaagaaagatcatcgtgcagggaagatcatccaagtctactaaggttggagatattatgactgaagagaacaaacttatcacagtcacccctgataccaaagttctgcaggctatgcaactgatgactgacaatagaatcaggcacatccccgtgattgatgaaaaagggatgattggcatggtgtccattggagatgtggttcgtgctgtggtgcgtgagcaccgacaagaggtcgagcgcttgaatgctttcatacaaggtggttattagataatgatgatgaaaaattctcaagggcactcaagctaatttgaattatgtaataagcttgagtgcttgtaaatatgttatggccacagagccttcttgtttgctttcctgtaatttcagttttatgggcattaacccgatggagtagcagcatgttaataataacaactggatgcagtttgaatttgttttg

SEQ ID NO: 5671 - protein, 109 aa, Glycine max
  peptide (1)..(109): Ceres Seq. ID no. 15176380
  misc_feature (39)..(91): Pfam Name: Pfam Description:  CBS domain
  misc_feature (1)..(109): NCBI GI NO: 15238284 NR Description: CBS domain containing protein
  misc_feature (1)..(109): NCBI GI NO: 29788876 NR Description: unknown protein
  misc_feature (18)..(109): NCBI GI NO: 34913008 NR Description: P0663E10.18
  misc_feature (18)..(98): NCBI GI NO: 9188545 NR Description: inosine-5'-monophosphate dehydrogenase
  misc_feature (18)..(106): NCBI GI NO: 34499375 NR Description: conserved hypothetical protein
  misc_feature (18)..(105): NCBI GI NO: 21243772 NR Description: conserved hypothetical protein
  misc_feature (18)..(105): NCBI GI NO: 21232293 NR Description: conserved hypothetical protein
  misc_feature (1)..(105): NCBI GI NO: 28850322 NR Description: similar to putative protein; protein id:At5g10860
  misc_feature (18)..(107): NCBI GI NO: 22984734 NR Description: hypothetical protein [Burkholderia fungorum]
  misc_feature (18)..(108): NCBI GI NO: 16126862 NR Description: CBS domain protein [Caulobacter crescentus CB15]
MFVPGSFMLTIWSSFHPDYLRKIIVQGRSSKSTKVGDIMTEENKLITVTPDTKVLQAMQLMTDNRIRHIPVIDEKGMIGMVSIGDVVRAVVREHRQEVERLNAFIQGGY

SEQ ID NO: 5672 - protein, 102 aa, Glycine max
  peptide (1)..(102): Ceres Seq. ID no. 15176381
  misc_feature (32)..(84): Pfam Name: Pfam Description:  CBS domain
  misc_feature (1)..(102): NCBI GI NO: 15238284 NR Description: CBS domain containing protein
  misc_feature (1)..(102): NCBI GI NO: 29788876 NR Description: unknown protein
  misc_feature (11)..(102): NCBI GI NO: 34913008 NR Description: P0663E10.18
  misc_feature (11)..(91): NCBI GI NO: 9188545 NR Description: inosine-5'-monophosphate dehydrogenase
  misc_feature (11)..(99): NCBI GI NO: 34499375 NR Description: conserved hypothetical protein
  misc_feature (11)..(98): NCBI GI NO: 21243772 NR Description: conserved hypothetical protein
  misc_feature (11)..(98): NCBI GI NO: 21232293 NR Description: conserved hypothetical protein
  misc_feature (1)..(98): NCBI GI NO: 28850322 NR Description: similar to putative protein; protein id:At5g10860
  misc_feature (11)..(100): NCBI GI NO: 22984734 NR Description: hypothetical protein [Burkholderia fungorum]
  misc_feature (11)..(101): NCBI GI NO: 16126862 NR Description: CBS domain protein [Caulobacter crescentus CB15]
MLTIWSSFHPDYLRKIIVQGRSSKSTKVGDIMTEENKLITVTPDTKVLQAMQLMTDNRIRHIPVIDEKGMIGMVSIGDVVRAVVREHRQEVERLNAFIQGGY

SEQ ID NO: 5673 - protein, 75 aa, Glycine max
  peptide (1)..(75): Ceres Seq. ID no. 15176382
MNFCKESKDACAISFMLVCPYRILRKCKVVNLNVLCYRNKERVRKTAFLCSFISCSLSLPSMIPKFYTIFGNEFQ

SEQ ID NO: 5674 - DNA, 2571 bp, Glycine max
  misc_feature (1)..(2571): Ceres Seq. ID no. 14313875
aacacaacacgcgccctacccttcatcaattgcttctttctcactcactgaaactcaacccttactttgcaattgcattcccagattcatttcagacaacgcaaccttaactttcccacatacgctaactcaataaccctttcattccgttcattgctctttccagattctattttgcctcttagaagttggaatagagaactagagctgggtggatggaggatgacaagaggaggaggaagaacaagaagaagaagaacaagcagaacaagaatgtggaaaatggggtgggagaaactgctaatagggatcagaatctgctgagtaatggaaaggatgagcatactaatctttccaagactgcaaatgagcaaagctcgaatgtcgatttgaatggggttggagagacattaagtagggatcacaatctggtaaataatggtaaggatgaacctgctaatctttcaggagtcgctgatgagcaatgcatggatgcagatcggaatggggttgttgaaacccccaatagtgatcaaaatctggtgaaaagtggaaaggatgagaatattccatcattagagtttgcagatgggcaaagtactaatatggattcaaatggtcatccgccaaatggctatatcagaagagacaatcaggaaattaaaagaagagaatgatatacatattcagaaagagactttatcaaaagagacaatcaggaaattaaaggcagaaaatgatatgcacattcagaaggaggccataatggaagagacaatcagaaaattgacagaacaaaatgacatgcatatgcagaaagagattgcatcagaagagactatcagaaaattaaaagaaaaacatgatatggatgttcagaaagaggccatatcagaagatacaattagaaatttgaaagaaaaaaatgatgtgcacgtgcagaaagaggagacaataaaaaaattgaaagaagaaaatgaagtgcacattcaggaagaggccatatcaaaggagacaattaaaaatctcaaagaagaaaatgataaactacttcagaaagtggtttccttggaagaggtcatcaataatttacaaactgataatgaattgcagacacaaaaacatactagtctggaaatgagaattgcacaattgcaaagtgagaataattccttacttcaaaaagaggcgagtgattatgttttccctttaaaaagattaggaatcattgattttgagaatattatacatccagatatttaatagtatatcatatgtaggctggattggtggaaaaaactaatcagttgctgaatgaaaaggtagttttgagcctgaaagctgagagtttagagagaaaaataaatcttctggagaatgagttgagttcttttagtgagaaagaggttggacttgaaacaagaattgcacaattgcagagtgagaataattccttacttcaaaaagaggctacattggtggaaagaaccaatcaattgctgaatgaaaaggcagttttgagcctgaaaggggagagtttagaacaaaaaatatatcttctggaaagcgatttgaattctttagtcaagaaggagaattcaactaaagaaactatttcaaacctgaatggaaacattgctgtgctacaagcgcaggtggaagaattggaggagtccaggaataatctttttctagaaaaccagcaattgagggaaaaagtgtcgagtcttcagtcaacggtccaaaatcatgaaaacagtaacacttcttcctgctcatgggatgcatctgtaaaggatcttgcttctgaaaacgaggacttgaagtctgaaattgaagcagcctttacgttggtggagaaattgatggctgaaaatgcagaacttgttgagaaggtcaccgagttatgtgttgagctggatcaccgaagtgcagaagtcggacattctggagtcactgaatccaatgggatgactgaatttgttaaacctactggtgttgccattcctctaccagaatctgctgagtatgcgtctgtatcatcccccaagttgaattcattggaagagacttcagtgaaggataatggtaactctaatgatgctaagcatgttgttggggtaacgtcaaactcgtcgttggtatcggctgatgacgctggagaaatcgtgcaaattccattggatgataatgaaatacaagatatagagttgcaggatgctaagaatgtggaaaatgatgctgatgctgtgccaatcacagatgctccgcttatcggtgctccatttcgtttgatatcatttgttgctaattttgttagtggtgctgacttggttaaccaaagctcttcaaacactgctcgttgacttggttgaccaaagctctgttttttttggctggcagtcttgaacatacaataacctcacttacattaggcagaataccaatataggttggcctaatttgggccattttaatgtttgtatgttaattctttgaacacggaaatattgtactggggaaaagcatatagttttatgtgttcttacttcatattgctttcacttttgg

SEQ ID NO: 5675 - protein, 224 aa, Glycine max
  peptide (1)..(224): Ceres Seq. ID no. 14313876
  misc_feature (18)..(186): Pfam Name: Pfam Description:  Myosin tail
  misc_feature (13)..(198): NCBI GI NO: 18447644 NR Description: SD05887p [Drosophila melanogaster]
  misc_feature (13)..(198): NCBI GI NO: 22024255 NR Description: CG3493-PA [Drosophila melanogaster]
  misc_feature (19)..(169): NCBI GI NO: 15224904 NR Description: hypothetical protein [Arabidopsis thaliana]
  misc_feature (36)..(213): NCBI GI NO: 15224904 NR Description: hypothetical protein [Arabidopsis thaliana]
  misc_feature (89)..(202): NCBI GI NO: 15224904 NR Description: hypothetical protein [Arabidopsis thaliana]
  misc_feature (20)..(205): NCBI GI NO: 1903280 NR Description: USO1 [Saccharomyces cerevisiae]
  misc_feature (14)..(196): NCBI GI NO: 37534452 NR Description: putative centromere protein
  misc_feature (20)..(205): NCBI GI NO: 677198 NR Description: putative
  misc_feature (28)..(209): NCBI GI NO: 1903280 NR Description: USO1 [Saccharomyces cerevisiae]
  misc_feature (20)..(205): NCBI GI NO: 137175 NR Description: Intracellular protein transport protein USO1
MGKVLIWIQMVIRQMAISEETIRKLKEENDIHIQKETLSKETIRKLKAENDMHIQKEAIMEETIRKLTEQNDMHMQKEIASEETIRKLKEKHDMDVQKEAISEDTIRNLKEKNDVHVQKEETIKKLKEENEVHIQEEAISKETIKNLKEENDKLLQKVVSLEEVINNLQTDNELQTQKHTSLEMRIAQLQSENNSLLQKEASDYVFPLKRLGIIDFENIIHPDI

SEQ ID NO: 5676 - protein, 215 aa, Glycine max
  peptide (1)..(215): Ceres Seq. ID no. 14313877
  misc_feature (9)..(177): Pfam Name: Pfam Description:  Myosin tail
  misc_feature (4)..(189): NCBI GI NO: 18447644 NR Description: SD05887p [Drosophila melanogaster]
  misc_feature (4)..(189): NCBI GI NO: 22024255 NR Description: CG3493-PA [Drosophila melanogaster]
  misc_feature (10)..(160): NCBI GI NO: 15224904 NR Description: hypothetical protein [Arabidopsis thaliana]
  misc_feature (27)..(204): NCBI GI NO: 15224904 NR Description: hypothetical protein [Arabidopsis thaliana]
  misc_feature (80)..(193): NCBI GI NO: 15224904 NR Description: hypothetical protein [Arabidopsis thaliana]
  misc_feature (11)..(196): NCBI GI NO: 1903280 NR Description: USO1 [Saccharomyces cerevisiae]
  misc_feature (5)..(187): NCBI GI NO: 37534452 NR Description: putative centromere protein
  misc_feature (11)..(196): NCBI GI NO: 677198 NR Description: putative
  misc_feature (19)..(200): NCBI GI NO: 1903280 NR Description: USO1 [Saccharomyces cerevisiae]
  misc_feature (11)..(196): NCBI GI NO: 137175 NR Description: Intracellular protein transport protein USO1
MVIRQMAISEETIRKLKEENDIHIQKETLSKETIRKLKAENDMHIQKEAIMEETIRKLTEQNDMHMQKEIASEETIRKLKEKHDMDVQKEAISEDTIRNLKEKNDVHVQKEETIKKLKEENEVHIQEEAISKETIKNLKEENDKLLQKVVSLEEVINNLQTDNELQTQKHTSLEMRIAQLQSENNSLLQKEASDYVFPLKRLGIIDFENIIHPDI

SEQ ID NO: 5677 - protein, 210 aa, Glycine max
  peptide (1)..(210): Ceres Seq. ID no. 14313878
  misc_feature (4)..(172): Pfam Name: Pfam Description:  Myosin tail
  misc_feature (1)..(184): NCBI GI NO: 18447644 NR Description: SD05887p [Drosophila melanogaster]
  misc_feature (1)..(184): NCBI GI NO: 22024255 NR Description: CG3493-PA [Drosophila melanogaster]
  misc_feature (5)..(155): NCBI GI NO: 15224904 NR Description: hypothetical protein [Arabidopsis thaliana]
  misc_feature (22)..(199): NCBI GI NO: 15224904 NR Description: hypothetical protein [Arabidopsis thaliana]
  misc_feature (75)..(188): NCBI GI NO: 15224904 NR Description: hypothetical protein [Arabidopsis thaliana]
  misc_feature (6)..(191): NCBI GI NO: 1903280 NR Description: USO1 [Saccharomyces cerevisiae]
  misc_feature (1)..(182): NCBI GI NO: 37534452 NR Description: putative centromere protein
  misc_feature (6)..(191): NCBI GI NO: 677198 NR Description: putative
  misc_feature (14)..(195): NCBI GI NO: 1903280 NR Description: USO1 [Saccharomyces cerevisiae]
  misc_feature (6)..(191): NCBI GI NO: 137175 NR Description: Intracellular protein transport protein USO1
MAISEETIRKLKEENDIHIQKETLSKETIRKLKAENDMHIQKEAIMEETIRKLTEQNDMHMQKEIASEETIRKLKEKHDMDVQKEAISEDTIRNLKEKNDVHVQKEETIKKLKEENEVHIQEEAISKETIKNLKEENDKLLQKVVSLEEVINNLQTDNELQTQKHTSLEMRIAQLQSENNSLLQKEASDYVFPLKRLGIIDFENIIHPDI

SEQ ID NO: 5678 - DNA, 2005 bp, Glycine max
  misc_feature (1)..(2005): Ceres Seq. ID no. 15172108
tatttttttaatataaaataaaatattatattttaaatatatttattattttttcagcttgctgcactaaatcagttaagaaatatatttggactgggtaaacgtgaagccgaggcgatttcacttgatgttacgtcgaaggtatatcgcaaacgacttgcacaggctgttgcagatggtgagttagaaatggcagatagcaaagcagccttccttcaaaatctatgtgatgaacttcattttgatccacaaaaggccagtgaacttcatgaagaaatttatcggcaaaagcttcagaaatgtgtagctgatggggagctcaatgaggaagatgttgctgctttgttgaggttgcgtgtaatgctctgcataccgcaacagattgttgaaacagctcattcagatatatgtggcagtttgtttgaaaaggttgtgaaggaggcaatcgcatcaggggttgatggatatgatgctgaaatccagaaatcagtaagaaaagcagcacatggcctgcgacttactagggaggttgctatttctattgcgagcaaggcggtaaggaagatttttattaattacataaaacgtgcgcgggcagctggaaatcgtacagagtctgcgaaagaactgaagaagatgatagccttcaacaccttagttgtaactaatttggtggaggacattaaaggggagtcagctgatatttcaactgaagaacctgtgaaagaggacattacacaaactgacgacgaagaatgggaatcacttcagacactcaagaaaataagaccgaacaaagaacttacggaaaagttgggaaaacctggtcagacagaaattactctgaaagatgatcttcctgaaagggataggactgatctttacaagacatacttactttattgtctaactggtgaagtgacaagggttccgttcggtgctcagatcactactaagaaggatgattctgagtatcttcttctaaatcagcttggtgggatcctgggattgagtagtcaagaaatagtggaagtgcacaggggtctagctgagcaagcttttaggcaacaggctgaggtaattttagctgatggacagttgacaaaggccagggtggagcagcttaataacctccagaagcaagtaggcttacctcaagaatatgctcagaaaataatcaagagtataaccactacaaaaatggcagctgccattgaaactgctgtaactcaagggaggctcaatatgaagcagattagggaactcaaggaagctaatgttgatttagacagtatggtatccgagaacttgagagaaaccctcttcaaaaaaactgttgatgacattttctcatccggtacaggagagtttgacaatgaggaagtatatgaaaaaatcccatcagatctcaacattaacaaagagaaggcaagaggtgttgttcatgagcttgcaaaaagtagactatctaactcattggttcaggccgtgtctctactaagacagagaaatcacaagggagtggtttcttcactcaatgacttgttggcatgtgacaaagcagtaccctcacagccagtttcatgggaagtgccagaggagcttgctgatctatacaccatatacttgaagagtgatccaactcctgagaatttgtctcgtttgcagtatctgttgggtataaatgattcaacagctgctgctcttagggagatgggagatagattactcaataccactgctgaggaagagaagtttgtattctagtgttgtgataaaatgtttggcattttaggcatactagagatgcttcaagtccccttaattttgccattttttatttgccattttgtttaacggtagcagaaaaagaatatcaccatgtataaactttggaatagagatgagtgcagtgctgaaatcttagataatattttgtttgagatagttaaattaatcaattgttattttgtatgaatgaaaataagttctcataatcgtgaac

SEQ ID NO: 5679 - protein, 525 aa, Glycine max
  peptide (1)..(525): Ceres Seq. ID no. 15172109
  misc_feature (1)..(525): NCBI GI NO: 7488813 NR Description: import intermediate-associated 100K proteinprecursor
  misc_feature (1)..(525): NCBI GI NO: 7523692 NR Description: Putative chloroplast inner envelope protein
  misc_feature (1)..(525): NCBI GI NO: 15221009 NR Description: chloroplast inner envelope protein -related
  misc_feature (1)..(525): NCBI GI NO: 20466768 NR Description: chloroplast inner envelope protein, putative
  misc_feature (1)..(525): NCBI GI NO: 1498315 NR Description: IAP100
  misc_feature (1)..(525): NCBI GI NO: 37535626 NR Description: putative chloroplast inner envelope protein
  misc_feature (1)..(453): NCBI GI NO: 13812316 NR Description: IAP100 protein [Guillardia theta]
MADSKAAFLQNLCDELHFDPQKASELHEEIYRQKLQKCVADGELNEEDVAALLRLRVMLCIPQQIVETAHSDICGSLFEKVVKEAIASGVDGYDAEIQKSVRKAAHGLRLTREVAISIASKAVRKIFINYIKRARAAGNRTESAKELKKMIAFNTLVVTNLVEDIKGESADISTEEPVKEDITQTDDEEWESLQTLKKIRPNKELTEKLGKPGQTEITLKDDLPERDRTDLYKTYLLYCLTGEVTRVPFGAQITTKKDDSEYLLLNQLGGILGLSSQEIVEVHRGLAEQAFRQQAEVILADGQLTKARVEQLNNLQKQVGLPQEYAQKIIKSITTTKMAAAIETAVTQGRLNMKQIRELKEANVDLDSMVSENLRETLFKKTVDDIFSSGTGEFDNEEVYEKIPSDLNINKEKARGVVHELAKSRLSNSLVQAVSLLRQRNHKGVVSSLNDLLACDKAVPSQPVSWEVPEELADLYTIYLKSDPTPENLSRLQYLLGINDSTAAALREMGDRLLNTTAEEEKFVF

SEQ ID NO: 5680 - protein, 468 aa, Glycine max
  peptide (1)..(468): Ceres Seq. ID no. 15172110
  misc_feature (1)..(468): NCBI GI NO: 7488813 NR Description: import intermediate-associated 100K proteinprecursor
  misc_feature (1)..(468): NCBI GI NO: 7523692 NR Description: Putative chloroplast inner envelope protein
  misc_feature (1)..(468): NCBI GI NO: 20466768 NR Description: chloroplast inner envelope protein, putative
  misc_feature (1)..(468): NCBI GI NO: 15221009 NR Description: chloroplast inner envelope protein -related
  misc_feature (1)..(468): NCBI GI NO: 1498315 NR Description: IAP100
  misc_feature (1)..(468): NCBI GI NO: 37535626 NR Description: putative chloroplast inner envelope protein
  misc_feature (1)..(396): NCBI GI NO: 13812316 NR Description: IAP100 protein [Guillardia theta]
MLCIPQQIVETAHSDICGSLFEKVVKEAIASGVDGYDAEIQKSVRKAAHGLRLTREVAISIASKAVRKIFINYIKRARAAGNRTESAKELKKMIAFNTLVVTNLVEDIKGESADISTEEPVKEDITQTDDEEWESLQTLKKIRPNKELTEKLGKPGQTEITLKDDLPERDRTDLYKTYLLYCLTGEVTRVPFGAQITTKKDDSEYLLLNQLGGILGLSSQEIVEVHRGLAEQAFRQQAEVILADGQLTKARVEQLNNLQKQVGLPQEYAQKIIKSITTTKMAAAIETAVTQGRLNMKQIRELKEANVDLDSMVSENLRETLFKKTVDDIFSSGTGEFDNEEVYEKIPSDLNINKEKARGVVHELAKSRLSNSLVQAVSLLRQRNHKGVVSSLNDLLACDKAVPSQPVSWEVPEELADLYTIYLKSDPTPENLSRLQYLLGINDSTAAALREMGDRLLNTTAEEEKFVF

SEQ ID NO: 5681 - protein, 376 aa, Glycine max
  peptide (1)..(376): Ceres Seq. ID no. 15172111
  misc_feature (1)..(376): NCBI GI NO: 7488813 NR Description: import intermediate-associated 100K proteinprecursor
  misc_feature (1)..(376): NCBI GI NO: 7523692 NR Description: Putative chloroplast inner envelope protein
  misc_feature (1)..(376): NCBI GI NO: 20466768 NR Description: chloroplast inner envelope protein, putative
  misc_feature (1)..(376): NCBI GI NO: 15221009 NR Description: chloroplast inner envelope protein -related
  misc_feature (1)..(376): NCBI GI NO: 1498315 NR Description: IAP100
  misc_feature (1)..(376): NCBI GI NO: 37535626 NR Description: putative chloroplast inner envelope protein
  misc_feature (1)..(304): NCBI GI NO: 13812316 NR Description: IAP100 protein [Guillardia theta]
MIAFNTLVVTNLVEDIKGESADISTEEPVKEDITQTDDEEWESLQTLKKIRPNKELTEKLGKPGQTEITLKDDLPERDRTDLYKTYLLYCLTGEVTRVPFGAQITTKKDDSEYLLLNQLGGILGLSSQEIVEVHRGLAEQAFRQQAEVILADGQLTKARVEQLNNLQKQVGLPQEYAQKIIKSITTTKMAAAIETAVTQGRLNMKQIRELKEANVDLDSMVSENLRETLFKKTVDDIFSSGTGEFDNEEVYEKIPSDLNINKEKARGVVHELAKSRLSNSLVQAVSLLRQRNHKGVVSSLNDLLACDKAVPSQPVSWEVPEELADLYTIYLKSDPTPENLSRLQYLLGINDSTAAALREMGDRLLNTTAEEEKFVF

SEQ ID NO: 5682 - DNA, 1761 bp, Glycine max
  misc_feature (1)..(1761): Ceres Seq. ID no. 15172020
gacagttctattgggaaagttttcaagttcacacatgttctggctgcctccttcgccggtttagttgccgccgccgccgcctcaagctaccggcgggcaccgtccacggtggtgggagagcagaagaaggttattcccgagctacgtaggacggaatctgggcgtctcggggagatcgaaaagttctcccactatgttgcaaggcaaatggggtttgaagatgctgatgaggttccagagctatgcatattggcccaagagtatttgaaaaaatccaaagggtgcgatgaaagcatctttgaatatatttccagtggcaatgtggagaacactgattctctatatgcgaaattagttgaggagttagagagatgcatcctcagttatttagcatttcactggaaccaagctacatctgtcattagtcaggttttgggtgtggagtctcagcagaaaaaaaagctgaagggaattctattggcagctacaagggaacagaggtttgatagagtaaccaagaatctgaaagtgacaagagtgatctctactttggtggaagagatgaaagcaataaatggtgactcgcaatgtacagaagtgatggtgcccatggcccacagtgagaggagtccagtcctgctgttcatggggggtggcatgggagctggaaagagcactgttcttaaagacattcttaaagaatcattttggtcaggagcagcttcaaatgctgtggtggttgaggcagatgctttcaaggagagtgacgtcatatatagagcccttagctccagaggtcaccatgatgacatgctccaaactgctgaattggtgcatcaatcttccactgatgctgcatcatctctgctggtgacagctctaaatgagggtcgagatgtgatcatggatggtaccttatcatgggaaccatttgtggagcaaactattgctatggcaagaaatgttcacaaacacaggtaccgaatgggggtagggtataaagtagctgaagatgggacaattactgaaaattactgggagcaagtaaatgatgcagaagagcatcaatcagaggaaatttctaatggagaagcacacacccaaaagccttacagaattgagctagttggtgtggtttgtgatggctatcttgctgttgttagaggcattaggagagctattatgacagggagggcagtgagagtgaattcacaactgaaatctcacaaaagatttgctaatgcatttccaagatattgcaaacttgttgataatgccagactctattgcacaaatgctgttggtggtccaccaaagcttatagggcggaaggatggtgatcacaatctactagtggatcgtgaagagatcaagtgcttggaaacgttaggcagtttgaatgctggagctgattccatctacgaacttcacaaagaacccagccccataatggaacctggttctgtttggaatgatatagttatgtcaccttcaaggccaagtgatcaaaaagaattgaaggaatctattcagaaaatagagaaatccatccgaaaaatgtaaccaatattgttgcctgatacgttggagcagtatttggctatctctggaatatatcgtgttttgttctatatctttaatcgtatgattttacttgacaaggaagattattgtgtcgttttcttggtatctatatgtaaagtgaaatgcttggaacatatattatgtaatatactcttgagttttgagcatatttttttt

SEQ ID NO: 5683 - protein, 520 aa, Glycine max
  peptide (1)..(520): Ceres Seq. ID no. 15172021
  misc_feature (2)..(516): NCBI GI NO: 99733 NR Description: hypothetical protein H1flk - Arabidopsis thaliana
  misc_feature (43)..(516): NCBI GI NO: 15219698 NR Description: expressed protein [Arabidopsis thaliana]
  misc_feature (21)..(515): NCBI GI NO: 15222183 NR Description: hypothetical protein [Arabidopsis thaliana]
  misc_feature (10)..(515): NCBI GI NO: 15224537 NR Description: hypothetical protein [Arabidopsis thaliana]
  misc_feature (10)..(515): NCBI GI NO: 28207050 NR Description: hypothetical protein [Arabidopsis thaliana]
  misc_feature (10)..(515): NCBI GI NO: 28207052 NR Description: hypothetical protein [Arabidopsis thaliana]
  misc_feature (228)..(510): NCBI GI NO: 34909990 NR Description: P0490D09.19
  misc_feature (68)..(164): NCBI GI NO: 34909990 NR Description: P0490D09.19
  misc_feature (243)..(515): NCBI GI NO: 1076336 NR Description: hypothetical protein H1
  misc_feature (244)..(515): NCBI GI NO: 388260 NR Description: H1-1flk [Arabidopsis thaliana]
DSSIGKVFKFTHVLAASFAGLVAAAAASSYRRAPSTVVGEQKKVIPELRRTESGRLGEIEKFSHYVARQMGFEDADEVPELCILAQEYLKKSKGCDESIFEYISSGNVENTDSLYAKLVEELERCILSYLAFHWNQATSVISQVLGVESQQKKKLKGILLAATREQRFDRVTKNLKVTRVISTLVEEMKAINGDSQCTEVMVPMAHSERSPVLLFMGGGMGAGKSTVLKDILKESFWSGAASNAVVVEADAFKESDVIYRALSSRGHHDDMLQTAELVHQSSTDAASSLLVTALNEGRDVIMDGTLSWEPFVEQTIAMARNVHKHRYRMGVGYKVAEDGTITENYWEQVNDAEEHQSEEISNGEAHTQKPYRIELVGVVCDGYLAVVRGIRRAIMTGRAVRVNSQLKSHKRFANAFPRYCKLVDNARLYCTNAVGGPPKLIGRKDGDHNLLVDREEIKCLETLGSLNAGADSIYELHKEPSPIMEPGSVWNDIVMSPSRPSDQKELKESIQKIEKSIRKM

SEQ ID NO: 5684 - protein, 451 aa, Glycine max
  peptide (1)..(451): Ceres Seq. ID no. 15172022
  misc_feature (1)..(447): NCBI GI NO: 99733 NR Description: hypothetical protein H1flk - Arabidopsis thaliana
  misc_feature (1)..(447): NCBI GI NO: 15219698 NR Description: expressed protein [Arabidopsis thaliana]
  misc_feature (1)..(446): NCBI GI NO: 15222183 NR Description: hypothetical protein [Arabidopsis thaliana]
  misc_feature (1)..(446): NCBI GI NO: 15224537 NR Description: hypothetical protein [Arabidopsis thaliana]
  misc_feature (1)..(446): NCBI GI NO: 28207050 NR Description: hypothetical protein [Arabidopsis thaliana]
  misc_feature (1)..(446): NCBI GI NO: 28207052 NR Description: hypothetical protein [Arabidopsis thaliana]
  misc_feature (159)..(441): NCBI GI NO: 34909990 NR Description: P0490D09.19
  misc_feature (1)..(95): NCBI GI NO: 34909990 NR Description: P0490D09.19
  misc_feature (174)..(446): NCBI GI NO: 1076336 NR Description: hypothetical protein H1
  misc_feature (175)..(446): NCBI GI NO: 388260 NR Description: H1-1flk [Arabidopsis thaliana]
MGFEDADEVPELCILAQEYLKKSKGCDESIFEYISSGNVENTDSLYAKLVEELERCILSYLAFHWNQATSVISQVLGVESQQKKKLKGILLAATREQRFDRVTKNLKVTRVISTLVEEMKAINGDSQCTEVMVPMAHSERSPVLLFMGGGMGAGKSTVLKDILKESFWSGAASNAVVVEADAFKESDVIYRALSSRGHHDDMLQTAELVHQSSTDAASSLLVTALNEGRDVIMDGTLSWEPFVEQTIAMARNVHKHRYRMGVGYKVAEDGTITENYWEQVNDAEEHQSEEISNGEAHTQKPYRIELVGVVCDGYLAVVRGIRRAIMTGRAVRVNSQLKSHKRFANAFPRYCKLVDNARLYCTNAVGGPPKLIGRKDGDHNLLVDREEIKCLETLGSLNAGADSIYELHKEPSPIMEPGSVWNDIVMSPSRPSDQKELKESIQKIEKSIRKM

SEQ ID NO: 5685 - protein, 333 aa, Glycine max
  peptide (1)..(333): Ceres Seq. ID no. 15172023
  misc_feature (1)..(329): NCBI GI NO: 99733 NR Description: hypothetical protein H1flk - Arabidopsis thaliana
  misc_feature (1)..(329): NCBI GI NO: 15219698 NR Description: expressed protein [Arabidopsis thaliana]
  misc_feature (1)..(328): NCBI GI NO: 15222183 NR Description: hypothetical protein [Arabidopsis thaliana]
  misc_feature (1)..(328): NCBI GI NO: 15224537 NR Description: hypothetical protein [Arabidopsis thaliana]
  misc_feature (1)..(328): NCBI GI NO: 28207050 NR Description: hypothetical protein [Arabidopsis thaliana]
  misc_feature (1)..(328): NCBI GI NO: 28207052 NR Description: hypothetical protein [Arabidopsis thaliana]
  misc_feature (41)..(323): NCBI GI NO: 34909990 NR Description: P0490D09.19
  misc_feature (56)..(328): NCBI GI NO: 1076336 NR Description: hypothetical protein H1
  misc_feature (57)..(328): NCBI GI NO: 388260 NR Description: H1-1flk [Arabidopsis thaliana]
MKAINGDSQCTEVMVPMAHSERSPVLLFMGGGMGAGKSTVLKDILKESFWSGAASNAVVVEADAFKESDVIYRALSSRGHHDDMLQTAELVHQSSTDAASSLLVTALNEGRDVIMDGTLSWEPFVEQTIAMARNVHKHRYRMGVGYKVAEDGTITENYWEQVNDAEEHQSEEISNGEAHTQKPYRIELVGVVCDGYLAVVRGIRRAIMTGRAVRVNSQLKSHKRFANAFPRYCKLVDNARLYCTNAVGGPPKLIGRKDGDHNLLVDREEIKCLETLGSLNAGADSIYELHKEPSPIMEPGSVWNDIVMSPSRPSDQKELKESIQKIEKSIRKM

SEQ ID NO: 5686 - DNA, 1988 bp, Glycine max
  misc_feature (1)..(1988): Ceres Seq. ID no. 12581802
cagctacgtaggcccccccccccgcgatctccctctctctaacgacgccgtttcgatcctctccttctgcttcgtagtaacagagttcaaaccataccatggatgagacttcagctctcatcgaagccattctccgagagcaagaggaagaagaagaagaagctcacagaagaagaaggaaccacaccacaatcaaaaataacaacaacaacaacaacgaatggcaaacggtgtcgtatacaaagcgcaaccgcaaccgcaacaataataggaagcctctcgccgacgacaatttcgccgccgatccttcttcctccgacgtcttcagctccgtccagcgccattccgaggaccgccgcctccggctactcaagtctcagatcgccgccgctgaagcggctgctgcggaagccacaccgagcagatcgaagcggcattccgacaacgaggaggacggcgatgccgagcctgaagccgaggtgaagaaggcgaagcagaagaagccgaagaagccgaaggtgacggtggccgaagctgcttccggaatcagcgccgatgatctcgacgcgtttctcgctgaaattaccgcttcgtatgaatcgcagcaagatattatgctgatgcggtttgctgattacttcggtcgcgcgttctcgtcggtgagtggagctcaattcccatggttgaagacgttcaaagagtctaccgttgcaaagattgttgatatccctcttttgcatatatctgaggatatttacaaaatatcaacggattgggtcagtcatcgatcatatgaagcacttggttcctttgtgctatggtcgttggacagcattcttgcagaccttgccagtcatcaaggagttgttaagggatctaagaaggcagtccagcaatcatcaccgaaatctcaggttgccatgtttgtggttttagcaatggtgcttcgacgaaaacctgatgtcttgattagtttattaccaataataaaggagaataaaaaatatcaaggacaggataaactccctgtcattgtttgggtgataactcaggcttctcaaggagatctagttatggggttgtacttgtgggtatatcttctattgccaatgctgagtgtgaagtctggttgtaatccacagtcaagagacttgatattacagttggttgagagaattatcacatctcctaaagctcgttctatcttgctaaatggggctgtcagaaggggggagcgtgttgtgcccccatgggcacttgattctctattgagagttactttccctcttccttcagcccgggtcaaggccactgaaagatttgaagctgtttatccaacattaagagaagttgcccttgccagttcccctggaagcaaagcaataaagcatcttgcacaacagatactaagctttgcaattaaagctgcaggagaagctaattctgacctatcaaaggaggcaagtgacatttttatttggtgtttgactcagaaccctgaatgttacaagcaatgggattttctttatatggataaccttgaagcaagtgttgttgtattgagaaaactttctggtgaatggaaggaatactttgtcaaacatcctactcttgatcctttgagggaaaatcttaagagcttcagtcaaaagaatgaaaaggcattggctaaggtggatgatggtgctcgccatgcattattgaaggatgcagacaagtactgcaaagtccttttgggacaattgtcacaaggccatggatgcttgaagagcatgatagttctttctgttgtacttgctgttggtgccgttttcatgtcccagaacttgcatttatgggattatagtcaactgacagaaatgttgaatctctcctaggatgagagttatcctgtgatttgctcggtgcttatgcccagtgtggatcacttcagtcaatagtgaggtgtgatgaggaatatttaatttattttagtcttcgattgagcg

SEQ ID NO: 5687 - protein, 592 aa, Glycine max
  peptide (1)..(592): Ceres Seq. ID no. 12581803
  misc_feature (34)..(591): NCBI GI NO: 15223242 NR Description: unknown protein; protein id: At1g70770.1
  misc_feature (42)..(592): NCBI GI NO: 34895518 NR Description: unnamed protein product
  misc_feature (210)..(592): NCBI GI NO: 15220663 NR Description: unknown protein; protein id: At1g23170.1
  misc_feature (74)..(195): NCBI GI NO: 15220663 NR Description: unknown protein; protein id: At1g23170.1
  misc_feature (210)..(418): NCBI GI NO: 25518112 NR Description: T26J12.6 protein - Arabidopsis thaliana
  misc_feature (74)..(195): NCBI GI NO: 25518112 NR Description: T26J12.6 protein - Arabidopsis thaliana
  misc_feature (476)..(576): NCBI GI NO: 25518112 NR Description: T26J12.6 protein - Arabidopsis thaliana
  misc_feature (125)..(577): NCBI GI NO: 6671944 NR Description: unknown protein [Arabidopsis thaliana]
  misc_feature (139)..(577): NCBI GI NO: 18399392 NR Description: expressed protein; protein id: At3g11880
MDETSALIEAILREQEEEEEEAHRRRRNHTTIKNNNNNNNEWQTVSYTKRNRNRNNNRKPLADDNFAADPSSSDVFSSVQRHSEDRRLRLLKSQIAAAEAAAAEATPSRSKRHSDNEEDGDAEPEAEVKKAKQKKPKKPKVTVAEAASGISADDLDAFLAEITASYESQQDIMLMRFADYFGRAFSSVSGAQFPWLKTFKESTVAKIVDIPLLHISEDIYKISTDWVSHRSYEALGSFVLWSLDSILADLASHQGVVKGSKKAVQQSSPKSQVAMFVVLAMVLRRKPDVLISLLPIIKENKKYQGQDKLPVIVWVITQASQGDLVMGLYLWVYLLLPMLSVKSGCNPQSRDLILQLVERIITSPKARSILLNGAVRRGERVVPPWALDSLLRVTFPLPSARVKATERFEAVYPTLREVALASSPGSKAIKHLAQQILSFAIKAAGEANSDLSKEASDIFIWCLTQNPECYKQWDFLYMDNLEASVVVLRKLSGEWKEYFVKHPTLDPLRENLKSFSQKNEKALAKVDDGARHALLKDADKYCKVLLGQLSQGHGCLKSMIVLSVVLAVGAVFMSQNLHLWDYSQLTEMLNLS

SEQ ID NO: 5688 - protein, 420 aa, Glycine max
  peptide (1)..(420): Ceres Seq. ID no. 12581804
  misc_feature (1)..(419): NCBI GI NO: 15223242 NR Description: unknown protein; protein id: At1g70770.1
  misc_feature (1)..(420): NCBI GI NO: 34895518 NR Description: unnamed protein product
  misc_feature (38)..(420): NCBI GI NO: 15220663 NR Description: unknown protein; protein id: At1g23170.1
  misc_feature (1)..(23): NCBI GI NO: 15220663 NR Description: unknown protein; protein id: At1g23170.1
  misc_feature (38)..(246): NCBI GI NO: 25518112 NR Description: T26J12.6 protein - Arabidopsis thaliana
  misc_feature (1)..(23): NCBI GI NO: 25518112 NR Description: T26J12.6 protein - Arabidopsis thaliana
  misc_feature (304)..(404): NCBI GI NO: 25518112 NR Description: T26J12.6 protein - Arabidopsis thaliana
  misc_feature (1)..(405): NCBI GI NO: 6671944 NR Description: unknown protein [Arabidopsis thaliana]
  misc_feature (1)..(405): NCBI GI NO: 18399392 NR Description: expressed protein; protein id: At3g11880
MLMRFADYFGRAFSSVSGAQFPWLKTFKESTVAKIVDIPLLHISEDIYKISTDWVSHRSYEALGSFVLWSLDSILADLASHQGVVKGSKKAVQQSSPKSQVAMFVVLAMVLRRKPDVLISLLPIIKENKKYQGQDKLPVIVWVITQASQGDLVMGLYLWVYLLLPMLSVKSGCNPQSRDLILQLVERIITSPKARSILLNGAVRRGERVVPPWALDSLLRVTFPLPSARVKATERFEAVYPTLREVALASSPGSKAIKHLAQQILSFAIKAAGEANSDLSKEASDIFIWCLTQNPECYKQWDFLYMDNLEASVVVLRKLSGEWKEYFVKHPTLDPLRENLKSFSQKNEKALAKVDDGARHALLKDADKYCKVLLGQLSQGHGCLKSMIVLSVVLAVGAVFMSQNLHLWDYSQLTEMLNLS

SEQ ID NO: 5689 - protein, 418 aa, Glycine max
  peptide (1)..(418): Ceres Seq. ID no. 12581805
  misc_feature (1)..(417): NCBI GI NO: 15223242 NR Description: unknown protein; protein id: At1g70770.1
  misc_feature (1)..(418): NCBI GI NO: 34895518 NR Description: unnamed protein product
  misc_feature (36)..(418): NCBI GI NO: 15220663 NR Description: unknown protein; protein id: At1g23170.1
  misc_feature (1)..(21): NCBI GI NO: 15220663 NR Description: unknown protein; protein id: At1g23170.1
  misc_feature (36)..(244): NCBI GI NO: 25518112 NR Description: T26J12.6 protein - Arabidopsis thaliana
  misc_feature (1)..(21): NCBI GI NO: 25518112 NR Description: T26J12.6 protein - Arabidopsis thaliana
  misc_feature (302)..(402): NCBI GI NO: 25518112 NR Description: T26J12.6 protein - Arabidopsis thaliana
  misc_feature (1)..(403): NCBI GI NO: 6671944 NR Description: unknown protein [Arabidopsis thaliana]
  misc_feature (1)..(403): NCBI GI NO: 18399392 NR Description: expressed protein; protein id: At3g11880
MRFADYFGRAFSSVSGAQFPWLKTFKESTVAKIVDIPLLHISEDIYKISTDWVSHRSYEALGSFVLWSLDSILADLASHQGVVKGSKKAVQQSSPKSQVAMFVVLAMVLRRKPDVLISLLPIIKENKKYQGQDKLPVIVWVITQASQGDLVMGLYLWVYLLLPMLSVKSGCNPQSRDLILQLVERIITSPKARSILLNGAVRRGERVVPPWALDSLLRVTFPLPSARVKATERFEAVYPTLREVALASSPGSKAIKHLAQQILSFAIKAAGEANSDLSKEASDIFIWCLTQNPECYKQWDFLYMDNLEASVVVLRKLSGEWKEYFVKHPTLDPLRENLKSFSQKNEKALAKVDDGARHALLKDADKYCKVLLGQLSQGHGCLKSMIVLSVVLAVGAVFMSQNLHLWDYSQLTEMLNLS

SEQ ID NO: 5690 - DNA, 1227 bp, Glycine max
  misc_feature (1)..(1227): Ceres Seq. ID no. 14304830
agctttaagcttttaacagtcaaaacttactacaacccagatcaattgcagggactaatatggggataacaaaaattttaatcagttataatttttctgttcttgaaaggtaaagtaggacagtggtgtgaaattggtggaaagaaaaaacatcagtgatcttgagtaactaacaatccatccgtgtaaaacgtgattggatttgggtcagtaatttaatgtacgaattacgaggtggcagcgactttaagtgttgaatggtgtgcaacatagaatcgcattggcgcgaacacgatgatgaggtcaaagatagtgttgtttggagactccatcacggagcaatcgatccgagagaatggatggggtgttcctcttgccaatgcctattctcgcagggctgatgtacttgttcgtggttatggtggatacaacactaggtgggctatgttcttactgggccatctcttccctctggactcaactaaaccacctactgctaccacaattttctttggcgctaatgatgcagctttgttaggaagaaccagtgaaaggcaacatgtacctattgaagaattcaaagagaacctcagaaaatttgttcgacacttaaaggattgctcaccaactatggtaattgtgcttattactccacctccacttagtgaggaaggacgcctggcatacgtaagatccgtatatggtgagaatgctactaaaatacctgaaagaacaaatgaagtaactggtcaatatgcaaatgcctgtgttgaggtagcaaaggaaatgggcgtgtggtatatcaatctatggtccaaaatgcaagaaaccgatggctggcaaacaaaatttttgtgggatggattgcacctgacaacagaaggaaatgcagtagtctacgaagaagtgataaatgtgttcaatgaagcagggctttctgctgataacatgccaatggatttccctcaccactcaaaaattgattccaaacatcctgagagagctttccagcagaatgtttgtgatatcccattgtgacactgctttggtctagtctagcaattttataccacgttctatttgatgatctagattttcttccagaactatattcgagtttaatgctttgatgaaaccacggtgaagaatattttttgtaatgacgtctgattcatgtagttcatctcatataataatggaataaaactattgttgttgtaatgcttt

SEQ ID NO: 5691 - protein, 247 aa, Glycine max
  peptide (1)..(247): Ceres Seq. ID no. 14304831
  misc_feature (6)..(205): Pfam Name: Pfam Description:  GDSL-like Lipase/Acylhydrolase
  misc_feature (2)..(240): NCBI GI NO: 15242002 NR Description: GDSL-motif lipase/hydrolase protein
  misc_feature (1)..(239): NCBI GI NO: 37535366 NR Description: putative esterase
  misc_feature (1)..(240): NCBI GI NO: 38454102 NR Description: At5g45920 [Arabidopsis thaliana]
  misc_feature (2)..(240): NCBI GI NO: 15242539 NR Description: GDSL-motif lipase/hydrolase protein
  misc_feature (2)..(239): NCBI GI NO: 34903948 NR Description: OSJNBa0038J17.19
  misc_feature (2)..(247): NCBI GI NO: 13161403 NR Description: CPRD49 [Vigna unguiculata]
  misc_feature (3)..(230): NCBI GI NO: 32352168 NR Description: hypothetical protein
  misc_feature (1)..(235): NCBI GI NO: 27478045 NR Description: similar to hypothetical protein 4833421E05Rik
  misc_feature (1)..(235): NCBI GI NO: 27754071 NR Description: hypothetical protein 4833421E05Rik [Mus musculus]
  misc_feature (2)..(224): NCBI GI NO: 16974631 NR Description: At2g38180/F16M14.11 [Arabidopsis thaliana]
MMRSKIVLFGDSITEQSIRENGWGVPLANAYSRRADVLVRGYGGYNTRWAMFLLGHLFPLDSTKPPTATTIFFGANDAALLGRTSERQHVPIEEFKENLRKFVRHLKDCSPTMVIVLITPPPLSEEGRLAYVRSVYGENATKIPERTNEVTGQYANACVEVAKEMGVWYINLWSKMQETDGWQTKFLWDGLHLTTEGNAVVYEEVINVFNEAGLSADNMPMDFPHHSKIDSKHPERAFQQNVCDIPL

SEQ ID NO: 5692 - protein, 246 aa, Glycine max
  peptide (1)..(246): Ceres Seq. ID no. 14304832
  misc_feature (5)..(204): Pfam Name: Pfam Description:  GDSL-like Lipase/Acylhydrolase
  misc_feature (1)..(239): NCBI GI NO: 15242002 NR Description: GDSL-motif lipase/hydrolase protein
  misc_feature (1)..(238): NCBI GI NO: 37535366 NR Description: putative esterase
  misc_feature (1)..(239): NCBI GI NO: 38454102 NR Description: At5g45920 [Arabidopsis thaliana]
  misc_feature (1)..(239): NCBI GI NO: 15242539 NR Description: GDSL-motif lipase/hydrolase protein
  misc_feature (1)..(238): NCBI GI NO: 34903948 NR Description: OSJNBa0038J17.19
  misc_feature (1)..(246): NCBI GI NO: 13161403 NR Description: CPRD49 [Vigna unguiculata]
  misc_feature (2)..(229): NCBI GI NO: 32352168 NR Description: hypothetical protein
  misc_feature (1)..(234): NCBI GI NO: 27478045 NR Description: similar to hypothetical protein 4833421E05Rik
  misc_feature (1)..(234): NCBI GI NO: 27754071 NR Description: hypothetical protein 4833421E05Rik [Mus musculus]
  misc_feature (1)..(223): NCBI GI NO: 16974631 NR Description: At2g38180/F16M14.11 [Arabidopsis thaliana]
MRSKIVLFGDSITEQSIRENGWGVPLANAYSRRADVLVRGYGGYNTRWAMFLLGHLFPLDSTKPPTATTIFFGANDAALLGRTSERQHVPIEEFKENLRKFVRHLKDCSPTMVIVLITPPPLSEEGRLAYVRSVYGENATKIPERTNEVTGQYANACVEVAKEMGVWYINLWSKMQETDGWQTKFLWDGLHLTTEGNAVVYEEVINVFNEAGLSADNMPMDFPHHSKIDSKHPERAFQQNVCDIPL

SEQ ID NO: 5693 - protein, 197 aa, Glycine max
  peptide (1)..(197): Ceres Seq. ID no. 14304833
  misc_feature (1)..(155): Pfam Name: Pfam Description:  GDSL-like Lipase/Acylhydrolase
  misc_feature (1)..(190): NCBI GI NO: 15242002 NR Description: GDSL-motif lipase/hydrolase protein
  misc_feature (1)..(189): NCBI GI NO: 37535366 NR Description: putative esterase
  misc_feature (1)..(190): NCBI GI NO: 38454102 NR Description: At5g45920 [Arabidopsis thaliana]
  misc_feature (1)..(190): NCBI GI NO: 15242539 NR Description: GDSL-motif lipase/hydrolase protein
  misc_feature (1)..(189): NCBI GI NO: 34903948 NR Description: OSJNBa0038J17.19
  misc_feature (1)..(197): NCBI GI NO: 13161403 NR Description: CPRD49 [Vigna unguiculata]
  misc_feature (1)..(180): NCBI GI NO: 32352168 NR Description: hypothetical protein
  misc_feature (1)..(185): NCBI GI NO: 27478045 NR Description: similar to hypothetical protein 4833421E05Rik
  misc_feature (1)..(185): NCBI GI NO: 27754071 NR Description: hypothetical protein 4833421E05Rik [Mus musculus]
  misc_feature (1)..(174): NCBI GI NO: 16974631 NR Description: At2g38180/F16M14.11 [Arabidopsis thaliana]
MFLLGHLFPLDSTKPPTATTIFFGANDAALLGRTSERQHVPIEEFKENLRKFVRHLKDCSPTMVIVLITPPPLSEEGRLAYVRSVYGENATKIPERTNEVTGQYANACVEVAKEMGVWYINLWSKMQETDGWQTKFLWDGLHLTTEGNAVVYEEVINVFNEAGLSADNMPMDFPHHSKIDSKHPERAFQQNVCDIPL

SEQ ID NO: 5694 - DNA, 909 bp, Glycine max
  misc_feature (1)..(909): Ceres Seq. ID no. 15176678
gtgaaggaaacgtcgaaaccttaaagcgaaccatgccagaaggagaacccaccaatggttactgcagcagcagcagcggcgaagaagacggtgacgccgcttggagagcagccatcgattccattgctcaaaccaccacctatgtctcttccaccaccaaacacactcaccctaatcatgatgatgatgatgattacgatggccacaaacccaaaacacgacaacttaagcactaccaactcaaggcacaaaaccttctgaatgaaatattggaaaattcaatagagatagtgagaaaacctgtccctgtcgtggatgaggatcccgagagcaatgaatgcggcattcgcttgtttaaacatgctcagccaggaatagtgtttgatcacgtagatgaacctcaaccaccaaggaaacggcctagaatacttcctggaggggatattgatgagaaatcaaagaagcagtttagaaagcagattagatctgttgctgttaatggtatagaaataatagctgcagcaaacgatgcatacaagaagtcattagctagactagaagctaaagatgcagcagcaaaagctaaagccaagagagaagatgaaagagttgaaaatttgaaaaagattaggggagaaaagtggctaccttccatggcccaggagatgcaggttaaaattcgacactgatttttgtctttcattctcttaacttcaattctagttttatgtgtaactagatgattgattagctttgttgatttggtagtggagctggttgtaccctaaaaaatatagttatgggattatagtttagttgtgaaaagctttttttttttttttttttttcactattctgttacaacactcttcacaagttcacatattgaaatttccgaaaatgtaaatc

SEQ ID NO: 5695 - protein, 228 aa, Glycine max
  peptide (1)..(228): Ceres Seq. ID no. 15176679
  misc_feature (25)..(227): NCBI GI NO: 15229629 NR Description: expressed protein [Arabidopsis thaliana]
  misc_feature (25)..(227): NCBI GI NO: 21593080 NR Description: unknown [Arabidopsis thaliana]
EGNVETLKRTMPEGEPTNGYCSSSSGEEDGDAAWRAAIDSIAQTTTYVSSTTKHTHPNHDDDDDYDGHKPKTRQLKHYQLKAQNLLNEILENSIEIVRKPVPVVDEDPESNECGIRLFKHAQPGIVFDHVDEPQPPRKRPRILPGGDIDEKSKKQFRKQIRSVAVNGIEIIAAANDAYKKSLARLEAKDAAAKAKAKREDERVENLKKIRGEKWLPSMAQEMQVKIRH

SEQ ID NO: 5696 - protein, 218 aa, Glycine max
  peptide (1)..(218): Ceres Seq. ID no. 15176680
  misc_feature (15)..(217): NCBI GI NO: 15229629 NR Description: expressed protein [Arabidopsis thaliana]
  misc_feature (15)..(217): NCBI GI NO: 21593080 NR Description: unknown [Arabidopsis thaliana]
MPEGEPTNGYCSSSSGEEDGDAAWRAAIDSIAQTTTYVSSTTKHTHPNHDDDDDYDGHKPKTRQLKHYQLKAQNLLNEILENSIEIVRKPVPVVDEDPESNECGIRLFKHAQPGIVFDHVDEPQPPRKRPRILPGGDIDEKSKKQFRKQIRSVAVNGIEIIAAANDAYKKSLARLEAKDAAAKAKAKREDERVENLKKIRGEKWLPSMAQEMQVKIRH

SEQ ID NO: 5697 - DNA, 690 bp, Glycine max
  misc_feature (1)..(690): Ceres Seq. ID no. 15227245
ccgggccccccctcgagtcagctwcgtaggccccccccccccaccgcagagaggatcaagggccacaacttctaatttatcagtttctcgttgatgatcttgacagtatggtgagtgatgctatgtggacagatgctaatggcatcgtgggttgtgaggattctaaacagagaaaggagctaaaggggtttcttcttgattgtgttatagaatatctagaatcaaattgctgccaatattttaactctggattcaagaaatggacgaagctgcccttgtgcatggaagctgagatgttggctcaagaggtgaagagggagatcaacaagtggttatctatggttgggatggtgcctgatgaaataatagaatgggaaatgagccactccttggggaaatggactgactttgacattgaagcatttgaggctggtgttgatatagatggggatatacttcaaattttggttgatgaagttgttcaagacctgcaggttgcaagcaggggcaccatttacttctaaaattcctttcagctgatcataggatatacttctaaaattcctttctctggtgagatatgtgatctaacaaggtgtattttttgtacaaataggattatgttatttctaatggaggcttttttttggggctctttgaattagtggacaaaataaagtccattgacct

SEQ ID NO: 5698 - protein, 138 aa, Glycine max
  peptide (1)..(138): Ceres Seq. ID no. 15227246
  misc_feature (1)..(132): NCBI GI NO: 34897244 NR Description: hypothetical protein
  misc_feature (1)..(127): NCBI GI NO: 34895600 NR Description: OSJNBa0083M16.12
  misc_feature (1)..(128): NCBI GI NO: 37201986 NR Description: At5g26910 [Arabidopsis thaliana]
  misc_feature (1)..(128): NCBI GI NO: 15240405 NR Description: expressed protein [Arabidopsis thaliana]
  misc_feature (1)..(128): NCBI GI NO: 7485246 NR Description: hypothetical protein A_IG002P16
  misc_feature (1)..(128): NCBI GI NO: 15230041 NR Description: expressed protein [Arabidopsis thaliana]
MVSDAMWTDANGIVGCEDSKQRKELKGFLLDCVIEYLESNCCQYFNSGFKKWTKLPLCMEAEMLAQEVKREINKWLSMVGMVPDEIIEWEMSHSLGKWTDFDIEAFEAGVDIDGDILQILVDEVVQDLQVASRGTIYF

SEQ ID NO: 5699 - protein, 133 aa, Glycine max
  peptide (1)..(133): Ceres Seq. ID no. 15227247
  misc_feature (1)..(127): NCBI GI NO: 34897244 NR Description: hypothetical protein
  misc_feature (1)..(122): NCBI GI NO: 34895600 NR Description: OSJNBa0083M16.12
  misc_feature (1)..(123): NCBI GI NO: 37201986 NR Description: At5g26910 [Arabidopsis thaliana]
  misc_feature (1)..(123): NCBI GI NO: 15240405 NR Description: expressed protein [Arabidopsis thaliana]
  misc_feature (1)..(123): NCBI GI NO: 7485246 NR Description: hypothetical protein A_IG002P16
  misc_feature (1)..(123): NCBI GI NO: 15230041 NR Description: expressed protein [Arabidopsis thaliana]
MWTDANGIVGCEDSKQRKELKGFLLDCVIEYLESNCCQYFNSGFKKWTKLPLCMEAEMLAQEVKREINKWLSMVGMVPDEIIEWEMSHSLGKWTDFDIEAFEAGVDIDGDILQILVDEVVQDLQVASRGTIYF

SEQ ID NO: 5700 - protein, 80 aa, Glycine max
  peptide (1)..(80): Ceres Seq. ID no. 15227248
  misc_feature (1)..(74): NCBI GI NO: 34897244 NR Description: hypothetical protein
  misc_feature (1)..(69): NCBI GI NO: 34895600 NR Description: OSJNBa0083M16.12
  misc_feature (1)..(70): NCBI GI NO: 37201986 NR Description: At5g26910 [Arabidopsis thaliana]
  misc_feature (1)..(70): NCBI GI NO: 15240405 NR Description: expressed protein [Arabidopsis thaliana]
  misc_feature (1)..(70): NCBI GI NO: 7485246 NR Description: hypothetical protein A_IG002P16
  misc_feature (1)..(70): NCBI GI NO: 15230041 NR Description: expressed protein [Arabidopsis thaliana]
MEAEMLAQEVKREINKWLSMVGMVPDEIIEWEMSHSLGKWTDFDIEAFEAGVDIDGDILQILVDEVVQDLQVASRGTIYF

SEQ ID NO: 5701 - DNA, 1362 bp, Glycine max
  misc_feature (1)..(1362): Ceres Seq. ID no. 14307351
actctcactggttttctctctccctttctctctctatctctgctctgtgctttttctctctgcagaatttcccaaatttctccactaccctatctcctctgctcctgaaactcgcacattcttcaccagcaatgcacgatcttcaatacgaatgcaatatcgatatttgacatccgagtatcagtgcttgagcgggtgaattggaaaatgctagaggcaatggaaagttcggtcaatggtggcttctcccatttgcagagctgtggagatagcagcgaagaagagttatcggtgcttcctcgtcacaccaaagttgtcgtaaccggaaataaccgcaccaaatcggtgctcgttggtcttcaaggtgtcgttaagaaagccgttggactaggcggatggcattggctggttcttacaaatggtattgaagtgaagctacaaaggaatgcacttagcgtgattgaagcacccactggtaatgaggaagatgatgaccttgagtttgaaaatatgccgtggaatggatcagatatggcatcggacgacacacacaagtcccacaaatcgaggcatagaatgtatagaacaatgggatcatctcacaagaccatgagtaggtccttctctggcgattcacagtcgaaggggtccgtttctatgcctaatgggtccgcgaaggtggacttgagcaaacttgaaatggctgcactgtggagatattggcgacattttaatctagtggatgcggtcccaaacccatcaaaagagcagctagtagacgttgttcagaggcatttcatgtcgcagcaaatcgacgaattgcaggtgattgtgggatttgtccaagctgcaaagaggctttagactgtatgcaattgagatggaatgatgcgagaaatgatatttgaatgaaaagtataattgtctatgctaacaaagataatgtatgtaatatccacttcccttcgtattatgtagcatgttttatcggtgatttttaactttctgttgtagtagtaggttagtagtttgaggttatagaggttcttactcttttgtagccacccggttgtgtagatatatatgacattgcaactggatcatcagggaagtcaccaccatggctttcttttcaacttgattcgatgtattactgactggggaagtgggttttcagagaccttaatgtatatatattttagtttctccctttgattcgtcttagatgaattcaagtgttgtgttgctccgggtggagtagtggatcgttgctaccatctccaagttaaagatactgttcaaatactattgagctaatgctagtgtgcgttcacaaagacaaaaatcactttatcattattc

SEQ ID NO: 5702 - protein, 218 aa, Glycine max
  peptide (1)..(218): Ceres Seq. ID no. 14307352
  misc_feature (1)..(218): NCBI GI NO: 25372870 NR Description: protein F18O14.5 [imported] - Arabidopsis thaliana
  misc_feature (1)..(218): NCBI GI NO: 18394724 NR Description: expressed protein [Arabidopsis thaliana]
  misc_feature (1)..(218): NCBI GI NO: 15222092 NR Description: hypothetical protein [Arabidopsis thaliana]
  misc_feature (24)..(209): NCBI GI NO: 18767383 NR Description: Hypothetical protein [Oryza sativa]
  misc_feature (24)..(209): NCBI GI NO: 37533376 NR Description: hypothetical protein
  misc_feature (21)..(218): NCBI GI NO: 38346468 NR Description: OSJNBa0019G23.16
  misc_feature (21)..(94): NCBI GI NO: 38567956 NR Description: OSJNBb0115I21.12
  misc_feature (200)..(218): NCBI GI NO: 38567956 NR Description: OSJNBb0115I21.12
MLEAMESSVNGGFSHLQSCGDSSEEELSVLPRHTKVVVTGNNRTKSVLVGLQGVVKKAVGLGGWHWLVLTNGIEVKLQRNALSVIEAPTGNEEDDDLEFENMPWNGSDMASDDTHKSHKSRHRMYRTMGSSHKTMSRSFSGDSQSKGSVSMPNGSAKVDLSKLEMAALWRYWRHFNLVDAVPNPSKEQLVDVVQRHFMSQQIDELQVIVGFVQAAKRL

SEQ ID NO: 5703 - protein, 214 aa, Glycine max
  peptide (1)..(214): Ceres Seq. ID no. 14307353
  misc_feature (1)..(214): NCBI GI NO: 25372870 NR Description: protein F18O14.5 [imported] - Arabidopsis thaliana
  misc_feature (1)..(214): NCBI GI NO: 18394724 NR Description: expressed protein [Arabidopsis thaliana]
  misc_feature (1)..(214): NCBI GI NO: 15222092 NR Description: hypothetical protein [Arabidopsis thaliana]
  misc_feature (20)..(205): NCBI GI NO: 18767383 NR Description: Hypothetical protein [Oryza sativa]
  misc_feature (20)..(205): NCBI GI NO: 37533376 NR Description: hypothetical protein
  misc_feature (17)..(214): NCBI GI NO: 38346468 NR Description: OSJNBa0019G23.16
  misc_feature (17)..(90): NCBI GI NO: 38567956 NR Description: OSJNBb0115I21.12
  misc_feature (196)..(214): NCBI GI NO: 38567956 NR Description: OSJNBb0115I21.12
MESSVNGGFSHLQSCGDSSEEELSVLPRHTKVVVTGNNRTKSVLVGLQGVVKKAVGLGGWHWLVLTNGIEVKLQRNALSVIEAPTGNEEDDDLEFENMPWNGSDMASDDTHKSHKSRHRMYRTMGSSHKTMSRSFSGDSQSKGSVSMPNGSAKVDLSKLEMAALWRYWRHFNLVDAVPNPSKEQLVDVVQRHFMSQQIDELQVIVGFVQAAKRL

SEQ ID NO: 5704 - protein, 117 aa, Glycine max
  peptide (1)..(117): Ceres Seq. ID no. 14307354
  misc_feature (1)..(117): NCBI GI NO: 25372870 NR Description: protein F18O14.5 [imported] - Arabidopsis thaliana
  misc_feature (1)..(117): NCBI GI NO: 18394724 NR Description: expressed protein [Arabidopsis thaliana]
  misc_feature (1)..(117): NCBI GI NO: 15222092 NR Description: hypothetical protein [Arabidopsis thaliana]
  misc_feature (1)..(108): NCBI GI NO: 18767383 NR Description: Hypothetical protein [Oryza sativa]
  misc_feature (1)..(108): NCBI GI NO: 37533376 NR Description: hypothetical protein
  misc_feature (1)..(117): NCBI GI NO: 38346468 NR Description: OSJNBa0019G23.16
  misc_feature (99)..(117): NCBI GI NO: 38567956 NR Description: OSJNBb0115I21.12
MPWNGSDMASDDTHKSHKSRHRMYRTMGSSHKTMSRSFSGDSQSKGSVSMPNGSAKVDLSKLEMAALWRYWRHFNLVDAVPNPSKEQLVDVVQRHFMSQQIDELQVIVGFVQAAKRL

SEQ ID NO: 5705 - DNA, 1243 bp, Glycine max
  misc_feature (1)..(1243): Ceres Seq. ID no. 14303355
gaggcaattatacatttaagttcatttcctcctctcctctctcttcattttatttttcttccatctgctaggaaaatgtctgtcagcgttgagggctctgcctttggggcactatttgaagaaaaaaatgtccattctgaagacagcaacgagcttgtgttgcatggtgcatttccattggctaaacatgagagacagaatggatttaatgccacagacatgaatgcatttggaaactccttcaggaactatgatgcagaaagtgaaaggcaaagaatggtggaggaattatataggatgcaacacatcaaccagacatatgactatgggaagagaatgagggaggagtatgggaaattggacaaattagaaatgggtatatgggagtgttgtgagctgctcaatgaagtgacggatgatagcgatcctgatttggatgaaccacaaatacaacatttgttgcagtccgctgaagccattagaaaagactatcctaatgaagattggttacatttaactgctcttattcatgatcttggaaagatccttatgcttccaagctttggtggccttcctcaatggtctgttgttggagatacatttcccctcggatgtgcttttgatgagtcaaatgttcaccacaagcatttcaaggacaatccggataacacaaatcctacttataacacgaaaaatggaatctacaaagaaggaattggactagacaatgttgtgatgtcatggggacatgatgagtatatgtatttggttgcaaaggaaaacggcaccactttgcctccagtagcattgttcattatcaaataccattctttttacgctttacatagggcaggagcatatacacatttgatgaatgaagaagatattgagaatttgaagtggctcaaaatatttagcaaatatgacctctacagcaagagtaaagttctagtagacatagaaaaagttaagccatactatatgtcgctcatcgagaagtatttcccagcaaagcttaggtggtgaaactcaaagacatacacatcgatatggaatcaaagtcatgggcaagctaaggatttaagtttatacttatgaattatgatcgttatgccgaacgtttaaggaattgtttttttcttttatcagattgaagttgttgcctaactttaaattattcttattaagctgtaccgaacgtttaccgtactagaagttgatgtatttacggtttggttgttcc

SEQ ID NO: 5706 - protein, 341 aa, Glycine max
  peptide (1)..(341): Ceres Seq. ID no. 14303356
  misc_feature (85)..(341): Pfam Name: DUF706 Pfam Description: Family of unknown function
  misc_feature (26)..(341): NCBI GI NO: 18399158 NR Description: expressed protein [Arabidopsis thaliana]
  misc_feature (26)..(341): NCBI GI NO: 21554393 NR Description: unknown [Arabidopsis thaliana]
  misc_feature (26)..(341): NCBI GI NO: 30687167 NR Description: expressed protein [Arabidopsis thaliana]
  misc_feature (26)..(341): NCBI GI NO: 7487428 NR Description: hypothetical protein T25K17
  misc_feature (26)..(341): NCBI GI NO: 21536858 NR Description: unknown [Arabidopsis thaliana]
  misc_feature (26)..(341): NCBI GI NO: 15241891 NR Description: expressed protein [Arabidopsis thaliana]
  misc_feature (68)..(341): NCBI GI NO: 30683840 NR Description: expressed protein [Arabidopsis thaliana]
  misc_feature (68)..(341): NCBI GI NO: 26451656 NR Description: unknown protein [Arabidopsis thaliana]
  misc_feature (100)..(341): NCBI GI NO: 13877657 NR Description: Unknown protein [Arabidopsis thaliana]
  misc_feature (68)..(333): NCBI GI NO: 7262695 NR Description: Strong similarity to an unknown protein fromArabidopsis thaliana gb|AL049171
EAIIHLSSFPPLLSLHFIFLPSARKMSVSVEGSAFGALFEEKNVHSEDSNELVLHGAFPLAKHERQNGFNATDMNAFGNSFRNYDAESERQRMVEELYRMQHINQTYDYGKRMREEYGKLDKLEMGIWECCELLNEVTDDSDPDLDEPQIQHLLQSAEAIRKDYPNEDWLHLTALIHDLGKILMLPSFGGLPQWSVVGDTFPLGCAFDESNVHHKHFKDNPDNTNPTYNTKNGIYKEGIGLDNVVMSWGHDEYMYLVAKENGTTLPPVALFIIKYHSFYALHRAGAYTHLMNEEDIENLKWLKIFSKYDLYSKSKVLVDIEKVKPYYMSLIEKYFPAKLRW

SEQ ID NO: 5707 - protein, 316 aa, Glycine max
  peptide (1)..(316): Ceres Seq. ID no. 14303357
  misc_feature (60)..(316): Pfam Name: DUF706 Pfam Description: Family of unknown function
  misc_feature (1)..(316): NCBI GI NO: 18399158 NR Description: expressed protein [Arabidopsis thaliana]
  misc_feature (1)..(316): NCBI GI NO: 21554393 NR Description: unknown [Arabidopsis thaliana]
  misc_feature (1)..(316): NCBI GI NO: 30687167 NR Description: expressed protein [Arabidopsis thaliana]
  misc_feature (1)..(316): NCBI GI NO: 7487428 NR Description: hypothetical protein T25K17
  misc_feature (1)..(316): NCBI GI NO: 21536858 NR Description: unknown [Arabidopsis thaliana]
  misc_feature (1)..(316): NCBI GI NO: 15241891 NR Description: expressed protein [Arabidopsis thaliana]
  misc_feature (43)..(316): NCBI GI NO: 30683840 NR Description: expressed protein [Arabidopsis thaliana]
  misc_feature (43)..(316): NCBI GI NO: 26451656 NR Description: unknown protein [Arabidopsis thaliana]
  misc_feature (75)..(316): NCBI GI NO: 13877657 NR Description: Unknown protein [Arabidopsis thaliana]
  misc_feature (43)..(308): NCBI GI NO: 7262695 NR Description: Strong similarity to an unknown protein fromArabidopsis thaliana gb|AL049171
MSVSVEGSAFGALFEEKNVHSEDSNELVLHGAFPLAKHERQNGFNATDMNAFGNSFRNYDAESERQRMVEELYRMQHINQTYDYGKRMREEYGKLDKLEMGIWECCELLNEVTDDSDPDLDEPQIQHLLQSAEAIRKDYPNEDWLHLTALIHDLGKILMLPSFGGLPQWSVVGDTFPLGCAFDESNVHHKHFKDNPDNTNPTYNTKNGIYKEGIGLDNVVMSWGHDEYMYLVAKENGTTLPPVALFIIKYHSFYALHRAGAYTHLMNEEDIENLKWLKIFSKYDLYSKSKVLVDIEKVKPYYMSLIEKYFPAKLRW

SEQ ID NO: 5708 - protein, 268 aa, Glycine max
  peptide (1)..(268): Ceres Seq. ID no. 14303358
  misc_feature (12)..(268): Pfam Name: DUF706 Pfam Description: Family of unknown function
  misc_feature (1)..(268): NCBI GI NO: 18399158 NR Description: expressed protein [Arabidopsis thaliana]
  misc_feature (1)..(268): NCBI GI NO: 21554393 NR Description: unknown [Arabidopsis thaliana]
  misc_feature (1)..(268): NCBI GI NO: 30687167 NR Description: expressed protein [Arabidopsis thaliana]
  misc_feature (1)..(268): NCBI GI NO: 7487428 NR Description: hypothetical protein T25K17
  misc_feature (1)..(268): NCBI GI NO: 21536858 NR Description: unknown [Arabidopsis thaliana]
  misc_feature (1)..(268): NCBI GI NO: 15241891 NR Description: expressed protein [Arabidopsis thaliana]
  misc_feature (1)..(268): NCBI GI NO: 30683840 NR Description: expressed protein [Arabidopsis thaliana]
  misc_feature (1)..(268): NCBI GI NO: 26451656 NR Description: unknown protein [Arabidopsis thaliana]
  misc_feature (27)..(268): NCBI GI NO: 13877657 NR Description: Unknown protein [Arabidopsis thaliana]
  misc_feature (1)..(260): NCBI GI NO: 7262695 NR Description: Strong similarity to an unknown protein fromArabidopsis thaliana gb|AL049171
MNAFGNSFRNYDAESERQRMVEELYRMQHINQTYDYGKRMREEYGKLDKLEMGIWECCELLNEVTDDSDPDLDEPQIQHLLQSAEAIRKDYPNEDWLHLTALIHDLGKILMLPSFGGLPQWSVVGDTFPLGCAFDESNVHHKHFKDNPDNTNPTYNTKNGIYKEGIGLDNVVMSWGHDEYMYLVAKENGTTLPPVALFIIKYHSFYALHRAGAYTHLMNEEDIENLKWLKIFSKYDLYSKSKVLVDIEKVKPYYMSLIEKYFPAKLRW

SEQ ID NO: 5709 - DNA, 1690 bp, Glycine max
  misc_feature (1)..(1690): Ceres Seq. ID no. 12581920
cagctacgtaggccccccccccgattcataactttgcgggttaggctcagacccaatctctattattagtattacatatcttggtcttaattttgattgaagctgaagcatcttggaggaaccaaatggctccactcttgtaccttggttgcagaagggtgctcctgttctctcttcttttgttcttttttgtttctgtttgctcagaacctcatcaaccagagagcaaagccttgtctggtgatggcagcagcagaagcagaagaagaatgttgttgttggagttggattctgaaaaggaagaatttgaacaacccctgaaaaagaaatccaccaaaaaccaaaccaagttaatcaaacccaccactagcctctcctccaaaaaccaaaccaaaaccatcaaatccaataaccttagttcctccaaaaaccaaaccaagctagccaaaaccaaagccaccaccctcaccgacaccgaggttgtcgtgaagaagctcaactccaccaccttaaagtccaagaagctgaattccacatccaaaggctccacgaaatcatcctcattggatctcgcgaaaacaagtggtactagtggcggcaagaacaaaacgacaaaagccaccgccaccaaggacaaggaagttaccaataaaaagaccaagttggatcaaaccgaagaatccgacaagcagagtaataagaagagtaacaccaccaacaacaagaagaagaaagaacaacaaggacaacctagttgggtgttcgaagacgaggtggacgatgatttggtttcggagttcaaagatctacccatgaagttccaacaaacactgatcccagacctggaacgaatctccacaacctcaaaagcctacataacaaaagccaacaaagagatcacgagagggttcaaaccctacgttggcaacaagtacgcacccaccatcaccactttactctcttgcgcattcgctttgatccctttgcttttggcctcactcctcttcaacaaaatcaaagcctatttctcactccaaaagctcttaatcttcatccaagcctacctcgctatctacttctccattctttgcctttcttccttcgtcactggccttgaacctctcaggtttttctactctgcttcgcgctccacctatctttgcctgcaggtcctccaaactctcgcttacgttctctaccttttgctgctactcatgtatctcgttttggtgttctcaactgattctggattgggctccaaattcttgggcctggcccaaacttttgtgggcttttccgtggggttgcattactacgtgactgtgtttcacagggttgtgttgaagcaaccgcccaagaccaattggaagattcacgccatttatgccacgtgttttttcctcatttgtgtcattgctagggctgatagaaagaagaagacctacttggaagaaggtggagaagagggcaagaaaaattgaaattagtcaaattggctatatatattagctattagctatacctacattttcgttttttttcctcataattaaaattttcaaattatccaaagcaacatataccaatattgttctattatattgtagcgaaatgccgtaaggcttttggcttttgtgtcaaccagcattcagattcgttccataaataaattcatgatgaggtgatggct

SEQ ID NO: 5710 - protein, 451 aa, Glycine max
  peptide (1)..(451): Ceres Seq. ID no. 12581921
  misc_feature (1)..(451): NCBI GI NO: 15236054 NR Description: putative protein; protein id: At4g39840
MAPLLYLGCRRVLLFSLLLFFFVSVCSEPHQPESKALSGDGSSRSRRRMLLLELDSEKEEFEQPLKKKSTKNQTKLIKPTTSLSSKNQTKTIKSNNLSSSKNQTKLAKTKATTLTDTEVVVKKLNSTTLKSKKLNSTSKGSTKSSSLDLAKTSGTSGGKNKTTKATATKDKEVTNKKTKLDQTEESDKQSNKKSNTTNNKKKKEQQGQPSWVFEDEVDDDLVSEFKDLPMKFQQTLIPDLERISTTSKAYITKANKEITRGFKPYVGNKYAPTITTLLSCAFALIPLLLASLLFNKIKAYFSLQKLLIFIQAYLAIYFSILCLSSFVTGLEPLRFFYSASRSTYLCLQVLQTLAYVLYLLLLLMYLVLVFSTDSGLGSKFLGLAQTFVGFSVGLHYYVTVFHRVVLKQPPKTNWKIHAIYATCFFLICVIARADRKKKTYLEEGGEEGKKN

SEQ ID NO: 5711 - protein, 403 aa, Glycine max
  peptide (1)..(403): Ceres Seq. ID no. 12581922
  misc_feature (1)..(403): NCBI GI NO: 15236054 NR Description: putative protein; protein id: At4g39840
MLLLELDSEKEEFEQPLKKKSTKNQTKLIKPTTSLSSKNQTKTIKSNNLSSSKNQTKLAKTKATTLTDTEVVVKKLNSTTLKSKKLNSTSKGSTKSSSLDLAKTSGTSGGKNKTTKATATKDKEVTNKKTKLDQTEESDKQSNKKSNTTNNKKKKEQQGQPSWVFEDEVDDDLVSEFKDLPMKFQQTLIPDLERISTTSKAYITKANKEITRGFKPYVGNKYAPTITTLLSCAFALIPLLLASLLFNKIKAYFSLQKLLIFIQAYLAIYFSILCLSSFVTGLEPLRFFYSASRSTYLCLQVLQTLAYVLYLLLLLMYLVLVFSTDSGLGSKFLGLAQTFVGFSVGLHYYVTVFHRVVLKQPPKTNWKIHAIYATCFFLICVIARADRKKKTYLEEGGEEGKKN

SEQ ID NO: 5712 - DNA, 1027 bp, Glycine max
  misc_feature (1)..(1027): Ceres Seq. ID no. 15170299
ttttaaatctgcaacctgcatagtgagacgtagatgccctggaaaatttctgtactgtagcaaacagagtagcaccaaaacaattttggttaaagagagtgaaaaacggggttagtaaattgcaatatcatattaagggcatgttgcaaatacgagtgaatgaatgtcttcgtttacgggtgcacgttccaaagcaaatgctaagtctgaaatgatcatagctaacgagattaacctctgccccatcaacacaagtaccattacatcaacctcgccagatacaagtgccaagaatgagaagaaaaagaagtctatccttccaaagattttcggatcaaagcgaaatgggagaggttcagacgaagagacactcaaatcatcaagtgcagaagaaggagatggagttactcttgatttggagaataagattgagacgagaagaaaagcatttttggaagcggcccccatcatgagaaaaagtttctcagaaagggagactagtcctgggatcgaaggcctaaatttgtccaattttgaacggcctatgatgactatggaaactgaacttctcaggatctttgttgcagcgtggaatgtgggagtcaccaagttatgacctcaacctccaagatttcttgctagtggaaggctccgcagatatatatgttttggggtacgaacatccatgcaacaaagtgaagaagaaaaaaataacgaacgaaagaagaagaagaagaagtatccctccccttcaccttaaaatttagttttcccttctcacaagtttggcatgttcgatgattgtgtgaatttagggcggaaagtgaaatacgggaaaaatggttgcttatggtaaattttgtttggaattgagattttatacatggacgtctcgaatgctcacttatgttgtatattttgttagttggttgttttgtgtttgtatctcttgatggctacaacatctcaccctttgtgactcctcttttataaaaatatcatcccaattttttctatgaatttgaat

SEQ ID NO: 5713 - protein, 150 aa, Glycine max
  peptide (1)..(150): Ceres Seq. ID no. 15170300
  misc_feature (83)..(146): NCBI GI NO: 30698095 NR Description: endonuclease/exonuclease/phosphatase family
  misc_feature (83)..(146): NCBI GI NO: 10178171 NR Description: inositol-1
MSSFTGARSKANAKSEMIIANEINLCPINTSTITSTSPDTSAKNEKKKKSILPKIFGSKRNGRGSDEETLKSSSAEEGDGVTLDLENKIETRRKAFLEAAPIMRKSFSERETSPGIEGLNLSNFERPMMTMETELLRIFVAAWNVGVTKL

SEQ ID NO: 5714 - protein, 134 aa, Glycine max
  peptide (1)..(134): Ceres Seq. ID no. 15170301
  misc_feature (67)..(130): NCBI GI NO: 30698095 NR Description: endonuclease/exonuclease/phosphatase family
  misc_feature (67)..(130): NCBI GI NO: 10178171 NR Description: inositol-1
MIIANEINLCPINTSTITSTSPDTSAKNEKKKKSILPKIFGSKRNGRGSDEETLKSSSAEEGDGVTLDLENKIETRRKAFLEAAPIMRKSFSERETSPGIEGLNLSNFERPMMTMETELLRIFVAAWNVGVTKL

SEQ ID NO: 5715 - DNA, 1715 bp, Glycine max
  misc_feature (1)..(1715): Ceres Seq. ID no. 14304838
actttcctctttctttcccttttcctcgtttccacaaccctcccgaattcttgagacgcttcccgaatcctttcacacacacgttgctgaatctatatatctaaatcccttcacttcccattcctaaatcctcttacaaaaactatacaacgttgcttttgttttgttttgttttgtctctctctaatcattccaatggccaaagaaggacccaactgggacgggttgctcaaatggagcattcctcattccgatgggactcgccccactcgcaatttaagtgaggaggatcggagatggtttatggaagcgatgcagtcacagaccattgatgttgtaaaacgtatgaaagagatcacacttgtgatgcaaactccagaacaagtcttgaaagaccaaggagttacccctgcagacattgaagatatgttggatgagttgcaagagcatgttgagtcaattgacatggccaatgatctccattcaattggtggcttggttcctcttcttggttacctaaagagttctcatgccaatattcgagcaaaggctgctgatgttgtgaccacaatagtccagaataatcctcgaagtcagcaacttgttatggaagcaaatggctttgaacctcttatttctaatttcagttcagatcctgatgtgactgttagaactaaagcactgggtgcaatatcttcactaatccggcacaacaaacaaggcattactgtatttcgtttggcaaatgggtatgctgctttgaaagatgcactagcctctgaaaatgtgagatttcaaaggaaagctctcaacttgacccattacctgttgcatgagaataattcagactgcaacatcgtgaatgagcttgggtttcctcgactgttgatgcaccttgcctcaagtgaagattcagatgtcagagaagctgcccttcggggccttcttgagcttgcttgcaatactcaagatggcaaggatggcaatgaggaagacagtgagaagatgaagcaacttcttcaagaacgaataaacaatatcagtttaatgtcagctgaggaccttggtgtagtcagggaggagaggcaacttgtggactccctgtggagcacttgcttcaacgagccatcttctcttcgagagaaagggtcttcttgtgcttccaggtgaagatgcaccccctccagatgttgctagccaatattttgaggcctcctctaagatattcgagtgtgaatccatcttccaagaaagactcaaacaatgaaaagaaagagatccctttgcttttagggtcagggccttctcttgcagacactaacaaccaaggttcaaatagagaaaatgctaatagctgaaagcttggatgctttctgctctgttttttttttgccgtgctttctttctatcttatcatacaagtaatttcatataggctctttttttcccctttcttttctcaccttagattggtcttccattgtatttcaagaatgatctcatggtatgtgacactataactagccttccattgcagcggtgaatgccttcaattttttgcacttgatatttttaaatacttgtttagatgttacagtcccactcttacatgtataaaaggatctacttgtccacattatccttcaattttgggtttgggcagtgtgtttctagtgaataaaaagagagaatgatagttatgatagttatgatag

SEQ ID NO: 5716 - protein, 324 aa, Glycine max
  peptide (1)..(324): Ceres Seq. ID no. 14304839
  misc_feature (130)..(171): Pfam Name: Pfam Description:  Armadillo/beta-catenin-like repeat
  misc_feature (1)..(318): NCBI GI NO: 18398480 NR Description: expressed protein [Arabidopsis thaliana]
  misc_feature (1)..(318): NCBI GI NO: 21553998 NR Description: unknown [Arabidopsis thaliana]
  misc_feature (30)..(318): NCBI GI NO: 6478927 NR Description: hypothetical protein [Arabidopsis thaliana]
  misc_feature (1)..(29): NCBI GI NO: 6478927 NR Description: hypothetical protein [Arabidopsis thaliana]
  misc_feature (1)..(318): NCBI GI NO: 34897412 NR Description: putative Hsp70 binding protein
  misc_feature (1)..(318): NCBI GI NO: 15232329 NR Description: expressed protein [Arabidopsis thaliana]
  misc_feature (1)..(318): NCBI GI NO: 26449490 NR Description: unknown protein [Arabidopsis thaliana]
  misc_feature (1)..(314): NCBI GI NO: 15241689 NR Description: expressed protein [Arabidopsis thaliana]
  misc_feature (7)..(285): NCBI GI NO: 23489828 NR Description: hypothetical protein [Plasmodium yoelii yoelii]
  misc_feature (7)..(316): NCBI GI NO: 29436427 NR Description: Similar to RIKEN cDNA 1500019G21 gene
MAKEGPNWDGLLKWSIPHSDGTRPTRNLSEEDRRWFMEAMQSQTIDVVKRMKEITLVMQTPEQVLKDQGVTPADIEDMLDELQEHVESIDMANDLHSIGGLVPLLGYLKSSHANIRAKAADVVTTIVQNNPRSQQLVMEANGFEPLISNFSSDPDVTVRTKALGAISSLIRHNKQGITVFRLANGYAALKDALASENVRFQRKALNLTHYLLHENNSDCNIVNELGFPRLLMHLASSEDSDVREAALRGLLELACNTQDGKDGNEEDSEKMKQLLQERINNISLMSAEDLGVVREERQLVDSLWSTCFNEPSSLREKGSSCASR

SEQ ID NO: 5717 - protein, 288 aa, Glycine max
  peptide (1)..(288): Ceres Seq. ID no. 14304840
  misc_feature (94)..(135): Pfam Name: Pfam Description:  Armadillo/beta-catenin-like repeat
  misc_feature (1)..(282): NCBI GI NO: 18398480 NR Description: expressed protein [Arabidopsis thaliana]
  misc_feature (1)..(282): NCBI GI NO: 21553998 NR Description: unknown [Arabidopsis thaliana]
  misc_feature (1)..(282): NCBI GI NO: 6478927 NR Description: hypothetical protein [Arabidopsis thaliana]
  misc_feature (1)..(282): NCBI GI NO: 34897412 NR Description: putative Hsp70 binding protein
  misc_feature (1)..(282): NCBI GI NO: 15232329 NR Description: expressed protein [Arabidopsis thaliana]
  misc_feature (1)..(282): NCBI GI NO: 26449490 NR Description: unknown protein [Arabidopsis thaliana]
  misc_feature (1)..(278): NCBI GI NO: 15241689 NR Description: expressed protein [Arabidopsis thaliana]
  misc_feature (1)..(249): NCBI GI NO: 23489828 NR Description: hypothetical protein [Plasmodium yoelii yoelii]
  misc_feature (1)..(280): NCBI GI NO: 29436427 NR Description: Similar to RIKEN cDNA 1500019G21 gene
  misc_feature (1)..(276): NCBI GI NO: 3928869 NR Description: Hsp70 binding protein HspBP1 [Homo sapiens]
MEAMQSQTIDVVKRMKEITLVMQTPEQVLKDQGVTPADIEDMLDELQEHVESIDMANDLHSIGGLVPLLGYLKSSHANIRAKAADVVTTIVQNNPRSQQLVMEANGFEPLISNFSSDPDVTVRTKALGAISSLIRHNKQGITVFRLANGYAALKDALASENVRFQRKALNLTHYLLHENNSDCNIVNELGFPRLLMHLASSEDSDVREAALRGLLELACNTQDGKDGNEEDSEKMKQLLQERINNISLMSAEDLGVVREERQLVDSLWSTCFNEPSSLREKGSSCASR

SEQ ID NO: 5718 - protein, 285 aa, Glycine max
  peptide (1)..(285): Ceres Seq. ID no. 14304841
  misc_feature (91)..(132): Pfam Name: Pfam Description:  Armadillo/beta-catenin-like repeat
  misc_feature (1)..(279): NCBI GI NO: 18398480 NR Description: expressed protein [Arabidopsis thaliana]
  misc_feature (1)..(279): NCBI GI NO: 21553998 NR Description: unknown [Arabidopsis thaliana]
  misc_feature (1)..(279): NCBI GI NO: 6478927 NR Description: hypothetical protein [Arabidopsis thaliana]
  misc_feature (1)..(279): NCBI GI NO: 34897412 NR Description: putative Hsp70 binding protein
  misc_feature (1)..(279): NCBI GI NO: 15232329 NR Description: expressed protein [Arabidopsis thaliana]
  misc_feature (1)..(279): NCBI GI NO: 26449490 NR Description: unknown protein [Arabidopsis thaliana]
  misc_feature (1)..(275): NCBI GI NO: 15241689 NR Description: expressed protein [Arabidopsis thaliana]
  misc_feature (1)..(246): NCBI GI NO: 23489828 NR Description: hypothetical protein [Plasmodium yoelii yoelii]
  misc_feature (1)..(277): NCBI GI NO: 29436427 NR Description: Similar to RIKEN cDNA 1500019G21 gene
  misc_feature (1)..(273): NCBI GI NO: 3928869 NR Description: Hsp70 binding protein HspBP1 [Homo sapiens]
MQSQTIDVVKRMKEITLVMQTPEQVLKDQGVTPADIEDMLDELQEHVESIDMANDLHSIGGLVPLLGYLKSSHANIRAKAADVVTTIVQNNPRSQQLVMEANGFEPLISNFSSDPDVTVRTKALGAISSLIRHNKQGITVFRLANGYAALKDALASENVRFQRKALNLTHYLLHENNSDCNIVNELGFPRLLMHLASSEDSDVREAALRGLLELACNTQDGKDGNEEDSEKMKQLLQERINNISLMSAEDLGVVREERQLVDSLWSTCFNEPSSLREKGSSCASR

SEQ ID NO: 5719 - DNA, 1602 bp, Glycine max
  misc_feature (1)..(1602): Ceres Seq. ID no. 14304823
accaaacctggttcatgtttaagacacggacatgtcacgtaaaccaagccaactattactcgcagatgagacaagaaacaattaaaaaaatcaattaaaatataaaaccagtgaagttgccacataactctttgattcccattactcatttccaccatttcaccttctcaatctgtttctctgctttactaatttgtcccaaatcagaaccagattgagcttctgcacaaccagaccagagattcaacgcagaaactatgcttatccctggtccataggatctgatttggttcataagagagtagtacacgtttcattgctcgaaatagagttgaaaaatctggagtttccatgtctgagaaaccatcttcatcgttgacatctaccgtagctgctcgagaagttgatcccttgttgcaggatttgaatgaaaaaaagcagagctttaggcgcaacgtggtgtcgttagcggtggagttgaaggagctacgtagtcgcctagcttcgcaggaacaatcgtatgctaaggaaactcaaaccagacaggaagcagagacaaatgccaagaacatggaattgcaaattggaaggttgcagaagaatttggaagaaagaaatgagcagcttcaggcgtcagcctcctctgctgagaagtatctgaaggagttggatgatcttagaacacagcttgtaacaacaagagcaactgctgatgcaagtgctgcatcagctcaatcagctcagctccaatgtttagaacttgtaaaagaattaaatgagaaaaatggttcactaagagagcatgaggatcgtgtcctgaggctaggggagcaactagacaatttacagaaggatcttcaggcaagggaatcttcacagaaacaattgaaagatgaagttttgaggattgagcacgatattatggaggctcttgcaaaagccggagagaacaagaattgtgaactgcggaaaatattggatgaggtttctcctaaaaattttgagaagatgaataagattctaggtgttaaggatgatgaaatagcaaaacttaaggatgaaattaagatcatgtctgctcactggaagctcaagactaaggaattagagtcacagttggagaaacagcggcgtgctgatcaagagctgaagaagaaagtgttgaagttagaattctgtctgcaggaagctcgttctcagacacgaaaactgcaaaggatgggtgaacgacgggacaaagctatcaaagaactgagagatcaattagctgcaaagcaacaaagagaagttgcagccgcagataagctaaaccagaatttctgggacacttctggattcaaaatggtggtctcgatgtccatgttgatcttggtggtattttcaaggcggtgaaaccattcctatatccaaaacaattcttgtatatagacccatatataccttcaaattctaggagtctagacaagttgtagaagccattttgcgcggcagtttttatagataatctactagctttagcttgtgcaaaatgtacgcgtagcaccaggatcagaaggcatttttgcggtgatctataaaattacattgcgtagttgcatttac

SEQ ID NO: 5720 - protein, 346 aa, Glycine max
  peptide (1)..(346): Ceres Seq. ID no. 14304824
  misc_feature (25)..(322): Pfam Name: Pfam Description:  Myosin tail
  misc_feature (18)..(346): NCBI GI NO: 18421042 NR Description: expressed protein [Arabidopsis thaliana]
  misc_feature (18)..(337): NCBI GI NO: 7485248 NR Description: hypothetical protein A_IG002P16
  misc_feature (9)..(346): NCBI GI NO: 22329439 NR Description: hypothetical protein [Arabidopsis thaliana]
  misc_feature (18)..(346): NCBI GI NO: 4097950 NR Description: plant IF-like protein [Arabidopsis thaliana]
  misc_feature (18)..(346): NCBI GI NO: 18397379 NR Description: expressed protein [Arabidopsis thaliana]
  misc_feature (9)..(290): NCBI GI NO: 25402551 NR Description: hypothetical protein
  misc_feature (241)..(336): NCBI GI NO: 22329441 NR Description: myosin heavy chain -related [Arabidopsis thaliana]
  misc_feature (98)..(346): NCBI GI NO: 34894370 NR Description: unnamed protein product
  misc_feature (1)..(208): NCBI GI NO: 34894370 NR Description: unnamed protein product
  misc_feature (16)..(324): NCBI GI NO: 34864325 NR Description: similar to KIAA1749 protein [Rattus norvegicus]
MSEKPSSSLTSTVAAREVDPLLQDLNEKKQSFRRNVVSLAVELKELRSRLASQEQSYAKETQTRQEAETNAKNMELQIGRLQKNLEERNEQLQASASSAEKYLKELDDLRTQLVTTRATADASAASAQSAQLQCLELVKELNEKNGSLREHEDRVLRLGEQLDNLQKDLQARESSQKQLKDEVLRIEHDIMEALAKAGENKNCELRKILDEVSPKNFEKMNKILGVKDDEIAKLKDEIKIMSAHWKLKTKELESQLEKQRRADQELKKKVLKLEFCLQEARSQTRKLQRMGERRDKAIKELRDQLAAKQQREVAAADKLNQNFWDTSGFKMVVSMSMLILVVFSRR

SEQ ID NO: 5721 - protein, 273 aa, Glycine max
  peptide (1)..(273): Ceres Seq. ID no. 14304825
  misc_feature (1)..(249): Pfam Name: Pfam Description:  Myosin tail
  misc_feature (1)..(273): NCBI GI NO: 18421042 NR Description: expressed protein [Arabidopsis thaliana]
  misc_feature (1)..(264): NCBI GI NO: 7485248 NR Description: hypothetical protein A_IG002P16
  misc_feature (1)..(273): NCBI GI NO: 22329439 NR Description: hypothetical protein [Arabidopsis thaliana]
  misc_feature (1)..(273): NCBI GI NO: 4097950 NR Description: plant IF-like protein [Arabidopsis thaliana]
  misc_feature (1)..(273): NCBI GI NO: 18397379 NR Description: expressed protein [Arabidopsis thaliana]
  misc_feature (1)..(217): NCBI GI NO: 25402551 NR Description: hypothetical protein
  misc_feature (168)..(263): NCBI GI NO: 22329441 NR Description: myosin heavy chain -related [Arabidopsis thaliana]
  misc_feature (25)..(273): NCBI GI NO: 34894370 NR Description: unnamed protein product
  misc_feature (1)..(135): NCBI GI NO: 34894370 NR Description: unnamed protein product
  misc_feature (1)..(251): NCBI GI NO: 34864325 NR Description: similar to KIAA1749 protein [Rattus norvegicus]
MELQIGRLQKNLEERNEQLQASASSAEKYLKELDDLRTQLVTTRATADASAASAQSAQLQCLELVKELNEKNGSLREHEDRVLRLGEQLDNLQKDLQARESSQKQLKDEVLRIEHDIMEALAKAGENKNCELRKILDEVSPKNFEKMNKILGVKDDEIAKLKDEIKIMSAHWKLKTKELESQLEKQRRADQELKKKVLKLEFCLQEARSQTRKLQRMGERRDKAIKELRDQLAAKQQREVAAADKLNQNFWDTSGFKMVVSMSMLILVVFSRR

SEQ ID NO: 5722 - DNA, 1252 bp, Glycine max
  misc_feature (1)..(1252): Ceres Seq. ID no. 15170265
atgcgtgctagttaatgtcttttccagaagaactgttttctgtacttcggacagtgcatctactgaggggacttagcattggacttggaatcaattactcttgtgcagaacagtggagacccttcgcagaagaagctttgtcccgagctggcagattaaaacgtggcactgtgactcttgcttaagacaggcatttctgaatggcatgccttacatgatttctagtattatcattcgttggttgcttctgatgtgtctatttcatatgaagatatctctccatcctactaaaccaactacatctagttatgatgtcacttgatgttttcacaggtaaggatgttaagcccagaggcagcaaaatgttgagtaaaatatttttttggagacactaaataggcaggtctggatcaatctagtttgttgattctgattcactggtaacttcttgtgtgacgtttaggaaagattatccgacccggaccgacccgacccgacccgaagcgagttgcagcaccgaaaaatgttcggcagaatcagagcatccacttcgtcgctcgacaccttagacggttctccgtccaagattctcaaagacgacactttctccttctacgaggctactctcatgaagctaatgcttggtgcgcgacgcgatacgagtgaggttacaaatgattcttcagttaattcaccttctgcggaagaagcaaatctcaagccagattttaatcctgcaacaagcacttcttgttccgagacaacgatgatggacacggagtctgataacgataactcttcacctagggttactgatcacgtttctagtgggagctcggaacagctaaagcagagcaacgtttccattcttcatttcttcaaagttaaggataccggacaggccggtgtgtcttcttccgaagaggcaacaacgtcaatgcggaatggaagttctgaatctatctcatcaatttgtgttgaatctgattgcagaagtgaagtggaaggtgttcaaattttgcaatattgtgaaatgtcggattaaaggttatacaaatatttattactcctactgcttctatcagttaaatgccatgctaaatatttttctgttgtgttgtactgtatctcactctggttacacttgagtgtggaccatgtattgttatattagatacactggtttttataccaaagtttggtaaattaagagtgtgtttccagtgaataaattagatgaagttgcaaagtt

SEQ ID NO: 5723 - protein, 173 aa, Glycine max
  peptide (1)..(173): Ceres Seq. ID no. 15170266
  misc_feature (1)..(127): NCBI GI NO: 18408641 NR Description: expressed protein [Arabidopsis thaliana]
MFGRIRASTSSLDTLDGSPSKILKDDTFSFYEATLMKLMLGARRDTSEVTNDSSVNSPSAEEANLKPDFNPATSTSCSETTMMDTESDNDNSSPRVTDHVSSGSSEQLKQSNVSILHFFKVKDTGQAGVSSSEEATTSMRNGSSESISSICVESDCRSEVEGVQILQYCEMSD

SEQ ID NO: 5724 - protein, 138 aa, Glycine max
  peptide (1)..(138): Ceres Seq. ID no. 15170267
  misc_feature (1)..(92): NCBI GI NO: 18408641 NR Description: expressed protein [Arabidopsis thaliana]
MKLMLGARRDTSEVTNDSSVNSPSAEEANLKPDFNPATSTSCSETTMMDTESDNDNSSPRVTDHVSSGSSEQLKQSNVSILHFFKVKDTGQAGVSSSEEATTSMRNGSSESISSICVESDCRSEVEGVQILQYCEMSD

SEQ ID NO: 5725 - protein, 135 aa, Glycine max
  peptide (1)..(135): Ceres Seq. ID no. 15170268
  misc_feature (1)..(89): NCBI GI NO: 18408641 NR Description: expressed protein [Arabidopsis thaliana]
MLGARRDTSEVTNDSSVNSPSAEEANLKPDFNPATSTSCSETTMMDTESDNDNSSPRVTDHVSSGSSEQLKQSNVSILHFFKVKDTGQAGVSSSEEATTSMRNGSSESISSICVESDCRSEVEGVQILQYCEMSD

SEQ ID NO: 5726 - DNA, 1619 bp, Glycine max
  misc_feature (1)..(1619): Ceres Seq. ID no. 15172124
gatccatcttcaactttcctttctttcctttcctcttctttttctccctccaagaacacatttttctttgacccttttgttccctctccacccacttcccctttaagacaatttcatgcttctctgtctcggatcctagatcttgctgtcggtgggttgatcggagtagatgtcgccgtcaaacgggttgcataacggcggcggaggcggcagcggtggtggcggaggtaatggggtgagttatatagagcaccaggtttcaaaacttgacactcttgctggtgtggcaatcaagtatggtgttgaggtagctgacataaaaaggatgaatgggttggccacagatcttcaaatgttcgcactgaagacattgaaaattccattaccaggacgtcatccaccatctcctgctcctggtccacatgatgaacctgcaaagtcaggagaagctagtattgagaggaaacccctacgcataggtcaatctgccatgaaggaacctctccagtccttagaactgaaaccacctcaaccgaatatttctccagctatgagcattttacagaaattctatggcctcaaatcttcaaattcaagagatacattgaatggaacagaaatggcagtttatttgtcctcaaattctgatcattctagtggggaatggcttcccaaagcctcacccattttagacctaccatcagcatcaaatgattaccccaggtcaacaaatttagtgtatgatctactgaccggggatgatgaatatgtgcctcttgcggaaattggggacacaggagttgagaagtctgatgagaaatctgtccgaagacgtcagaaagctgaagttgataacggaaccagtaccccagaaaagattatgaaagaaggaaatggtaatggatcaaatggtctttcttcaaatggaaaaacattagccatgaggccgaaatcggctagtcgagcagcgctgttccctgagtcagaatcaggatggttagattcaattccagtggggttgggagaatctatatttactgatggcttttccggagtgcgcaaatcgtcaagtgcatcaagcctcagagagcaggaaaaaaacaattcagcagcagcctggccgcctgcaatatggagcttgaaacctgacttgcaagcagccatttcgaaacctatctttgatggtctacctatcccaatatctggccgcagaagcaaagctgcccttgattagtgtaaaattgttccccatttgagcaaaatactttttgactttacacaaatataaattgcaacaagatgcaattatttgggttagtaagccttgcaaagaaggaaaagaaaaaagaagagagaaaaatacaaaattaggatatttgttccaggcctagcaaggggtagatgacctcctaagaggaaaagcttcagcagttgcaactgaggaaaaggtgcatgaaaatggtaagcagctggtttttcaattgtaccaataatgtaatggtgttcgaccccacctggatgataaagagttatttacatattgattatttcctttgttaaatgaacgagtgaagtgaaagtcattctgttcagtggttaatcatgtgattattattatt

SEQ ID NO: 5727 - protein, 354 aa, Glycine max
  peptide (1)..(354): Ceres Seq. ID no. 15172125
  misc_feature (28)..(71): Pfam Name: Pfam Description:  LysM domain
  misc_feature (25)..(354): NCBI GI NO: 11291586 NR Description: hypothetical protein T22D6
  misc_feature (25)..(354): NCBI GI NO: 30682281 NR Description: expressed protein [Arabidopsis thaliana]
  misc_feature (25)..(354): NCBI GI NO: 22327003 NR Description: expressed protein [Arabidopsis thaliana]
  misc_feature (25)..(354): NCBI GI NO: 9759371 NR Description: gene_id:MYJ24.12~unknown protein
  misc_feature (25)..(199): NCBI GI NO: 37535512 NR Description: unknown protein
  misc_feature (25)..(73): NCBI GI NO: 24431595 NR Description: Hypothetical protein
  misc_feature (20)..(133): NCBI GI NO: 23503313 NR Description: hypothetical protein MGC35274 [Homo sapiens]
MSPSNGLHNGGGGGSGGGGGNGVSYIEHQVSKLDTLAGVAIKYGVEVADIKRMNGLATDLQMFALKTLKIPLPGRHPPSPAPGPHDEPAKSGEASIERKPLRIGQSAMKEPLQSLELKPPQPNISPAMSILQKFYGLKSSNSRDTLNGTEMAVYLSSNSDHSSGEWLPKASPILDLPSASNDYPRSTNLVYDLLTGDDEYVPLAEIGDTGVEKSDEKSVRRRQKAEVDNGTSTPEKIMKEGNGNGSNGLSSNGKTLAMRPKSASRAALFPESESGWLDSIPVGLGESIFTDGFSGVRKSSSASSLREQEKNNSAAAWPPAIWSLKPDLQAAISKPIFDGLPIPISGRRSKAALD

SEQ ID NO: 5728 - protein, 302 aa, Glycine max
  peptide (1)..(302): Ceres Seq. ID no. 15172126
  misc_feature (1)..(302): NCBI GI NO: 11291586 NR Description: hypothetical protein T22D6
  misc_feature (1)..(302): NCBI GI NO: 30682281 NR Description: expressed protein [Arabidopsis thaliana]
  misc_feature (1)..(302): NCBI GI NO: 22327003 NR Description: expressed protein [Arabidopsis thaliana]
  misc_feature (1)..(302): NCBI GI NO: 9759371 NR Description: gene_id:MYJ24.12~unknown protein
  misc_feature (1)..(147): NCBI GI NO: 37535512 NR Description: unknown protein
  misc_feature (1)..(21): NCBI GI NO: 24431595 NR Description: Hypothetical protein
  misc_feature (1)..(81): NCBI GI NO: 23503313 NR Description: hypothetical protein MGC35274 [Homo sapiens]
MNGLATDLQMFALKTLKIPLPGRHPPSPAPGPHDEPAKSGEASIERKPLRIGQSAMKEPLQSLELKPPQPNISPAMSILQKFYGLKSSNSRDTLNGTEMAVYLSSNSDHSSGEWLPKASPILDLPSASNDYPRSTNLVYDLLTGDDEYVPLAEIGDTGVEKSDEKSVRRRQKAEVDNGTSTPEKIMKEGNGNGSNGLSSNGKTLAMRPKSASRAALFPESESGWLDSIPVGLGESIFTDGFSGVRKSSSASSLREQEKNNSAAAWPPAIWSLKPDLQAAISKPIFDGLPIPISGRRSKAALD

SEQ ID NO: 5729 - protein, 293 aa, Glycine max
  peptide (1)..(293): Ceres Seq. ID no. 15172127
  misc_feature (1)..(293): NCBI GI NO: 11291586 NR Description: hypothetical protein T22D6
  misc_feature (1)..(293): NCBI GI NO: 30682281 NR Description: expressed protein [Arabidopsis thaliana]
  misc_feature (1)..(293): NCBI GI NO: 22327003 NR Description: expressed protein [Arabidopsis thaliana]
  misc_feature (1)..(293): NCBI GI NO: 9759371 NR Description: gene_id:MYJ24.12~unknown protein
  misc_feature (1)..(138): NCBI GI NO: 37535512 NR Description: unknown protein
  misc_feature (1)..(12): NCBI GI NO: 24431595 NR Description: Hypothetical protein
  misc_feature (1)..(72): NCBI GI NO: 23503313 NR Description: hypothetical protein MGC35274 [Homo sapiens]
MFALKTLKIPLPGRHPPSPAPGPHDEPAKSGEASIERKPLRIGQSAMKEPLQSLELKPPQPNISPAMSILQKFYGLKSSNSRDTLNGTEMAVYLSSNSDHSSGEWLPKASPILDLPSASNDYPRSTNLVYDLLTGDDEYVPLAEIGDTGVEKSDEKSVRRRQKAEVDNGTSTPEKIMKEGNGNGSNGLSSNGKTLAMRPKSASRAALFPESESGWLDSIPVGLGESIFTDGFSGVRKSSSASSLREQEKNNSAAAWPPAIWSLKPDLQAAISKPIFDGLPIPISGRRSKAALD

SEQ ID NO: 5730 - DNA, 566 bp, Glycine max
  misc_feature (1)..(566): Ceres Seq. ID no. 13581144
atatatggagagaatggagtttcagacagcaataaattatattcagaggaagtgaagaaggataatatcattagccctaaaatgaagaatgtaactgtgaaatggaatccctgttctgagaaagagcatcagttttatatttcagaagctgaactgcaaatgcatcaagctaagacgccattgtggggaaagactgggatatattttcattcagtgggtaaagaggctactttgatgatggatgaagaagctgctctcgaaggggaatttgagatcgaaaagattccaactcgtgtgatacaagctaggtcaaaagacttggttccaatttttgactatattcagacctcaaaatttcaacaaataaggtctgctttgatgactaactaattaacttactaattatctattaggtaggtcaaaagatttaggctttcgacattttgctattaatttttttgtcataacgacattacctcactttcgaaggctagagaataccaaaattgattatgttcatattgcatgtactctttgctgcatgcaaggagacagtttatttatgg

SEQ ID NO: 5731 - protein, 129 aa, Glycine max
  peptide (1)..(129): Ceres Seq. ID no. 13581145
  misc_feature (1)..(123): NCBI GI NO: 34908756 NR Description: P0415A04.11
  misc_feature (1)..(122): NCBI GI NO: 15239726 NR Description: expressed protein [Arabidopsis thaliana]
IYGENGVSDSNKLYSEEVKKDNIISPKMKNVTVKWNPCSEKEHQFYISEAELQMHQAKTPLWGKTGIYFHSVGKEATLMMDEEAALEGEFEIEKIPTRVIQARSKDLVPIFDYIQTSKFQQIRSALMTN

SEQ ID NO: 5732 - protein, 102 aa, Glycine max
  peptide (1)..(102): Ceres Seq. ID no. 13581146
  misc_feature (1)..(96): NCBI GI NO: 34908756 NR Description: P0415A04.11
  misc_feature (1)..(95): NCBI GI NO: 15239726 NR Description: expressed protein [Arabidopsis thaliana]
MKNVTVKWNPCSEKEHQFYISEAELQMHQAKTPLWGKTGIYFHSVGKEATLMMDEEAALEGEFEIEKIPTRVIQARSKDLVPIFDYIQTSKFQQIRSALMTN

SEQ ID NO: 5733 - protein, 76 aa, Glycine max
  peptide (1)..(76): Ceres Seq. ID no. 13581147
  misc_feature (1)..(70): NCBI GI NO: 34908756 NR Description: P0415A04.11
  misc_feature (1)..(69): NCBI GI NO: 15239726 NR Description: expressed protein [Arabidopsis thaliana]
MHQAKTPLWGKTGIYFHSVGKEATLMMDEEAALEGEFEIEKIPTRVIQARSKDLVPIFDYIQTSKFQQIRSALMTN

SEQ ID NO: 5734 - DNA, 1107 bp, Glycine max
  misc_feature (1)..(1107): Ceres Seq. ID no. 14303359
ttttctctctctctctccccactttcatctgtaacaagttgtcaagggcgtgtgtttttgccccacttgggagttgggacactattctatttaatttaatttcacttctggtgagagggcctcaactcttctctacttctgtgctccaatttcctgttgcttcatgcatggctccctaagggaagaaagcttgtcatttgactcttattacgttatcctgtttgcaaatttatttgctctacaatctgcttcacaggtttctctctctgtttctgctggagttgttcaaatgggagaaagagttttattctctacgtagagtttggtagacaaagataatattttgagataatgctagttccacttgccccgtaccctccaccccctccaccagctccatatacgcctccaccaaatggtgcacagagtcaactagtctgttctgggtgtagaaaccttctgctctatccagttggagccacctctgtgtgctgtgctgtttgcaatgcagtcacaacagtgccacctcctggcacagaaatggcccagttagtttgtggaggctgtcacactttcctcatgtacatccgtggagccacaagtgtgcaatgctcttgctgtcacacggtcaatctagctttggaagcaaatctggtggcgcatgtcaactgtgggaactgtaagatgctactcaggtaccaatatggagcaagatccgtgaaatgtgccgtttgcagttttgtaacgtcagttggggcctcgacaagcaccactgagcagaaattcagcacctaaatcttactgtaaaattggtgacagacaccacgaccttggttttaatcaaatatcgcccttgaggaataacgagtgcatatgagatagctgaggaaattttcttaacatgtatagagctatttttcccttgagtgaaataattaaataaattttgtattattggtgtaccatgtaatgctttatttgtaagcagtgtaagcctctaaaggaatgagtagtggagtttatagttctccaatttcaattgcagtgtgccaaaaagctatttggaataactatatatgataagattattgattctgagtgcttttg

SEQ ID NO: 5735 - protein, 147 aa, Glycine max
  peptide (1)..(147): Ceres Seq. ID no. 14303360
  misc_feature (1)..(146): NCBI GI NO: 18398482 NR Description: zinc-finger protein -related
  misc_feature (1)..(144): NCBI GI NO: 30692719 NR Description: zinc-finger protein -related
  misc_feature (1)..(147): NCBI GI NO: 34905200 NR Description: P0672D01.2
  misc_feature (1)..(98): NCBI GI NO: 25403154 NR Description: probable zinc-finger protein, 7043-7771
  misc_feature (25)..(137): NCBI GI NO: 30685083 NR Description: zinc-finger protein Lsd1 [Arabidopsis thaliana]
  misc_feature (25)..(137): NCBI GI NO: 30685085 NR Description: zinc-finger protein Lsd1 [Arabidopsis thaliana]
  misc_feature (25)..(134): NCBI GI NO: 17981380 NR Description: zinc finger protein LSD2 [Brassica oleracea]
  misc_feature (25)..(134): NCBI GI NO: 29467531 NR Description: P0582D05.23
  misc_feature (58)..(137): NCBI GI NO: 17981378 NR Description: zinc finger protein LSD1 [Brassica oleracea]
  misc_feature (64)..(138): NCBI GI NO: 32400832 NR Description: 18S subunit ribosomal protein [Triticum aestivum]
MLVPLAPYPPPPPPAPYTPPPNGAQSQLVCSGCRNLLLYPVGATSVCCAVCNAVTTVPPPGTEMAQLVCGGCHTFLMYIRGATSVQCSCCHTVNLALEANLVAHVNCGNCKMLLRYQYGARSVKCAVCSFVTSVGASTSTTEQKFST

SEQ ID NO: 5736 - protein, 84 aa, Glycine max
  peptide (1)..(84): Ceres Seq. ID no. 14303361
  misc_feature (1)..(83): NCBI GI NO: 18398482 NR Description: zinc-finger protein -related
  misc_feature (1)..(81): NCBI GI NO: 30692719 NR Description: zinc-finger protein -related
  misc_feature (1)..(84): NCBI GI NO: 34905200 NR Description: P0672D01.2
  misc_feature (1)..(35): NCBI GI NO: 25403154 NR Description: probable zinc-finger protein, 7043-7771
  misc_feature (1)..(74): NCBI GI NO: 30685083 NR Description: zinc-finger protein Lsd1 [Arabidopsis thaliana]
  misc_feature (1)..(74): NCBI GI NO: 30685085 NR Description: zinc-finger protein Lsd1 [Arabidopsis thaliana]
  misc_feature (1)..(71): NCBI GI NO: 17981380 NR Description: zinc finger protein LSD2 [Brassica oleracea]
  misc_feature (1)..(71): NCBI GI NO: 29467531 NR Description: P0582D05.23
  misc_feature (1)..(74): NCBI GI NO: 17981378 NR Description: zinc finger protein LSD1 [Brassica oleracea]
  misc_feature (1)..(75): NCBI GI NO: 32400832 NR Description: 18S subunit ribosomal protein [Triticum aestivum]
MAQLVCGGCHTFLMYIRGATSVQCSCCHTVNLALEANLVAHVNCGNCKMLLRYQYGARSVKCAVCSFVTSVGASTSTTEQKFST

SEQ ID NO: 5737 - DNA, 1448 bp, Glycine max
  misc_feature (1)..(1448): Ceres Seq. ID no. 14304859
attgacaacgactcctttagaagacagaaaattcttgaagagtgaaatgaccaatgatgcaaatttatcccgagttaagcctttggcatctgaaatccctcacaaagattatgcggatagatttgatagaaaaatctcgcaagtcggagaaatcaagtatcatgaagaaccagatgaggaacttgtcagacattacaagcgtcttccaaatagtatccttacagagcaatctcttaaagatatgctttctgattccctcacttcactgaatctagctaacctcaagtgggtgaaaaacgaacatttgaataagcttggttttgttgctccaaacttagtggagcttaatatttcaggtaccgttgctaatgacaccacccttgaagaaattggcaagacatgcttgaatcttaagtcaattgacatttctcattgtccggagcttactgagaaaggagtccgagcatttttcgagaactgtccccctattcaaaaattctgggcatcaacttgtcccaattctgtaacagatgagtcattggcctatttcacaaatgctgaagaattaactacattcaatatcgaattttgttctaaggtcagtgacgtatccctccaggtcattgtcgaagctgctcctccactcaaagagttatacgtttcaggctgtactaaaattaccggaaagattgtaaccgctttaatacagataggaaattaccaattagaaattgccgaaatctcaaacttaagccaagctgagtttgataacgagaccatgaaagcggtcggaacatgttcaaagttaagaagattaaacatttcaggggatagtaatattggagatgaaggtgtacacaacttgatctcaggatataaggaagcagatgattcattggtgaagaaagatgaagggttcaagcacttagttgagtttagaatgagttcaaccaagatcaattctgaaggcgctgtgataaaattctgcaatgcttgtccaaacttggagatcttggacatgaatggttttgtgcctgtaggagagactggaataaatatgatctgcaaatcattatctaagcttaagatctgcttgataaactttacggataagatatcagatccttacctagttgagcttcgtcagacttatcctgatgtgaagtttgtccgcacaataattgcgcctagtaatccagctgataatgaattgagagtgccattcccaaggattcaacaaggaaagaagaaaaagaagaagggtaagaagaagaagtaaaaaggcatagtttagcagttgatattgtaataatataaatatttctatattaaagagctttttttttgttgctgcctcagaacctttattttagtttatttttgctgatatatgacttaatttaaggagatatattccatatatactaaaaacactcttagcttaattc

SEQ ID NO: 5738 - protein, 425 aa, Glycine max
  peptide (1)..(425): Ceres Seq. ID no. 14304860
  misc_feature (85)..(410): NCBI GI NO: 31226369 NR Description: ENSANGP00000010053 [Anopheles gambiae]
  misc_feature (75)..(399): NCBI GI NO: 26336707 NR Description: unnamed protein product [Mus musculus]
  misc_feature (75)..(399): NCBI GI NO: 30519963 NR Description: F-box and leucine-rich repeat protein 2
  misc_feature (75)..(399): NCBI GI NO: 5919219 NR Description: leucine-rich repeats containing F-box protein FBL3
  misc_feature (75)..(399): NCBI GI NO: 6063090 NR Description: F-box protein FBL2 [Homo sapiens]
  misc_feature (75)..(399): NCBI GI NO: 7022695 NR Description: unnamed protein product [Homo sapiens]
  misc_feature (75)..(399): NCBI GI NO: 16306582 NR Description: F-box and leucine-rich repeat protein 2
  misc_feature (75)..(399): NCBI GI NO: 6164721 NR Description: F-box protein Fbl2 [Homo sapiens]
  misc_feature (106)..(410): NCBI GI NO: 15237286 NR Description: expressed protein [Arabidopsis thaliana]
  misc_feature (89)..(399): NCBI GI NO: 27734755 NR Description: F-box protein FBL2 [Homo sapiens]
LTTTPLEDRKFLKSEMTNDANLSRVKPLASEIPHKDYADRFDRKISQVGEIKYHEEPDEELVRHYKRLPNSILTEQSLKDMLSDSLTSLNLANLKWVKNEHLNKLGFVAPNLVELNISGTVANDTTLEEIGKTCLNLKSIDISHCPELTEKGVRAFFENCPPIQKFWASTCPNSVTDESLAYFTNAEELTTFNIEFCSKVSDVSLQVIVEAAPPLKELYVSGCTKITGKIVTALIQIGNYQLEIAEISNLSQAEFDNETMKAVGTCSKLRRLNISGDSNIGDEGVHNLISGYKEADDSLVKKDEGFKHLVEFRMSSTKINSEGAVIKFCNACPNLEILDMNGFVPVGETGINMICKSLSKLKICLINFTDKISDPYLVELRQTYPDVKFVRTIIAPSNPADNELRVPFPRIQQGKKKKKKGKKKK

SEQ ID NO: 5739 - protein, 410 aa, Glycine max
  peptide (1)..(410): Ceres Seq. ID no. 14304861
  misc_feature (70)..(395): NCBI GI NO: 31226369 NR Description: ENSANGP00000010053 [Anopheles gambiae]
  misc_feature (60)..(384): NCBI GI NO: 26336707 NR Description: unnamed protein product [Mus musculus]
  misc_feature (60)..(384): NCBI GI NO: 30519963 NR Description: F-box and leucine-rich repeat protein 2
  misc_feature (60)..(384): NCBI GI NO: 5919219 NR Description: leucine-rich repeats containing F-box protein FBL3
  misc_feature (60)..(384): NCBI GI NO: 6063090 NR Description: F-box protein FBL2 [Homo sapiens]
  misc_feature (60)..(384): NCBI GI NO: 16306582 NR Description: F-box and leucine-rich repeat protein 2
  misc_feature (60)..(384): NCBI GI NO: 7022695 NR Description: unnamed protein product [Homo sapiens]
  misc_feature (60)..(384): NCBI GI NO: 6164721 NR Description: F-box protein Fbl2 [Homo sapiens]
  misc_feature (91)..(395): NCBI GI NO: 15237286 NR Description: expressed protein [Arabidopsis thaliana]
  misc_feature (74)..(384): NCBI GI NO: 27734755 NR Description: F-box protein FBL2 [Homo sapiens]
MTNDANLSRVKPLASEIPHKDYADRFDRKISQVGEIKYHEEPDEELVRHYKRLPNSILTEQSLKDMLSDSLTSLNLANLKWVKNEHLNKLGFVAPNLVELNISGTVANDTTLEEIGKTCLNLKSIDISHCPELTEKGVRAFFENCPPIQKFWASTCPNSVTDESLAYFTNAEELTTFNIEFCSKVSDVSLQVIVEAAPPLKELYVSGCTKITGKIVTALIQIGNYQLEIAEISNLSQAEFDNETMKAVGTCSKLRRLNISGDSNIGDEGVHNLISGYKEADDSLVKKDEGFKHLVEFRMSSTKINSEGAVIKFCNACPNLEILDMNGFVPVGETGINMICKSLSKLKICLINFTDKISDPYLVELRQTYPDVKFVRTIIAPSNPADNELRVPFPRIQQGKKKKKKGKKKK

SEQ ID NO: 5740 - protein, 345 aa, Glycine max
  peptide (1)..(345): Ceres Seq. ID no. 14304862
  misc_feature (5)..(330): NCBI GI NO: 31226369 NR Description: ENSANGP00000010053 [Anopheles gambiae]
  misc_feature (1)..(319): NCBI GI NO: 26336707 NR Description: unnamed protein product [Mus musculus]
  misc_feature (1)..(319): NCBI GI NO: 30519963 NR Description: F-box and leucine-rich repeat protein 2
  misc_feature (1)..(319): NCBI GI NO: 5919219 NR Description: leucine-rich repeats containing F-box protein FBL3
  misc_feature (1)..(319): NCBI GI NO: 6063090 NR Description: F-box protein FBL2 [Homo sapiens]
  misc_feature (1)..(319): NCBI GI NO: 7022695 NR Description: unnamed protein product [Homo sapiens]
  misc_feature (1)..(319): NCBI GI NO: 16306582 NR Description: F-box and leucine-rich repeat protein 2
  misc_feature (1)..(319): NCBI GI NO: 6164721 NR Description: F-box protein Fbl2 [Homo sapiens]
  misc_feature (26)..(330): NCBI GI NO: 15237286 NR Description: expressed protein [Arabidopsis thaliana]
  misc_feature (9)..(319): NCBI GI NO: 27734755 NR Description: F-box protein FBL2 [Homo sapiens]
MLSDSLTSLNLANLKWVKNEHLNKLGFVAPNLVELNISGTVANDTTLEEIGKTCLNLKSIDISHCPELTEKGVRAFFENCPPIQKFWASTCPNSVTDESLAYFTNAEELTTFNIEFCSKVSDVSLQVIVEAAPPLKELYVSGCTKITGKIVTALIQIGNYQLEIAEISNLSQAEFDNETMKAVGTCSKLRRLNISGDSNIGDEGVHNLISGYKEADDSLVKKDEGFKHLVEFRMSSTKINSEGAVIKFCNACPNLEILDMNGFVPVGETGINMICKSLSKLKICLINFTDKISDPYLVELRQTYPDVKFVRTIIAPSNPADNELRVPFPRIQQGKKKKKKGKKKK

SEQ ID NO: 5741 - DNA, 937 bp, Glycine max
  misc_feature (1)..(937): Ceres Seq. ID no. 15170269
gaagatgcttcttcttatatgaagaatgcatctcaagtagatattccctttcctggaccattgcaagtttcaaaatcaagtggcttcgcatgggcaaaaaggcgtagagatgacacttcagttagatcccacagtcggtctatttctagaggatatatctttaattcatcagaaacttctacactaaattcaaggaataattctgaatccagaaaccatgaaaataagaaatttttcggggcacatgccaattctaggggccatgacctacttgaaatttctaagcttgccatgcaaaatcaatggagtaagtttgatcgtctagattcgtttgatacttgtgacgaataccattcacaagaactgtccgtggcactttataacaggcaagattcactatccaagagaagtaacctgagttaccaggatcaagcagaaaaggtagagttttcagggccactactatctcaaatgcacacagttgatgagctcttagaaagacacgagagtcatatccggcgtacggtcagaagatcatggtttcagagaggtaagaagcaagggaagtaactgcaactgtaatatttattcttgaaaggatatagatcctcgtatatcaaatcaaatgtccttgtgaaagggccttctccattcaccaagcacactcgctgctgtgactttgagcaacaatgaacattatcatgtacacatagacacagttaccagcagcatgagatgttacctagaagcttggaaactaactaatttgaggagtgtaattcaatttatagaaatcagaaggccgtggagaagagaagagaggctttttttttcttctttttcaccatggattctctatttttggccaattataatatagaaaaatttatttctgtatgatctaaacttcctcaatcctattgcctttgcctttggt

SEQ ID NO: 5742 - protein, 189 aa, Glycine max
  peptide (1)..(189): Ceres Seq. ID no. 15170270
  misc_feature (1)..(186): NCBI GI NO: 33146814 NR Description: putative cyclin-dependent kinase CDC2C
  misc_feature (1)..(139): NCBI GI NO: 15221833 NR Description: protein kinase -related [Arabidopsis thaliana]
  misc_feature (1)..(138): NCBI GI NO: 22330629 NR Description: protein kinase -related [Arabidopsis thaliana]
EDASSYMKNASQVDIPFPGPLQVSKSSGFAWAKRRRDDTSVRSHSRSISRGYIFNSSETSTLNSRNNSESRNHENKKFFGAHANSRGHDLLEISKLAMQNQWSKFDRLDSFDTCDEYHSQELSVALYNRQDSLSKRSNLSYQDQAEKVEFSGPLLSQMHTVDELLERHESHIRRTVRRSWFQRGKKQGK

SEQ ID NO: 5743 - protein, 183 aa, Glycine max
  peptide (1)..(183): Ceres Seq. ID no. 15170271
  misc_feature (1)..(180): NCBI GI NO: 33146814 NR Description: putative cyclin-dependent kinase CDC2C
  misc_feature (1)..(133): NCBI GI NO: 15221833 NR Description: protein kinase -related [Arabidopsis thaliana]
  misc_feature (1)..(132): NCBI GI NO: 22330629 NR Description: protein kinase -related [Arabidopsis thaliana]
MKNASQVDIPFPGPLQVSKSSGFAWAKRRRDDTSVRSHSRSISRGYIFNSSETSTLNSRNNSESRNHENKKFFGAHANSRGHDLLEISKLAMQNQWSKFDRLDSFDTCDEYHSQELSVALYNRQDSLSKRSNLSYQDQAEKVEFSGPLLSQMHTVDELLERHESHIRRTVRRSWFQRGKKQGK

SEQ ID NO: 5744 - DNA, 1377 bp, Glycine max
  misc_feature (1)..(1377): Ceres Seq. ID no. 14306949
tttttcttccctttttttataaattttttagaggctaacatggaggaggttgagcaagctaatagagtagctgttgaaagctgccatagggttctgagtttgttgtctcaaccaagggatcaggttcagcataggaatttaatggtggaaaccggtgaaactgtggtgaggttcaagaaggttgtttccatgcttcacaatggtttgggtcatgcaagagtgaggaaacttaaaaaccctcaaatcccctcttcccaccaaagcatcttcttagacaaccccaattgcaaaaccttaaccaacaacagcaacaacaaccatcactccaaaaaaaatctatactttccccaaaccagctaccctgacaattcagttcaggaacatggttcaaccattaagaattctctctctcttggacaaccctctttggaattgagctccaatgggaaaagtcctcttcacctcacacagcagggttcatcaaatcactatcacttctttcagcagcagcaacagcaaaggttgttgcagcagcagcagcaacaacaacaaatgaagcatcaagctgaaatgttgttccgaaggaacaatagtggcataaacctgaattttgacagcactagctgcacaccaacaatgtcatccactaagtcttttatttcttccttgagcatagatggaagtgtggctaacttggatggaagtgccttccatttaataggagctccacactcttctgatcagaattcgcaacagcctaagagaaaatgttctgccagaggcgatgagggaagcttgaaatgtgggagcagtgctagatgtcattgctctaagaagaggaaacatagagtgaagagggcaattaaggtgcctgctatcagcaacaaacttgcagatatccctcctgatgattattcgtggaggaagtatggacagaagccaatcaagggctctcctcaccctaggggatattacaagtgcagcagcatgagagggtgtcctgcaaggaagcatgttgagaggtgcttggaagagcctaccatgctaattgtcacctatgaaggtgaacataaccaccccaagttaccaacacaatctgcaaatgcatgaaactatgtggagagcttaaccagatcaagccaatcattcaattcgtcaaatcctctatgtgattggcttgagatgctgctgtacatatttttagtgatgcaaacaagcagggatggataatattgttggcgcagattttgtcttttggatagtttggctatccagccgttttatttagagggtgaggatgaggatcactgattaaatgaacaaagtctgtaaaattagctagtttcaattcctaagaactatttaatctttcttaag

SEQ ID NO: 5745 - protein, 369 aa, Glycine max
  peptide (1)..(369): Ceres Seq. ID no. 14306950
  misc_feature (301)..(361): Pfam Name: Pfam Description:  WRKY DNA -binding domain
  misc_feature (104)..(368): NCBI GI NO: 15241875 NR Description: WRKY family transcription factor
  misc_feature (14)..(103): NCBI GI NO: 15241875 NR Description: WRKY family transcription factor
  misc_feature (104)..(368): NCBI GI NO: 29839595 NR Description: Probable WRKY transcription factor 74
  misc_feature (14)..(103): NCBI GI NO: 29839595 NR Description: Probable WRKY transcription factor 74
  misc_feature (136)..(366): NCBI GI NO: 18402397 NR Description: WRKY family transcription factor
  misc_feature (187)..(368): NCBI GI NO: 18396971 NR Description: WRKY family transcription factor
  misc_feature (14)..(172): NCBI GI NO: 18396971 NR Description: WRKY family transcription factor
  misc_feature (109)..(367): NCBI GI NO: 11993901 NR Description: somatic embryogenesis related protein
  misc_feature (14)..(92): NCBI GI NO: 11993901 NR Description: somatic embryogenesis related protein
  misc_feature (115)..(367): NCBI GI NO: 40539044 NR Description: putative somatic embryogenesis related protein
FFFPFFINFLEANMEEVEQANRVAVESCHRVLSLLSQPRDQVQHRNLMVETGETVVRFKKVVSMLHNGLGHARVRKLKNPQIPSSHQSIFLDNPNCKTLTNNSNNNHHSKKNLYFPQTSYPDNSVQEHGSTIKNSLSLGQPSLELSSNGKSPLHLTQQGSSNHYHFFQQQQQQRLLQQQQQQQQMKHQAEMLFRRNNSGINLNFDSTSCTPTMSSTKSFISSLSIDGSVANLDGSAFHLIGAPHSSDQNSQQPKRKCSARGDEGSLKCGSSARCHCSKKRKHRVKRAIKVPAISNKLADIPPDDYSWRKYGQKPIKGSPHPRGYYKCSSMRGCPARKHVERCLEEPTMLIVTYEGEHNHPKLPTQSANA

SEQ ID NO: 5746 - protein, 356 aa, Glycine max
  peptide (1)..(356): Ceres Seq. ID no. 14306951
  misc_feature (288)..(348): Pfam Name: Pfam Description:  WRKY DNA -binding domain
  misc_feature (91)..(355): NCBI GI NO: 15241875 NR Description: WRKY family transcription factor
  misc_feature (1)..(90): NCBI GI NO: 15241875 NR Description: WRKY family transcription factor
  misc_feature (91)..(355): NCBI GI NO: 29839595 NR Description: Probable WRKY transcription factor 74
  misc_feature (1)..(90): NCBI GI NO: 29839595 NR Description: Probable WRKY transcription factor 74
  misc_feature (123)..(353): NCBI GI NO: 18402397 NR Description: WRKY family transcription factor
  misc_feature (174)..(355): NCBI GI NO: 18396971 NR Description: WRKY family transcription factor
  misc_feature (1)..(159): NCBI GI NO: 18396971 NR Description: WRKY family transcription factor
  misc_feature (96)..(354): NCBI GI NO: 11993901 NR Description: somatic embryogenesis related protein
  misc_feature (1)..(79): NCBI GI NO: 11993901 NR Description: somatic embryogenesis related protein
  misc_feature (102)..(354): NCBI GI NO: 40539044 NR Description: putative somatic embryogenesis related protein
MEEVEQANRVAVESCHRVLSLLSQPRDQVQHRNLMVETGETVVRFKKVVSMLHNGLGHARVRKLKNPQIPSSHQSIFLDNPNCKTLTNNSNNNHHSKKNLYFPQTSYPDNSVQEHGSTIKNSLSLGQPSLELSSNGKSPLHLTQQGSSNHYHFFQQQQQQRLLQQQQQQQQMKHQAEMLFRRNNSGINLNFDSTSCTPTMSSTKSFISSLSIDGSVANLDGSAFHLIGAPHSSDQNSQQPKRKCSARGDEGSLKCGSSARCHCSKKRKHRVKRAIKVPAISNKLADIPPDDYSWRKYGQKPIKGSPHPRGYYKCSSMRGCPARKHVERCLEEPTMLIVTYEGEHNHPKLPTQSANA

SEQ ID NO: 5747 - protein, 322 aa, Glycine max
  peptide (1)..(322): Ceres Seq. ID no. 14306952
  misc_feature (254)..(314): Pfam Name: Pfam Description:  WRKY DNA -binding domain
  misc_feature (57)..(321): NCBI GI NO: 15241875 NR Description: WRKY family transcription factor
  misc_feature (1)..(56): NCBI GI NO: 15241875 NR Description: WRKY family transcription factor
  misc_feature (57)..(321): NCBI GI NO: 29839595 NR Description: Probable WRKY transcription factor 74
  misc_feature (1)..(56): NCBI GI NO: 29839595 NR Description: Probable WRKY transcription factor 74
  misc_feature (89)..(319): NCBI GI NO: 18402397 NR Description: WRKY family transcription factor
  misc_feature (140)..(321): NCBI GI NO: 18396971 NR Description: WRKY family transcription factor
  misc_feature (1)..(125): NCBI GI NO: 18396971 NR Description: WRKY family transcription factor
  misc_feature (62)..(320): NCBI GI NO: 11993901 NR Description: somatic embryogenesis related protein
  misc_feature (1)..(45): NCBI GI NO: 11993901 NR Description: somatic embryogenesis related protein
  misc_feature (68)..(320): NCBI GI NO: 40539044 NR Description: putative somatic embryogenesis related protein
MVETGETVVRFKKVVSMLHNGLGHARVRKLKNPQIPSSHQSIFLDNPNCKTLTNNSNNNHHSKKNLYFPQTSYPDNSVQEHGSTIKNSLSLGQPSLELSSNGKSPLHLTQQGSSNHYHFFQQQQQQRLLQQQQQQQQMKHQAEMLFRRNNSGINLNFDSTSCTPTMSSTKSFISSLSIDGSVANLDGSAFHLIGAPHSSDQNSQQPKRKCSARGDEGSLKCGSSARCHCSKKRKHRVKRAIKVPAISNKLADIPPDDYSWRKYGQKPIKGSPHPRGYYKCSSMRGCPARKHVERCLEEPTMLIVTYEGEHNHPKLPTQSANA

SEQ ID NO: 5748 - DNA, 1496 bp, Glycine max
  misc_feature (1)..(1496): Ceres Seq. ID no. 15177818
acaaaatcgcccgcagtttcatcttcttcttcactctcttgctctcagtctcagactatttttctgaaagcatttcaaatggttgatagcaatccttcctctggatcacccgaagaaacacaaaatcccaacccagatgggaatgcacctgttgaaagtgatcttgcattggagaatctagcccaaaaagttcaagaatctctctctctggaaaaaagacataaattttgggaaacccaacctgttgggcagttcaaggatgtaggggactccagtttgccagaaggcccgattgaacttccaacccccttatctgaggtcaaacaagaaccatacaaccttcctgaccactatgaatgggttacttgtgacataaactctgaggagacgtgtgatgaggtatacaaccttcttgctcataattatgttgaggatgatgagaatatgtttcgatttaactactcaaaggaatttctgcgctgggctctgcaacctccgggttatttcaagagttggcatattggtgtccgtgttaaaagttccaagaagatggttgcctttataacaggtattcctgctagaatccgagttcgtgatgaggttgttcatatggcagagatcaattttctgtgtgtccataagaagcttcgaacaaagaggcttgctcctgtcatgatcaaagaggtcaccaggagggtgcatctggaaaatatgtggcaggcagcctacactgctggagtagttctccctacaccaataacaacttgtcaatactggcacagatctttgaatcccaagaagctaattgatgttggtttttctcggcttggtgcacgaatgacaatgagtcgaaccatcaagctttacaagctaccagaatcaacaatcaccccagggtttaggaagatggaaattcatgacgttcctgcagttaccaggctaattagaaattatttgagtcattttgttgttgcacctgattttgatgaaaacgatgtggagcattggcttcttccaagggatggtgttattgacagttatctggttgaaagtccggaaactcacgaggtcacggacttttgtagtttttacacacttccttcttctatccttggccacctaaattataaaattttgaaagcagcatattcattttataatgtttccacagtaactcctttgcttcagctgataaatgatgctctcattgtcgcaaaacacaaggattatgatgttttcaatgcattagatgtcatgcagaatgagaccttcttgagggaactgaagtttggaccaggtgatgggaaacttcattattatctttacaactaccgaataaggcatgcattgaagccatcagagcttgggcttgtgcttctgtagtctaaattttggaaatttgtcttgctatattgggatttataatggttttgctgtagacattgtatggttgcaaattatgtggtgatcaacgattagaccttaaattttgcttc

SEQ ID NO: 5749 - protein, 460 aa, Glycine max
  peptide (1)..(460): Ceres Seq. ID no. 15177819
  misc_feature (270)..(459): Pfam Name: Pfam Description:  Myristoyl-CoA:protein N-myristoyltransferase
  misc_feature (27)..(460): NCBI GI NO: 18423927 NR Description: N-myristoyl transferase [Arabidopsis thaliana]
  misc_feature (50)..(460): NCBI GI NO: 34910442 NR Description: putative N-myristoyl transferase
  misc_feature (170)..(460): NCBI GI NO: 8777442 NR Description: N-myristoyl transferase [Arabidopsis thaliana]
  misc_feature (27)..(106): NCBI GI NO: 8777442 NR Description: N-myristoyl transferase [Arabidopsis thaliana]
  misc_feature (72)..(459): NCBI GI NO: 13924516 NR Description: N-myristoyltransferase-like protein 2
  misc_feature (2)..(459): NCBI GI NO: 13623535 NR Description: N-myristoyltransferase 2 [Homo sapiens]
  misc_feature (2)..(459): NCBI GI NO: 30584349 NR Description: Homo sapiens N-myristoyltransferase 2
  misc_feature (2)..(459): NCBI GI NO: 4758816 NR Description: glycylpeptide N-tetradecanoyltransferase 2
  misc_feature (22)..(459): NCBI GI NO: 22902271 NR Description: Nmt2 protein [Mus musculus]
  misc_feature (56)..(459): NCBI GI NO: 6679084 NR Description: N-myristoyltransferase 2 [Mus musculus]
TKSPAVSSSSSLSCSQSQTIFLKAFQMVDSNPSSGSPEETQNPNPDGNAPVESDLALENLAQKVQESLSLEKRHKFWETQPVGQFKDVGDSSLPEGPIELPTPLSEVKQEPYNLPDHYEWVTCDINSEETCDEVYNLLAHNYVEDDENMFRFNYSKEFLRWALQPPGYFKSWHIGVRVKSSKKMVAFITGIPARIRVRDEVVHMAEINFLCVHKKLRTKRLAPVMIKEVTRRVHLENMWQAAYTAGVVLPTPITTCQYWHRSLNPKKLIDVGFSRLGARMTMSRTIKLYKLPESTITPGFRKMEIHDVPAVTRLIRNYLSHFVVAPDFDENDVEHWLLPRDGVIDSYLVESPETHEVTDFCSFYTLPSSILGHLNYKILKAAYSFYNVSTVTPLLQLINDALIVAKHKDYDVFNALDVMQNETFLRELKFGPGDGKLHYYLYNYRIRHALKPSELGLVLL

SEQ ID NO: 5750 - protein, 434 aa, Glycine max
  peptide (1)..(434): Ceres Seq. ID no. 15177820
  misc_feature (244)..(433): Pfam Name: Pfam Description:  Myristoyl-CoA:protein N-myristoyltransferase
  misc_feature (1)..(434): NCBI GI NO: 18423927 NR Description: N-myristoyl transferase [Arabidopsis thaliana]
  misc_feature (24)..(434): NCBI GI NO: 34910442 NR Description: putative N-myristoyl transferase
  misc_feature (144)..(434): NCBI GI NO: 8777442 NR Description: N-myristoyl transferase [Arabidopsis thaliana]
  misc_feature (1)..(80): NCBI GI NO: 8777442 NR Description: N-myristoyl transferase [Arabidopsis thaliana]
  misc_feature (46)..(433): NCBI GI NO: 13924516 NR Description: N-myristoyltransferase-like protein 2
  misc_feature (1)..(433): NCBI GI NO: 13623535 NR Description: N-myristoyltransferase 2 [Homo sapiens]
  misc_feature (1)..(433): NCBI GI NO: 30584349 NR Description: Homo sapiens N-myristoyltransferase 2
  misc_feature (1)..(433): NCBI GI NO: 4758816 NR Description: glycylpeptide N-tetradecanoyltransferase 2
  misc_feature (1)..(433): NCBI GI NO: 22902271 NR Description: Nmt2 protein [Mus musculus]
  misc_feature (30)..(433): NCBI GI NO: 6679084 NR Description: N-myristoyltransferase 2 [Mus musculus]
MVDSNPSSGSPEETQNPNPDGNAPVESDLALENLAQKVQESLSLEKRHKFWETQPVGQFKDVGDSSLPEGPIELPTPLSEVKQEPYNLPDHYEWVTCDINSEETCDEVYNLLAHNYVEDDENMFRFNYSKEFLRWALQPPGYFKSWHIGVRVKSSKKMVAFITGIPARIRVRDEVVHMAEINFLCVHKKLRTKRLAPVMIKEVTRRVHLENMWQAAYTAGVVLPTPITTCQYWHRSLNPKKLIDVGFSRLGARMTMSRTIKLYKLPESTITPGFRKMEIHDVPAVTRLIRNYLSHFVVAPDFDENDVEHWLLPRDGVIDSYLVESPETHEVTDFCSFYTLPSSILGHLNYKILKAAYSFYNVSTVTPLLQLINDALIVAKHKDYDVFNALDVMQNETFLRELKFGPGDGKLHYYLYNYRIRHALKPSELGLVLL

SEQ ID NO: 5751 - protein, 312 aa, Glycine max
  peptide (1)..(312): Ceres Seq. ID no. 15177821
  misc_feature (122)..(311): Pfam Name: Pfam Description:  Myristoyl-CoA:protein N-myristoyltransferase
  misc_feature (1)..(312): NCBI GI NO: 18423927 NR Description: N-myristoyl transferase [Arabidopsis thaliana]
  misc_feature (1)..(312): NCBI GI NO: 34910442 NR Description: putative N-myristoyl transferase
  misc_feature (22)..(312): NCBI GI NO: 8777442 NR Description: N-myristoyl transferase [Arabidopsis thaliana]
  misc_feature (1)..(311): NCBI GI NO: 13924516 NR Description: N-myristoyltransferase-like protein 2
  misc_feature (1)..(311): NCBI GI NO: 13623535 NR Description: N-myristoyltransferase 2 [Homo sapiens]
  misc_feature (1)..(311): NCBI GI NO: 30584349 NR Description: Homo sapiens N-myristoyltransferase 2
  misc_feature (1)..(311): NCBI GI NO: 4758816 NR Description: glycylpeptide N-tetradecanoyltransferase 2
  misc_feature (1)..(311): NCBI GI NO: 22902271 NR Description: Nmt2 protein [Mus musculus]
  misc_feature (1)..(311): NCBI GI NO: 6679084 NR Description: N-myristoyltransferase 2 [Mus musculus]
  misc_feature (1)..(311): NCBI GI NO: 34877234 NR Description: similar to N-myristoyltransferase 2
MFRFNYSKEFLRWALQPPGYFKSWHIGVRVKSSKKMVAFITGIPARIRVRDEVVHMAEINFLCVHKKLRTKRLAPVMIKEVTRRVHLENMWQAAYTAGVVLPTPITTCQYWHRSLNPKKLIDVGFSRLGARMTMSRTIKLYKLPESTITPGFRKMEIHDVPAVTRLIRNYLSHFVVAPDFDENDVEHWLLPRDGVIDSYLVESPETHEVTDFCSFYTLPSSILGHLNYKILKAAYSFYNVSTVTPLLQLINDALIVAKHKDYDVFNALDVMQNETFLRELKFGPGDGKLHYYLYNYRIRHALKPSELGLVLL

SEQ ID NO: 5752 - DNA, 1296 bp, Glycine max
  misc_feature (1)..(1296): Ceres Seq. ID no. 14303417
ggtgccattcccttcacaccattctcacaaaacaactttcaaactctgagaaagaatggctgccaacacattgatgagtactgctatctcagccttcccatctctcctttcttcctcaaaatccagatttgccaccgcagttcctctttctagctttggtgtcaccaatgcctcttcttctcgcttttctatgagtgctgactggatgccaggccagcctagacctccttaccttgatggttcagcacctggtgactttggattcgaccctcttcgtcttggtgaagtaccagagaatcttgagaggttcaaagagtcagaactcattcactgcagatgggccatgcttgctgttccagggattttggttccagaggcattgggcttaggcaactgggtaaaggctcaggaatgggcagcagttcctgggggccaagcaacctacctaggcaatccagttccatggggcaccctacccaccattctggccattgaattccttgctatttcctttgtggagcaccaaaggagcatggagaaggacccagagaagaagaaataccctggtggtgcttttgatcctttgggatactctaaggaccctaaaacattccatgaatacaaagtcaaagaacttaagaatggacgtcttgttttgttggcttttgtgggattctgtgttcaacaatcagcttatcccggcactggacctttggagaacttggctgctcacttggctgacccatggcacaacaacattggaaacatcattattccacaatcgattttgccttgaaaaaaaaaaatcaaatatttgtttcaatagctacctgtataattccatgtaacattttgtaacgaatcgggttgctacgttggtatctctgtgttgtaattaaacttcgaattcaaactcatactctggcaactcgttggtatgacagaaaagcttgaaacaaacttccaagtccaagtttaaaacttgcattacatgattacatccatatctaatgatgaataaaacatgttttggaccaactgcagcctgcaaagtgccaatttccttgaatgcttcctaaagtattaggcatccggtgtattccagcaaatattatgtcagctaacgacttttcaacaacatttggttttgttaaaactgattttcctgcaaaataataagtcagctaaacttatatacatgtctcaaattcagcattcagaactaagggagtctaacttgagtagggtgcatgagtttttaaaccccttggtacctgtgtttgattcctacaagtc

SEQ ID NO: 5753 - protein, 246 aa, Glycine max
  peptide (1)..(246): Ceres Seq. ID no. 14303418
  misc_feature (55)..(212): Pfam Name: Pfam Description:  Chlorophyll A-B binding protein
  misc_feature (1)..(246): NCBI GI NO: 625547 NR Description: chlorophyll a/b-binding protein type I
  misc_feature (1)..(246): NCBI GI NO: 82078 NR Description: chlorophyll a/b-binding protein type I precursor
  misc_feature (1)..(246): NCBI GI NO: 82079 NR Description: chlorophyll a/b-binding protein type I precursor
  misc_feature (1)..(246): NCBI GI NO: 115764 NR Description: Chlorophyll A-B binding protein 6A
  misc_feature (1)..(241): NCBI GI NO: 15233115 NR Description: light-harvesting chlorophyll a/b binding protein
  misc_feature (1)..(241): NCBI GI NO: 13265501 NR Description: AT3g54890 [Arabidopsis thaliana]
  misc_feature (1)..(246): NCBI GI NO: 3789954 NR Description: chlorophyll a/b-binding protein precursor
  misc_feature (1)..(244): NCBI GI NO: 6685157 NR Description: chlorophyll a/b binding protein precursor
  misc_feature (1)..(246): NCBI GI NO: 99485 NR Description: chlorophyll a/b-binding protein type 1 precursor
  misc_feature (42)..(246): NCBI GI NO: 20790 NR Description: Type 1 chlorophyll a /b-binding protein
MAANTLMSTAISAFPSLLSSSKSRFATAVPLSSFGVTNASSSRFSMSADWMPGQPRPPYLDGSAPGDFGFDPLRLGEVPENLERFKESELIHCRWAMLAVPGILVPEALGLGNWVKAQEWAAVPGGQATYLGNPVPWGTLPTILAIEFLAISFVEHQRSMEKDPEKKKYPGGAFDPLGYSKDPKTFHEYKVKELKNGRLVLLAFVGFCVQQSAYPGTGPLENLAAHLADPWHNNIGNIIIPQSILP

SEQ ID NO: 5754 - protein, 240 aa, Glycine max
  peptide (1)..(240): Ceres Seq. ID no. 14303419
  misc_feature (49)..(206): Pfam Name: Pfam Description:  Chlorophyll A-B binding protein
  misc_feature (1)..(240): NCBI GI NO: 625547 NR Description: chlorophyll a/b-binding protein type I
  misc_feature (1)..(240): NCBI GI NO: 82078 NR Description: chlorophyll a/b-binding protein type I precursor
  misc_feature (1)..(240): NCBI GI NO: 82079 NR Description: chlorophyll a/b-binding protein type I precursor
  misc_feature (1)..(240): NCBI GI NO: 115764 NR Description: Chlorophyll A-B binding protein 6A
  misc_feature (1)..(235): NCBI GI NO: 15233115 NR Description: light-harvesting chlorophyll a/b binding protein
  misc_feature (1)..(235): NCBI GI NO: 13265501 NR Description: AT3g54890 [Arabidopsis thaliana]
  misc_feature (1)..(240): NCBI GI NO: 3789954 NR Description: chlorophyll a/b-binding protein precursor
  misc_feature (1)..(238): NCBI GI NO: 6685157 NR Description: chlorophyll a/b binding protein precursor
  misc_feature (1)..(240): NCBI GI NO: 99485 NR Description: chlorophyll a/b-binding protein type 1 precursor
  misc_feature (36)..(240): NCBI GI NO: 20790 NR Description: Type 1 chlorophyll a /b-binding protein
MSTAISAFPSLLSSSKSRFATAVPLSSFGVTNASSSRFSMSADWMPGQPRPPYLDGSAPGDFGFDPLRLGEVPENLERFKESELIHCRWAMLAVPGILVPEALGLGNWVKAQEWAAVPGGQATYLGNPVPWGTLPTILAIEFLAISFVEHQRSMEKDPEKKKYPGGAFDPLGYSKDPKTFHEYKVKELKNGRLVLLAFVGFCVQQSAYPGTGPLENLAAHLADPWHNNIGNIIIPQSILP

SEQ ID NO: 5755 - protein, 201 aa, Glycine max
  peptide (1)..(201): Ceres Seq. ID no. 14303420
  misc_feature (10)..(167): Pfam Name: Pfam Description:  Chlorophyll A-B binding protein
  misc_feature (1)..(201): NCBI GI NO: 625547 NR Description: chlorophyll a/b-binding protein type I
  misc_feature (1)..(201): NCBI GI NO: 82078 NR Description: chlorophyll a/b-binding protein type I precursor
  misc_feature (1)..(201): NCBI GI NO: 82079 NR Description: chlorophyll a/b-binding protein type I precursor
  misc_feature (1)..(201): NCBI GI NO: 115764 NR Description: Chlorophyll A-B binding protein 6A
  misc_feature (1)..(196): NCBI GI NO: 15233115 NR Description: light-harvesting chlorophyll a/b binding protein
  misc_feature (1)..(196): NCBI GI NO: 13265501 NR Description: AT3g54890 [Arabidopsis thaliana]
  misc_feature (1)..(201): NCBI GI NO: 3789954 NR Description: chlorophyll a/b-binding protein precursor
  misc_feature (1)..(199): NCBI GI NO: 6685157 NR Description: chlorophyll a/b binding protein precursor
  misc_feature (1)..(201): NCBI GI NO: 99485 NR Description: chlorophyll a/b-binding protein type 1 precursor
  misc_feature (1)..(201): NCBI GI NO: 20790 NR Description: Type 1 chlorophyll a /b-binding protein
MSADWMPGQPRPPYLDGSAPGDFGFDPLRLGEVPENLERFKESELIHCRWAMLAVPGILVPEALGLGNWVKAQEWAAVPGGQATYLGNPVPWGTLPTILAIEFLAISFVEHQRSMEKDPEKKKYPGGAFDPLGYSKDPKTFHEYKVKELKNGRLVLLAFVGFCVQQSAYPGTGPLENLAAHLADPWHNNIGNIIIPQSILP

SEQ ID NO: 5756 - DNA, 1279 bp, Glycine max
  misc_feature (1)..(1279): Ceres Seq. ID no. 15225873
tttctatcatggaaacattatcagttggcttgaatgccaaaccatttcagaagactaaaaacacttcgaacttctctgcacctgcaagtgatcctgtttcctttcagagagaaaactgcagtgctgaaagtaaagaggctgttttgggagcaagaactaatgttgaggccaatggattgaggtcaaaagtaaacagcacacctctttctctgccaaaaaagagtacacatgaacctagaaagtcatttgacaattctagcagcaatacagacattcaagcacagaagagtgcaccttctcccaataacttgcagaagacagcgaaagaaagagataattcagatcaagtttctgaagtgcaccatgatgcttccgatgcttttccaacagagtgggtgccaccaaatttgagtgtacccattttggatctggttgatgttatcttccaggttcatgatggtggatggattaggcggaaggctttttgggttgctaaacaaatcttacaactaggaatgggtgatgcctttgatgactggttgatagagaaaattcagcttctccgtaagggttcagtggttgcttcaggggtcaagcgagttgagcaaatactctggcctgatggaatattcataaccaagcatccaaatcgacgacctccgtcaccttctagtccatctcagaattctcctcatggcaatcaacctacacaagtgtcttctccaaggttggatgatgagcagaaacaggaggcagatcggcgtgcaaaatttgtatatgagctaatgattgatcatgcaccgccagctattgtaggtcttgttggtcggaaggagtacgagcaatgtgcaagggatttatattttttccttcagtcatccgttatcttgaagcagctggcttttgacatcctggagctgctgctgacatcggcatttccggagcttgataatgtatttaagcagctgcatgaagaaaagcataaatttggtgagttcagaacacagtaaatattacaattttcagacgaggcacggagaaataatggtttagatgtttcgtcttccgaaatacattctttttcttgtgattgttcctgattgcccttttgtctctgcaaccgctatccttctctttctgccaactaatgagccaaaggcaattcaatttttccatctaccaagtcaagttttgtaattaaggttggcattttgaggcagacgtcatgtaaattttgagattaatgcaattattttgagattctttattggctaaaaag

SEQ ID NO: 5757 - protein, 335 aa, Glycine max
  peptide (1)..(335): Ceres Seq. ID no. 15225874
  misc_feature (51)..(227): NCBI GI NO: 25518623 NR Description: hypothetical protein F9L1.19
  misc_feature (237)..(270): NCBI GI NO: 25518623 NR Description: hypothetical protein F9L1.19
  misc_feature (51)..(324): NCBI GI NO: 30679545 NR Description: expressed protein [Arabidopsis thaliana]
  misc_feature (51)..(262): NCBI GI NO: 25411680 NR Description: hypothetical protein At2g15900
SIMETLSVGLNAKPFQKTKNTSNFSAPASDPVSFQRENCSAESKEAVLGARTNVEANGLRSKVNSTPLSLPKKSTHEPRKSFDNSSSNTDIQAQKSAPSPNNLQKTAKERDNSDQVSEVHHDASDAFPTEWVPPNLSVPILDLVDVIFQVHDGGWIRRKAFWVAKQILQLGMGDAFDDWLIEKIQLLRKGSVVASGVKRVEQILWPDGIFITKHPNRRPPSPSSPSQNSPHGNQPTQVSSPRLDDEQKQEADRRAKFVYELMIDHAPPAIVGLVGRKEYEQCARDLYFFLQSSVILKQLAFDILELLLTSAFPELDNVFKQLHEEKHKFGEFRTQ

SEQ ID NO: 5758 - protein, 333 aa, Glycine max
  peptide (1)..(333): Ceres Seq. ID no. 15225875
  misc_feature (49)..(225): NCBI GI NO: 25518623 NR Description: hypothetical protein F9L1.19
  misc_feature (235)..(268): NCBI GI NO: 25518623 NR Description: hypothetical protein F9L1.19
  misc_feature (49)..(322): NCBI GI NO: 30679545 NR Description: expressed protein [Arabidopsis thaliana]
  misc_feature (49)..(260): NCBI GI NO: 25411680 NR Description: hypothetical protein At2g15900
METLSVGLNAKPFQKTKNTSNFSAPASDPVSFQRENCSAESKEAVLGARTNVEANGLRSKVNSTPLSLPKKSTHEPRKSFDNSSSNTDIQAQKSAPSPNNLQKTAKERDNSDQVSEVHHDASDAFPTEWVPPNLSVPILDLVDVIFQVHDGGWIRRKAFWVAKQILQLGMGDAFDDWLIEKIQLLRKGSVVASGVKRVEQILWPDGIFITKHPNRRPPSPSSPSQNSPHGNQPTQVSSPRLDDEQKQEADRRAKFVYELMIDHAPPAIVGLVGRKEYEQCARDLYFFLQSSVILKQLAFDILELLLTSAFPELDNVFKQLHEEKHKFGEFRTQ

SEQ ID NO: 5759 - DNA, 1026 bp, Glycine max
  misc_feature (1)..(1026): Ceres Seq. ID no. 14306375
aagatgcatttttctttttctattcaacatggattgttgaaggtagctgaaagagctcttttcttatggaacaatgaccacatcgtcaacttgattgcgcataaccgacaagtgatcctgcccatcatatttccagctttagacaggaatgttcaaagccattggaaccctgctgtcgtcaacctaactcacaatattagaaagatgttcttggagatggatgagaagctcttcatttcttgtcataatcactttaaggaggaagaagcaatcttgatctcaacagcggagaagcggaaggaggcatggaaacaactagagcatgcagccagtctcaggcccgtaattggaaatactgcagttttagtgtcctgacttgcattgcgggctggatcctcaatccttgttaacctcatgttatggtggaaaatctcaagatatgtggaatagctggttattgggagtggcattttgtatttgaatcctatgttcttagccttaattgcaaaaatattcctcctatttttttcaacttactaaattggtcctcttatattttaattcactgtcagagtctttttttttttttttaaatggctatttgtgttcttagagtagaaattgaacattgatggttaaggggaaatgttactaatacgtgttattatctaattggtaagtaaaatggtaaataaaaattaatgattaataagacaatgacacttgggagtaaatgttctttattaacagtccacgttcaattttagatatgggaatttaaatagtcaattttagatatgggaatttaaatagtcaattaaaatatagaagattgattttttgagtttgagtttgaataaataggaggattattttttgcaattaagccatgtacttatgatgcttttgaagtgagagggttttgattgctactgtgtggtacatcatgatgaagaccatgcagtgaatgaaaccattttctgtgcaactttatttccaaaatcttccgtgtatgttcttttactc

SEQ ID NO: 5760 - protein, 124 aa, Glycine max
  peptide (1)..(124): Ceres Seq. ID no. 14306376
  misc_feature (14)..(111): Pfam Name: B56 family Pfam Description: Protein phosphatase 2A regulatory B subunit
  misc_feature (14)..(124): NCBI GI NO: 15239451 NR Description: AtBgamma - like protein [Arabidopsis thaliana]
  misc_feature (8)..(123): NCBI GI NO: 7160008 NR Description: putative B' regulatory subunit of PP2A
  misc_feature (8)..(123): NCBI GI NO: 21530782 NR Description: protein phosphatase 2A B'kappa subunit
  misc_feature (14)..(124): NCBI GI NO: 31712071 NR Description: putative protein phosphatase 2A regulatory subunitB'
  misc_feature (14)..(113): NCBI GI NO: 15232782 NR Description: B' regulatory subunit of PP2A (AtB'beta)
  misc_feature (14)..(112): NCBI GI NO: 15233133 NR Description: protein phosphatase 2A regulatory subunit B-relatedprotein
  misc_feature (14)..(123): NCBI GI NO: 11994401 NR Description: protein phosphatase 2A B' regulatory subunit
  misc_feature (14)..(123): NCBI GI NO: 15233119 NR Description: B regulatory subunit of PP2A -related
  misc_feature (14)..(107): NCBI GI NO: 15230961 NR Description: B regulatory subunit of protein phosphatase 2A -related
  misc_feature (14)..(124): NCBI GI NO: 21530784 NR Description: putative protein phosphatase 2A B'zeta subunit
KMHFSFSIQHGLLKVAERALFLWNNDHIVNLIAHNRQVILPIIFPALDRNVQSHWNPAVVNLTHNIRKMFLEMDEKLFISCHNHFKEEEAILISTAEKRKEAWKQLEHAASLRPVIGNTAVLVS

SEQ ID NO: 5761 - protein, 123 aa, Glycine max
  peptide (1)..(123): Ceres Seq. ID no. 14306377
  misc_feature (13)..(110): Pfam Name: B56 family Pfam Description: Protein phosphatase 2A regulatory B subunit
  misc_feature (13)..(123): NCBI GI NO: 15239451 NR Description: AtBgamma - like protein [Arabidopsis thaliana]
  misc_feature (7)..(122): NCBI GI NO: 7160008 NR Description: putative B' regulatory subunit of PP2A
  misc_feature (7)..(122): NCBI GI NO: 21530782 NR Description: protein phosphatase 2A B'kappa subunit
  misc_feature (13)..(123): NCBI GI NO: 31712071 NR Description: putative protein phosphatase 2A regulatory subunitB'
  misc_feature (13)..(112): NCBI GI NO: 15232782 NR Description: B' regulatory subunit of PP2A (AtB'beta)
  misc_feature (13)..(111): NCBI GI NO: 15233133 NR Description: protein phosphatase 2A regulatory subunit B-relatedprotein
  misc_feature (13)..(122): NCBI GI NO: 11994401 NR Description: protein phosphatase 2A B' regulatory subunit
  misc_feature (13)..(122): NCBI GI NO: 15233119 NR Description: B regulatory subunit of PP2A -related
  misc_feature (13)..(106): NCBI GI NO: 15230961 NR Description: B regulatory subunit of protein phosphatase 2A -related
  misc_feature (13)..(123): NCBI GI NO: 21530784 NR Description: putative protein phosphatase 2A B'zeta subunit
MHFSFSIQHGLLKVAERALFLWNNDHIVNLIAHNRQVILPIIFPALDRNVQSHWNPAVVNLTHNIRKMFLEMDEKLFISCHNHFKEEEAILISTAEKRKEAWKQLEHAASLRPVIGNTAVLVS

SEQ ID NO: 5762 - DNA, 1109 bp, Glycine max
  misc_feature (1)..(1109): Ceres Seq. ID no. 13637939
gttctaggggaacctgacagaggcagttaacgaacaaacagatgggttgggccatagcactacacggcggcgccggcgacatcccgctttcccttccaccggagcgccgccagcctcgcgaggaggccctccgccactgcctccaaatcggcgtggaagctctcaaggccaaactgcctcctctcgacgtggttgaacttgtctttcgggagttggagaacattccgcagtttaacgcgggaaggggatctgtgctgacttgcagaggcaccgtggaaatggaagcttccataatggacggcaccactatgaattgcggagctgtttccggcctcactaccgtcgtcaacgccatctctcttgctcgattggtcatggaaaacacgcctcacatctatctcgctttcgatggagcagaggaatttgcaagacaacaaggcgttgagactgtggattcaagccattttattacaaaagaaaatattgaaaggctaaagcaggcaaaagaagctaacagggttcagattgattatacgcaacctatccaaaatgatactaagaaagagaccgcattggctaatggtgatagccaaattggaactgttgggtgtgtggctgtagatagtcttgggaatttggcttctgcaacatctactggtggattagtgaacaaaatggtgggtcgaattggtgacacaccagtcattggtgctggtacctatgcggatgcacgttgtgcggtttcagcgacaggcaaaggtgaagcaataatacgtgggacagtggcaagagatgtggctgctctgatggagtttaagggtctttctctcgtggaagctgctaattgtgttgtacatgagcgcacaccaaaaggcactgttggtttggttgctgtgtctgccaaaggagaagttgcaatgccttttaatacaacaggcatgttcagagcgtgtgctactgaagatggatattctgagattgcaatttggcctgctgccaaaatagagtagtctttaggctttactgatttccaagcttaatgtattctgacatttgatgatgcttcacgcatgcttatatcacagggaaatctatttgcttttcaaggt

SEQ ID NO: 5763 - protein, 322 aa, Glycine max
  peptide (1)..(322): Ceres Seq. ID no. 13637940
  misc_feature (2)..(317): Pfam Name: Pfam Description:  Asparaginase
  misc_feature (2)..(319): NCBI GI NO: 1703447 NR Description: L-ASPARAGINASE (L-ASPARAGINE AMIDOHYDROLASE)
  misc_feature (2)..(317): NCBI GI NO: 231573 NR Description: L-ASPARAGINASE (L-ASPARAGINE AMIDOHYDROLASE)
  misc_feature (2)..(317): NCBI GI NO: 6685231 NR Description: L-asparaginase (L-asparagine amidohydrolase)
  misc_feature (19)..(319): NCBI GI NO: 231574 NR Description: L-ASPARAGINASE (L-ASPARAGINE AMIDOHYDROLASE)
  misc_feature (1)..(317): NCBI GI NO: 15241528 NR Description: asparaginase [Arabidopsis thaliana]
  misc_feature (1)..(317): NCBI GI NO: 1076292 NR Description: asparaginase (EC 3.5.1.1) - Arabidopsis thaliana
  misc_feature (2)..(316): NCBI GI NO: 18401029 NR Description: L-asparaginase -related [Arabidopsis thaliana]
  misc_feature (3)..(316): NCBI GI NO: 10241428 NR Description: putative l-asparaginase
  misc_feature (2)..(316): NCBI GI NO: 23428804 NR Description: L-asparaginase [Glycine max]
  misc_feature (2)..(316): NCBI GI NO: 29420787 NR Description: L-asparaginase [Glycine max]
MGWAIALHGGAGDIPLSLPPERRQPREEALRHCLQIGVEALKAKLPPLDVVELVFRELENIPQFNAGRGSVLTCRGTVEMEASIMDGTTMNCGAVSGLTTVVNAISLARLVMENTPHIYLAFDGAEEFARQQGVETVDSSHFITKENIERLKQAKEANRVQIDYTQPIQNDTKKETALANGDSQIGTVGCVAVDSLGNLASATSTGGLVNKMVGRIGDTPVIGAGTYADARCAVSATGKGEAIIRGTVARDVAALMEFKGLSLVEAANCVVHERTPKGTVGLVAVSAKGEVAMPFNTTGMFRACATEDGYSEIAIWPAAKIE

SEQ ID NO: 5764 - protein, 243 aa, Glycine max
  peptide (1)..(243): Ceres Seq. ID no. 13637941
  misc_feature (1)..(238): Pfam Name: Pfam Description:  Asparaginase
  misc_feature (1)..(240): NCBI GI NO: 1703447 NR Description: L-ASPARAGINASE (L-ASPARAGINE AMIDOHYDROLASE)
  misc_feature (1)..(238): NCBI GI NO: 231573 NR Description: L-ASPARAGINASE (L-ASPARAGINE AMIDOHYDROLASE)
  misc_feature (1)..(238): NCBI GI NO: 6685231 NR Description: L-asparaginase (L-asparagine amidohydrolase)
  misc_feature (1)..(240): NCBI GI NO: 231574 NR Description: L-ASPARAGINASE (L-ASPARAGINE AMIDOHYDROLASE)
  misc_feature (1)..(238): NCBI GI NO: 15241528 NR Description: asparaginase [Arabidopsis thaliana]
  misc_feature (1)..(238): NCBI GI NO: 1076292 NR Description: asparaginase (EC 3.5.1.1) - Arabidopsis thaliana
  misc_feature (1)..(237): NCBI GI NO: 18401029 NR Description: L-asparaginase -related [Arabidopsis thaliana]
  misc_feature (1)..(237): NCBI GI NO: 10241428 NR Description: putative l-asparaginase
  misc_feature (1)..(237): NCBI GI NO: 23428804 NR Description: L-asparaginase [Glycine max]
  misc_feature (1)..(237): NCBI GI NO: 29420787 NR Description: L-asparaginase [Glycine max]
MEASIMDGTTMNCGAVSGLTTVVNAISLARLVMENTPHIYLAFDGAEEFARQQGVETVDSSHFITKENIERLKQAKEANRVQIDYTQPIQNDTKKETALANGDSQIGTVGCVAVDSLGNLASATSTGGLVNKMVGRIGDTPVIGAGTYADARCAVSATGKGEAIIRGTVARDVAALMEFKGLSLVEAANCVVHERTPKGTVGLVAVSAKGEVAMPFNTTGMFRACATEDGYSEIAIWPAAKIE

SEQ ID NO: 5765 - protein, 238 aa, Glycine max
  peptide (1)..(238): Ceres Seq. ID no. 13637942
  misc_feature (1)..(233): Pfam Name: Pfam Description:  Asparaginase
  misc_feature (1)..(235): NCBI GI NO: 1703447 NR Description: L-ASPARAGINASE (L-ASPARAGINE AMIDOHYDROLASE)
  misc_feature (1)..(233): NCBI GI NO: 231573 NR Description: L-ASPARAGINASE (L-ASPARAGINE AMIDOHYDROLASE)
  misc_feature (1)..(233): NCBI GI NO: 6685231 NR Description: L-asparaginase (L-asparagine amidohydrolase)
  misc_feature (1)..(235): NCBI GI NO: 231574 NR Description: L-ASPARAGINASE (L-ASPARAGINE AMIDOHYDROLASE)
  misc_feature (1)..(233): NCBI GI NO: 15241528 NR Description: asparaginase [Arabidopsis thaliana]
  misc_feature (1)..(233): NCBI GI NO: 1076292 NR Description: asparaginase (EC 3.5.1.1) - Arabidopsis thaliana
  misc_feature (1)..(232): NCBI GI NO: 18401029 NR Description: L-asparaginase -related [Arabidopsis thaliana]
  misc_feature (1)..(232): NCBI GI NO: 10241428 NR Description: putative l-asparaginase
  misc_feature (1)..(232): NCBI GI NO: 23428804 NR Description: L-asparaginase [Glycine max]
  misc_feature (1)..(232): NCBI GI NO: 29420787 NR Description: L-asparaginase [Glycine max]
MDGTTMNCGAVSGLTTVVNAISLARLVMENTPHIYLAFDGAEEFARQQGVETVDSSHFITKENIERLKQAKEANRVQIDYTQPIQNDTKKETALANGDSQIGTVGCVAVDSLGNLASATSTGGLVNKMVGRIGDTPVIGAGTYADARCAVSATGKGEAIIRGTVARDVAALMEFKGLSLVEAANCVVHERTPKGTVGLVAVSAKGEVAMPFNTTGMFRACATEDGYSEIAIWPAAKIE

SEQ ID NO: 5766 - DNA, 1906 bp, Glycine max
  misc_feature (1)..(1906): Ceres Seq. ID no. 14313131
atttattacattttaactttgctccaactcaaatttgtaagtaagtggtttcaaggacgcatgcaattcttcaatctcagttgagtgataatatagaggccttgaagccttttcaagtttagtagaggctgagaaatgtattgtatctagaaaataatgcttgtttgtgtttgtatactatactattcaagaaatgctatagtatcaatatcttgtgatgtttttaatttagataaagaataataacgaaactttccaaagagactgagagtatgtgtaatcttcataaagtgatttttgtgctagaaactagaaagcacaaatacaacaaatgatacatatacaatatggcagacaatagataattttaaaaatagcaggacaccacaactataataagatatataaaattagcacaaaaaatttttaattcaaaagataaaattgatgttttatttttgaatgaatcattgtatacatataagactgttgttgttgtcttctaattattgtgatattcccatcggtattgctacaaaagtgtaagaaataaaggtaaacaatataaaatgtaacttagagtatttgaagtgtccatgaccgacatgacacaactgtaattttgtagtgtccgtgcttccttgtttatgtataagatccagatctgaagattttcctattctattaatgcatatatctaataatgtaaatactgtcttctgctctagattcaatcataaaacaggcgctgaggatgtgcatttcactgccatgtcctctaatgatgaatctgatactgatgttgatggctgtaacaatgatgagggcattgtcgaggaggaagcattggctcaaaattcctctatagatatgactgcgttaaataatgggaactgcaatgtcagtgacttggatagttcttcacttagtgagagtgatacttctatgctggagatgattatgacaaaagatgtcagcagtggaagtgaggtatttaatacttatgggatactgggtaatgctgctttgcttcatagatatggatttactgagcaagataattcctatgatattgtaaacatagatatggaactggtaattcaatggtgttcttccgtgttttcggaccgccacagtagagcaagagtttccctttggagaaggttaggctattctgtatgtggcagccaagactctgactattttgagatctcatttgatggagaaccacagattgaactcctcagtttgttacacatcatgttattaccagataatgcctaccataagttagacctatcagtatcggttgccggaaattatgatgaatcaaatggaaccacccttctgaatggtgatatctttcctagtaaagcatttaatatgaacaataaatccttgctgcccaaaaaagtttgtgatgccctgttgtcgctttctgatatgagggagagtctctatggtttgaaatcaattgaagatgatattgaggcattgggaaggtgtagtttaattagagagagaaaactgtatcattctttgatgctgcgcatcaatgaaaggaagatccttcagaggctcagaaattatgcttcacagccatttaaaaataaaatcacgaaccatggttctccgaggaagaagttgaaaagaacaacaaagaaaacaagttgatttttttagtgtttattttattttaattatttttctatgagatgctttaacttgtattttggtgcaccaagtcattggcctatgcaaagtagcaaagccgtctctttcatttgtcgcatttggtttttggtcagcaataaaacatcgtttttctttcattagttccttaatttatcatttgtgtttccgtcattttatgccatgatctttcatctcatgctcttatattgat

SEQ ID NO: 5767 - protein, 328 aa, Glycine max
  peptide (1)..(328): Ceres Seq. ID no. 14313132
  misc_feature (16)..(113): Pfam Name: Pfam Description:  SET domain
  misc_feature (66)..(309): NCBI GI NO: 34907380 NR Description: P0471B04.24
  misc_feature (15)..(59): NCBI GI NO: 34907380 NR Description: P0471B04.24
  misc_feature (16)..(327): NCBI GI NO: 15228958 NR Description: SET-domain transcriptional regulator family
  misc_feature (15)..(301): NCBI GI NO: 28829640 NR Description: similar to Arabidopsis thaliana (Mouse-ear cress)
MHISNNVNTVFCSRFNHKTGAEDVHFTAMSSNDESDTDVDGCNNDEGIVEEEALAQNSSIDMTALNNGNCNVSDLDSSSLSESDTSMLEMIMTKDVSSGSEVFNTYGILGNAALLHRYGFTEQDNSYDIVNIDMELVIQWCSSVFSDRHSRARVSLWRRLGYSVCGSQDSDYFEISFDGEPQIELLSLLHIMLLPDNAYHKLDLSVSVAGNYDESNGTTLLNGDIFPSKAFNMNNKSLLPKKVCDALLSLSDMRESLYGLKSIEDDIEALGRCSLIRERKLYHSLMLRINERKILQRLRNYASQPFKNKITNHGSPRKKLKRTTKKTS

SEQ ID NO: 5768 - protein, 300 aa, Glycine max
  peptide (1)..(300): Ceres Seq. ID no. 14313133
  misc_feature (1)..(85): Pfam Name: Pfam Description:  SET domain
  misc_feature (38)..(281): NCBI GI NO: 34907380 NR Description: P0471B04.24
  misc_feature (1)..(31): NCBI GI NO: 34907380 NR Description: P0471B04.24
  misc_feature (1)..(299): NCBI GI NO: 15228958 NR Description: SET-domain transcriptional regulator family
  misc_feature (1)..(273): NCBI GI NO: 28829640 NR Description: similar to Arabidopsis thaliana (Mouse-ear cress)
MSSNDESDTDVDGCNNDEGIVEEEALAQNSSIDMTALNNGNCNVSDLDSSSLSESDTSMLEMIMTKDVSSGSEVFNTYGILGNAALLHRYGFTEQDNSYDIVNIDMELVIQWCSSVFSDRHSRARVSLWRRLGYSVCGSQDSDYFEISFDGEPQIELLSLLHIMLLPDNAYHKLDLSVSVAGNYDESNGTTLLNGDIFPSKAFNMNNKSLLPKKVCDALLSLSDMRESLYGLKSIEDDIEALGRCSLIRERKLYHSLMLRINERKILQRLRNYASQPFKNKITNHGSPRKKLKRTTKKTS

SEQ ID NO: 5769 - protein, 267 aa, Glycine max
  peptide (1)..(267): Ceres Seq. ID no. 14313134
  misc_feature (1)..(52): Pfam Name: Pfam Description:  SET domain
  misc_feature (5)..(248): NCBI GI NO: 34907380 NR Description: P0471B04.24
  misc_feature (1)..(266): NCBI GI NO: 15228958 NR Description: SET-domain transcriptional regulator family
  misc_feature (1)..(240): NCBI GI NO: 28829640 NR Description: similar to Arabidopsis thaliana (Mouse-ear cress)
MTALNNGNCNVSDLDSSSLSESDTSMLEMIMTKDVSSGSEVFNTYGILGNAALLHRYGFTEQDNSYDIVNIDMELVIQWCSSVFSDRHSRARVSLWRRLGYSVCGSQDSDYFEISFDGEPQIELLSLLHIMLLPDNAYHKLDLSVSVAGNYDESNGTTLLNGDIFPSKAFNMNNKSLLPKKVCDALLSLSDMRESLYGLKSIEDDIEALGRCSLIRERKLYHSLMLRINERKILQRLRNYASQPFKNKITNHGSPRKKLKRTTKKTS

SEQ ID NO: 5770 - DNA, 1325 bp, Glycine max
  misc_feature (1)..(1325): Ceres Seq. ID no. 14303413
agggcaaaaacagaacagaaacagagatgggttgcaatagctccaaggctgagccaccaccgttggaaaacaccatgcatcatcatcatcatgcagacgttgcagagttccaaaaacccaaaaccctaaaagaagaagtagtgctacagattccaggatgcaaagttcatctgatggaccaaggcgaggccctcgaactcgcacaaggtcacttcacgatcatgaagatcatggagcagaacgtggcactagcaaccattataaaagttggaaacagtgttcaatggcctctaacgaaagacgagccggtggtgaaggtggatgctcttcactacctgttctctctgcctgtgaaagatggtggggagcctcttagctatggtgtcacctttccagaacagtgctatgggaacatggagatgttggattcttttctcaaggatcactcttgcttttctggtttggaaaggaataagaagagtgatcttaaatgggaggagtttgctccaagggttgaagattacaatcattttctggcaagggcaattgcaggagggactggccagattgttaagggtatcttcttgtgcagcaatgcttacaccaaccaggtccaaaaaggaggggaaacgatcctaaatactgctgcagaaaagaacaatggtggcatggtcacagaaagtatgaaccacaggagtgatgccacaaagaataatgcaacgaacgataacctcaaacgtgtgagaaagctgacaaatatgacagaaaggttaaccaaatctttgcttgatggtgttggaataatgagtggatcagtgatgactcctgtgctgaaatcccaaccaggacaggcattcctaaatatgctccctggagaggtgctgttggcttcccttgatgccgtcaatagagtttttgaagcagctgaagctgctgaaaaacaaaccttttctgccacctctcaagctgcaaccagaatggtttctaacaggtttggggaagaagcaggagaggctactgagcatgtgtttgcaactgcaggacatgctgttaacactgcttggaatgtctctaagatacggaaggccatcaatccagcctcttcagcaaatgctgcaggagcactgagaaattctgccaaaaatagaaatgttatatattaaattcctatcatgtactgctttatgtttgacaatggtgaaggcataaaattttgcctatacatattgcaatatcattttggttgttatatgtaagtattaatgtgtgtattggtcatcccaaagcagaccttagaagaaacaaactataaaaagtgtccacat

SEQ ID NO: 5771 - protein, 386 aa, Glycine max
  peptide (1)..(386): Ceres Seq. ID no. 14303414
  misc_feature (41)..(380): NCBI GI NO: 26450712 NR Description: unknown protein [Arabidopsis thaliana]
  misc_feature (9)..(380): NCBI GI NO: 15233098 NR Description: expressed protein [Arabidopsis thaliana]
  misc_feature (41)..(380): NCBI GI NO: 7488048 NR Description: probable allene oxide synthase - Arabidopsisthaliana
  misc_feature (41)..(380): NCBI GI NO: 25407536 NR Description: hypothetical protein AT4g15450
  misc_feature (41)..(322): NCBI GI NO: 30683270 NR Description: expressed protein [Arabidopsis thaliana]
  misc_feature (160)..(382): NCBI GI NO: 34910728 NR Description: P0690B02.29
  misc_feature (39)..(152): NCBI GI NO: 34910728 NR Description: P0690B02.29
  misc_feature (158)..(382): NCBI GI NO: 18419759 NR Description: hypothetical protein [Arabidopsis thaliana]
  misc_feature (39)..(162): NCBI GI NO: 18419759 NR Description: hypothetical protein [Arabidopsis thaliana]
  misc_feature (158)..(368): NCBI GI NO: 7486396 NR Description: hypothetical protein F4B14
GKNRTETEMGCNSSKAEPPPLENTMHHHHHADVAEFQKPKTLKEEVVLQIPGCKVHLMDQGEALELAQGHFTIMKIMEQNVALATIIKVGNSVQWPLTKDEPVVKVDALHYLFSLPVKDGGEPLSYGVTFPEQCYGNMEMLDSFLKDHSCFSGLERNKKSDLKWEEFAPRVEDYNHFLARAIAGGTGQIVKGIFLCSNAYTNQVQKGGETILNTAAEKNNGGMVTESMNHRSDATKNNATNDNLKRVRKLTNMTERLTKSLLDGVGIMSGSVMTPVLKSQPGQAFLNMLPGEVLLASLDAVNRVFEAAEAAEKQTFSATSQAATRMVSNRFGEEAGEATEHVFATAGHAVNTAWNVSKIRKAINPASSANAAGALRNSAKNRNVIY

SEQ ID NO: 5772 - protein, 378 aa, Glycine max
  peptide (1)..(378): Ceres Seq. ID no. 14303415
  misc_feature (33)..(372): NCBI GI NO: 26450712 NR Description: unknown protein [Arabidopsis thaliana]
  misc_feature (1)..(372): NCBI GI NO: 15233098 NR Description: expressed protein [Arabidopsis thaliana]
  misc_feature (33)..(372): NCBI GI NO: 7488048 NR Description: probable allene oxide synthase - Arabidopsisthaliana
  misc_feature (33)..(372): NCBI GI NO: 25407536 NR Description: hypothetical protein AT4g15450
  misc_feature (33)..(314): NCBI GI NO: 30683270 NR Description: expressed protein [Arabidopsis thaliana]
  misc_feature (152)..(374): NCBI GI NO: 34910728 NR Description: P0690B02.29
  misc_feature (31)..(144): NCBI GI NO: 34910728 NR Description: P0690B02.29
  misc_feature (150)..(374): NCBI GI NO: 18419759 NR Description: hypothetical protein [Arabidopsis thaliana]
  misc_feature (31)..(154): NCBI GI NO: 18419759 NR Description: hypothetical protein [Arabidopsis thaliana]
  misc_feature (150)..(360): NCBI GI NO: 7486396 NR Description: hypothetical protein F4B14
MGCNSSKAEPPPLENTMHHHHHADVAEFQKPKTLKEEVVLQIPGCKVHLMDQGEALELAQGHFTIMKIMEQNVALATIIKVGNSVQWPLTKDEPVVKVDALHYLFSLPVKDGGEPLSYGVTFPEQCYGNMEMLDSFLKDHSCFSGLERNKKSDLKWEEFAPRVEDYNHFLARAIAGGTGQIVKGIFLCSNAYTNQVQKGGETILNTAAEKNNGGMVTESMNHRSDATKNNATNDNLKRVRKLTNMTERLTKSLLDGVGIMSGSVMTPVLKSQPGQAFLNMLPGEVLLASLDAVNRVFEAAEAAEKQTFSATSQAATRMVSNRFGEEAGEATEHVFATAGHAVNTAWNVSKIRKAINPASSANAAGALRNSAKNRNVIY

SEQ ID NO: 5773 - protein, 362 aa, Glycine max
  peptide (1)..(362): Ceres Seq. ID no. 14303416
  misc_feature (17)..(356): NCBI GI NO: 26450712 NR Description: unknown protein [Arabidopsis thaliana]
  misc_feature (1)..(356): NCBI GI NO: 15233098 NR Description: expressed protein [Arabidopsis thaliana]
  misc_feature (17)..(356): NCBI GI NO: 7488048 NR Description: probable allene oxide synthase - Arabidopsisthaliana
  misc_feature (17)..(356): NCBI GI NO: 25407536 NR Description: hypothetical protein AT4g15450
  misc_feature (17)..(298): NCBI GI NO: 30683270 NR Description: expressed protein [Arabidopsis thaliana]
  misc_feature (136)..(358): NCBI GI NO: 34910728 NR Description: P0690B02.29
  misc_feature (15)..(128): NCBI GI NO: 34910728 NR Description: P0690B02.29
  misc_feature (134)..(358): NCBI GI NO: 18419759 NR Description: hypothetical protein [Arabidopsis thaliana]
  misc_feature (15)..(138): NCBI GI NO: 18419759 NR Description: hypothetical protein [Arabidopsis thaliana]
  misc_feature (134)..(344): NCBI GI NO: 7486396 NR Description: hypothetical protein F4B14
MHHHHHADVAEFQKPKTLKEEVVLQIPGCKVHLMDQGEALELAQGHFTIMKIMEQNVALATIIKVGNSVQWPLTKDEPVVKVDALHYLFSLPVKDGGEPLSYGVTFPEQCYGNMEMLDSFLKDHSCFSGLERNKKSDLKWEEFAPRVEDYNHFLARAIAGGTGQIVKGIFLCSNAYTNQVQKGGETILNTAAEKNNGGMVTESMNHRSDATKNNATNDNLKRVRKLTNMTERLTKSLLDGVGIMSGSVMTPVLKSQPGQAFLNMLPGEVLLASLDAVNRVFEAAEAAEKQTFSATSQAATRMVSNRFGEEAGEATEHVFATAGHAVNTAWNVSKIRKAINPASSANAAGALRNSAKNRNVIY

SEQ ID NO: 5774 - DNA, 1463 bp, Glycine max
  misc_feature (1)..(1463): Ceres Seq. ID no. 15172093
aattcattccacacaacaaaaacaccaattctccaccctctcattgaaaaaaaaacaaccaaacaaaaaaaatcaatcattttattttatttttttacgaaaatggttgatttacattggaaatcaaagatgcctagttccaaaacaccaaaactctctctctccgacaacaagtccttaccctctttgcaactacccttccgcaccacagatatctctcccgccgctccttccgtttgcgccgcttacgactactatctccgtcttccttaactcagaaagctttggaactccactgattttcctaattggaacaacgaaccgattctaaaaccaattttgcaagctctcgaaatcacgttccgctttctttccattgttctctccgatcccagaccttactccaaccacagagaatggactcgccggatagagtctctcatcatgcatcaaattgaaatcattgccatactttgtgaagaagaggaacaaaattccgacacacgtggcactgcaccaaccgctgatctcagcagcagcaatagcagcgtgagcagaagctacagcgaggcgagcctgcttcctcggcttgccacgtggtacaaatccagggacgtggcgcagaggatccttctctccgtggaatgccaaatgaggaggtgctcctacacgcttggtttgggcgagccgaacctagcggggaagccgagcctgctctacgacctcgtgtgcaagccgaatgagatccacgcgctgaagacgacgccgtacgacgagcgcgtggagaaccacgagaaccacgcggtgcacgccacgcaccagatcgcggagtcgtggattcacgcgtcgcggaaggttctggagagaatcgcggacgcggtgctctccagaaccttcctgaaagcagcagaggactgctacgccgtggagaggatctggaagcttctcgcggaggtggaggacctccacctgatgatggatccggacgatttcttgaggctaaagaatcaactctcggtgaaatcctcgagcggcgaaacggcatcgttctgcttcagatcgaatgagttagtggaactgacgaagatgtgcagagatctgaggcacaaggtgccggagatattggaggtggaggtggatccgaagggaggaccgaggattcaagaggcggcgatgaagctctacgtttcgaagagcgagttcgagaaggttcacttgttgcaggcgatgcaggcgattgaggcggcgatgaagagattcttctacgcgtataagcaggtgttggcggtggtgatgggaagttcagaggctaacggtaaccgagttgggttgagttgcgactcggctgactcgttgactcagattttccttgaaccgacgtattttccaagcttggatgccgccaagacttttcttggatacctgtgggataataacgataataacaaatggatatgaaaacg

SEQ ID NO: 5775 - protein, 337 aa, Glycine max
  peptide (1)..(337): Ceres Seq. ID no. 15172094
  misc_feature (1)..(337): NCBI GI NO: 12006354 NR Description: putative Hs1pro-1-like receptor [Glycine max]
  misc_feature (1)..(337): NCBI GI NO: 7677046 NR Description: putative Hs1pro-1 homolog [Pisum sativum]
  misc_feature (1)..(330): NCBI GI NO: 27311581 NR Description: Unknown protein [Arabidopsis thaliana]
  misc_feature (1)..(330): NCBI GI NO: 21593007 NR Description: putative nematode-resistance protein
  misc_feature (1)..(330): NCBI GI NO: 15225612 NR Description: nematode-resistance protein -related
  misc_feature (1)..(328): NCBI GI NO: 15228750 NR Description: nematode resistance protein-related protein
  misc_feature (70)..(337): NCBI GI NO: 14764516 NR Description: putative Hs1pro-1-like protein [Cicer arietinum]
  misc_feature (1)..(328): NCBI GI NO: 21553529 NR Description: nematode resistance protein-like protein
  misc_feature (1)..(328): NCBI GI NO: 34908408 NR Description: putative nematode resistance-like protein
MHQIEIIAILCEEEEQNSDTRGTAPTADLSSSNSSVSRSYSEASLLPRLATWYKSRDVAQRILLSVECQMRRCSYTLGLGEPNLAGKPSLLYDLVCKPNEIHALKTTPYDERVENHENHAVHATHQIAESWIHASRKVLERIADAVLSRTFLKAAEDCYAVERIWKLLAEVEDLHLMMDPDDFLRLKNQLSVKSSSGETASFCFRSNELVELTKMCRDLRHKVPEILEVEVDPKGGPRIQEAAMKLYVSKSEFEKVHLLQAMQAIEAAMKRFFYAYKQVLAVVMGSSEANGNRVGLSCDSADSLTQIFLEPTYFPSLDAAKTFLGYLWDNNDNNKWI

SEQ ID NO: 5776 - protein, 268 aa, Glycine max
  peptide (1)..(268): Ceres Seq. ID no. 15172095
  misc_feature (1)..(268): NCBI GI NO: 12006354 NR Description: putative Hs1pro-1-like receptor [Glycine max]
  misc_feature (1)..(268): NCBI GI NO: 7677046 NR Description: putative Hs1pro-1 homolog [Pisum sativum]
  misc_feature (1)..(261): NCBI GI NO: 27311581 NR Description: Unknown protein [Arabidopsis thaliana]
  misc_feature (1)..(261): NCBI GI NO: 21593007 NR Description: putative nematode-resistance protein
  misc_feature (1)..(261): NCBI GI NO: 15225612 NR Description: nematode-resistance protein -related
  misc_feature (1)..(259): NCBI GI NO: 15228750 NR Description: nematode resistance protein-related protein
  misc_feature (1)..(268): NCBI GI NO: 14764516 NR Description: putative Hs1pro-1-like protein [Cicer arietinum]
  misc_feature (1)..(259): NCBI GI NO: 21553529 NR Description: nematode resistance protein-like protein
  misc_feature (1)..(259): NCBI GI NO: 34908408 NR Description: putative nematode resistance-like protein
MRRCSYTLGLGEPNLAGKPSLLYDLVCKPNEIHALKTTPYDERVENHENHAVHATHQIAESWIHASRKVLERIADAVLSRTFLKAAEDCYAVERIWKLLAEVEDLHLMMDPDDFLRLKNQLSVKSSSGETASFCFRSNELVELTKMCRDLRHKVPEILEVEVDPKGGPRIQEAAMKLYVSKSEFEKVHLLQAMQAIEAAMKRFFYAYKQVLAVVMGSSEANGNRVGLSCDSADSLTQIFLEPTYFPSLDAAKTFLGYLWDNNDNNKWI

SEQ ID NO: 5777 - DNA, 1411 bp, Glycine max
  misc_feature (1)..(1411): Ceres Seq. ID no. 15170272
gtttgagagagcagaatggttctatcaaacaagaaactgaagcttaagctgagagctgaattagcccaaagcaactccaacgccgccgctgaacccccttcattttctattaataataataactctctcaaaactcttctggactctgccacgcccacacccagattcttcaagagagagaagcgaagaaagcttcgatccgaccaacctccacaacaacccaacaaggaaaatgaaactgaaacacagggttcgcccaataagaagacaaagaggaagaagctagaggacgatgacgtggcagcaactggagtttccgacacaccaaagaagaagaaaaaccccaggacggctaaggaaaacgaatctaatggtggaggggaaatgccagaggctacagagttaaccaagaccaatacaactaccagtcaagacaatggtgatgctcctaatacaaatacaaagatttatgttggaggaattccctattattcaactgaggatgatattcgaagttattttgaaagctgtggcaccataactgaagttgattgcatgacttttcctgaaactggcaagtttagagggattgccattattactttcaagactgaagcagcagccaaaagagcattggctcttgatggagctgacatgggaggactctttcttaaaatccaaccatataaagcaactcgagccaataaagcctcagattttgctccagaaattttggaggggtacaatagaatatatgttggaaatttgtcgtgggatataacagaggaagaactgaggaaattcttcaataattctgagataacatcgctacgattcggtatggacaaggagacaggagagtttcgagggtatgcccatgtggattttggtgatagtcagtcactaaaaaaagcacttgcattggaccaaaatgttttgtttgggagacctgtcaggataagttgtgcggttcctttgaagaaaaaaactggaactcatgcaagctccacagttaatgaagctaatggtgataaatcaagttccacaggaagtgacaagataaatggagctgatggtgataaatcaagttccacaggaagtggcaagatgaggaggaggacatgctatgagtgtggtgagaaaggacatacatttgcggcatgcccaacgaaacaaacagttgctgcaactacaacctaaagcgtgtaggaaaactcaaacaggtcactgttcttttttcttctagcaaacagtttgattgtagtttataaaatacaataatgaggcatccataactgatcggatttacagtttcctacttcccttgttattgttatcattttttcctcttgaaatgaaaattctttgtctttgttataagcaaagaaaagtaggaagagattaaaaagtc

SEQ ID NO: 5778 - protein, 394 aa, Glycine max
  peptide (1)..(394): Ceres Seq. ID no. 15170273
  misc_feature (151)..(221): Pfam Name: a.k.a. RRM, RBD, or RNP domain Pfam Description: RNA recognition motif.
  misc_feature (70)..(386): NCBI GI NO: 15233246 NR Description: RNA recognition motif (RRM)-containing protein
  misc_feature (53)..(386): NCBI GI NO: 18026763 NR Description: phragmoplastin-interacting protein PHIP1
  misc_feature (1)..(227): NCBI GI NO: 15233246 NR Description: RNA recognition motif (RRM)-containing protein
  misc_feature (293)..(394): NCBI GI NO: 15233246 NR Description: RNA recognition motif (RRM)-containing protein
  misc_feature (1)..(227): NCBI GI NO: 18026763 NR Description: phragmoplastin-interacting protein PHIP1
  misc_feature (303)..(386): NCBI GI NO: 15233246 NR Description: RNA recognition motif (RRM)-containing protein
  misc_feature (303)..(386): NCBI GI NO: 18026763 NR Description: phragmoplastin-interacting protein PHIP1
  misc_feature (71)..(319): NCBI GI NO: 25446691 NR Description: Unknown protein
  misc_feature (18)..(388): NCBI GI NO: 38344339 NR Description: OSJNBa0058K23.21
  misc_feature (80)..(318): NCBI GI NO: 133248 NR Description: 31 kDa ribonucleoprotein, chloroplast precursor
MVLSNKKLKLKLRAELAQSNSNAAAEPPSFSINNNNSLKTLLDSATPTPRFFKREKRRKLRSDQPPQQPNKENETETQGSPNKKTKRKKLEDDDVAATGVSDTPKKKKNPRTAKENESNGGGEMPEATELTKTNTTTSQDNGDAPNTNTKIYVGGIPYYSTEDDIRSYFESCGTITEVDCMTFPETGKFRGIAIITFKTEAAAKRALALDGADMGGLFLKIQPYKATRANKASDFAPEILEGYNRIYVGNLSWDITEEELRKFFNNSEITSLRFGMDKETGEFRGYAHVDFGDSQSLKKALALDQNVLFGRPVRISCAVPLKKKTGTHASSTVNEANGDKSSSTGSDKINGADGDKSSSTGSGKMRRRTCYECGEKGHTFAACPTKQTVAATTT

SEQ ID NO: 5779 - protein, 271 aa, Glycine max
  peptide (1)..(271): Ceres Seq. ID no. 15170274
  misc_feature (28)..(98): Pfam Name: a.k.a. RRM, RBD, or RNP domain Pfam Description: RNA recognition motif.
  misc_feature (1)..(263): NCBI GI NO: 15233246 NR Description: RNA recognition motif (RRM)-containing protein
  misc_feature (1)..(263): NCBI GI NO: 18026763 NR Description: phragmoplastin-interacting protein PHIP1
  misc_feature (1)..(104): NCBI GI NO: 15233246 NR Description: RNA recognition motif (RRM)-containing protein
  misc_feature (170)..(271): NCBI GI NO: 15233246 NR Description: RNA recognition motif (RRM)-containing protein
  misc_feature (1)..(104): NCBI GI NO: 18026763 NR Description: phragmoplastin-interacting protein PHIP1
  misc_feature (180)..(263): NCBI GI NO: 15233246 NR Description: RNA recognition motif (RRM)-containing protein
  misc_feature (180)..(263): NCBI GI NO: 18026763 NR Description: phragmoplastin-interacting protein PHIP1
  misc_feature (1)..(196): NCBI GI NO: 25446691 NR Description: Unknown protein
  misc_feature (1)..(265): NCBI GI NO: 38344339 NR Description: OSJNBa0058K23.21
  misc_feature (1)..(195): NCBI GI NO: 133248 NR Description: 31 kDa ribonucleoprotein, chloroplast precursor
MPEATELTKTNTTTSQDNGDAPNTNTKIYVGGIPYYSTEDDIRSYFESCGTITEVDCMTFPETGKFRGIAIITFKTEAAAKRALALDGADMGGLFLKIQPYKATRANKASDFAPEILEGYNRIYVGNLSWDITEEELRKFFNNSEITSLRFGMDKETGEFRGYAHVDFGDSQSLKKALALDQNVLFGRPVRISCAVPLKKKTGTHASSTVNEANGDKSSSTGSDKINGADGDKSSSTGSGKMRRRTCYECGEKGHTFAACPTKQTVAATTT

SEQ ID NO: 5780 - protein, 214 aa, Glycine max
  peptide (1)..(214): Ceres Seq. ID no. 15170275
  misc_feature (1)..(206): NCBI GI NO: 15233246 NR Description: RNA recognition motif (RRM)-containing protein
  misc_feature (1)..(206): NCBI GI NO: 18026763 NR Description: phragmoplastin-interacting protein PHIP1
  misc_feature (1)..(47): NCBI GI NO: 15233246 NR Description: RNA recognition motif (RRM)-containing protein
  misc_feature (113)..(214): NCBI GI NO: 15233246 NR Description: RNA recognition motif (RRM)-containing protein
  misc_feature (1)..(47): NCBI GI NO: 18026763 NR Description: phragmoplastin-interacting protein PHIP1
  misc_feature (123)..(206): NCBI GI NO: 15233246 NR Description: RNA recognition motif (RRM)-containing protein
  misc_feature (123)..(206): NCBI GI NO: 18026763 NR Description: phragmoplastin-interacting protein PHIP1
  misc_feature (1)..(139): NCBI GI NO: 25446691 NR Description: Unknown protein
  misc_feature (1)..(208): NCBI GI NO: 38344339 NR Description: OSJNBa0058K23.21
  misc_feature (1)..(138): NCBI GI NO: 133248 NR Description: 31 kDa ribonucleoprotein, chloroplast precursor
MTFPETGKFRGIAIITFKTEAAAKRALALDGADMGGLFLKIQPYKATRANKASDFAPEILEGYNRIYVGNLSWDITEEELRKFFNNSEITSLRFGMDKETGEFRGYAHVDFGDSQSLKKALALDQNVLFGRPVRISCAVPLKKKTGTHASSTVNEANGDKSSSTGSDKINGADGDKSSSTGSGKMRRRTCYECGEKGHTFAACPTKQTVAATTT

SEQ ID NO: 5781 - DNA, 1458 bp, Glycine max
  misc_feature (1)..(1458): Ceres Seq. ID no. 15172096
atatccgaagctactcacgagtctatgagtgtgaaggaaccagcctcacaagggagtgctcagcaggttgaggaagaagtgcagcaaaagttggttcctactgaggctggaaagaaaaagaaaaagaagaaagttcgtttgcccccaaatgatttgcagtggaaaaccccacatgactttggggctgagaactatatgatgaataatatgatgccaatggttccacctcctggctataattcgtactggaatggcatgcaacctatggatggatttatggcaccgtatggtaatccaatgcaaatgatgggttatggtctgggccccttggacatgccatttggtggtatgccacaagacccatttggcatgcaaggttacatgatgcctggtttcccgcctcatagggatcttgctgacttcagtatgggaatgaatgttccacctcctgtaatgagtagagaggagtttgaagcccggaaagctgatatgaggaggaagcgtgaaaatgatagacgtcctgaaagggacttctctaaagatcgagactttggtagggaagtgagcagtgttggggatgtttcttcaatgaaatcaaaaactaggtcaattccaccgtcctcgggtagcgattaccatcagccccgtttccgttcagagcgacactcacctgataggtctccgcgcgatgtggaacctccacctccacgcccaaccaagagaaagttagagcaccactccgatcgcgaacgcgaagacagggatcgcgactatgagcacgagcgccaccaccgccgtcaccgatcggaatcctcatccagaaggtcatcggaaccagtcgccaaaccttcatccaatgccgctgctgctgctgctgcagcagcagcagcagcagcggcagcagccgcggatcgcaagcagaaggccagcgtgttctcccgcataagctttcctgctgaagaggaacctcctaagaagagaaaagtcaccgcttcttccacaacggaaccagccgctaccgccgccgcacccagtgcctcttcggcacacctaaagacagtgtcgaacggttactacgaagggaggaagagtagcggcgtggcggactacgaatccagtgacgacgagcggcactttaaacggaggccgtcgaggtacgagccgtcgcctccgccgcagccggcggagtgggaggaggaagggaggcattcgagaggaacgagggagcgcaagcataggtgagtggcaattttgataggcagccaaggacgaaggaaacggacaccgagagacgaccagactcaacttgtctcttccgaaccttgaaataaacttcttgttctttgaaggaagggaatttcaatgtaactttgctgctgtgactgaatcccgtcaattttcaataatttctccatgtaaaattataactgttttattcaaatctaattaattgctacc

SEQ ID NO: 5782 - protein, 413 aa, Glycine max
  peptide (1)..(413): Ceres Seq. ID no. 15172097
  misc_feature (1)..(405): NCBI GI NO: 37534622 NR Description: putative DNA-binding protein
  misc_feature (8)..(350): NCBI GI NO: 7488095 NR Description: probable DNA-binding protein - Arabidopsis thaliana
  misc_feature (8)..(350): NCBI GI NO: 15236068 NR Description: glycine-rich protein [Arabidopsis thaliana]
  misc_feature (1)..(410): NCBI GI NO: 15238091 NR Description: DNA-binding protein-related [Arabidopsis thaliana]
ISEATHESMSVKEPASQGSAQQVEEEVQQKLVPTEAGKKKKKKKVRLPPNDLQWKTPHDFGAENYMMNNMMPMVPPPGYNSYWNGMQPMDGFMAPYGNPMQMMGYGLGPLDMPFGGMPQDPFGMQGYMMPGFPPHRDLADFSMGMNVPPPVMSREEFEARKADMRRKRENDRRPERDFSKDRDFGREVSSVGDVSSMKSKTRSIPPSSGSDYHQPRFRSERHSPDRSPRDVEPPPPRPTKRKLEHHSDREREDRDRDYEHERHHRRHRSESSSRRSSEPVAKPSSNAAAAAAAAAAAAAAAAADRKQKASVFSRISFPAEEEPPKKRKVTASSTTEPAATAAAPSASSAHLKTVSNGYYEGRKSSGVADYESSDDERHFKRRPSRYEPSPPPQPAEWEEEGRHSRGTRERKHR

SEQ ID NO: 5783 - protein, 405 aa, Glycine max
  peptide (1)..(405): Ceres Seq. ID no. 15172098
  misc_feature (1)..(397): NCBI GI NO: 37534622 NR Description: putative DNA-binding protein
  misc_feature (1)..(342): NCBI GI NO: 7488095 NR Description: probable DNA-binding protein - Arabidopsis thaliana
  misc_feature (1)..(342): NCBI GI NO: 15236068 NR Description: glycine-rich protein [Arabidopsis thaliana]
  misc_feature (1)..(402): NCBI GI NO: 15238091 NR Description: DNA-binding protein-related [Arabidopsis thaliana]
MSVKEPASQGSAQQVEEEVQQKLVPTEAGKKKKKKKVRLPPNDLQWKTPHDFGAENYMMNNMMPMVPPPGYNSYWNGMQPMDGFMAPYGNPMQMMGYGLGPLDMPFGGMPQDPFGMQGYMMPGFPPHRDLADFSMGMNVPPPVMSREEFEARKADMRRKRENDRRPERDFSKDRDFGREVSSVGDVSSMKSKTRSIPPSSGSDYHQPRFRSERHSPDRSPRDVEPPPPRPTKRKLEHHSDREREDRDRDYEHERHHRRHRSESSSRRSSEPVAKPSSNAAAAAAAAAAAAAAAAADRKQKASVFSRISFPAEEEPPKKRKVTASSTTEPAATAAAPSASSAHLKTVSNGYYEGRKSSGVADYESSDDERHFKRRPSRYEPSPPPQPAEWEEEGRHSRGTRERKHR

SEQ ID NO: 5784 - protein, 348 aa, Glycine max
  peptide (1)..(348): Ceres Seq. ID no. 15172099
  misc_feature (1)..(340): NCBI GI NO: 37534622 NR Description: putative DNA-binding protein
  misc_feature (1)..(285): NCBI GI NO: 7488095 NR Description: probable DNA-binding protein - Arabidopsis thaliana
  misc_feature (1)..(285): NCBI GI NO: 15236068 NR Description: glycine-rich protein [Arabidopsis thaliana]
  misc_feature (1)..(345): NCBI GI NO: 15238091 NR Description: DNA-binding protein-related [Arabidopsis thaliana]
MMNNMMPMVPPPGYNSYWNGMQPMDGFMAPYGNPMQMMGYGLGPLDMPFGGMPQDPFGMQGYMMPGFPPHRDLADFSMGMNVPPPVMSREEFEARKADMRRKRENDRRPERDFSKDRDFGREVSSVGDVSSMKSKTRSIPPSSGSDYHQPRFRSERHSPDRSPRDVEPPPPRPTKRKLEHHSDREREDRDRDYEHERHHRRHRSESSSRRSSEPVAKPSSNAAAAAAAAAAAAAAAAADRKQKASVFSRISFPAEEEPPKKRKVTASSTTEPAATAAAPSASSAHLKTVSNGYYEGRKSSGVADYESSDDERHFKRRPSRYEPSPPPQPAEWEEEGRHSRGTRERKHR

SEQ ID NO: 5785 - DNA, 1733 bp, Glycine max
  misc_feature (1)..(1733): Ceres Seq. ID no. 15172476
ggttaatttcgtcggtcaactgcatgggtctccgcttctcctctggctcggcacctcactcctcttccctcaacggctctcactgttcaggttcagcaagaactggctgcaagaacgtggggttctccgcaaccgggaagagtcagttttcggagattgcgagtggaagcgacgatcgcgaagagtctcttggtcggattctgaaatggccaaacttgaaggtgtttagttttgaggagctgatttctgcctcaaggcgtttcaggtatgacatacaggggttagtgatcggtaaaggttgttttggcccagtttacaagggatgtttggatgagaatacccttacccctgccaaagtaggctatggaatggccgttgcgatcaaaatgtttaaccaagattacttccgagggtttgaagagtggcagtcagaagtaaactttttaggaaggctttctcaccccaacctggttaatctattgggatactgttgggacgaggataagcttcttctagtgtatgagttcatgccaaagggaagcttagactatcatctattcagaggaaacataacaccactttcttggaacacacggcttaaaatagctattggtgcagctcggggattagctttcttgcacgcctctgaaaacaatgtcatattcagtgatttcaaggcctcaaatatacttcttgacgggaattacaatgcaaagatctcagattttggctttgctagatgggggccttttgaaggagaatcacatgtatctaccagggtcattggcacatatgattatgctgctccagaatacatagcaacaggtaattatatttagccattattaacaactaaggtagctttaaaatgcatgttttgactttattaatgtctcataaggcaagatgtgagccaagattacattctatgccatgtaaaaaagacacggaagcaaaataaattaaaaaacaaaggatctgtttggtttaagaagatgttttcatctttgtttcctgtttttcacaaataattactgaaatgctatgtggtttcttgatttcaaagatttacacgagaaacagttaacaccagatttgcgttcttttcactgtttctgaaagtaggaaacaaagtcaaaacaaggtgacatattgacatttttgtagttatcaatacaaacaggaaatgaaaacagacgaagttttcttaaaccaaacaggacttagtgtaacacaaacagtcgatgctgtggaaggtgaagttgggagaaggcagactaaaataaggaatagtgtaatgctctgatccaccacaaactaacatgcctttgaattgtatcaatatttcaaaaggccacttgtatgtgaagagtgatatctatggatttggtgtagtgctgcttgaaatacttacaggcatgcgggcacttgacacaaatcgacctcaaaccatgcagaacctagttgaatggactaagccttgtctttcttccaaaaaaaagttgaaagccataatggatgctaagatagagggtcaatattcacttgaggcagcatggcaagcagcaaaacttactctaaaatgcctaaaatctgtccctgaagaacgtccttctatgaaagatgtagttgaggcattggaagccattgaagctatccaaaacccacaattcgcagcgtacatctcatccaccccctcggcagggtcgtaagagtataaacaaatttataag

SEQ ID NO: 5786 - protein, 278 aa, Glycine max
  peptide (1)..(278): Ceres Seq. ID no. 15172477
  misc_feature (14)..(278): NCBI GI NO: 38345396 NR Description: OSJNBa0017B10.2
  misc_feature (16)..(278): NCBI GI NO: 21537344 NR Description: putative protein kinase [Arabidopsis thaliana]
  misc_feature (16)..(278): NCBI GI NO: 18398350 NR Description: protein kinase -related [Arabidopsis thaliana]
  misc_feature (8)..(278): NCBI GI NO: 25287605 NR Description: probable protein kinase
  misc_feature (40)..(278): NCBI GI NO: 20503002 NR Description: Putative protein kinase
  misc_feature (7)..(278): NCBI GI NO: 25287611 NR Description: protein kinase-like protein
  misc_feature (10)..(278): NCBI GI NO: 30690422 NR Description: protein kinase family [Arabidopsis thaliana]
  misc_feature (6)..(276): NCBI GI NO: 34906046 NR Description: putative serine/threonine-specific protein kinase
  misc_feature (64)..(278): NCBI GI NO: 25287650 NR Description: hypothetical protein F15M4.14
  misc_feature (31)..(278): NCBI GI NO: 14719339 NR Description: putative protein kinase [Oryza sativa]
LISSVNCMGLRFSSGSAPHSSSLNGSHCSGSARTGCKNVGFSATGKSQFSEIASGSDDREESLGRILKWPNLKVFSFEELISASRRFRYDIQGLVIGKGCFGPVYKGCLDENTLTPAKVGYGMAVAIKMFNQDYFRGFEEWQSEVNFLGRLSHPNLVNLLGYCWDEDKLLLVYEFMPKGSLDYHLFRGNITPLSWNTRLKIAIGAARGLAFLHASENNVIFSDFKASNILLDGNYNAKISDFGFARWGPFEGESHVSTRVIGTYDYAAPEYIATGNYI

SEQ ID NO: 5787 - protein, 271 aa, Glycine max
  peptide (1)..(271): Ceres Seq. ID no. 15172478
  misc_feature (7)..(271): NCBI GI NO: 38345396 NR Description: OSJNBa0017B10.2
  misc_feature (9)..(271): NCBI GI NO: 21537344 NR Description: putative protein kinase [Arabidopsis thaliana]
  misc_feature (9)..(271): NCBI GI NO: 18398350 NR Description: protein kinase -related [Arabidopsis thaliana]
  misc_feature (1)..(271): NCBI GI NO: 25287605 NR Description: probable protein kinase
  misc_feature (33)..(271): NCBI GI NO: 20503002 NR Description: Putative protein kinase
  misc_feature (1)..(271): NCBI GI NO: 25287611 NR Description: protein kinase-like protein
  misc_feature (3)..(271): NCBI GI NO: 30690422 NR Description: protein kinase family [Arabidopsis thaliana]
  misc_feature (1)..(269): NCBI GI NO: 34906046 NR Description: putative serine/threonine-specific protein kinase
  misc_feature (57)..(271): NCBI GI NO: 25287650 NR Description: hypothetical protein F15M4.14
  misc_feature (24)..(271): NCBI GI NO: 14719339 NR Description: putative protein kinase [Oryza sativa]
MGLRFSSGSAPHSSSLNGSHCSGSARTGCKNVGFSATGKSQFSEIASGSDDREESLGRILKWPNLKVFSFEELISASRRFRYDIQGLVIGKGCFGPVYKGCLDENTLTPAKVGYGMAVAIKMFNQDYFRGFEEWQSEVNFLGRLSHPNLVNLLGYCWDEDKLLLVYEFMPKGSLDYHLFRGNITPLSWNTRLKIAIGAARGLAFLHASENNVIFSDFKASNILLDGNYNAKISDFGFARWGPFEGESHVSTRVIGTYDYAAPEYIATGNYI

SEQ ID NO: 5788 - protein, 156 aa, Glycine max
  peptide (1)..(156): Ceres Seq. ID no. 15172479
  misc_feature (1)..(156): NCBI GI NO: 38345396 NR Description: OSJNBa0017B10.2
  misc_feature (1)..(156): NCBI GI NO: 21537344 NR Description: putative protein kinase [Arabidopsis thaliana]
  misc_feature (1)..(156): NCBI GI NO: 18398350 NR Description: protein kinase -related [Arabidopsis thaliana]
  misc_feature (1)..(156): NCBI GI NO: 25287605 NR Description: probable protein kinase
  misc_feature (1)..(156): NCBI GI NO: 20503002 NR Description: Putative protein kinase
  misc_feature (1)..(156): NCBI GI NO: 25287611 NR Description: protein kinase-like protein
  misc_feature (1)..(156): NCBI GI NO: 30690422 NR Description: protein kinase family [Arabidopsis thaliana]
  misc_feature (1)..(154): NCBI GI NO: 34906046 NR Description: putative serine/threonine-specific protein kinase
  misc_feature (1)..(156): NCBI GI NO: 25287650 NR Description: hypothetical protein F15M4.14
  misc_feature (1)..(156): NCBI GI NO: 14719339 NR Description: putative protein kinase [Oryza sativa]
MAVAIKMFNQDYFRGFEEWQSEVNFLGRLSHPNLVNLLGYCWDEDKLLLVYEFMPKGSLDYHLFRGNITPLSWNTRLKIAIGAARGLAFLHASENNVIFSDFKASNILLDGNYNAKISDFGFARWGPFEGESHVSTRVIGTYDYAAPEYIATGNYI

SEQ ID NO: 5789 - DNA, 1380 bp, Glycine max
  misc_feature (1)..(1380): Ceres Seq. ID no. 15176234
gcattgttctaacacgataatcctgtgaaggcgttaactccaaagatccaatttcactatataaattgtgacgaaagcaaaatgaattcacatagctgagagagaaaggaaaggttaactaagaagcaatacttcaatggccacccttgttgttcataaccaaacttcttctgctcaagatgctgaggctctccaacaggctttcaaaggatggggggctgatgacaaggccattatagcaatactgggtcacagaaatgttcatcagaggcaagaaatcagaaaagcttatgaggagatttaccaagaggatctcatcaaacgccttgagtccgagatctctggtgactttgagagagctatgtaccggtggatgttgcagcctgcggatcgtgatgctgttttggtgaatgtggcaatcaagaatggcaccaaagactaccatgtgattgcagagattgcttgtgtcctatcagctgaagagctcttggcagtgaggcgggcctaccaccgccgctacaagtgttccttggaggaagatgtggcagctaacaccaccggcaatcttcgccagcttttggttggattggtgacctcatataggtatgagggtgatgagatcaatgtaaaattttcacaaactgaagctaatgttcttcatgaatctgtcaaggagaagaaaggcaacagtgaagaagtcatcaggatccttactacaagaagcaaaactcaacttgtggcaactttcaaccgctacagagatgaacatggaatttccatcagtaagaaattgttggatcaaacatctgatgacttccacaaggtgttgcacactgctattcgctgcatcaatgaccataagaagtactatgagaaggttttgcgcaatgcagtcaagaagtttggaactgacgaggatggactaagccgtgtgattgttacaagggctgagaaggatctgaaggacatcaaagagctctactacaagagaaacagtgttcaccttgaggatgaagtgtccaaggaaacttctggggactacaagaagttcctcctcactctcttggggaaataagactaagttaagaacttgctctaagggcatcttagtaatgggtttttgttaattatgtcattggtttctggtttgtgcgatttcattatgttagttttccagtaagagtttgttatatctggttaagtttttgagacaacaagaactcgtgtcttgtttgagggcatgcgtgccatttcttagggttgtgttggtacttggcatgctcttattagaggacctctatgctgcgtgtttcctttggattatgctattacctcacctggtttgcttttaatgaaaggttgataacaaatttatatgtg

SEQ ID NO: 5790 - protein, 312 aa, Glycine max
  peptide (1)..(312): Ceres Seq. ID no. 15176235
  misc_feature (242)..(309): Pfam Name: Pfam Description:  Annexin
  misc_feature (1)..(312): NCBI GI NO: 3176098 NR Description: annexin [Medicago truncatula]
  misc_feature (1)..(312): NCBI GI NO: 21264397 NR Description: Annexin-like protein RJ4
  misc_feature (44)..(312): NCBI GI NO: 1362037 NR Description: annexin homolog RJ4
  misc_feature (1)..(311): NCBI GI NO: 22326753 NR Description: annexin-related protein [Arabidopsis thaliana]
  misc_feature (1)..(312): NCBI GI NO: 15220216 NR Description: Ca2+-dependent membrane-binding protein annexin
  misc_feature (1)..(312): NCBI GI NO: 1621539 NR Description: annexin-like protein
  misc_feature (1)..(312): NCBI GI NO: 3928134 NR Description: annexin P38 [Capsicum annuum]
  misc_feature (1)..(312): NCBI GI NO: 4580920 NR Description: vacuole-associated annexin VCaB42
  misc_feature (25)..(311): NCBI GI NO: 34905372 NR Description: putative annexin
  misc_feature (14)..(311): NCBI GI NO: 32401406 NR Description: annexin 11a; ANX XIa [Danio rerio]
MATLVVHNQTSSAQDAEALQQAFKGWGADDKAIIAILGHRNVHQRQEIRKAYEEIYQEDLIKRLESEISGDFERAMYRWMLQPADRDAVLVNVAIKNGTKDYHVIAEIACVLSAEELLAVRRAYHRRYKCSLEEDVAANTTGNLRQLLVGLVTSYRYEGDEINVKFSQTEANVLHESVKEKKGNSEEVIRILTTRSKTQLVATFNRYRDEHGISISKKLLDQTSDDFHKVLHTAIRCINDHKKYYEKVLRNAVKKFGTDEDGLSRVIVTRAEKDLKDIKELYYKRNSVHLEDEVSKETSGDYKKFLLTLLGK

SEQ ID NO: 5791 - protein, 237 aa, Glycine max
  peptide (1)..(237): Ceres Seq. ID no. 15176236
  misc_feature (167)..(234): Pfam Name: Pfam Description:  Annexin
  misc_feature (1)..(237): NCBI GI NO: 3176098 NR Description: annexin [Medicago truncatula]
  misc_feature (1)..(237): NCBI GI NO: 21264397 NR Description: Annexin-like protein RJ4
  misc_feature (1)..(237): NCBI GI NO: 1362037 NR Description: annexin homolog RJ4
  misc_feature (1)..(236): NCBI GI NO: 22326753 NR Description: annexin-related protein [Arabidopsis thaliana]
  misc_feature (1)..(237): NCBI GI NO: 15220216 NR Description: Ca2+-dependent membrane-binding protein annexin
  misc_feature (1)..(237): NCBI GI NO: 1621539 NR Description: annexin-like protein
  misc_feature (1)..(237): NCBI GI NO: 3928134 NR Description: annexin P38 [Capsicum annuum]
  misc_feature (1)..(237): NCBI GI NO: 4580920 NR Description: vacuole-associated annexin VCaB42
  misc_feature (1)..(236): NCBI GI NO: 34905372 NR Description: putative annexin
  misc_feature (1)..(236): NCBI GI NO: 32401406 NR Description: annexin 11a; ANX XIa [Danio rerio]
MYRWMLQPADRDAVLVNVAIKNGTKDYHVIAEIACVLSAEELLAVRRAYHRRYKCSLEEDVAANTTGNLRQLLVGLVTSYRYEGDEINVKFSQTEANVLHESVKEKKGNSEEVIRILTTRSKTQLVATFNRYRDEHGISISKKLLDQTSDDFHKVLHTAIRCINDHKKYYEKVLRNAVKKFGTDEDGLSRVIVTRAEKDLKDIKELYYKRNSVHLEDEVSKETSGDYKKFLLTLLGK

SEQ ID NO: 5792 - protein, 233 aa, Glycine max
  peptide (1)..(233): Ceres Seq. ID no. 15176237
  misc_feature (163)..(230): Pfam Name: Pfam Description:  Annexin
  misc_feature (1)..(233): NCBI GI NO: 3176098 NR Description: annexin [Medicago truncatula]
  misc_feature (1)..(233): NCBI GI NO: 21264397 NR Description: Annexin-like protein RJ4
  misc_feature (1)..(233): NCBI GI NO: 1362037 NR Description: annexin homolog RJ4
  misc_feature (1)..(232): NCBI GI NO: 22326753 NR Description: annexin-related protein [Arabidopsis thaliana]
  misc_feature (1)..(233): NCBI GI NO: 15220216 NR Description: Ca2+-dependent membrane-binding protein annexin
  misc_feature (1)..(233): NCBI GI NO: 1621539 NR Description: annexin-like protein
  misc_feature (1)..(233): NCBI GI NO: 3928134 NR Description: annexin P38 [Capsicum annuum]
  misc_feature (1)..(233): NCBI GI NO: 4580920 NR Description: vacuole-associated annexin VCaB42
  misc_feature (1)..(232): NCBI GI NO: 34905372 NR Description: putative annexin
  misc_feature (1)..(232): NCBI GI NO: 32401406 NR Description: annexin 11a; ANX XIa [Danio rerio]
MLQPADRDAVLVNVAIKNGTKDYHVIAEIACVLSAEELLAVRRAYHRRYKCSLEEDVAANTTGNLRQLLVGLVTSYRYEGDEINVKFSQTEANVLHESVKEKKGNSEEVIRILTTRSKTQLVATFNRYRDEHGISISKKLLDQTSDDFHKVLHTAIRCINDHKKYYEKVLRNAVKKFGTDEDGLSRVIVTRAEKDLKDIKELYYKRNSVHLEDEVSKETSGDYKKFLLTLLGK

SEQ ID NO: 5793 - DNA, 1440 bp, Glycine max
  misc_feature (1)..(1440): Ceres Seq. ID no. 12607348
gcccccccccctgggaaaatgctttttatttggttcttttaatttcatggcttgtagttagaactgaatagcataaactgtaatctgttgaatctgcttgtgttttaatttcaaagaagcaagacaattatctagctactttaatggccttttgttatcgttttgcattggtggcatattaagccttttcaatgtgtggattcaataccatcaaggatgggactggggctttgggttctccaccattgaatgaaattgaacagaaaataggagaaagaattctccttctcccccaaggatttgtcctttcacaactcatttctctattaacaaactaactaactactatcctatctgtcttaactaactctcccttccttctctcctaactcctaacataaaaactcttcttaacttggtgagatgaaataactttttatcatgtactgtcatgatattgtagtgattagaaaagaaaactgtgttgctattttgttgatctgattatatttattagagatctcagctgaacagagtggaaagaaacaatttataatataattttttacttctgagaattaggcttaaagtaattatggataaactaacacactggtttctgtgagcttgtcaagcatacacatttcccttggggcttatttaaaggttaatgcttatattggaatttaatggtttaattagaattggatgagaagtatactgtatagatttgattatgaagccaactattgttctttggactttgattattagtttacataattattgaagtggtttgaagtgaactgtctgtttaggatgactaagcatgcacttcaatcttctatttattccctgccccatatctcagcatatgaaattttagttgttacgtcattatacctaccagtgcatgcttgagtgttctctacttgtttaattgaaagcttcatgtaatttgctatgttttgcaggaggacaagatcacaatcatgccctttttgccgcgacaatcttaagagagtaaactcgggtgatctctgggtgttcactgacaatagggatgtagtagacatggcaacagtgacaagggagaatcttagaaggcttttcatgtacatagataagttgcctttggtcattccagactttctctttgacacatatgactctcacctaagatgagtggttgcaacagacagattttactgtctggtgtgtggtcttggaggggtggttcctttctatttagtaacgtaaactccgaatgcaatttggtaaatttagtttatatagagttgtattgttgcttcccacgtcttccagaagtatccagccctgtgtttactgtgggttggtggtgaagttgagatggtaaattgtatgtaggtcatttgtatatcctgtacagattgaattacttattaagaagagttttgc

SEQ ID NO: 5794 - protein, 73 aa, Glycine max
  peptide (1)..(73): Ceres Seq. ID no. 12607349
  misc_feature (5)..(73): NCBI GI NO: 38175742 NR Description: zinc finger protein family-like
  misc_feature (5)..(71): NCBI GI NO: 34899152 NR Description: RNA-binding protein-like~contains ESTC28606
  misc_feature (6)..(73): NCBI GI NO: 37535758 NR Description: unknown protein
  misc_feature (5)..(73): NCBI GI NO: 8843801 NR Description: contains similarity to RNA binding-likeprotein~gene_id:MZN1
  misc_feature (5)..(73): NCBI GI NO: 18424150 NR Description: Expressed protein; protein id: At5g58787
  misc_feature (7)..(73): NCBI GI NO: 9294812 NR Description: MTD2 [Medicago truncatula]
  misc_feature (7)..(73): NCBI GI NO: 15232735 NR Description: RNA-binding protein-like protein
  misc_feature (7)..(73): NCBI GI NO: 21618121 NR Description: RNA-binding protein-like protein
  misc_feature (6)..(73): NCBI GI NO: 37534822 NR Description: putative AP2-domain DNA-binding protein
  misc_feature (5)..(62): NCBI GI NO: 15241003 NR Description: putative protein; protein id: At5g01520
MFCRRTRSQSCPFCRDNLKRVNSGDLWVFTDNRDVVDMATVTRENLRRLFMYIDKLPLVIPDFLFDTYDSHLR

SEQ ID NO: 5795 - protein, 60 aa, Glycine max
  peptide (1)..(60): Ceres Seq. ID no. 12607350
MSGCNRQILLSGVWSWRGGSFLFSNVNSECNLVNLVYIELYCCFPRLPEVSSPVFTVGWW

SEQ ID NO: 5796 - protein, 48 aa, Glycine max
  peptide (1)..(48): Ceres Seq. ID no. 12607351
MCGFNTIKDGTGALGSPPLNEIEQKIGERILLLPQGFVLSQLISLLTN

SEQ ID NO: 5797 - DNA, 1683 bp, Glycine max
  misc_feature (1)..(1683): Ceres Seq. ID no. 15169252
agatataacagcagacactacctgcggaagacgatccggagccgccacctattcttttgttcatcacatattcaatggcttcctctcttctctctccatcatttacatccttcctccgcaccaaggatctctctctctctgctttcacttctcagcgatgcttcaaagcggtgccaaggaaaataatccgttgtgctattgcggcgcctcagcgccaaccttccaccactggatcagtgaggactgcaatgaccatgactgagaagatattggccagagcttctgagaaggcacagctgacccctggggataatgtttgggtcaatgttgatattttgatgacacatgatgtgtgtggccctggttctattgggattttcaagagggagtttggcgaggatgccaaggtttgggaccgtgaaaagcttgtaataatacctgaccactatattttcacaagtgatgaacgtgccaatcgcaatgtagacatattaagagatttctgccatgagcagaatatcaagtacttttatgatattaaggatcttagtaattttaaggtaaatccagactataagggtgtttgccatgttgctcttgctcaggaaggtcattgtaggccaggagaggttctcttaggtactgattctcacacttgtactgctggagcatttggtcaatttgctacagggattggtaatactgatgccggctttgtgctgggaactgggaaacttctgctcaaggtgcccccaactttgagatttgtaatggatggagaaatgcccgattatttgctttctaaggatttgattctgcaaattattggtgaaataactgtggctggggcaacatataaatcgatggagtttgttggtacaaccgttgaaagtttaactatggaagaacggatgacattgtgcaacatggttgttgaagctggtggaaagaatggtgttgttcctgctgacagcactacatttaaatatcttgagggcaagacatctctgccatatgaacctgtttatagtgacgatcaagcaagatttctcgcagagtatagatttgatgtctcaaaattggagccagtggtggccaagcctcattctccggataatcgtgctttggcaagagagtgcaaggatgtgaaaattgacagagtatacataggatcttgtacaggtggcaaaacagaggatttcatggctgcagcaaaagtttttctggcatcaggtaaacaggtcaaagttcctacatttcttgtgcctgcaacacaaaaggtttggatggacttgtactccctccctgtccctggatctggtggtaagacatgctcacagatatttgaagaagttgggtgtgacacaccagctagtcctagttgtggtgcttgtttgggtggcccaaaagatacttacgcacgcatgaatgaacctaaggtttgtgtttcaactacgaacaggaacttcccgggccgaatgggacacaaggaaggtcaaatctatttggcttccccttatacagctgctgcatctgcattgaccggttatgttactgatcctagagagttcttgtagtagaatgttgttacaatcatctcattgtgttgtactcgttgttggttatttgtgtattctctactctctactagtcataagttaaaactgacaactatttaagctc

SEQ ID NO: 5798 - protein, 500 aa, Glycine max
  peptide (1)..(500): Ceres Seq. ID no. 15169253
  misc_feature (60)..(491): Pfam Name: aconitate hydratase Pfam Description: Aconitase family
  misc_feature (1)..(500): NCBI GI NO: 18414006 NR Description: aconitase family [Arabidopsis thaliana]
  misc_feature (1)..(500): NCBI GI NO: 7450363 NR Description: hypothetical protein T9E8
  misc_feature (59)..(500): NCBI GI NO: 23043646 NR Description: hypothetical protein
  misc_feature (58)..(500): NCBI GI NO: 21673449 NR Description: 3-isopropylmalate dehydratase
  misc_feature (60)..(500): NCBI GI NO: 20094876 NR Description: 3-isopropylmalate dehydratase large subunit
  misc_feature (59)..(498): NCBI GI NO: 15668676 NR Description: 3-isopropylmalate dehydratase (leuC)
  misc_feature (58)..(496): NCBI GI NO: 15679385 NR Description: 3-isopropylmalate dehydratase, LeuD subunit
  misc_feature (59)..(498): NCBI GI NO: 15606262 NR Description: large subunit of isopropylmalate isomerase
  misc_feature (60)..(497): NCBI GI NO: 20091903 NR Description: 3-isopropylmalate dehydratase, large subunit
  misc_feature (52)..(498): NCBI GI NO: 23050847 NR Description: hypothetical protein [Methanosarcina barkeri]
MASSLLSPSFTSFLRTKDLSLSAFTSQRCFKAVPRKIIRCAIAAPQRQPSTTGSVRTAMTMTEKILARASEKAQLTPGDNVWVNVDILMTHDVCGPGSIGIFKREFGEDAKVWDREKLVIIPDHYIFTSDERANRNVDILRDFCHEQNIKYFYDIKDLSNFKVNPDYKGVCHVALAQEGHCRPGEVLLGTDSHTCTAGAFGQFATGIGNTDAGFVLGTGKLLLKVPPTLRFVMDGEMPDYLLSKDLILQIIGEITVAGATYKSMEFVGTTVESLTMEERMTLCNMVVEAGGKNGVVPADSTTFKYLEGKTSLPYEPVYSDDQARFLAEYRFDVSKLEPVVAKPHSPDNRALARECKDVKIDRVYIGSCTGGKTEDFMAAAKVFLASGKQVKVPTFLVPATQKVWMDLYSLPVPGSGGKTCSQIFEEVGCDTPASPSCGACLGGPKDTYARMNEPKVCVSTTNRNFPGRMGHKEGQIYLASPYTAAASALTGYVTDPREFL

SEQ ID NO: 5799 - protein, 442 aa, Glycine max
  peptide (1)..(442): Ceres Seq. ID no. 15169254
  misc_feature (2)..(433): Pfam Name: aconitate hydratase Pfam Description: Aconitase family
  misc_feature (1)..(442): NCBI GI NO: 18414006 NR Description: aconitase family [Arabidopsis thaliana]
  misc_feature (1)..(442): NCBI GI NO: 7450363 NR Description: hypothetical protein T9E8
  misc_feature (1)..(442): NCBI GI NO: 23043646 NR Description: hypothetical protein
  misc_feature (1)..(442): NCBI GI NO: 21673449 NR Description: 3-isopropylmalate dehydratase
  misc_feature (2)..(442): NCBI GI NO: 20094876 NR Description: 3-isopropylmalate dehydratase large subunit
  misc_feature (1)..(440): NCBI GI NO: 15668676 NR Description: 3-isopropylmalate dehydratase (leuC)
  misc_feature (1)..(438): NCBI GI NO: 15679385 NR Description: 3-isopropylmalate dehydratase, LeuD subunit
  misc_feature (1)..(440): NCBI GI NO: 15606262 NR Description: large subunit of isopropylmalate isomerase
  misc_feature (2)..(439): NCBI GI NO: 20091903 NR Description: 3-isopropylmalate dehydratase, large subunit
  misc_feature (1)..(440): NCBI GI NO: 23050847 NR Description: hypothetical protein [Methanosarcina barkeri]
MTMTEKILARASEKAQLTPGDNVWVNVDILMTHDVCGPGSIGIFKREFGEDAKVWDREKLVIIPDHYIFTSDERANRNVDILRDFCHEQNIKYFYDIKDLSNFKVNPDYKGVCHVALAQEGHCRPGEVLLGTDSHTCTAGAFGQFATGIGNTDAGFVLGTGKLLLKVPPTLRFVMDGEMPDYLLSKDLILQIIGEITVAGATYKSMEFVGTTVESLTMEERMTLCNMVVEAGGKNGVVPADSTTFKYLEGKTSLPYEPVYSDDQARFLAEYRFDVSKLEPVVAKPHSPDNRALARECKDVKIDRVYIGSCTGGKTEDFMAAAKVFLASGKQVKVPTFLVPATQKVWMDLYSLPVPGSGGKTCSQIFEEVGCDTPASPSCGACLGGPKDTYARMNEPKVCVSTTNRNFPGRMGHKEGQIYLASPYTAAASALTGYVTDPREFL

SEQ ID NO: 5800 - protein, 440 aa, Glycine max
  peptide (1)..(440): Ceres Seq. ID no. 15169255
  misc_feature (1)..(431): Pfam Name: aconitate hydratase Pfam Description: Aconitase family
  misc_feature (1)..(440): NCBI GI NO: 18414006 NR Description: aconitase family [Arabidopsis thaliana]
  misc_feature (1)..(440): NCBI GI NO: 7450363 NR Description: hypothetical protein T9E8
  misc_feature (1)..(440): NCBI GI NO: 23043646 NR Description: hypothetical protein
  misc_feature (1)..(440): NCBI GI NO: 21673449 NR Description: 3-isopropylmalate dehydratase
  misc_feature (1)..(440): NCBI GI NO: 20094876 NR Description: 3-isopropylmalate dehydratase large subunit
  misc_feature (1)..(438): NCBI GI NO: 15668676 NR Description: 3-isopropylmalate dehydratase (leuC)
  misc_feature (1)..(436): NCBI GI NO: 15679385 NR Description: 3-isopropylmalate dehydratase, LeuD subunit
  misc_feature (1)..(438): NCBI GI NO: 15606262 NR Description: large subunit of isopropylmalate isomerase
  misc_feature (1)..(437): NCBI GI NO: 20091903 NR Description: 3-isopropylmalate dehydratase, large subunit
  misc_feature (1)..(438): NCBI GI NO: 23050847 NR Description: hypothetical protein [Methanosarcina barkeri]
MTEKILARASEKAQLTPGDNVWVNVDILMTHDVCGPGSIGIFKREFGEDAKVWDREKLVIIPDHYIFTSDERANRNVDILRDFCHEQNIKYFYDIKDLSNFKVNPDYKGVCHVALAQEGHCRPGEVLLGTDSHTCTAGAFGQFATGIGNTDAGFVLGTGKLLLKVPPTLRFVMDGEMPDYLLSKDLILQIIGEITVAGATYKSMEFVGTTVESLTMEERMTLCNMVVEAGGKNGVVPADSTTFKYLEGKTSLPYEPVYSDDQARFLAEYRFDVSKLEPVVAKPHSPDNRALARECKDVKIDRVYIGSCTGGKTEDFMAAAKVFLASGKQVKVPTFLVPATQKVWMDLYSLPVPGSGGKTCSQIFEEVGCDTPASPSCGACLGGPKDTYARMNEPKVCVSTTNRNFPGRMGHKEGQIYLASPYTAAASALTGYVTDPREFL

SEQ ID NO: 5801 - DNA, 937 bp, Glycine max
  misc_feature (1)..(937): Ceres Seq. ID no. 13593987
ttacctccaggtcgccctcctgctccatctcaaatgatacctcatccaaatgttggtgcatatatgtcaagccaacagccaactgttggatatactaatttaattagttctctaatgtcgcaaggtgtgatctcattggctaaccagctgcctgcacaggattctgttggaactgagtttaatccagatattctgaaggttcgtcatgagtctgcagtcaatgccttatatggtgatctccctagacaatgcacaacttgtgggctgagattcaaatgccaagaggaacacagtagtcatatggattggcatgtgactaagaatcggatgtctaaaacccgtaagcagaaaccctctcggaagtggtttgttagtgacaggatgtggctcagtggtgcagaggcattgggaacagaatcagctccaggttttttgccaacagaaaccatagaagaaaggaaagatgatgaagagttggcagtgcctgcagaagaagaccagaatacatgtgcattatgcggagagccttttgatgagttttacagtgatgaaatggaggaatggatgtatcgaggagcagtatacctcaatgcacctacgggaacaacagcaggcatggataggactcagttaggccccataattcatgctaaatgcagatcagaatctaatatggccacctctgaagatcttggaccagatgaaaagggtgccgatgaagagggttcccaaaggaaacgaatgcgaagttgatcaatgttgaccagttttgtgcattgtaacttatgattttccgttggtgtatctcatagagttgaatcttgcaataccatggccattctgccaaagtcatgtacatgtatagttggactagtaacgttcatattttcttgcagccaacggttacattttaacttaaaattatttcgtcccttgc

SEQ ID NO: 5802 - protein, 250 aa, Glycine max
  peptide (1)..(250): Ceres Seq. ID no. 13593988
  misc_feature (18)..(250): NCBI GI NO: 30679905 NR Description: S-locus protein 4-related [Arabidopsis thaliana]
  misc_feature (18)..(224): NCBI GI NO: 4115937 NR Description: contains similarity to human PCF11p homolog
  misc_feature (1)..(224): NCBI GI NO: 38637067 NR Description: putative S-locus protein 4
  misc_feature (2)..(231): NCBI GI NO: 6069478 NR Description: S-locus protein 4 [Brassica rapa]
  misc_feature (24)..(231): NCBI GI NO: 18642418 NR Description: putative PCF11 protein [Brassica napus]
  misc_feature (3)..(226): NCBI GI NO: 15239923 NR Description: S-locus protein 4-related [Arabidopsis thaliana]
  misc_feature (15)..(226): NCBI GI NO: 15219679 NR Description: expressed protein [Arabidopsis thaliana]
  misc_feature (15)..(226): NCBI GI NO: 18086323 NR Description: At1g66500/F28G11_6 [Arabidopsis thaliana]
  misc_feature (53)..(229): NCBI GI NO: 18404146 NR Description: expressed protein [Arabidopsis thaliana]
  misc_feature (53)..(229): NCBI GI NO: 25408479 NR Description: hypothetical protein At2g36480
LPPGRPPAPSQMIPHPNVGAYMSSQQPTVGYTNLISSLMSQGVISLANQLPAQDSVGTEFNPDILKVRHESAVNALYGDLPRQCTTCGLRFKCQEEHSSHMDWHVTKNRMSKTRKQKPSRKWFVSDRMWLSGAEALGTESAPGFLPTETIEERKDDEELAVPAEEDQNTCALCGEPFDEFYSDEMEEWMYRGAVYLNAPTGTTAGMDRTQLGPIIHAKCRSESNMATSEDLGPDEKGADEEGSQRKRMRS

SEQ ID NO: 5803 - protein, 239 aa, Glycine max
  peptide (1)..(239): Ceres Seq. ID no. 13593989
  misc_feature (7)..(239): NCBI GI NO: 30679905 NR Description: S-locus protein 4-related [Arabidopsis thaliana]
  misc_feature (7)..(213): NCBI GI NO: 4115937 NR Description: contains similarity to human PCF11p homolog
  misc_feature (1)..(213): NCBI GI NO: 38637067 NR Description: putative S-locus protein 4
  misc_feature (1)..(220): NCBI GI NO: 6069478 NR Description: S-locus protein 4 [Brassica rapa]
  misc_feature (13)..(220): NCBI GI NO: 18642418 NR Description: putative PCF11 protein [Brassica napus]
  misc_feature (1)..(215): NCBI GI NO: 15239923 NR Description: S-locus protein 4-related [Arabidopsis thaliana]
  misc_feature (4)..(215): NCBI GI NO: 15219679 NR Description: expressed protein [Arabidopsis thaliana]
  misc_feature (4)..(215): NCBI GI NO: 18086323 NR Description: At1g66500/F28G11_6 [Arabidopsis thaliana]
  misc_feature (42)..(218): NCBI GI NO: 18404146 NR Description: expressed protein [Arabidopsis thaliana]
  misc_feature (42)..(218): NCBI GI NO: 25408479 NR Description: hypothetical protein At2g36480
MIPHPNVGAYMSSQQPTVGYTNLISSLMSQGVISLANQLPAQDSVGTEFNPDILKVRHESAVNALYGDLPRQCTTCGLRFKCQEEHSSHMDWHVTKNRMSKTRKQKPSRKWFVSDRMWLSGAEALGTESAPGFLPTETIEERKDDEELAVPAEEDQNTCALCGEPFDEFYSDEMEEWMYRGAVYLNAPTGTTAGMDRTQLGPIIHAKCRSESNMATSEDLGPDEKGADEEGSQRKRMRS

SEQ ID NO: 5804 - protein, 229 aa, Glycine max
  peptide (1)..(229): Ceres Seq. ID no. 13593990
  misc_feature (1)..(229): NCBI GI NO: 30679905 NR Description: S-locus protein 4-related [Arabidopsis thaliana]
  misc_feature (1)..(203): NCBI GI NO: 4115937 NR Description: contains similarity to human PCF11p homolog
  misc_feature (1)..(203): NCBI GI NO: 38637067 NR Description: putative S-locus protein 4
  misc_feature (1)..(210): NCBI GI NO: 6069478 NR Description: S-locus protein 4 [Brassica rapa]
  misc_feature (3)..(210): NCBI GI NO: 18642418 NR Description: putative PCF11 protein [Brassica napus]
  misc_feature (1)..(205): NCBI GI NO: 15239923 NR Description: S-locus protein 4-related [Arabidopsis thaliana]
  misc_feature (1)..(205): NCBI GI NO: 15219679 NR Description: expressed protein [Arabidopsis thaliana]
  misc_feature (1)..(205): NCBI GI NO: 18086323 NR Description: At1g66500/F28G11_6 [Arabidopsis thaliana]
  misc_feature (32)..(208): NCBI GI NO: 18404146 NR Description: expressed protein [Arabidopsis thaliana]
  misc_feature (32)..(208): NCBI GI NO: 25408479 NR Description: hypothetical protein At2g36480
MSSQQPTVGYTNLISSLMSQGVISLANQLPAQDSVGTEFNPDILKVRHESAVNALYGDLPRQCTTCGLRFKCQEEHSSHMDWHVTKNRMSKTRKQKPSRKWFVSDRMWLSGAEALGTESAPGFLPTETIEERKDDEELAVPAEEDQNTCALCGEPFDEFYSDEMEEWMYRGAVYLNAPTGTTAGMDRTQLGPIIHAKCRSESNMATSEDLGPDEKGADEEGSQRKRMRS

SEQ ID NO: 5805 - DNA, 2151 bp, Glycine max
  misc_feature (1)..(2151): Ceres Seq. ID no. 14310556
gggagttacacattattctctctctcactcacactcagagtggtagctagacaacaacgagagagagagagagagagatggaggatctcgaggaggaagagaacggagcggaggaggtgttggggtcaagcttgaccatggagaaagtggcggctgcgaagaagttcattgagaatcattatagggctcagatgaagaacatccaagagaggaaggagaggcgctgggttttagaaagaaaattggcatcatcagatgtgccaaatgaggagcggatcaacctcatcaaagatttagagaggaaggagactgaatatatgcgattgaaaagacacaagatttgtgttaatgattttgaacttttgaccatcattggaaggggggcttttggggaggttagactgtgccgggagaagaaatctggaaatatttatgctatgaaaaagctgaagaaatctgaaatgcttaggagaggccaggtggaacatgttagagctgagaggaatttgctggccgaagttgccagtcattgcattgtgaaactttactactcatttcaggatgctgagtacttgtatttaattatggagtatctgcctgggggtgacgttatgactctgctgatgagggaagacaccttaagtgaaaatgttgctagattttacattgcacaaagtgttctggccatagaatctattcacaaacacaattacattcacagagatattaaacctgataaccttcttctggataaaaatggtcacatgaagctctctgattttggtctctgtaagcctctggattgtattgccttgtctacactgcatgaaaatcagaccatagatgatgaaactttggcagaaccaatggatgttgatgatgcggacaatcgaagtagctggagaagtccacgtgaacagcttcaacattggcagatgaacaggaggaagttggcattttcaacagtggggacaccagactacattgctcctgaagtacttttgaaaaaaggatatgggatggaatgtgattggtggtcactgggagcaataatgtatgaaatgctggttggttacccaccattttactccgatgatccaataaccacatgcagaaagattgttcattggagaaatcatttaagatttccagatgatgcccagttaacacttgaggctaaggatctaatttataggttgctctgtgatgttgatcataggttaggtactcgaggggccattgaaataaaggctcatccttggttcaagggtgttgattgggataaactgtatgaaatggaggcagcatttaaacctcaagtcaacggggaactggatacccaaaacttcatgaagtttgatgaggttgatccaccaacagcagcaagaaccgggtctggatcctcacgaaagatgctaactaccaaagatctaagtttcgttggttatacttacaagaatttcgatgctgtaaaggaagggctccgtcaatcttttggtgattccatgcaagagtatgcttctaaacgggcagctgaagaaacaagtttacaaatgcttgcatcctctggagatccaatggttccataactttgtgcaaattgaagtccatcctgttgggtttttgtgtacttgctttggctttaaatattcggccaagaacatgtattatggtgtactccaattcctatgccatttgcaagaaaaatgtgtacagcaagcagttgacagcattgtcaaagcttgtagggcaaccccgcgcgtctgtatttgaattttcaacttaggaactgagagttgtgcgactgagtgctcctgtcctggctgcccaggttggctgaggaagacttgccttctctagtggcagttgctggttaaatgttagttatggacaaaaattgctaaggaactattaaagcatcctgaaaattattcgatgtgatgtgtacatttattggaagataacataaattaaactattaaaacaaactatgcttggggatggagtgtggaattgtctttagcagctcagttgcttgccctttttccctttttatctatttcatgtggaaaagtgcaattagtgacgtcaacctcactgtcctggtcactagctaatgcttgattgaatacaaacaactttttcttaaag

SEQ ID NO: 5806 - protein, 503 aa, Glycine max
  peptide (1)..(503): Ceres Seq. ID no. 14310557
  misc_feature (93)..(396): Pfam Name: Pfam Description:  Protein kinase domain
  misc_feature (1)..(502): NCBI GI NO: 31088226 NR Description: protein kinase [Raphanus sativus]
  misc_feature (1)..(502): NCBI GI NO: 27311789 NR Description: putative protein kinase [Arabidopsis thaliana]
  misc_feature (1)..(474): NCBI GI NO: 15234064 NR Description: protein kinase, putative [Arabidopsis thaliana]
  misc_feature (1)..(502): NCBI GI NO: 31088228 NR Description: protein kinase [Raphanus sativus]
  misc_feature (21)..(484): NCBI GI NO: 541824 NR Description: protein kinase (EC 2.7.1.-) - spinach
  misc_feature (21)..(490): NCBI GI NO: 34906336 NR Description: unnamed protein product
  misc_feature (5)..(472): NCBI GI NO: 18399030 NR Description: protein kinase, putative [Arabidopsis thaliana]
  misc_feature (5)..(455): NCBI GI NO: 7446410 NR Description: protein kinase F27F23
  misc_feature (447)..(472): NCBI GI NO: 7446410 NR Description: protein kinase F27F23
  misc_feature (1)..(467): NCBI GI NO: 7339534 NR Description: protein kinase MK6 [Mesembryanthemum crystallinum]
MEDLEEEENGAEEVLGSSLTMEKVAAAKKFIENHYRAQMKNIQERKERRWVLERKLASSDVPNEERINLIKDLERKETEYMRLKRHKICVNDFELLTIIGRGAFGEVRLCREKKSGNIYAMKKLKKSEMLRRGQVEHVRAERNLLAEVASHCIVKLYYSFQDAEYLYLIMEYLPGGDVMTLLMREDTLSENVARFYIAQSVLAIESIHKHNYIHRDIKPDNLLLDKNGHMKLSDFGLCKPLDCIALSTLHENQTIDDETLAEPMDVDDADNRSSWRSPREQLQHWQMNRRKLAFSTVGTPDYIAPEVLLKKGYGMECDWWSLGAIMYEMLVGYPPFYSDDPITTCRKIVHWRNHLRFPDDAQLTLEAKDLIYRLLCDVDHRLGTRGAIEIKAHPWFKGVDWDKLYEMEAAFKPQVNGELDTQNFMKFDEVDPPTAARTGSGSSRKMLTTKDLSFVGYTYKNFDAVKEGLRQSFGDSMQEYASKRAAEETSLQMLASSGDPMVP

SEQ ID NO: 5807 - protein, 483 aa, Glycine max
  peptide (1)..(483): Ceres Seq. ID no. 14310558
  misc_feature (73)..(376): Pfam Name: Pfam Description:  Protein kinase domain
  misc_feature (1)..(482): NCBI GI NO: 31088226 NR Description: protein kinase [Raphanus sativus]
  misc_feature (1)..(482): NCBI GI NO: 27311789 NR Description: putative protein kinase [Arabidopsis thaliana]
  misc_feature (1)..(454): NCBI GI NO: 15234064 NR Description: protein kinase, putative [Arabidopsis thaliana]
  misc_feature (1)..(482): NCBI GI NO: 31088228 NR Description: protein kinase [Raphanus sativus]
  misc_feature (1)..(464): NCBI GI NO: 541824 NR Description: protein kinase (EC 2.7.1.-) - spinach
  misc_feature (1)..(470): NCBI GI NO: 34906336 NR Description: unnamed protein product
  misc_feature (1)..(452): NCBI GI NO: 18399030 NR Description: protein kinase, putative [Arabidopsis thaliana]
  misc_feature (1)..(435): NCBI GI NO: 7446410 NR Description: protein kinase F27F23
  misc_feature (427)..(452): NCBI GI NO: 7446410 NR Description: protein kinase F27F23
  misc_feature (1)..(447): NCBI GI NO: 7339534 NR Description: protein kinase MK6 [Mesembryanthemum crystallinum]
MEKVAAAKKFIENHYRAQMKNIQERKERRWVLERKLASSDVPNEERINLIKDLERKETEYMRLKRHKICVNDFELLTIIGRGAFGEVRLCREKKSGNIYAMKKLKKSEMLRRGQVEHVRAERNLLAEVASHCIVKLYYSFQDAEYLYLIMEYLPGGDVMTLLMREDTLSENVARFYIAQSVLAIESIHKHNYIHRDIKPDNLLLDKNGHMKLSDFGLCKPLDCIALSTLHENQTIDDETLAEPMDVDDADNRSSWRSPREQLQHWQMNRRKLAFSTVGTPDYIAPEVLLKKGYGMECDWWSLGAIMYEMLVGYPPFYSDDPITTCRKIVHWRNHLRFPDDAQLTLEAKDLIYRLLCDVDHRLGTRGAIEIKAHPWFKGVDWDKLYEMEAAFKPQVNGELDTQNFMKFDEVDPPTAARTGSGSSRKMLTTKDLSFVGYTYKNFDAVKEGLRQSFGDSMQEYASKRAAEETSLQMLASSGDPMVP

SEQ ID NO: 5808 - protein, 465 aa, Glycine max
  peptide (1)..(465): Ceres Seq. ID no. 14310559
  misc_feature (55)..(358): Pfam Name: Pfam Description:  Protein kinase domain
  misc_feature (1)..(464): NCBI GI NO: 31088226 NR Description: protein kinase [Raphanus sativus]
  misc_feature (1)..(464): NCBI GI NO: 27311789 NR Description: putative protein kinase [Arabidopsis thaliana]
  misc_feature (1)..(436): NCBI GI NO: 15234064 NR Description: protein kinase, putative [Arabidopsis thaliana]
  misc_feature (1)..(464): NCBI GI NO: 31088228 NR Description: protein kinase [Raphanus sativus]
  misc_feature (1)..(446): NCBI GI NO: 541824 NR Description: protein kinase (EC 2.7.1.-) - spinach
  misc_feature (1)..(452): NCBI GI NO: 34906336 NR Description: unnamed protein product
  misc_feature (1)..(434): NCBI GI NO: 18399030 NR Description: protein kinase, putative [Arabidopsis thaliana]
  misc_feature (1)..(417): NCBI GI NO: 7446410 NR Description: protein kinase F27F23
  misc_feature (409)..(434): NCBI GI NO: 7446410 NR Description: protein kinase F27F23
  misc_feature (1)..(429): NCBI GI NO: 7339534 NR Description: protein kinase MK6 [Mesembryanthemum crystallinum]
MKNIQERKERRWVLERKLASSDVPNEERINLIKDLERKETEYMRLKRHKICVNDFELLTIIGRGAFGEVRLCREKKSGNIYAMKKLKKSEMLRRGQVEHVRAERNLLAEVASHCIVKLYYSFQDAEYLYLIMEYLPGGDVMTLLMREDTLSENVARFYIAQSVLAIESIHKHNYIHRDIKPDNLLLDKNGHMKLSDFGLCKPLDCIALSTLHENQTIDDETLAEPMDVDDADNRSSWRSPREQLQHWQMNRRKLAFSTVGTPDYIAPEVLLKKGYGMECDWWSLGAIMYEMLVGYPPFYSDDPITTCRKIVHWRNHLRFPDDAQLTLEAKDLIYRLLCDVDHRLGTRGAIEIKAHPWFKGVDWDKLYEMEAAFKPQVNGELDTQNFMKFDEVDPPTAARTGSGSSRKMLTTKDLSFVGYTYKNFDAVKEGLRQSFGDSMQEYASKRAAEETSLQMLASSGDPMVP

SEQ ID NO: 5809 - DNA, 1316 bp, Glycine max
  misc_feature (1)..(1316): Ceres Seq. ID no. 14313620
catttgctttgcattgttccttcacacaacagttctttaccattcttctgttaatagattctggatccatgttcctgataatattgttccattctcaggatccagtgttgtgcagtgtgacagttggtgtttcccactttgaaagatgtgctctttgggttcaagtattgtattacccattctatggtagtggtgctgtcggagactatgaaggtgactatgccgaagaggatcctcaaatcatgagacagaagagaagcctaaggcccgaattaggtgaacctgtgattttgagatgtcagccatataaaattccattgactgagcttcttttgccacaccaaatatcacctgttgagtttttccgactgtggcccagtttgccagctatcgtagaatatactggcacatatacatatgaaggtagtggctttaaggctactgctgctcagcagtatggtgcatctcctttcttaagtggactgaaatccttgtcttccaagccattccacatagtttgttcacatataatccgcacggtggcagggtttgagatgtgttatgctgctaaaacttggcatggtggcttcttgggcatgatgatatttggtgcaagtgaagtgagtagaaatgtggacttgggtgatgagactacaaccatgctgtgcaagtttgtggttcgagcatccgatccatctattaccaaggagattggatcagatcttcaaggctggttggatgaccttactgatggcggtgtggagtatatgcctgaagatgaagtgaaagtagctgcagccgagaggcttcgcatatcaatggaaaggatagccttgttaaaggcggcccaaccacgacccaagactccaaaatctgacaacgaagatgaagaggaggaagatgacaaaaataaagaaaagaaagatggcgaagatgagaaaaagaaggggccttcaactctatcgaaactaactgctgaggaagctgaacatcaagctcttcaagcagcagtactacaggagtggcatatgatctgcaaggatagaacaactgaagttaattaactattttcttttggtgtttttgatttttcttttttccatggctttccgagaaatgtacgagtgtattctttgtaattttttctcattttacatacacgaattaggtagaagccaaaatttgcccgagaaacgttcgagtgtattctttgtatactctttcccatattttcaggaaagtgttttgtacatgtaccgcgcggctattgatctgctattttatatttgaagcatttgttggaggtgttaggcatt

SEQ ID NO: 5810 - protein, 353 aa, Glycine max
  peptide (1)..(353): Ceres Seq. ID no. 14313621
  misc_feature (31)..(348): NCBI GI NO: 6016734 NR Description: unknown protein [Arabidopsis thaliana]
  misc_feature (31)..(348): NCBI GI NO: 30678420 NR Description: expressed protein [Arabidopsis thaliana]
  misc_feature (31)..(315): NCBI GI NO: 28393648 NR Description: unknown protein [Arabidopsis thaliana]
FALHCSFTQQFFTILLLIDSGSMFLIILFHSQDPVLCSVTVGVSHFERCALWVQVLYYPFYGSGAVGDYEGDYAEEDPQIMRQKRSLRPELGEPVILRCQPYKIPLTELLLPHQISPVEFFRLWPSLPAIVEYTGTYTYEGSGFKATAAQQYGASPFLSGLKSLSSKPFHIVCSHIIRTVAGFEMCYAAKTWHGGFLGMMIFGASEVSRNVDLGDETTTMLCKFVVRASDPSITKEIGSDLQGWLDDLTDGGVEYMPEDEVKVAAAERLRISMERIALLKAAQPRPKTPKSDNEDEEEEDDKNKEKKDGEDEKKKGPSTLSKLTAEEAEHQALQAAVLQEWHMICKDRTTEVN

SEQ ID NO: 5811 - protein, 331 aa, Glycine max
  peptide (1)..(331): Ceres Seq. ID no. 14313622
  misc_feature (9)..(326): NCBI GI NO: 6016734 NR Description: unknown protein [Arabidopsis thaliana]
  misc_feature (9)..(326): NCBI GI NO: 30678420 NR Description: expressed protein [Arabidopsis thaliana]
  misc_feature (9)..(293): NCBI GI NO: 28393648 NR Description: unknown protein [Arabidopsis thaliana]
MFLIILFHSQDPVLCSVTVGVSHFERCALWVQVLYYPFYGSGAVGDYEGDYAEEDPQIMRQKRSLRPELGEPVILRCQPYKIPLTELLLPHQISPVEFFRLWPSLPAIVEYTGTYTYEGSGFKATAAQQYGASPFLSGLKSLSSKPFHIVCSHIIRTVAGFEMCYAAKTWHGGFLGMMIFGASEVSRNVDLGDETTTMLCKFVVRASDPSITKEIGSDLQGWLDDLTDGGVEYMPEDEVKVAAAERLRISMERIALLKAAQPRPKTPKSDNEDEEEEDDKNKEKKDGEDEKKKGPSTLSKLTAEEAEHQALQAAVLQEWHMICKDRTTEVN

SEQ ID NO: 5812 - protein, 273 aa, Glycine max
  peptide (1)..(273): Ceres Seq. ID no. 14313623
  misc_feature (1)..(268): NCBI GI NO: 6016734 NR Description: unknown protein [Arabidopsis thaliana]
  misc_feature (1)..(268): NCBI GI NO: 30678420 NR Description: expressed protein [Arabidopsis thaliana]
  misc_feature (1)..(235): NCBI GI NO: 28393648 NR Description: unknown protein [Arabidopsis thaliana]
MRQKRSLRPELGEPVILRCQPYKIPLTELLLPHQISPVEFFRLWPSLPAIVEYTGTYTYEGSGFKATAAQQYGASPFLSGLKSLSSKPFHIVCSHIIRTVAGFEMCYAAKTWHGGFLGMMIFGASEVSRNVDLGDETTTMLCKFVVRASDPSITKEIGSDLQGWLDDLTDGGVEYMPEDEVKVAAAERLRISMERIALLKAAQPRPKTPKSDNEDEEEEDDKNKEKKDGEDEKKKGPSTLSKLTAEEAEHQALQAAVLQEWHMICKDRTTEVN

SEQ ID NO: 5813 - DNA, 1741 bp, Glycine max
  misc_feature (1)..(1741): Ceres Seq. ID no. 14313425
gatgatggaagaaacaaagagaagggaaatatcaggaggtgcgagtaccggagccaaacgcgggtgtgtgtgtgtgtgagggagagagagatgcagttccattcagaaactccaaactaaacatccctggcgacaaccttaggaatctcgatcgctgaaaaaacctatgcagccccgaacacactctctgcattccaacttgtttaagtcatgcctttcgattcacccttctctcaataaatttttaatcagattcttggccaccgccacactcataataaagttttgtttttccaaataaagggaatggcgactcctgttgagcctccaaatgggatcagaactgaagggaagcattattattccatgtggcaaaccctgtttgagattgactcaaaatacgttcccatcaagccgattggtcgcggagcatatggaattgtgtgctcttctgtgaatagagagataaatgagaaggttgccatcaagaagatacagaatgcctttgaaaaccgggttgatgccctgaggactttgcgcgaactcaagcttcttcgccaccttcaccatgagaatgtgattgctttgaaggacatcatgatgcctgttcacaggaatagtttcaaggatgtctatctggtttatgaactcatggacacggatttgcatcagattattaagtcttctcaagctttgtctaatgatcactgccagtatttcctctttcagttgctccggggcttgaaatatcttcactccgctaacattcttcatcgtgacttgaaacctgggaatcttctaatcaatgcaaattgtgacctaaaaatatgtgatttcgggctagctcgtactaattgcagcaagaaccagttcatgaccgagtatgttgtcactcggtggtatagggcaccagagctcctactctgctgtgacaactatgggacatctattgatgtttggtcagttggatgtatctttgcagagcttcttggccgaaaaccgattttccctggttcagagtgtctcaaccagctgaagttgattatcaatatccttggtagtcaaagggaggaggatattgaattcattgataacccaaaggcaaagaagtatatcaaatcacttccttattctcctggaacccccctttcgcaactttatcctaatgcgcatccattggcaattgatcttctggcaaagatgcttgttttcgatccaacaaagaggatcagtgtcactcaagcacttcaacacccttacatggcccctctgtatgatcctaactgtgaccctccagccgtcattccaattgatcttgacattgatgaggatctaggggaagagatgataagggacatgatgtggaaagaaatgcttcattaccatcctgaatctgctatggagagtgcagggttgtgctaatgatatttacttcctttcatagttatgttcccttttgttggtgccaggatagttctaatatcataacttgcttcaaataattaggagggctttgtcatcagtgagctccttatatgttctgttttctatttattgaaagcagagagaaacagcaaaaagatgaccatcttaaaaaaaaatgtgttattgctgatgatgcattgtagtctttaaacgccatgttgagagattgattttgtactgaactttgtattgtagttgccttgttttgttgtacataattatgtttctgtgtctttcataaaccattttgtaaatc

SEQ ID NO: 5814 - protein, 371 aa, Glycine max
  peptide (1)..(371): Ceres Seq. ID no. 14313426
  misc_feature (32)..(319): Pfam Name: Pfam Description:  Protein kinase domain
  misc_feature (1)..(370): NCBI GI NO: 8132347 NR Description: MAP kinase PsMAPK2 [Pisum sativum]
  misc_feature (1)..(364): NCBI GI NO: 2499614 NR Description: MITOGEN-ACTIVATED PROTEIN KINASE HOMOLOG NTF3
  misc_feature (1)..(365): NCBI GI NO: 2499612 NR Description: MITOGEN-ACTIVATED PROTEIN KINASE HOMOLOG 1 (PMEK1)
  misc_feature (1)..(364): NCBI GI NO: 15218451 NR Description: mitogen-activated protein kinase
  misc_feature (1)..(364): NCBI GI NO: 18406388 NR Description: mitogen-activated protein kinase
  misc_feature (1)..(362): NCBI GI NO: 11869994 NR Description: MAP kinase 2 [Oryza sativa]
  misc_feature (1)..(364): NCBI GI NO: 533281 NR Description: ATMPK2 [Arabidopsis thaliana]
  misc_feature (1)..(362): NCBI GI NO: 7341300 NR Description: MAP kinase MAPK2 [Oryza sativa]
  misc_feature (1)..(362): NCBI GI NO: 24412848 NR Description: putative mitogen-activated protein kinase, msrmk3
  misc_feature (1)..(364): NCBI GI NO: 533280 NR Description: ATMPK1 [Arabidopsis thaliana]
MATPVEPPNGIRTEGKHYYSMWQTLFEIDSKYVPIKPIGRGAYGIVCSSVNREINEKVAIKKIQNAFENRVDALRTLRELKLLRHLHHENVIALKDIMMPVHRNSFKDVYLVYELMDTDLHQIIKSSQALSNDHCQYFLFQLLRGLKYLHSANILHRDLKPGNLLINANCDLKICDFGLARTNCSKNQFMTEYVVTRWYRAPELLLCCDNYGTSIDVWSVGCIFAELLGRKPIFPGSECLNQLKLIINILGSQREEDIEFIDNPKAKKYIKSLPYSPGTPLSQLYPNAHPLAIDLLAKMLVFDPTKRISVTQALQHPYMAPLYDPNCDPPAVIPIDLDIDEDLGEEMIRDMMWKEMLHYHPESAMESAGLC

SEQ ID NO: 5815 - protein, 351 aa, Glycine max
  peptide (1)..(351): Ceres Seq. ID no. 14313427
  misc_feature (12)..(299): Pfam Name: Pfam Description:  Protein kinase domain
  misc_feature (1)..(350): NCBI GI NO: 8132347 NR Description: MAP kinase PsMAPK2 [Pisum sativum]
  misc_feature (1)..(344): NCBI GI NO: 2499614 NR Description: MITOGEN-ACTIVATED PROTEIN KINASE HOMOLOG NTF3
  misc_feature (1)..(345): NCBI GI NO: 2499612 NR Description: MITOGEN-ACTIVATED PROTEIN KINASE HOMOLOG 1 (PMEK1)
  misc_feature (1)..(344): NCBI GI NO: 15218451 NR Description: mitogen-activated protein kinase
  misc_feature (1)..(344): NCBI GI NO: 18406388 NR Description: mitogen-activated protein kinase
  misc_feature (1)..(342): NCBI GI NO: 11869994 NR Description: MAP kinase 2 [Oryza sativa]
  misc_feature (1)..(344): NCBI GI NO: 533281 NR Description: ATMPK2 [Arabidopsis thaliana]
  misc_feature (1)..(342): NCBI GI NO: 7341300 NR Description: MAP kinase MAPK2 [Oryza sativa]
  misc_feature (1)..(342): NCBI GI NO: 24412848 NR Description: putative mitogen-activated protein kinase, msrmk3
  misc_feature (1)..(344): NCBI GI NO: 533280 NR Description: ATMPK1 [Arabidopsis thaliana]
MWQTLFEIDSKYVPIKPIGRGAYGIVCSSVNREINEKVAIKKIQNAFENRVDALRTLRELKLLRHLHHENVIALKDIMMPVHRNSFKDVYLVYELMDTDLHQIIKSSQALSNDHCQYFLFQLLRGLKYLHSANILHRDLKPGNLLINANCDLKICDFGLARTNCSKNQFMTEYVVTRWYRAPELLLCCDNYGTSIDVWSVGCIFAELLGRKPIFPGSECLNQLKLIINILGSQREEDIEFIDNPKAKKYIKSLPYSPGTPLSQLYPNAHPLAIDLLAKMLVFDPTKRISVTQALQHPYMAPLYDPNCDPPAVIPIDLDIDEDLGEEMIRDMMWKEMLHYHPESAMESAGLC

SEQ ID NO: 5816 - protein, 274 aa, Glycine max
  peptide (1)..(274): Ceres Seq. ID no. 14313428
  misc_feature (1)..(222): Pfam Name: Pfam Description:  Protein kinase domain
  misc_feature (1)..(273): NCBI GI NO: 8132347 NR Description: MAP kinase PsMAPK2 [Pisum sativum]
  misc_feature (1)..(267): NCBI GI NO: 2499614 NR Description: MITOGEN-ACTIVATED PROTEIN KINASE HOMOLOG NTF3
  misc_feature (1)..(268): NCBI GI NO: 2499612 NR Description: MITOGEN-ACTIVATED PROTEIN KINASE HOMOLOG 1 (PMEK1)
  misc_feature (1)..(267): NCBI GI NO: 15218451 NR Description: mitogen-activated protein kinase
  misc_feature (1)..(267): NCBI GI NO: 18406388 NR Description: mitogen-activated protein kinase
  misc_feature (1)..(265): NCBI GI NO: 11869994 NR Description: MAP kinase 2 [Oryza sativa]
  misc_feature (1)..(267): NCBI GI NO: 533281 NR Description: ATMPK2 [Arabidopsis thaliana]
  misc_feature (1)..(265): NCBI GI NO: 7341300 NR Description: MAP kinase MAPK2 [Oryza sativa]
  misc_feature (1)..(265): NCBI GI NO: 24412848 NR Description: putative mitogen-activated protein kinase, msrmk3
  misc_feature (1)..(267): NCBI GI NO: 533280 NR Description: ATMPK1 [Arabidopsis thaliana]
MMPVHRNSFKDVYLVYELMDTDLHQIIKSSQALSNDHCQYFLFQLLRGLKYLHSANILHRDLKPGNLLINANCDLKICDFGLARTNCSKNQFMTEYVVTRWYRAPELLLCCDNYGTSIDVWSVGCIFAELLGRKPIFPGSECLNQLKLIINILGSQREEDIEFIDNPKAKKYIKSLPYSPGTPLSQLYPNAHPLAIDLLAKMLVFDPTKRISVTQALQHPYMAPLYDPNCDPPAVIPIDLDIDEDLGEEMIRDMMWKEMLHYHPESAMESAGLC

SEQ ID NO: 5817 - DNA, 1400 bp, Glycine max
  misc_feature (1)..(1400): Ceres Seq. ID no. 15170239
gaaaccaagtctcgcaagccatcttggctagcactctctccttccccaccgcgccgccgagctccgcctccggccgacgcaagcagcccacctcggacgaattcttcttcccctactactcgtatctaccgggatggcgtcgggtggagatctcccatccgggttcgctgatgagagcaaaagtacaaaaacagaaggatcatccaacgaatgtcaaggggtccctccagctgccgctgcaggcttgtcgggtcctttcgatttttcttctatgcaaagtttgctcaatgatccatctataaaggagatggcggaccagattgcaagggaccctgcattcaatcagatggctgagcagctacagaaaggtgctcagactgcaggagaacagggcatgcctccattggatcctcatcaatacatggaaacaatgcaaaaggtcatggaaaaccctcagtttatgacaatggcagagcgcctcgggactgctcttatgcaggatcctactatgtccagtatgctggaaaatttgactagtccaacacataaggaggagcttgaagagcgcatgtctcggattaaggaagatccagccttgaagccaattcttgatgagttagagaatggtggtcctgctgcaatgataaagtactggaatgaccctgaaactcttcaaaagattggccaggcaatgggaactaccatgccgtttagcactgtctctactgctgaaccttctggtactgaagaaactgaagaagaaggtgaagatgaagacgaatccattgtccaccacactgccagtgttggtgacggtgagggtctgaagaaggctctagatggtggagcagacaaggatgaagaagactctgagggaagaagggccttgcactttgcatgtggatatggtgagttcaagtgtgcggaaatcctccttgaggcgggtgctgctgtagatgccatggataagaacaagaacaccccactgcattacgctgctggctatggccggaaagagtgtgtggatcttctgttgaagcacggtgctgctgtcactctccaaaacatggatgggaagacgcccatcgacgtcgccaagctcaacaaccaggacgaggtcctcaagctgctcgagaaggacgtgttcctgtaaatcacttcacttggcccccatgaagaggcatcatgttttacatcccttggcattggttttatatagtcatactcgaatcggcattttattcgttgtgtaagaatctactgttagctagcctgcaggccgactggctgaggttagaactgcatgttactgtatatggagacttgtgtatcgtccactttgttgctgttgattccactagagtaatccaagatgtacccaagattatttttgtcgtttg

SEQ ID NO: 5818 - protein, 339 aa, Glycine max
  peptide (1)..(339): Ceres Seq. ID no. 15170240
  misc_feature (280)..(312): Pfam Name: Pfam Description:  Ankyrin repeat
  misc_feature (13)..(339): NCBI GI NO: 38175562 NR Description: putative ankyrin domain protein
  misc_feature (3)..(339): NCBI GI NO: 24637568 NR Description: ankyrin domain protein [Nicotiana tabacum]
  misc_feature (3)..(339): NCBI GI NO: 13310811 NR Description: ankyrin-repeat protein HBP1 [Nicotiana tabacum]
  misc_feature (15)..(339): NCBI GI NO: 29826242 NR Description: TGB12K interacting protein 2 [Nicotiana tabacum]
  misc_feature (15)..(339): NCBI GI NO: 29826244 NR Description: TGB12K interacting protein 3 [Nicotiana tabacum]
  misc_feature (1)..(339): NCBI GI NO: 27573339 NR Description: unknown protein
  misc_feature (13)..(339): NCBI GI NO: 15237008 NR Description: ankyrin repeat-containing protein 2
  misc_feature (13)..(339): NCBI GI NO: 3478700 NR Description: AFT protein [Arabidopsis thaliana]
  misc_feature (13)..(339): NCBI GI NO: 4205079 NR Description: ankyrin repeat-containing protein 2
  misc_feature (212)..(339): NCBI GI NO: 3929221 NR Description: TRF1-interacting ankyrin-related ADP-ribosepolymerase
MASGGDLPSGFADESKSTKTEGSSNECQGVPPAAAAGLSGPFDFSSMQSLLNDPSIKEMADQIARDPAFNQMAEQLQKGAQTAGEQGMPPLDPHQYMETMQKVMENPQFMTMAERLGTALMQDPTMSSMLENLTSPTHKEELEERMSRIKEDPALKPILDELENGGPAAMIKYWNDPETLQKIGQAMGTTMPFSTVSTAEPSGTEETEEEGEDEDESIVHHTASVGDGEGLKKALDGGADKDEEDSEGRRALHFACGYGEFKCAEILLEAGAAVDAMDKNKNTPLHYAAGYGRKECVDLLLKHGAAVTLQNMDGKTPIDVAKLNNQDEVLKLLEKDVFL

SEQ ID NO: 5819 - protein, 293 aa, Glycine max
  peptide (1)..(293): Ceres Seq. ID no. 15170241
  misc_feature (234)..(266): Pfam Name: Pfam Description:  Ankyrin repeat
  misc_feature (1)..(293): NCBI GI NO: 38175562 NR Description: putative ankyrin domain protein
  misc_feature (1)..(293): NCBI GI NO: 24637568 NR Description: ankyrin domain protein [Nicotiana tabacum]
  misc_feature (1)..(293): NCBI GI NO: 13310811 NR Description: ankyrin-repeat protein HBP1 [Nicotiana tabacum]
  misc_feature (1)..(293): NCBI GI NO: 29826242 NR Description: TGB12K interacting protein 2 [Nicotiana tabacum]
  misc_feature (1)..(293): NCBI GI NO: 29826244 NR Description: TGB12K interacting protein 3 [Nicotiana tabacum]
  misc_feature (1)..(293): NCBI GI NO: 27573339 NR Description: unknown protein
  misc_feature (1)..(293): NCBI GI NO: 15237008 NR Description: ankyrin repeat-containing protein 2
  misc_feature (1)..(293): NCBI GI NO: 3478700 NR Description: AFT protein [Arabidopsis thaliana]
  misc_feature (1)..(293): NCBI GI NO: 4205079 NR Description: ankyrin repeat-containing protein 2
  misc_feature (166)..(293): NCBI GI NO: 3929221 NR Description: TRF1-interacting ankyrin-related ADP-ribosepolymerase
MQSLLNDPSIKEMADQIARDPAFNQMAEQLQKGAQTAGEQGMPPLDPHQYMETMQKVMENPQFMTMAERLGTALMQDPTMSSMLENLTSPTHKEELEERMSRIKEDPALKPILDELENGGPAAMIKYWNDPETLQKIGQAMGTTMPFSTVSTAEPSGTEETEEEGEDEDESIVHHTASVGDGEGLKKALDGGADKDEEDSEGRRALHFACGYGEFKCAEILLEAGAAVDAMDKNKNTPLHYAAGYGRKECVDLLLKHGAAVTLQNMDGKTPIDVAKLNNQDEVLKLLEKDVFL

SEQ ID NO: 5820 - protein, 281 aa, Glycine max
  peptide (1)..(281): Ceres Seq. ID no. 15170242
  misc_feature (222)..(254): Pfam Name: Pfam Description:  Ankyrin repeat
  misc_feature (1)..(281): NCBI GI NO: 38175562 NR Description: putative ankyrin domain protein
  misc_feature (1)..(281): NCBI GI NO: 24637568 NR Description: ankyrin domain protein [Nicotiana tabacum]
  misc_feature (1)..(281): NCBI GI NO: 13310811 NR Description: ankyrin-repeat protein HBP1 [Nicotiana tabacum]
  misc_feature (1)..(281): NCBI GI NO: 29826242 NR Description: TGB12K interacting protein 2 [Nicotiana tabacum]
  misc_feature (1)..(281): NCBI GI NO: 29826244 NR Description: TGB12K interacting protein 3 [Nicotiana tabacum]
  misc_feature (1)..(281): NCBI GI NO: 27573339 NR Description: unknown protein
  misc_feature (1)..(281): NCBI GI NO: 15237008 NR Description: ankyrin repeat-containing protein 2
  misc_feature (1)..(281): NCBI GI NO: 3478700 NR Description: AFT protein [Arabidopsis thaliana]
  misc_feature (1)..(281): NCBI GI NO: 4205079 NR Description: ankyrin repeat-containing protein 2
  misc_feature (154)..(281): NCBI GI NO: 3929221 NR Description: TRF1-interacting ankyrin-related ADP-ribosepolymerase
MADQIARDPAFNQMAEQLQKGAQTAGEQGMPPLDPHQYMETMQKVMENPQFMTMAERLGTALMQDPTMSSMLENLTSPTHKEELEERMSRIKEDPALKPILDELENGGPAAMIKYWNDPETLQKIGQAMGTTMPFSTVSTAEPSGTEETEEEGEDEDESIVHHTASVGDGEGLKKALDGGADKDEEDSEGRRALHFACGYGEFKCAEILLEAGAAVDAMDKNKNTPLHYAAGYGRKECVDLLLKHGAAVTLQNMDGKTPIDVAKLNNQDEVLKLLEKDVFL

SEQ ID NO: 5821 - DNA, 953 bp, Glycine max
  misc_feature (1)..(953): Ceres Seq. ID no. 15224823
gagtcagctacgtaggccccccccccaatcagtcaaaggcatgtgtttagtcataccttctcaatgatttggcaaaatatgtttgtggggacttttgtttcatgttggaagttgaagaaacacaaaaatagatatggagtttctaaaaggtttcaggttttatataggccaggaaattacttatgtttctatcactaagtatgggtcctttggtatatatggattttggcatttgtcacgctcattgatatatggttgtcccccaagtttaagttcttacatgccttatctttggcgggttattggaatgtgactgagtatcctgacatgaaagttaatcttaatgttgaaatgatttggcaggagcatgcttataagtcataaccacacgtgtacaatttgtttatttggagctgtcctaaatttgtatcatttcccaaaaggaagactgtgtgcaccaggcctaattgtatgcacaccctcctccttccttctcttagttgtccacaactggagtcactctctaatgccatcaaatgggaagttttgcaaactcctcttaattacgagactcgaggaagcaaagttctcttcactacatgcagtaagagagttgcttcaaccatgcagtcaaataaagcgagtcaactagagcaattacatgaagaacattgctagaaatatgaattttggttcttgtctctcacgttgatgtgtatgacttgttctccatgggactgtgggtattgattgccgtgttttatgttctactttttcatttgtatcattggaattctataattgaaagagtgggaatataaaaatgtgaargggtgttgttttcttttgtttaataagacagcttctatacagaattatcctaagctaaatgcaagaatycyttwttygtttttttwwaaramaaagawaaaaaaaaaaaaaaagaattcctg

SEQ ID NO: 5822 - protein, 94 aa, Glycine max
  peptide (1)..(94): Ceres Seq. ID no. 15224824
MLISHNHTCTICLFGAVLNLYHFPKGRLCAPGLIVCTPSSFLLLVVHNWSHSLMPSNGKFCKLLLITRLEEAKFSSLHAVRELLQPCSQIKRVN

SEQ ID NO: 5823 - protein, 68 aa, Glycine max
  peptide (1)..(68): Ceres Seq. ID no. 15224825
  misc_feature (22)..(68): NCBI GI NO: 7488704 NR Description: probable resistance protein - soybean (fragment)
  misc_feature (22)..(67): NCBI GI NO: 7107256 NR Description: unknown [Cajanus cajan]
  misc_feature (22)..(68): NCBI GI NO: 13111697 NR Description: putative resistance protein KNBS4 [Glycine max]
  misc_feature (23)..(67): NCBI GI NO: 7107264 NR Description: unknown [Cajanus cajan]
MHTLLLPSLSCPQLESLSNAIKWEVLQTPLNYETRGSKVLFTTCSKRVASTMQSNKASQLEQLHEEHC

SEQ ID NO: 5824 - protein, 59 aa, Glycine max
  peptide (1)..(59): Ceres Seq. ID no. 15224826
MEFLKGFRFYIGQEITYVSITKYGSFGIYGFWHLSRSLIYGCPPSLSSYMPYLWRVIGM

SEQ ID NO: 5825 - DNA, 1262 bp, Glycine max
  misc_feature (1)..(1262): Ceres Seq. ID no. 15175666
agtagagataatgagattaggtgtgagtgtgagtgtgcggtgctcaatcggcaccgcttcaggcaacacccaaaccgattatcccgccaaattccaacggtcatctttctcaactgccaacttcctccccgacaacgcttcttcagatttagcagtttcaatttcgagtagtagcagcaggagagggctaatacgcatagccacgttgccatgtcttcttcccctcataggttgcctcccagccaacgccatgcagccaggttcaaaggaatatcttctcattaaagaagaggtgaggaaggtcttgtccaagggaaaggctgctggcgtgcttcgattggtattccatgatgccggaacctttgacatcgatgacagtacaggtggtatgaatggttctatagtctatgaacttgaaagacctgaaaatgctggcctgaaaaaatcagtaaaggttctgcaaaaagcaaagactcagatagatgctatccaaccagtatcttgggcggacatgattgctgtggctggagctgaagcagttgaagtatgtggaggtccacctattcaagtttcactgggcagattagatacactggtgcctgatccagaagggagacttcctgaggaatctctcaatgcttctggtttgaagaaatgtttccagagcaaaggcttttcaacacaagaacttgtggctttgtctggagcccacactattggaagtaaaggttttggaagcccaatttcttttgacaattcatattataaggttcttttggagaagccgtggacgtcttcaggtggtatgccgagtatgattgggcttccttcagatcacgctcttgttgaggatgatgaatgcttaagatggattaaaaaatacgcagacagtgagaatctattctttgaagatttcaaaaatgcgtatgtcaagctggtgaattctggtgtgaggcggaatagcttataaattcaggagttgaatgttccaacttccactgaaggggcaacttgcatttttattgactttctaacagtgtttatgcacagttgccatgaagttttgggtgctttattattgatttgaacatcaagatctactaccccctaaaaatcaaccaacgaagtatgtgcatgcagggccaataaatttcatggaaaagtcgtttaaggggtgtattggattaagattttaaaagactattttagcataatttttttttttgaattttaaagattatgtaaaattattatgatttatc

SEQ ID NO: 5826 - protein, 322 aa, Glycine max
  peptide (1)..(322): Ceres Seq. ID no. 15175667
  misc_feature (98)..(296): Pfam Name: Pfam Description:  Peroxidase
  misc_feature (57)..(322): NCBI GI NO: 30689347 NR Description: ascorbate peroxidase family [Arabidopsis thaliana]
  misc_feature (14)..(316): NCBI GI NO: 27817866 NR Description: OJ1081_B12.15
  misc_feature (166)..(264): NCBI GI NO: 7487935 NR Description: L-ascorbate peroxidase homolog F10M6
  misc_feature (290)..(322): NCBI GI NO: 7487935 NR Description: L-ascorbate peroxidase homolog F10M6
  misc_feature (94)..(125): NCBI GI NO: 7487935 NR Description: L-ascorbate peroxidase homolog F10M6
  misc_feature (90)..(316): NCBI GI NO: 15080682 NR Description: peroxisome type ascorbate peroxidase
  misc_feature (89)..(322): NCBI GI NO: 5442410 NR Description: ascorbate peroxidase [Zantedeschia aethiopica]
  misc_feature (95)..(316): NCBI GI NO: 7489542 NR Description: L-ascorbate peroxidase (EC 1.11.1.11)
  misc_feature (83)..(263): NCBI GI NO: 38104959 NR Description: hypothetical protein MG10368.4
  misc_feature (242)..(321): NCBI GI NO: 38104959 NR Description: hypothetical protein MG10368.4
VEIMRLGVSVSVRCSIGTASGNTQTDYPAKFQRSSFSTANFLPDNASSDLAVSISSSSSRRGLIRIATLPCLLPLIGCLPANAMQPGSKEYLLIKEEVRKVLSKGKAAGVLRLVFHDAGTFDIDDSTGGMNGSIVYELERPENAGLKKSVKVLQKAKTQIDAIQPVSWADMIAVAGAEAVEVCGGPPIQVSLGRLDTLVPDPEGRLPEESLNASGLKKCFQSKGFSTQELVALSGAHTIGSKGFGSPISFDNSYYKVLLEKPWTSSGGMPSMIGLPSDHALVEDDECLRWIKKYADSENLFFEDFKNAYVKLVNSGVRRNSL

SEQ ID NO: 5827 - protein, 319 aa, Glycine max
  peptide (1)..(319): Ceres Seq. ID no. 15175668
  misc_feature (95)..(293): Pfam Name: Pfam Description:  Peroxidase
  misc_feature (54)..(319): NCBI GI NO: 30689347 NR Description: ascorbate peroxidase family [Arabidopsis thaliana]
  misc_feature (11)..(313): NCBI GI NO: 27817866 NR Description: OJ1081_B12.15
  misc_feature (163)..(261): NCBI GI NO: 7487935 NR Description: L-ascorbate peroxidase homolog F10M6
  misc_feature (287)..(319): NCBI GI NO: 7487935 NR Description: L-ascorbate peroxidase homolog F10M6
  misc_feature (91)..(122): NCBI GI NO: 7487935 NR Description: L-ascorbate peroxidase homolog F10M6
  misc_feature (87)..(313): NCBI GI NO: 15080682 NR Description: peroxisome type ascorbate peroxidase
  misc_feature (86)..(319): NCBI GI NO: 5442410 NR Description: ascorbate peroxidase [Zantedeschia aethiopica]
  misc_feature (92)..(313): NCBI GI NO: 7489542 NR Description: L-ascorbate peroxidase (EC 1.11.1.11)
  misc_feature (80)..(260): NCBI GI NO: 38104959 NR Description: hypothetical protein MG10368.4
  misc_feature (239)..(318): NCBI GI NO: 38104959 NR Description: hypothetical protein MG10368.4
MRLGVSVSVRCSIGTASGNTQTDYPAKFQRSSFSTANFLPDNASSDLAVSISSSSSRRGLIRIATLPCLLPLIGCLPANAMQPGSKEYLLIKEEVRKVLSKGKAAGVLRLVFHDAGTFDIDDSTGGMNGSIVYELERPENAGLKKSVKVLQKAKTQIDAIQPVSWADMIAVAGAEAVEVCGGPPIQVSLGRLDTLVPDPEGRLPEESLNASGLKKCFQSKGFSTQELVALSGAHTIGSKGFGSPISFDNSYYKVLLEKPWTSSGGMPSMIGLPSDHALVEDDECLRWIKKYADSENLFFEDFKNAYVKLVNSGVRRNSL

SEQ ID NO: 5828 - protein, 239 aa, Glycine max
  peptide (1)..(239): Ceres Seq. ID no. 15175669
  misc_feature (15)..(213): Pfam Name: Pfam Description:  Peroxidase
  misc_feature (1)..(239): NCBI GI NO: 30689347 NR Description: ascorbate peroxidase family [Arabidopsis thaliana]
  misc_feature (1)..(233): NCBI GI NO: 27817866 NR Description: OJ1081_B12.15
  misc_feature (83)..(181): NCBI GI NO: 7487935 NR Description: L-ascorbate peroxidase homolog F10M6
  misc_feature (207)..(239): NCBI GI NO: 7487935 NR Description: L-ascorbate peroxidase homolog F10M6
  misc_feature (11)..(42): NCBI GI NO: 7487935 NR Description: L-ascorbate peroxidase homolog F10M6
  misc_feature (7)..(233): NCBI GI NO: 15080682 NR Description: peroxisome type ascorbate peroxidase
  misc_feature (6)..(239): NCBI GI NO: 5442410 NR Description: ascorbate peroxidase [Zantedeschia aethiopica]
  misc_feature (12)..(233): NCBI GI NO: 7489542 NR Description: L-ascorbate peroxidase (EC 1.11.1.11)
  misc_feature (1)..(180): NCBI GI NO: 38104959 NR Description: hypothetical protein MG10368.4
  misc_feature (159)..(238): NCBI GI NO: 38104959 NR Description: hypothetical protein MG10368.4
MQPGSKEYLLIKEEVRKVLSKGKAAGVLRLVFHDAGTFDIDDSTGGMNGSIVYELERPENAGLKKSVKVLQKAKTQIDAIQPVSWADMIAVAGAEAVEVCGGPPIQVSLGRLDTLVPDPEGRLPEESLNASGLKKCFQSKGFSTQELVALSGAHTIGSKGFGSPISFDNSYYKVLLEKPWTSSGGMPSMIGLPSDHALVEDDECLRWIKKYADSENLFFEDFKNAYVKLVNSGVRRNSL

SEQ ID NO: 5829 - DNA, 1261 bp, Glycine max
  misc_feature (1)..(1261): Ceres Seq. ID no. 14313599
ggtaataaggcaaaaccctctctctctctctctcaatttgtttacctcttcaactcaaccacacttctaagatcaaaagctacctttgttgctttgagtttgaactttgaatcaatcaatcaatcaaagtgggtggtgactcatggaagtgaaaggaaggataagcaactccaccatcaccaccaccacaatccaaagtgaggatgagatggaccttcgaagaggtccttggaccgtcgatgaggatcttgctctcatcaattacattgctaatcatggtgaaggtcgatggaactccctagctcgttcagctggactcaaacgaactggcaagagctgcagattgagatggttgaattatttgcgtcccgatgttcgacgtggcaacatcacacttgaagaacagcttcttattctcgagctccatggtcgctggggaaaccgatggtctaaaattgctcaatatttgcctggaagaaccgataatgagataaagaattattggagaacccgtgtccaaaagcaagccaagcaactcaaatgtgacgtgaatagcaagcaattcaaggatgccatgcgctacctttggatgccaaggctggtggagcgcattcaagccgccgccgtggccgccaccactgccacggccaccgtgggttctccaactgcatcagctagtgctactacaaccatcaccactaacaacaacgccaccacatacaactacgagaacaacaacaacaacaaccttaacaacagttttgaagtgcacagtgggaacatgatgttgagaaatccagcaatcatgaacattaataattttgttggttcacacagttacactccagagaataatagtacgggtgcctcatcggattcatttggtgctcaggtttcgcctgtctcggacttgactcaggattattacaataatgtcacggttgggaataataacaacaacaataaccctaatcctgagtattaccaacaagcacatgatcaattgagtttcttagactgcatcacaagcccttcagggttgttcgatttccagtccatggaaccaaacaccccgtggattcagagtaatgttggggacacgtcaaccaacggtttctggaatgttgaaaacatgttgctctttcaacaactctctgacaacatgtgaaacatcaattcgtaggagaattcatggtgagagggactaaaaaaactgtgaagggttgtgaaatttacagatgataaaattatataattaagt

SEQ ID NO: 5830 - protein, 341 aa, Glycine max
  peptide (1)..(341): Ceres Seq. ID no. 14313600
  misc_feature (27)..(74): Pfam Name: Pfam Description:  Myb-like DNA-binding domain
  misc_feature (1)..(213): NCBI GI NO: 15230731 NR Description: myb family transcription factor (MYB108)
  misc_feature (2)..(338): NCBI GI NO: 7446184 NR Description: myb-related protein Cpm5
  misc_feature (2)..(338): NCBI GI NO: 7446183 NR Description: ABA-induced myb-related protein Cpm10 -Craterostigma plantagineum
  misc_feature (20)..(290): NCBI GI NO: 15240518 NR Description: myb family transcription factor
  misc_feature (20)..(338): NCBI GI NO: 7446185 NR Description: dehydration-induced myb-related protein Cpm7 -Craterostigma plantagineum
  misc_feature (24)..(184): NCBI GI NO: 19073328 NR Description: typical P-type R2R3 Myb protein [Sorghum bicolor]
  misc_feature (24)..(188): NCBI GI NO: 13177578 NR Description: Myb transcription factor JAMyb [Oryza sativa]
  misc_feature (17)..(187): NCBI GI NO: 34898110 NR Description: putative typical P-type R2R3 Myb protein
  misc_feature (17)..(189): NCBI GI NO: 18401993 NR Description: myb family transcription factor
  misc_feature (16)..(209): NCBI GI NO: 14249015 NR Description: myb-like transcription factor Myb 5
MEVKGRISNSTITTTTIQSEDEMDLRRGPWTVDEDLALINYIANHGEGRWNSLARSAGLKRTGKSCRLRWLNYLRPDVRRGNITLEEQLLILELHGRWGNRWSKIAQYLPGRTDNEIKNYWRTRVQKQAKQLKCDVNSKQFKDAMRYLWMPRLVERIQAAAVAATTATATVGSPTASASATTTITTNNNATTYNYENNNNNNLNNSFEVHSGNMMLRNPAIMNINNFVGSHSYTPENNSTGASSDSFGAQVSPVSDLTQDYYNNVTVGNNNNNNNPNPEYYQQAHDQLSFLDCITSPSGLFDFQSMEPNTPWIQSNVGDTSTNGFWNVENMLLFQQLSDNM

SEQ ID NO: 5831 - protein, 319 aa, Glycine max
  peptide (1)..(319): Ceres Seq. ID no. 14313601
  misc_feature (5)..(52): Pfam Name: Pfam Description:  Myb-like DNA-binding domain
  misc_feature (1)..(191): NCBI GI NO: 15230731 NR Description: myb family transcription factor (MYB108)
  misc_feature (1)..(316): NCBI GI NO: 7446184 NR Description: myb-related protein Cpm5
  misc_feature (1)..(316): NCBI GI NO: 7446183 NR Description: ABA-induced myb-related protein Cpm10 -Craterostigma plantagineum
  misc_feature (1)..(268): NCBI GI NO: 15240518 NR Description: myb family transcription factor
  misc_feature (1)..(316): NCBI GI NO: 7446185 NR Description: dehydration-induced myb-related protein Cpm7 -Craterostigma plantagineum
  misc_feature (2)..(162): NCBI GI NO: 19073328 NR Description: typical P-type R2R3 Myb protein [Sorghum bicolor]
  misc_feature (2)..(166): NCBI GI NO: 13177578 NR Description: Myb transcription factor JAMyb [Oryza sativa]
  misc_feature (1)..(165): NCBI GI NO: 34898110 NR Description: putative typical P-type R2R3 Myb protein
  misc_feature (1)..(167): NCBI GI NO: 18401993 NR Description: myb family transcription factor
  misc_feature (1)..(187): NCBI GI NO: 14249015 NR Description: myb-like transcription factor Myb 5
MDLRRGPWTVDEDLALINYIANHGEGRWNSLARSAGLKRTGKSCRLRWLNYLRPDVRRGNITLEEQLLILELHGRWGNRWSKIAQYLPGRTDNEIKNYWRTRVQKQAKQLKCDVNSKQFKDAMRYLWMPRLVERIQAAAVAATTATATVGSPTASASATTTITTNNNATTYNYENNNNNNLNNSFEVHSGNMMLRNPAIMNINNFVGSHSYTPENNSTGASSDSFGAQVSPVSDLTQDYYNNVTVGNNNNNNNPNPEYYQQAHDQLSFLDCITSPSGLFDFQSMEPNTPWIQSNVGDTSTNGFWNVENMLLFQQLSDNM

SEQ ID NO: 5832 - protein, 197 aa, Glycine max
  peptide (1)..(197): Ceres Seq. ID no. 14313602
  misc_feature (1)..(69): NCBI GI NO: 15230731 NR Description: myb family transcription factor (MYB108)
  misc_feature (1)..(194): NCBI GI NO: 7446184 NR Description: myb-related protein Cpm5
  misc_feature (1)..(194): NCBI GI NO: 7446183 NR Description: ABA-induced myb-related protein Cpm10 -Craterostigma plantagineum
  misc_feature (1)..(146): NCBI GI NO: 15240518 NR Description: myb family transcription factor
  misc_feature (1)..(194): NCBI GI NO: 7446185 NR Description: dehydration-induced myb-related protein Cpm7 -Craterostigma plantagineum
  misc_feature (1)..(40): NCBI GI NO: 19073328 NR Description: typical P-type R2R3 Myb protein [Sorghum bicolor]
  misc_feature (1)..(44): NCBI GI NO: 13177578 NR Description: Myb transcription factor JAMyb [Oryza sativa]
  misc_feature (1)..(43): NCBI GI NO: 34898110 NR Description: putative typical P-type R2R3 Myb protein
  misc_feature (1)..(45): NCBI GI NO: 18401993 NR Description: myb family transcription factor
  misc_feature (1)..(65): NCBI GI NO: 14249015 NR Description: myb-like transcription factor Myb 5
MRYLWMPRLVERIQAAAVAATTATATVGSPTASASATTTITTNNNATTYNYENNNNNNLNNSFEVHSGNMMLRNPAIMNINNFVGSHSYTPENNSTGASSDSFGAQVSPVSDLTQDYYNNVTVGNNNNNNNPNPEYYQQAHDQLSFLDCITSPSGLFDFQSMEPNTPWIQSNVGDTSTNGFWNVENMLLFQQLSDNM

SEQ ID NO: 5833 - DNA, 1674 bp, Glycine max
  misc_feature (1)..(1674): Ceres Seq. ID no. 15177903
ggtctgtttcgttgcaaagaagagtgttgaagcttttcttcttcctctgccttgtcttcttccctttgccttcaacctcgttttcttttcttcgtcttctatcaccgattccgattctcttcttccttattttattgatcctctctgcgattaccaattttctcatttcctccgttttctcggcgaccgaacggaggagtagaacgcagttctgaaaacgattggaaaatgctgggaactgcactgcaattcggcggcgttcgcggcgatgatcggttttacattccggtgaagacgcggaagagccagaatcagcgcaaacagagtcacagagccaagaacaatgaacctgaaaacacggatttagtttcgaagagcaaaatcgatatctctgaggataacaacagcaatagcgatagcaatctcaaccaatctctgaaaccaactctttctccgtccgtagagtctgtcagtaacatcgataggttcttggagtccacaacaccgtcagttccggctcagtatttctccaagacaacgatgagaagatggaagttttgcgatgtggagtatcagtcttattttgcactgagtgatctgtgggagtcttttaaggagtggagtgcgtacggagctggagtgcctttggtgcttgatcaaagtgattctgttgttcagtattatgttccgtatttgtcggctattcaactctatgctcactctgctgagaaggcaactgcaaagccaaggtacaccggtgaagatagtgatggtgattactacagagattcatgcagtgaaggaagtagtgattatgaatatggaaaaaggactgaatttatgactcaaagaagtagtcagtatctaacaggtggtatctcactgcaaatgaacacactatctatgcatgataaacacagtactgtgcaagaaggattttctagtgatgatagtgaaactgggaatcctcaagatctactttttgagtattttgaacaagatcctccgtatagtcgtgagcccttggctgacaagattcaagatcttgcacgccactatcctgccctcaagtcgttgagaagctgtgatttattaccagtcagttgggtgtctgtggcatggtatcctatatatcgaatacccacaggtccaactttaaaagatttagatggatgctttctaacataccatacactccatacacccttgacaggaagtggtcgtactcatgctccaacactggtttatcccagtgagatggatggtgtaccaaagatttctatacctacttttgcaatggcttcctataagttaaaggggtctatttggatgaaaaaaggagttagtgaatctcaacaagtgagttccctcttgcaggctgctgataactggttaagactagttcaggttaatcacccggattttcagttctttaaatcacatggcacataccatagatgaactgcataagccgacatgtctttcctgcttttggctaaaactgagccttaatttctgtgttcgttgcttggtgcaaacttggtaaaagcccatccatctgtagagattgtgatgacgcgatagctgcctaattttggattcttgtgatatgcctaagcagcacaaaaagatgaagccaatatgaagcaatgaattcatagagattgctaaagc

SEQ ID NO: 5834 - protein, 410 aa, Glycine max
  peptide (1)..(410): Ceres Seq. ID no. 15177904
  misc_feature (82)..(402): Pfam Name: DUF789 Pfam Description: Protein of unknown function
  misc_feature (43)..(402): NCBI GI NO: 22329567 NR Description: expressed protein [Arabidopsis thaliana]
  misc_feature (11)..(195): NCBI GI NO: 15450996 NR Description: Unknown protein [Arabidopsis thaliana]
  misc_feature (236)..(405): NCBI GI NO: 15450996 NR Description: Unknown protein [Arabidopsis thaliana]
  misc_feature (209)..(410): NCBI GI NO: 10177151 NR Description: gb|AAF31026
  misc_feature (48)..(195): NCBI GI NO: 10177151 NR Description: gb|AAF31026
  misc_feature (209)..(410): NCBI GI NO: 22327664 NR Description: expressed protein [Arabidopsis thaliana]
  misc_feature (48)..(195): NCBI GI NO: 22327664 NR Description: expressed protein [Arabidopsis thaliana]
  misc_feature (236)..(405): NCBI GI NO: 34394268 NR Description: hypothetical protein
  misc_feature (36)..(194): NCBI GI NO: 34394268 NR Description: hypothetical protein
  misc_feature (55)..(402): NCBI GI NO: 18379188 NR Description: expressed protein [Arabidopsis thaliana]
MLGTALQFGGVRGDDRFYIPVKTRKSQNQRKQSHRAKNNEPENTDLVSKSKIDISEDNNSNSDSNLNQSLKPTLSPSVESVSNIDRFLESTTPSVPAQYFSKTTMRRWKFCDVEYQSYFALSDLWESFKEWSAYGAGVPLVLDQSDSVVQYYVPYLSAIQLYAHSAEKATAKPRYTGEDSDGDYYRDSCSEGSSDYEYGKRTEFMTQRSSQYLTGGISLQMNTLSMHDKHSTVQEGFSSDDSETGNPQDLLFEYFEQDPPYSREPLADKIQDLARHYPALKSLRSCDLLPVSWVSVAWYPIYRIPTGPTLKDLDGCFLTYHTLHTPLTGSGRTHAPTLVYPSEMDGVPKISIPTFAMASYKLKGSIWMKKGVSESQQVSSLLQAADNWLRLVQVNHPDFQFFKSHGTYHR

SEQ ID NO: 5835 - protein, 306 aa, Glycine max
  peptide (1)..(306): Ceres Seq. ID no. 15177905
  misc_feature (1)..(298): Pfam Name: DUF789 Pfam Description: Protein of unknown function
  misc_feature (1)..(298): NCBI GI NO: 22329567 NR Description: expressed protein [Arabidopsis thaliana]
  misc_feature (1)..(91): NCBI GI NO: 15450996 NR Description: Unknown protein [Arabidopsis thaliana]
  misc_feature (132)..(301): NCBI GI NO: 15450996 NR Description: Unknown protein [Arabidopsis thaliana]
  misc_feature (105)..(306): NCBI GI NO: 10177151 NR Description: gb|AAF31026
  misc_feature (1)..(91): NCBI GI NO: 10177151 NR Description: gb|AAF31026
  misc_feature (105)..(306): NCBI GI NO: 22327664 NR Description: expressed protein [Arabidopsis thaliana]
  misc_feature (1)..(91): NCBI GI NO: 22327664 NR Description: expressed protein [Arabidopsis thaliana]
  misc_feature (132)..(301): NCBI GI NO: 34394268 NR Description: hypothetical protein
  misc_feature (1)..(90): NCBI GI NO: 34394268 NR Description: hypothetical protein
  misc_feature (1)..(298): NCBI GI NO: 18379188 NR Description: expressed protein [Arabidopsis thaliana]
MRRWKFCDVEYQSYFALSDLWESFKEWSAYGAGVPLVLDQSDSVVQYYVPYLSAIQLYAHSAEKATAKPRYTGEDSDGDYYRDSCSEGSSDYEYGKRTEFMTQRSSQYLTGGISLQMNTLSMHDKHSTVQEGFSSDDSETGNPQDLLFEYFEQDPPYSREPLADKIQDLARHYPALKSLRSCDLLPVSWVSVAWYPIYRIPTGPTLKDLDGCFLTYHTLHTPLTGSGRTHAPTLVYPSEMDGVPKISIPTFAMASYKLKGSIWMKKGVSESQQVSSLLQAADNWLRLVQVNHPDFQFFKSHGTYHR

SEQ ID NO: 5836 - protein, 206 aa, Glycine max
  peptide (1)..(206): Ceres Seq. ID no. 15177906
  misc_feature (1)..(198): Pfam Name: DUF789 Pfam Description: Protein of unknown function
  misc_feature (1)..(198): NCBI GI NO: 22329567 NR Description: expressed protein [Arabidopsis thaliana]
  misc_feature (32)..(201): NCBI GI NO: 15450996 NR Description: Unknown protein [Arabidopsis thaliana]
  misc_feature (5)..(206): NCBI GI NO: 10177151 NR Description: gb|AAF31026
  misc_feature (5)..(206): NCBI GI NO: 22327664 NR Description: expressed protein [Arabidopsis thaliana]
  misc_feature (32)..(201): NCBI GI NO: 34394268 NR Description: hypothetical protein
  misc_feature (1)..(198): NCBI GI NO: 18379188 NR Description: expressed protein [Arabidopsis thaliana]
  misc_feature (27)..(206): NCBI GI NO: 9280648 NR Description: F21B7.22 [Arabidopsis thaliana]
  misc_feature (27)..(206): NCBI GI NO: 18379117 NR Description: expressed protein [Arabidopsis thaliana]
  misc_feature (46)..(198): NCBI GI NO: 22328289 NR Description: expressed protein [Arabidopsis thaliana]
  misc_feature (32)..(126): NCBI GI NO: 18414588 NR Description: expressed protein [Arabidopsis thaliana]
MTQRSSQYLTGGISLQMNTLSMHDKHSTVQEGFSSDDSETGNPQDLLFEYFEQDPPYSREPLADKIQDLARHYPALKSLRSCDLLPVSWVSVAWYPIYRIPTGPTLKDLDGCFLTYHTLHTPLTGSGRTHAPTLVYPSEMDGVPKISIPTFAMASYKLKGSIWMKKGVSESQQVSSLLQAADNWLRLVQVNHPDFQFFKSHGTYHR

SEQ ID NO: 5837 - DNA, 1455 bp, Glycine max
  misc_feature (1)..(1455): Ceres Seq. ID no. 14311989
gttatgactctttgacttctccttcatctctttcgctggacaaaacccctttcgccggaaaacccaccgcaacctttgtggttcgcaactccgtttccggcttcaccgtgctcctcttacacgcagtatatatatatgtatgtatatggggaaaactaggtggttgataatattggttacctgtttatgcctgctttccttttctgatggcagagaactcaaggttaggcataaaaagcaacattaccaatacaatcatacagttgctacaatattagtggaatatgcttctgcggtatacttgtcagatttaactgaactttttacttggacgtgctctaggtgtaatggcttgaccaagggatttgaaatgatagagttagttgttgacgtcgagcattgcttacaggcatttgttggagtggccgatgatcctcatgccattatcattgcattcagaggaacaaatgaacacagcttacagaattggattgaagatttatattggaagcagcatgatataaattatccaggcatggatgatgcaatggtacaccgtggtttttataccgcgtaccacaatacaacaatacgtcctgcaattttagatgctgttgaaagagcaaagaagttttatggagatattgaaattatagcaacagggcattcaatgggaggggcaatggcttcattttgtggacttgatttaacggtaaatcaaaatgaaaaaaatgttcaagttatgacatttggacaacctcgtattggaaatgctgcttttgcatctctctatacgaaactagttccaaataccatccgagtcacaaatgaccatgatattgtacctcatttgcctccatactattattatttaccgcagaagacataccgccacttcccaagagaggtatggctttataacatcggattaggtagtcttgtgtacagtgttgagaagatttgtgatgaatctggtgaggatccaaattgcagcagatcggtgactgggaatagcattgctgatcacttggtctattatggcgttgacatgggatcagatgagccaagttcatgcagaattgttatggattcttatgttcagaatactaacatcaaagattcaagaggaaacttaatcttgtccagagatcctgcaacccccctcatcaaattgagtggagagggtgacaatcaggaaaatcccattaatgttgattgaattggcatcagatatctgttgcatgatatgttccagaggtttgccgtgtggcattattcttcagatttcttctttcttcatggtccatacagctgaacaattttattgaacaggctagggctggaaggagtttgtatagtcttggactcgtgtacatatgctcatacttgtatatataactaataattatatttttttacttcataattaataattcttgatactttgttaagtgc

SEQ ID NO: 5838 - protein, 359 aa, Glycine max
  peptide (1)..(359): Ceres Seq. ID no. 14311990
  misc_feature (1)..(344): NCBI GI NO: 15238889 NR Description: lipase (class 3) family [Arabidopsis thaliana]
  misc_feature (3)..(346): NCBI GI NO: 18418946 NR Description: lipase (class 3) family [Arabidopsis thaliana]
  misc_feature (17)..(336): NCBI GI NO: 21425571 NR Description: triacylglycerol lipase [Triticum aestivum]
  misc_feature (11)..(336): NCBI GI NO: 21425569 NR Description: triacylglycerol Lipase [Triticum aestivum]
  misc_feature (3)..(286): NCBI GI NO: 30686925 NR Description: lipase (class 3) family [Arabidopsis thaliana]
  misc_feature (7)..(336): NCBI GI NO: 34395192 NR Description: putative triacylglycerol lipase
  misc_feature (7)..(336): NCBI GI NO: 34899296 NR Description: putative triacylglycerol lipase
  misc_feature (78)..(336): NCBI GI NO: 34907212 NR Description: P0492G09.26
  misc_feature (36)..(302): NCBI GI NO: 21166167 NR Description: triacylglycerol lipase-like protein triacylglycerollipase
  misc_feature (63)..(305): NCBI GI NO: 417256 NR Description: LIPASE PRECURSOR (TRIACYLGLYCEROL LIPASE)
MYMGKTRWLIILVTCLCLLSFSDGRELKVRHKKQHYQYNHTVATILVEYASAVYLSDLTELFTWTCSRCNGLTKGFEMIELVVDVEHCLQAFVGVADDPHAIIIAFRGTNEHSLQNWIEDLYWKQHDINYPGMDDAMVHRGFYTAYHNTTIRPAILDAVERAKKFYGDIEIIATGHSMGGAMASFCGLDLTVNQNEKNVQVMTFGQPRIGNAAFASLYTKLVPNTIRVTNDHDIVPHLPPYYYYLPQKTYRHFPREVWLYNIGLGSLVYSVEKICDESGEDPNCSRSVTGNSIADHLVYYGVDMGSDEPSSCRIVMDSYVQNTNIKDSRGNLILSRDPATPLIKLSGEGDNQENPINVD

SEQ ID NO: 5839 - protein, 357 aa, Glycine max
  peptide (1)..(357): Ceres Seq. ID no. 14311991
  misc_feature (1)..(342): NCBI GI NO: 15238889 NR Description: lipase (class 3) family [Arabidopsis thaliana]
  misc_feature (1)..(344): NCBI GI NO: 18418946 NR Description: lipase (class 3) family [Arabidopsis thaliana]
  misc_feature (15)..(334): NCBI GI NO: 21425571 NR Description: triacylglycerol lipase [Triticum aestivum]
  misc_feature (9)..(334): NCBI GI NO: 21425569 NR Description: triacylglycerol Lipase [Triticum aestivum]
  misc_feature (1)..(284): NCBI GI NO: 30686925 NR Description: lipase (class 3) family [Arabidopsis thaliana]
  misc_feature (5)..(334): NCBI GI NO: 34395192 NR Description: putative triacylglycerol lipase
  misc_feature (5)..(334): NCBI GI NO: 34899296 NR Description: putative triacylglycerol lipase
  misc_feature (76)..(334): NCBI GI NO: 34907212 NR Description: P0492G09.26
  misc_feature (34)..(300): NCBI GI NO: 21166167 NR Description: triacylglycerol lipase-like protein triacylglycerollipase
  misc_feature (61)..(303): NCBI GI NO: 417256 NR Description: LIPASE PRECURSOR (TRIACYLGLYCEROL LIPASE)
MGKTRWLIILVTCLCLLSFSDGRELKVRHKKQHYQYNHTVATILVEYASAVYLSDLTELFTWTCSRCNGLTKGFEMIELVVDVEHCLQAFVGVADDPHAIIIAFRGTNEHSLQNWIEDLYWKQHDINYPGMDDAMVHRGFYTAYHNTTIRPAILDAVERAKKFYGDIEIIATGHSMGGAMASFCGLDLTVNQNEKNVQVMTFGQPRIGNAAFASLYTKLVPNTIRVTNDHDIVPHLPPYYYYLPQKTYRHFPREVWLYNIGLGSLVYSVEKICDESGEDPNCSRSVTGNSIADHLVYYGVDMGSDEPSSCRIVMDSYVQNTNIKDSRGNLILSRDPATPLIKLSGEGDNQENPINVD

SEQ ID NO: 5840 - protein, 282 aa, Glycine max
  peptide (1)..(282): Ceres Seq. ID no. 14311992
  misc_feature (1)..(267): NCBI GI NO: 15238889 NR Description: lipase (class 3) family [Arabidopsis thaliana]
  misc_feature (1)..(269): NCBI GI NO: 18418946 NR Description: lipase (class 3) family [Arabidopsis thaliana]
  misc_feature (1)..(259): NCBI GI NO: 21425571 NR Description: triacylglycerol lipase [Triticum aestivum]
  misc_feature (1)..(259): NCBI GI NO: 21425569 NR Description: triacylglycerol Lipase [Triticum aestivum]
  misc_feature (1)..(209): NCBI GI NO: 30686925 NR Description: lipase (class 3) family [Arabidopsis thaliana]
  misc_feature (1)..(259): NCBI GI NO: 34395192 NR Description: putative triacylglycerol lipase
  misc_feature (1)..(259): NCBI GI NO: 34899296 NR Description: putative triacylglycerol lipase
  misc_feature (1)..(259): NCBI GI NO: 34907212 NR Description: P0492G09.26
  misc_feature (1)..(225): NCBI GI NO: 21166167 NR Description: triacylglycerol lipase-like protein triacylglycerollipase
  misc_feature (1)..(228): NCBI GI NO: 417256 NR Description: LIPASE PRECURSOR (TRIACYLGLYCEROL LIPASE)
MIELVVDVEHCLQAFVGVADDPHAIIIAFRGTNEHSLQNWIEDLYWKQHDINYPGMDDAMVHRGFYTAYHNTTIRPAILDAVERAKKFYGDIEIIATGHSMGGAMASFCGLDLTVNQNEKNVQVMTFGQPRIGNAAFASLYTKLVPNTIRVTNDHDIVPHLPPYYYYLPQKTYRHFPREVWLYNIGLGSLVYSVEKICDESGEDPNCSRSVTGNSIADHLVYYGVDMGSDEPSSCRIVMDSYVQNTNIKDSRGNLILSRDPATPLIKLSGEGDNQENPINVD

SEQ ID NO: 5841 - DNA, 1414 bp, Glycine max
  misc_feature (1)..(1414): Ceres Seq. ID no. 13594080
ggggggggggsagctacgtaggccccccccccccatctctttcatactctcacgtcattatattaagctagctttgctaatattggacccttcttcaaccccaaaaatataaaaaactaaaaaaacatcaaccgaaggggtcatttctcccaatccgtttctgtttctgtcttccaggaacactgtcagtgagtgaaggatacgatgaacatcatgtctacccaccagtgtagttggcctgtgagaattcaggatcatcctgacaaaggaagtattaatagggctccattttccagaggatcagacttccttaatgttggataccatactcaaaaatatggtcatagtgccagaaaatgtaggcccgttttttccagttcagtgagcaacattacggatccttcagattcagataacactgataagaaaaaacctcagaatggtgaaatgggaggagtgaatagtgaaatgcttagagagagtctcgagaaaatagttggaaaagatgattccacgtttagtggatttgaccttgctacccttatcaggaacaaatatgggaggtcttatgatgttcagttgataaagaaggagttcatgggaagaaatctccttgcgatgaatgtcatgtggaagtacatggagcagagatccttcccattgaccgaagaagagtatattttgaggcttgatgatattgcaaacaacttaaaatgttggggagctgtgtctcatattcggaacagcctagaaaagtcgaaggaacgacctcggatagggaaggcagtaagcatttttatagatatggatgagtcgggtgctcgttccaacgagtggatctacaaatagaatgtgttactgatttgaaatcctaaagttagtcactggtttccagataacagtgaaggaaaagtccataggcagcaggtccaccacttttagtgaatttcgttagtttggaatttattacacttggatcttaacatctacagaagcttttctgacgtttctgttggcaacttggcatcaggcctaggcaactatatttttggttctgcccttctttttttcctttgttcatattgatgtaaaatgagttaatataagaaaaagcattcatattaaatttctaacaaactttctcttcaaattagaggagacactaatattaaaggtgttgtcctaagtgcatgcacattcctcgtgggaattacttgaaacatgagagaaatttgaatcctttgccagcaagtatgattatagccagctgatgctataactgcttggatagagaatacgatttttcagtgtagcttttatcaaagtagaaatttctttcgatgccaaaaaaaaaaaaaaaaaaaaaaaaaaaaaaaaagaaaaaaaaaaaaaaaaaagaattcctgcagcccgg

SEQ ID NO: 5842 - protein, 214 aa, Glycine max
  peptide (1)..(214): Ceres Seq. ID no. 15221297
  misc_feature (1)..(214): NCBI GI NO: 11994202 NR Description: dbj|BAA18864
  misc_feature (1)..(214): NCBI GI NO: 18402409 NR Description: expressed protein [Arabidopsis thaliana]
  misc_feature (107)..(212): NCBI GI NO: 23041855 NR Description: hypothetical protein
  misc_feature (106)..(212): NCBI GI NO: 17229946 NR Description: hypothetical protein [Nostoc sp. PCC 7120]
  misc_feature (106)..(212): NCBI GI NO: 23130142 NR Description: hypothetical protein [Nostoc punctiforme]
  misc_feature (106)..(211): NCBI GI NO: 16332324 NR Description: unknown protein [Synechocystis sp. PCC 6803]
  misc_feature (106)..(212): NCBI GI NO: 22298501 NR Description: ORF_ID:tll0958~hypothetical protein
  misc_feature (106)..(203): NCBI GI NO: 37521175 NR Description: hypothetical protein gsr1606
  misc_feature (109)..(197): NCBI GI NO: 33866372 NR Description: conserved hypothetical protein
  misc_feature (116)..(203): NCBI GI NO: 33861020 NR Description: conserved hypothetical protein
MNIMSTHQCSWPVRIQDHPDKGSINRAPFSRGSDFLNVGYHTQKYGHSARKCRPVFSSSVSNITDPSDSDNTDKKKPQNGEMGGVNSEMLRESLEKIVGKDDSTFSGFDLATLIRNKYGRSYDVQLIKKEFMGRNLLAMNVMWKYMEQRSFPLTEEEYILRLDDIANNLKCWGAVSHIRNSLEKSKERPRIGKAVSIFIDMDESGARSNEWIYK

SEQ ID NO: 5843 - protein, 211 aa, Glycine max
  peptide (1)..(211): Ceres Seq. ID no. 15221298
  misc_feature (1)..(211): NCBI GI NO: 11994202 NR Description: dbj|BAA18864
  misc_feature (1)..(211): NCBI GI NO: 18402409 NR Description: expressed protein [Arabidopsis thaliana]
  misc_feature (104)..(209): NCBI GI NO: 23041855 NR Description: hypothetical protein
  misc_feature (103)..(209): NCBI GI NO: 17229946 NR Description: hypothetical protein [Nostoc sp. PCC 7120]
  misc_feature (103)..(209): NCBI GI NO: 23130142 NR Description: hypothetical protein [Nostoc punctiforme]
  misc_feature (103)..(208): NCBI GI NO: 16332324 NR Description: unknown protein [Synechocystis sp. PCC 6803]
  misc_feature (103)..(209): NCBI GI NO: 22298501 NR Description: ORF_ID:tll0958~hypothetical protein
  misc_feature (103)..(200): NCBI GI NO: 37521175 NR Description: hypothetical protein gsr1606
  misc_feature (106)..(194): NCBI GI NO: 33866372 NR Description: conserved hypothetical protein
  misc_feature (113)..(200): NCBI GI NO: 33861020 NR Description: conserved hypothetical protein
MSTHQCSWPVRIQDHPDKGSINRAPFSRGSDFLNVGYHTQKYGHSARKCRPVFSSSVSNITDPSDSDNTDKKKPQNGEMGGVNSEMLRESLEKIVGKDDSTFSGFDLATLIRNKYGRSYDVQLIKKEFMGRNLLAMNVMWKYMEQRSFPLTEEEYILRLDDIANNLKCWGAVSHIRNSLEKSKERPRIGKAVSIFIDMDESGARSNEWIYK

SEQ ID NO: 5844 - protein, 133 aa, Glycine max
  peptide (1)..(133): Ceres Seq. ID no. 15221299
  misc_feature (1)..(133): NCBI GI NO: 11994202 NR Description: dbj|BAA18864
  misc_feature (1)..(133): NCBI GI NO: 18402409 NR Description: expressed protein [Arabidopsis thaliana]
  misc_feature (26)..(131): NCBI GI NO: 23041855 NR Description: hypothetical protein
  misc_feature (25)..(131): NCBI GI NO: 17229946 NR Description: hypothetical protein [Nostoc sp. PCC 7120]
  misc_feature (25)..(131): NCBI GI NO: 23130142 NR Description: hypothetical protein [Nostoc punctiforme]
  misc_feature (25)..(130): NCBI GI NO: 16332324 NR Description: unknown protein [Synechocystis sp. PCC 6803]
  misc_feature (25)..(131): NCBI GI NO: 22298501 NR Description: ORF_ID:tll0958~hypothetical protein
  misc_feature (25)..(122): NCBI GI NO: 37521175 NR Description: hypothetical protein gsr1606
  misc_feature (28)..(116): NCBI GI NO: 33866372 NR Description: conserved hypothetical protein
  misc_feature (35)..(122): NCBI GI NO: 33861020 NR Description: conserved hypothetical protein
MGGVNSEMLRESLEKIVGKDDSTFSGFDLATLIRNKYGRSYDVQLIKKEFMGRNLLAMNVMWKYMEQRSFPLTEEEYILRLDDIANNLKCWGAVSHIRNSLEKSKERPRIGKAVSIFIDMDESGARSNEWIYK

SEQ ID NO: 5845 - DNA, 1555 bp, Glycine max
  misc_feature (1)..(1555): Ceres Seq. ID no. 15226529
gaaggtaaccccaaatcaaatccgagttgtttcttgtttaagggttcaagggtattatgcttgctggattcattctcttgctgaaatgcagtctttctagaaagtttgttcaactgtcccattattggcgttagctatgctacccactggagcaaaagagacccaattacgtgagagcaacagtcagaaggtccatcctcaaccaatagaagaggccatgaatcagaatccagaagcaatggaaaccctaatatctaaagtttttatgaatatctcttccttgaagtcagcttatattgagcttcaagctgctcatactccctacgaccctgataaaattcacactgctgataaacttgttattagtgagctgaaaaatctgtctgaactcaagcatttctacagggagaacaacccaaaaccagtgtgtgtttctccccaagactcacgtttagctgcagaaattcaagaacaacagagccttctgaaaacttatgaggtcatggtgaagaagttccaatctgaaatccagaataaagattcagagatccatcaattacagcagcagattgagcaggctagccagaagcgagcaaaactagagaaaaatctgaagcttagaggtttgtcaaccaaagaatcggaagatgaaaatggctttttccctgttgatctaactccagatctcttcacctctgctgtggaagtggctgcaaaagccattcatgatttttctaaacctttgatcaacatgatgaaagcagctgggtgggaccttgatgctgctgccaactcaatcgaacctgatgttgtttacgcaaagagagctcataagaaatatgcatttgagtcttacatatgccaaagaatgttcagtggctttgagcaggaaaacttctctgtcaaattagacaatactactgcaactaaagagagcttcttccaccagtttctcgctttaagagagatggatcccttggatatgctggggcaaaatccagattccatttttgggaaattttgcaggagcaaatacctggtggtagttcatcccaagatggaggcatcgttctttggaaatttagatcagcgaaattatgtgatgggtggagggcatccaaggactcctttttaccaggcttttcttaaactgaccaagtcaatttggcttttacacaggttggcttattcttttgagccgaatgttaaggtatttcaggttaaaggagggagtgagttctctgatgtttatatggaaagtgtggtcaagaatctgataatggatgacaatgatgaaaaacccaaaattggtttgatggttatgcctggattttggattgggggaagtttgattcagagtaaagtctatctctctggtatgaaggcggctgaatgattcctgaacacagtcaagactttcagaaaatgcatagttgattgtatgtggtttgtttgaattgtcgtttctttatcttgtaagaaaatgctgttgtctgtaatttttaatatcctttttagtggttgtaagagtaaatgagccctttatcctttgttt

SEQ ID NO: 5846 - protein, 419 aa, Glycine max
  peptide (1)..(419): Ceres Seq. ID no. 15226530
  misc_feature (24)..(159): Pfam Name: DUF641 Pfam Description: Plant protein of unknown function
  misc_feature (1)..(419): NCBI GI NO: 15225441 NR Description: expressed protein [Arabidopsis thaliana]
  misc_feature (24)..(293): NCBI GI NO: 15235221 NR Description: expressed protein [Arabidopsis thaliana]
  misc_feature (316)..(380): NCBI GI NO: 15235221 NR Description: expressed protein [Arabidopsis thaliana]
  misc_feature (24)..(304): NCBI GI NO: 15234143 NR Description: hypothetical protein [Arabidopsis thaliana]
  misc_feature (34)..(413): NCBI GI NO: 8777470 NR Description: gb|AAB82637
  misc_feature (34)..(413): NCBI GI NO: 15231944 NR Description: expressed protein [Arabidopsis thaliana]
  misc_feature (1)..(413): NCBI GI NO: 15219282 NR Description: expressed protein [Arabidopsis thaliana]
  misc_feature (30)..(413): NCBI GI NO: 22329840 NR Description: expressed protein [Arabidopsis thaliana]
  misc_feature (30)..(413): NCBI GI NO: 20466324 NR Description: unknown protein [Arabidopsis thaliana]
  misc_feature (37)..(414): NCBI GI NO: 15232398 NR Description: expressed protein [Arabidopsis thaliana]
MLPTGAKETQLRESNSQKVHPQPIEEAMNQNPEAMETLISKVFMNISSLKSAYIELQAAHTPYDPDKIHTADKLVISELKNLSELKHFYRENNPKPVCVSPQDSRLAAEIQEQQSLLKTYEVMVKKFQSEIQNKDSEIHQLQQQIEQASQKRAKLEKNLKLRGLSTKESEDENGFFPVDLTPDLFTSAVEVAAKAIHDFSKPLINMMKAAGWDLDAAANSIEPDVVYAKRAHKKYAFESYICQRMFSGFEQENFSVKLDNTTATKESFFHQFLALREMDPLDMLGQNPDSIFGKFCRSKYLVVVHPKMEASFFGNLDQRNYVMGGGHPRTPFYQAFLKLTKSIWLLHRLAYSFEPNVKVFQVKGGSEFSDVYMESVVKNLIMDDNDEKPKIGLMVMPGFWIGGSLIQSKVYLSGMKAAE

SEQ ID NO: 5847 - protein, 392 aa, Glycine max
  peptide (1)..(392): Ceres Seq. ID no. 15226531
  misc_feature (1)..(132): Pfam Name: DUF641 Pfam Description: Plant protein of unknown function
  misc_feature (1)..(392): NCBI GI NO: 15225441 NR Description: expressed protein [Arabidopsis thaliana]
  misc_feature (1)..(266): NCBI GI NO: 15235221 NR Description: expressed protein [Arabidopsis thaliana]
  misc_feature (289)..(353): NCBI GI NO: 15235221 NR Description: expressed protein [Arabidopsis thaliana]
  misc_feature (1)..(277): NCBI GI NO: 15234143 NR Description: hypothetical protein [Arabidopsis thaliana]
  misc_feature (7)..(386): NCBI GI NO: 8777470 NR Description: gb|AAB82637
  misc_feature (7)..(386): NCBI GI NO: 15231944 NR Description: expressed protein [Arabidopsis thaliana]
  misc_feature (1)..(386): NCBI GI NO: 15219282 NR Description: expressed protein [Arabidopsis thaliana]
  misc_feature (3)..(386): NCBI GI NO: 22329840 NR Description: expressed protein [Arabidopsis thaliana]
  misc_feature (3)..(386): NCBI GI NO: 20466324 NR Description: unknown protein [Arabidopsis thaliana]
  misc_feature (10)..(387): NCBI GI NO: 15232398 NR Description: expressed protein [Arabidopsis thaliana]
MNQNPEAMETLISKVFMNISSLKSAYIELQAAHTPYDPDKIHTADKLVISELKNLSELKHFYRENNPKPVCVSPQDSRLAAEIQEQQSLLKTYEVMVKKFQSEIQNKDSEIHQLQQQIEQASQKRAKLEKNLKLRGLSTKESEDENGFFPVDLTPDLFTSAVEVAAKAIHDFSKPLINMMKAAGWDLDAAANSIEPDVVYAKRAHKKYAFESYICQRMFSGFEQENFSVKLDNTTATKESFFHQFLALREMDPLDMLGQNPDSIFGKFCRSKYLVVVHPKMEASFFGNLDQRNYVMGGGHPRTPFYQAFLKLTKSIWLLHRLAYSFEPNVKVFQVKGGSEFSDVYMESVVKNLIMDDNDEKPKIGLMVMPGFWIGGSLIQSKVYLSGMKAAE

SEQ ID NO: 5848 - protein, 385 aa, Glycine max
  peptide (1)..(385): Ceres Seq. ID no. 15226532
  misc_feature (1)..(125): Pfam Name: DUF641 Pfam Description: Plant protein of unknown function
  misc_feature (1)..(385): NCBI GI NO: 15225441 NR Description: expressed protein [Arabidopsis thaliana]
  misc_feature (1)..(259): NCBI GI NO: 15235221 NR Description: expressed protein [Arabidopsis thaliana]
  misc_feature (282)..(346): NCBI GI NO: 15235221 NR Description: expressed protein [Arabidopsis thaliana]
  misc_feature (1)..(270): NCBI GI NO: 15234143 NR Description: hypothetical protein [Arabidopsis thaliana]
  misc_feature (1)..(379): NCBI GI NO: 8777470 NR Description: gb|AAB82637
  misc_feature (1)..(379): NCBI GI NO: 15231944 NR Description: expressed protein [Arabidopsis thaliana]
  misc_feature (1)..(379): NCBI GI NO: 15219282 NR Description: expressed protein [Arabidopsis thaliana]
  misc_feature (1)..(379): NCBI GI NO: 22329840 NR Description: expressed protein [Arabidopsis thaliana]
  misc_feature (1)..(379): NCBI GI NO: 20466324 NR Description: unknown protein [Arabidopsis thaliana]
  misc_feature (3)..(380): NCBI GI NO: 15232398 NR Description: expressed protein [Arabidopsis thaliana]
METLISKVFMNISSLKSAYIELQAAHTPYDPDKIHTADKLVISELKNLSELKHFYRENNPKPVCVSPQDSRLAAEIQEQQSLLKTYEVMVKKFQSEIQNKDSEIHQLQQQIEQASQKRAKLEKNLKLRGLSTKESEDENGFFPVDLTPDLFTSAVEVAAKAIHDFSKPLINMMKAAGWDLDAAANSIEPDVVYAKRAHKKYAFESYICQRMFSGFEQENFSVKLDNTTATKESFFHQFLALREMDPLDMLGQNPDSIFGKFCRSKYLVVVHPKMEASFFGNLDQRNYVMGGGHPRTPFYQAFLKLTKSIWLLHRLAYSFEPNVKVFQVKGGSEFSDVYMESVVKNLIMDDNDEKPKIGLMVMPGFWIGGSLIQSKVYLSGMKAAE

SEQ ID NO: 5849 - DNA, 1381 bp, Glycine max
  misc_feature (1)..(1381): Ceres Seq. ID no. 14308625
tgtaactcccgtagtcccgctgtatgttgtgttgaattgcttgctcaggcagcttgaaggagcacattgctaaggttaaaatagctgaaattgcatttatggtgcaattatgcaatttgctgtaagcagtgttgtggtagtaatgttctaaatcttgaaagtgttgtttcctaggtttatagcatctatttaaggactcatgagaaatcccagtttattggaacatgtttgtctcgctgacatctatctgctgtagcattcaactagtctgtgttttggtaactgtgtggacatgccattcaatccctgagtaaaatgtgaaaacattttacatttattgccactgctaatagtttccaaggataacgaaagcaataatctaattttgtttttgtaccctctactctagaaggtacaaagaaaatgcatgcttgaataaatttttaattgttctcatttgtagaaaaaagttggaattccattttacttgaagatgtttgagctaataacttctcttctaagttcgaacttacatggtttcttaaatggcaatcacaggcagcattgcatgctctaggaaacatctcgggagaaaccagatctgagaacaacatcatactcaatgccgaagaagaagaaaacctgcgacgcttaatttatgaaacagcatccagaagctcaaagctgactccatcgggtctttttctgtcagtattgcagcaggattcagaaatacgtctagcgggctatagaatgctaagtggattggttgcccgaccatggtgcttgatggagatatgttcaaaacaagagattataaataaagttacggacccaagtactgaaacgacaaaaataggtatggaaggcagatataactgctgcaaggcaatacacaaatcattgacagtgtctagtagagtttctgctaatcctgcttttgcaggaatagctgcaaagtttcaggaagctgttggaatgggtccatatcttgttaaaaggcatgttgaagctcaacctgctgtgataacggctgatagattttagttttcacacctgagtggtcaagcaatacctgtaatggagcagttttttttctcttctcaaatacaatgtggagtgttatagaacaaaaaccttttccccctcaaatgttgaaacttgatggaatgagtatattaatcatagttttttagtgtattatatttcaatggcttttgtcaactctagcaaatagatattctttttggctttggatgtgtgttgcatgtgtgaagtagtagtctttgtcaacaattacattgtctactaactggcatatatactgaacttgcattcagctataatttagcttattcaagttcgactgcagcatgttgtt

SEQ ID NO: 5850 - protein, 97 aa, Glycine max
  peptide (1)..(97): Ceres Seq. ID no. 14308626
  misc_feature (1)..(97): NCBI GI NO: 11994507 NR Description: gene_id:F4B12.9~unknown protein
  misc_feature (1)..(97): NCBI GI NO: 18400660 NR Description: expressed protein [Arabidopsis thaliana]
  misc_feature (1)..(97): NCBI GI NO: 21593496 NR Description: unknown [Arabidopsis thaliana]
MLSGLVARPWCLMEICSKQEIINKVTDPSTETTKIGMEGRYNCCKAIHKSLTVSSRVSANPAFAGIAAKFQEAVGMGPYLVKRHVEAQPAVITADRF

SEQ ID NO: 5851 - protein, 85 aa, Glycine max
  peptide (1)..(85): Ceres Seq. ID no. 14308627
  misc_feature (1)..(85): NCBI GI NO: 11994507 NR Description: gene_id:F4B12.9~unknown protein
  misc_feature (1)..(85): NCBI GI NO: 18400660 NR Description: expressed protein [Arabidopsis thaliana]
  misc_feature (1)..(85): NCBI GI NO: 21593496 NR Description: unknown [Arabidopsis thaliana]
MEICSKQEIINKVTDPSTETTKIGMEGRYNCCKAIHKSLTVSSRVSANPAFAGIAAKFQEAVGMGPYLVKRHVEAQPAVITADRF

SEQ ID NO: 5852 - protein, 61 aa, Glycine max
  peptide (1)..(61): Ceres Seq. ID no. 14308628
  misc_feature (1)..(61): NCBI GI NO: 11994507 NR Description: gene_id:F4B12.9~unknown protein
  misc_feature (1)..(61): NCBI GI NO: 18400660 NR Description: expressed protein [Arabidopsis thaliana]
  misc_feature (1)..(61): NCBI GI NO: 21593496 NR Description: unknown [Arabidopsis thaliana]
MEGRYNCCKAIHKSLTVSSRVSANPAFAGIAAKFQEAVGMGPYLVKRHVEAQPAVITADRF

SEQ ID NO: 5853 - DNA, 1271 bp, Glycine max
  misc_feature (1)..(1271): Ceres Seq. ID no. 15169032
aaaagactgaaggataaaacaggcagacattgtcaccagcccccaagcccaaatactatagtgaatggactcacttggccatgtttggcagtggcaccactgacaccttaaggtggaaccagtgtagccatgttagaccatgtttggtgtccataccttggtgcattcgtctgttcttttcataggccaaaatctgattttacaagttattgtgacagggagttgtagtgtttagctttgatactactaatctgtgtttctcatctgctttaaactgtgagcagtgagattctcgcatcttatacatttaagcaattgaaagcatgatgaatcattactattaattttgttatcatatttttgcaatgcaagttctcagtctttcaaagtcttgtcaccttgctttgtgtttgctgatgtaagatttctggttaattaatttgaatctgaaatgtgggcgttcacctcaccatatgctattatagtgcaatctccttaatatatatttgagtatagtattatcaatccaagaaaaaagaaaaaagatattactgcatatcatttttttgttatcatacttttgcaaaataagttctgtctttcgacgttttgaaatcttgtgatgcaacttatttgccatttgtgtttgctgatgcaagattttccttgttaatttgaatcggaaatgcaggtgttagcccaacagctattgcagtgcaatccccttatgttgctcaagtacaacttttgagggacaagcttgatgaatttccagaagcagcaggtactgaggttgcaaccattgacagttttcaaggtcgggaagctgatgcagtaattttatccatggtacgatcaaacacattgggagctgttggattccttggggatagcagaagaatcaatgttgccatcacaagagcacgcaaacatttagctttggtctgtgacagctcgactatatgccacaataccttcttagcaaggcttctgcgtcatattagacactttggtagggtgaagcatgcagaaccaggtagttttggaggatatggacttgggatgaatccaatattaccttccattaattagtgtgcaacagtagcacgaaacaagttcctatttaatccaatattacttggaggatatggacttgggatggataggttttttctttaaacttgtatagttgtatagcaattcataaattcaaaattgtgtagcgtatcaagtacgtacagaaaagttcattgaaaccccaagattggtat

SEQ ID NO: 5854 - protein, 81 aa, Glycine max
  peptide (1)..(81): Ceres Seq. ID no. 15169033
  misc_feature (1)..(78): NCBI GI NO: 9758800 NR Description: DNA helicase-like [Arabidopsis thaliana]
  misc_feature (1)..(78): NCBI GI NO: 30692868 NR Description: DNA helicase-related [Arabidopsis thaliana]
  misc_feature (1)..(61): NCBI GI NO: 183250 NR Description: glial factor-1
  misc_feature (1)..(61): NCBI GI NO: 908917 NR Description: DNA helicase [Homo sapiens]
  misc_feature (1)..(61): NCBI GI NO: 1082534 NR Description: Ig mu chain switch region binding protein 2
  misc_feature (1)..(61): NCBI GI NO: 4504623 NR Description: immunoglobulin mu binding protein 2
  misc_feature (1)..(61): NCBI GI NO: 13928794 NR Description: immunoglobulin mu binding protein 2
  misc_feature (1)..(61): NCBI GI NO: 2498040 NR Description: DNA-BINDING PROTEIN SMUBP-2
  misc_feature (1)..(61): NCBI GI NO: 6678029 NR Description: immunoglobulin mu binding protein 2
  misc_feature (1)..(56): NCBI GI NO: 7446669 NR Description: probable helicase At2g03270
MVRSNTLGAVGFLGDSRRINVAITRARKHLALVCDSSTICHNTFLARLLRHIRHFGRVKHAEPGSFGGYGLGMNPILPSIN

SEQ ID NO: 5855 - DNA, 2314 bp, Glycine max
  misc_feature (1)..(2314): Ceres Seq. ID no. 15224874
gatggaagagctctccgcggggcctctcgtccccgccgtcgtcaaaccggaagcgtccaaaggcgccgccgtcgccgccgacacctccgccgcggcctccggcggcacgttcccggcctccacgtcggagccggacaaggacttcctctgcccgatttgcatgcagatcatcaaggacgcgttcctcaccgcgtgcggccacagcttctgctacatgtgcatcatcacgcacctccgcaacaagagcgattgcccttgctgcggccactacctcaccaacaccaacctcttccctaacttcttgctcgacaagctactgaagaagacttctgcgcgtcaaatatcaaaaaccgcttcacctgtggaacatttccggcaggcattgcaaaagggttgtgatgtgtcaattaaggagctagacacccttttgtcacttcttgccgagaagaaaagaaaaatggaacaagaagaagctgagagaaatatgcaaatattgttagacttcttgcattgcttacgcaagcaaaaagttgatgagttgaaggaggtacaaactgatctccagtttataaaagaggacattaatgctgtggagaaacatagaatggatttgtatcgtgcacgggacaggtactctgtaaaattacggatgcttgatgactctggtggaagaaaatcatggcattcatcaatggacaagaacaacagtggccttatatctcgtcctctaaatctacgaggagggttgtcatcagggagccatactaagaaaaatgatggaaagtcccaaattagctctcacgggcatggagttcagagaagggatgccatcactggatccgattcacaatatataaatcaatcgggtctttctctagttagaaagaagagggtgcatacacagttcaatgacctacaagaatgttacctacaaaagcgacgacatgcagctgataggccccatagccaacaagtaagagatataaatctcataagtcgagaaggttatactgctggtcttgaagattttcagtcagtcttgacaactttcacacgctatagccgattgagagtcattgcagaactaagacatggggatatatttcattcagcaaatatagtgtcaagcatagagtttgactgcgatgatgatttgtttgctactgctggagtttcccggcgcatcaaagtttttgacttttctgctgttgtgaatgaacctacagatgctcactgtcctgttgtggagatgtctacacgttcaaaacttagttgcttgagttggaataaatatgctaagaatcaaatagctagtagtgattatgaaggaattgtgactgtttgggatgtaaccactcgaaagagtttaatggaatatgaagagcatgaaaagcgtgcatggagtgttgatttttcaagaacagatccctctatgcttgtatctggtagcgatgactgtaaggtcaaaatttggtgtacaaatcaggaagctagtgttctaaatatagacatgaaagcaaacatatgctgtgtcaaatataatcctggatctggcaattatattgcagttggatcagcagaccatcacatccattattatgatttgagaaatatcagccgtccagtccatgttttcagtgggcacaggaaggctgtttcatatgtgaaatttctgtctaatgatgaacttgcttctgcatcaacagatagtacactgcgattatgggatgtgaaggaaaacttgccagttcgtactttcaaaggccatgcaaatgagaaaaactttgttggccttacagtaagcagtgaatacattgcgtgtggcagtgaaacaaatgaagtctttgtgtaccacaaggaaatctcgagacctttgacttgccacagatttgggtcccctgatatggatgacgctgaagatgaggctggatcgtacttcattagtgctgtatgctggaagagtgatcgccccactattctaactgcaaatagtcaaggcaccatcaaagtgctggtgcttgcagcttgaacacgagaaaaaagaatagaatgtggaattggtattatcttttcccatgctattatgattgtatcatttattaattgtacatagttttcaagtgtatatggcaggctttagggatcttaatgagatattagttgagtgcttaaacctttatcaacaaacctatttaagggactgaactttaatttttaccaattgaggacctcaaatttattaaattttgtattaataaatgctcaggagacaaaataaaatatcaaatttggcatgcaaaaaaaaaaaaaaaaa

SEQ ID NO: 5856 - protein, 675 aa, Glycine max
  peptide (1)..(675): Ceres Seq. ID no. 15224875
  misc_feature (50)..(87): Pfam Name: RING finger Pfam Description: Zinc finger, C3HC4 type
  misc_feature (1)..(675): NCBI GI NO: 15225760 NR Description: COP1 regulatory protein [Arabidopsis thaliana]
  misc_feature (100)..(675): NCBI GI NO: 8574407 NR Description: COP1 regulatory protein [Pisum sativum]
  misc_feature (1)..(675): NCBI GI NO: 402685 NR Description: regulatory protein
  misc_feature (100)..(675): NCBI GI NO: 7688065 NR Description: constitutively photomorphogenic 1 protein
  misc_feature (1)..(675): NCBI GI NO: 4090943 NR Description: COP1 homolog [Lycopersicon esculentum]
  misc_feature (2)..(675): NCBI GI NO: 11127996 NR Description: COP1 [Ipomoea nil]
  misc_feature (1)..(675): NCBI GI NO: 15029364 NR Description: photoregulatory zinc-finger protein COP1
  misc_feature (6)..(674): NCBI GI NO: 16151847 NR Description: copI [Oryza sativa]
  misc_feature (1)..(464): NCBI GI NO: 7688065 NR Description: constitutively photomorphogenic 1 protein
  misc_feature (1)..(464): NCBI GI NO: 8574407 NR Description: COP1 regulatory protein [Pisum sativum]
MEELSAGPLVPAVVKPEASKGAAVAADTSAAASGGTFPASTSEPDKDFLCPICMQIIKDAFLTACGHSFCYMCIITHLRNKSDCPCCGHYLTNTNLFPNFLLDKLLKKTSARQISKTASPVEHFRQALQKGCDVSIKELDTLLSLLAEKKRKMEQEEAERNMQILLDFLHCLRKQKVDELKEVQTDLQFIKEDINAVEKHRMDLYRARDRYSVKLRMLDDSGGRKSWHSSMDKNNSGLISRPLNLRGGLSSGSHTKKNDGKSQISSHGHGVQRRDAITGSDSQYINQSGLSLVRKKRVHTQFNDLQECYLQKRRHAADRPHSQQVRDINLISREGYTAGLEDFQSVLTTFTRYSRLRVIAELRHGDIFHSANIVSSIEFDCDDDLFATAGVSRRIKVFDFSAVVNEPTDAHCPVVEMSTRSKLSCLSWNKYAKNQIASSDYEGIVTVWDVTTRKSLMEYEEHEKRAWSVDFSRTDPSMLVSGSDDCKVKIWCTNQEASVLNIDMKANICCVKYNPGSGNYIAVGSADHHIHYYDLRNISRPVHVFSGHRKAVSYVKFLSNDELASASTDSTLRLWDVKENLPVRTFKGHANEKNFVGLTVSSEYIACGSETNEVFVYHKEISRPLTCHRFGSPDMDDAEDEAGSYFISAVCWKSDRPTILTANSQGTIKVLVLAA

SEQ ID NO: 5857 - protein, 622 aa, Glycine max
  peptide (1)..(622): Ceres Seq. ID no. 15224876
  misc_feature (1)..(34): Pfam Name: RING finger Pfam Description: Zinc finger, C3HC4 type
  misc_feature (1)..(622): NCBI GI NO: 15225760 NR Description: COP1 regulatory protein [Arabidopsis thaliana]
  misc_feature (47)..(622): NCBI GI NO: 8574407 NR Description: COP1 regulatory protein [Pisum sativum]
  misc_feature (1)..(622): NCBI GI NO: 402685 NR Description: regulatory protein
  misc_feature (47)..(622): NCBI GI NO: 7688065 NR Description: constitutively photomorphogenic 1 protein
  misc_feature (1)..(622): NCBI GI NO: 4090943 NR Description: COP1 homolog [Lycopersicon esculentum]
  misc_feature (1)..(622): NCBI GI NO: 11127996 NR Description: COP1 [Ipomoea nil]
  misc_feature (1)..(622): NCBI GI NO: 15029364 NR Description: photoregulatory zinc-finger protein COP1
  misc_feature (1)..(621): NCBI GI NO: 16151847 NR Description: copI [Oryza sativa]
  misc_feature (1)..(411): NCBI GI NO: 7688065 NR Description: constitutively photomorphogenic 1 protein
  misc_feature (1)..(411): NCBI GI NO: 8574407 NR Description: COP1 regulatory protein [Pisum sativum]
MQIIKDAFLTACGHSFCYMCIITHLRNKSDCPCCGHYLTNTNLFPNFLLDKLLKKTSARQISKTASPVEHFRQALQKGCDVSIKELDTLLSLLAEKKRKMEQEEAERNMQILLDFLHCLRKQKVDELKEVQTDLQFIKEDINAVEKHRMDLYRARDRYSVKLRMLDDSGGRKSWHSSMDKNNSGLISRPLNLRGGLSSGSHTKKNDGKSQISSHGHGVQRRDAITGSDSQYINQSGLSLVRKKRVHTQFNDLQECYLQKRRHAADRPHSQQVRDINLISREGYTAGLEDFQSVLTTFTRYSRLRVIAELRHGDIFHSANIVSSIEFDCDDDLFATAGVSRRIKVFDFSAVVNEPTDAHCPVVEMSTRSKLSCLSWNKYAKNQIASSDYEGIVTVWDVTTRKSLMEYEEHEKRAWSVDFSRTDPSMLVSGSDDCKVKIWCTNQEASVLNIDMKANICCVKYNPGSGNYIAVGSADHHIHYYDLRNISRPVHVFSGHRKAVSYVKFLSNDELASASTDSTLRLWDVKENLPVRTFKGHANEKNFVGLTVSSEYIACGSETNEVFVYHKEISRPLTCHRFGSPDMDDAEDEAGSYFISAVCWKSDRPTILTANSQGTIKVLVLAA

SEQ ID NO: 5858 - protein, 604 aa, Glycine max
  peptide (1)..(604): Ceres Seq. ID no. 15224877
  misc_feature (424)..(463): Pfam Name: Pfam Description:  WD domain, G-beta repeat
  misc_feature (1)..(604): NCBI GI NO: 15225760 NR Description: COP1 regulatory protein [Arabidopsis thaliana]
  misc_feature (29)..(604): NCBI GI NO: 8574407 NR Description: COP1 regulatory protein [Pisum sativum]
  misc_feature (1)..(604): NCBI GI NO: 402685 NR Description: regulatory protein
  misc_feature (29)..(604): NCBI GI NO: 7688065 NR Description: constitutively photomorphogenic 1 protein
  misc_feature (1)..(604): NCBI GI NO: 4090943 NR Description: COP1 homolog [Lycopersicon esculentum]
  misc_feature (1)..(604): NCBI GI NO: 11127996 NR Description: COP1 [Ipomoea nil]
  misc_feature (1)..(604): NCBI GI NO: 15029364 NR Description: photoregulatory zinc-finger protein COP1
  misc_feature (1)..(603): NCBI GI NO: 16151847 NR Description: copI [Oryza sativa]
  misc_feature (1)..(393): NCBI GI NO: 7688065 NR Description: constitutively photomorphogenic 1 protein
  misc_feature (1)..(393): NCBI GI NO: 8574407 NR Description: COP1 regulatory protein [Pisum sativum]
MCIITHLRNKSDCPCCGHYLTNTNLFPNFLLDKLLKKTSARQISKTASPVEHFRQALQKGCDVSIKELDTLLSLLAEKKRKMEQEEAERNMQILLDFLHCLRKQKVDELKEVQTDLQFIKEDINAVEKHRMDLYRARDRYSVKLRMLDDSGGRKSWHSSMDKNNSGLISRPLNLRGGLSSGSHTKKNDGKSQISSHGHGVQRRDAITGSDSQYINQSGLSLVRKKRVHTQFNDLQECYLQKRRHAADRPHSQQVRDINLISREGYTAGLEDFQSVLTTFTRYSRLRVIAELRHGDIFHSANIVSSIEFDCDDDLFATAGVSRRIKVFDFSAVVNEPTDAHCPVVEMSTRSKLSCLSWNKYAKNQIASSDYEGIVTVWDVTTRKSLMEYEEHEKRAWSVDFSRTDPSMLVSGSDDCKVKIWCTNQEASVLNIDMKANICCVKYNPGSGNYIAVGSADHHIHYYDLRNISRPVHVFSGHRKAVSYVKFLSNDELASASTDSTLRLWDVKENLPVRTFKGHANEKNFVGLTVSSEYIACGSETNEVFVYHKEISRPLTCHRFGSPDMDDAEDEAGSYFISAVCWKSDRPTILTANSQGTIKVLVLAA

SEQ ID NO: 5859 - DNA, 1366 bp, Glycine max
  misc_feature (1)..(1366): Ceres Seq. ID no. 12581680
cagctacgtaggcccccccccccccaccgcgtataccacaccgaacaacacaacagagagacagagcattaaggatgttggagctgtgccgcaagccactgaagatgtgcttcggtggtggaggcaacgacgacggcctcctctggcacacagaccttaagccccacgcttcagggaactactcaattgcagtggtgcaagctaattcatccttggaagaccaagcacaagtatttacctctccctccgcaacctttgttggtgtatacgacggtcacggtggtcctgaagcttcccgtttcatcaccaaccacctcttctccttccttcgcaaattcacaacagaggagggtggtttgtcggaggaagttataaagaaggcgttcgaggcaacggaagatgagtttttgcgtgtagtgagggaatcatggattgcgcggccacagatagcttccgtgggttcgtgttgtcttctgggagcgatttcaaagggagttctttatgttgctaatctcggggattcgagggcggttttgggtcggaaagcgttggaaggagaggtgaattgtggtgctggtgctgtggtggcagagcgtttgtccactgatcataatgttggagtggagaatgttagaaaggaggttgaagctcttcaccctgatgatccacacattgtggtttgcactcgtggagtttggcgaatcaagggcattattcaggtctcaagatcaataggagatgtttacctaaagaaaccagaatttgacactaatcctctgttccaacaatttgtatgtccactatacttgaggagacctgtaatgacagctgaaccatcgatattggcgcgtaaattgaaggcagatgatctgtttttgatctttgcatcagacgggctttgggagcatttaactgatgaagcggctgttgaaatcatctccagaagtcccagaataggaattgcaaaacgattggcgagagctgcactagaagaggttgcaaagaaaagagaaatgaggtatggggatctaaggaaaacagataaaggtctaaggcgccattttcatgatgatattacagtgatcgttctatatctcgatcattcaaaagaatctcaaaatggtagatcaagacgtaaaggagtttatgattgcattaatactcctattgatatcttctctgtgagctcagatgaagctgatctttaaattgaattagctattagcagtgactctccacgtactgctttttacacaagaaatttgtcacatacaaaagtagtagttacggtggccaaatgaaaaggattgtaaaagaagtaatactcattatcttaatcatcatatttttttctatttctctaact

SEQ ID NO: 5860 - protein, 377 aa, Glycine max
  peptide (1)..(377): Ceres Seq. ID no. 12581681
  misc_feature (36)..(313): Pfam Name: Pfam Description:  Protein phosphatase 2C
  misc_feature (1)..(376): NCBI GI NO: 15235152 NR Description: putative protein; protein id: At4g33920
  misc_feature (14)..(376): NCBI GI NO: 26006493 NR Description: Putative protein phosphatase
  misc_feature (15)..(375): NCBI GI NO: 14488375 NR Description: putative protein phosphatase
  misc_feature (16)..(375): NCBI GI NO: 33147010 NR Description: protein phosphatase 2C-like
  misc_feature (16)..(375): NCBI GI NO: 34915296 NR Description: protein phosphatase 2C-like
  misc_feature (1)..(343): NCBI GI NO: 38346816 NR Description: OSJNBa0088A01.23
  misc_feature (17)..(342): NCBI GI NO: 15239244 NR Description: protein phosphatase 2C-like protein
  misc_feature (1)..(357): NCBI GI NO: 18855039 NR Description: putative protein phosphatase [Oryza sativa]
  misc_feature (17)..(347): NCBI GI NO: 11282001 NR Description: protein phosphatase 2C-like protein
  misc_feature (1)..(354): NCBI GI NO: 9294356 NR Description: protein phosphatase 2C [Arabidopsis thaliana]
MLELCRKPLKMCFGGGGNDDGLLWHTDLKPHASGNYSIAVVQANSSLEDQAQVFTSPSATFVGVYDGHGGPEASRFITNHLFSFLRKFTTEEGGLSEEVIKKAFEATEDEFLRVVRESWIARPQIASVGSCCLLGAISKGVLYVANLGDSRAVLGRKALEGEVNCGAGAVVAERLSTDHNVGVENVRKEVEALHPDDPHIVVCTRGVWRIKGIIQVSRSIGDVYLKKPEFDTNPLFQQFVCPLYLRRPVMTAEPSILARKLKADDLFLIFASDGLWEHLTDEAAVEIISRSPRIGIAKRLARAALEEVAKKREMRYGDLRKTDKGLRRHFHDDITVIVLYLDHSKESQNGRSRRKGVYDCINTPIDIFSVSSDEADL

SEQ ID NO: 5861 - protein, 367 aa, Glycine max
  peptide (1)..(367): Ceres Seq. ID no. 12581682
  misc_feature (26)..(303): Pfam Name: Pfam Description:  Protein phosphatase 2C
  misc_feature (1)..(366): NCBI GI NO: 15235152 NR Description: putative protein; protein id: At4g33920
  misc_feature (4)..(366): NCBI GI NO: 26006493 NR Description: Putative protein phosphatase
  misc_feature (5)..(365): NCBI GI NO: 14488375 NR Description: putative protein phosphatase
  misc_feature (6)..(365): NCBI GI NO: 33147010 NR Description: protein phosphatase 2C-like
  misc_feature (6)..(365): NCBI GI NO: 34915296 NR Description: protein phosphatase 2C-like
  misc_feature (1)..(333): NCBI GI NO: 38346816 NR Description: OSJNBa0088A01.23
  misc_feature (7)..(332): NCBI GI NO: 15239244 NR Description: protein phosphatase 2C-like protein
  misc_feature (1)..(347): NCBI GI NO: 18855039 NR Description: putative protein phosphatase [Oryza sativa]
  misc_feature (7)..(337): NCBI GI NO: 11282001 NR Description: protein phosphatase 2C-like protein
  misc_feature (1)..(344): NCBI GI NO: 9294356 NR Description: protein phosphatase 2C [Arabidopsis thaliana]
MCFGGGGNDDGLLWHTDLKPHASGNYSIAVVQANSSLEDQAQVFTSPSATFVGVYDGHGGPEASRFITNHLFSFLRKFTTEEGGLSEEVIKKAFEATEDEFLRVVRESWIARPQIASVGSCCLLGAISKGVLYVANLGDSRAVLGRKALEGEVNCGAGAVVAERLSTDHNVGVENVRKEVEALHPDDPHIVVCTRGVWRIKGIIQVSRSIGDVYLKKPEFDTNPLFQQFVCPLYLRRPVMTAEPSILARKLKADDLFLIFASDGLWEHLTDEAAVEIISRSPRIGIAKRLARAALEEVAKKREMRYGDLRKTDKGLRRHFHDDITVIVLYLDHSKESQNGRSRRKGVYDCINTPIDIFSVSSDEADL

SEQ ID NO: 5862 - DNA, 1449 bp, Glycine max
  misc_feature (1)..(1449): Ceres Seq. ID no. 15169248
ggggaggaagcacagaccacaggggcatatctcaaatttttttacaaagtggataatataatataaattgaataactgagggtttggtacttaagtttaatttagttaaagttgtttgtgtctggaattggtgtttgaaaatggctctctttgctgcattttccatttgtaaagttgccaaggatgcagctggagttgcaggaaatgtctttgcttttgggttgtttgtgtctcccatacccacatttaggaggattatcagaaatgggtcaacagagatgttctcagggttgccatatatttattcccttctaaactgcttgatctgcatgtggtatggcacacctctgatatctgctgataatttgttggttacaactgttaattcaattggagctgtctttcaatttgtgtacataatcatcttcctgatgtatgctgagaaagcaaaaaaggtgagaatgattggattatcgctggcagttcttggcatatttgcaatcatattagttggaagcttgcaaatagatgacattataatgcggcggttctttgtgggattcttgagctgtgcctctctcatttcaatgtttgcctctccattgtttataattaaattggtcattcagacaaagagtgttgaattcatgccgttttatctctcactttccaccttcctaatgagcacctctttcttactttatggattattcaacgatgatgcctttatttatgtgccaaatgggataggaaccatattgggattgatacagttgatattatacttctatttcgagggtaaatctagagtgaactccagagaacctttgatagtgtcatatgcatgatcagttctgctgaaaagactggagtgacaacttcttgttcctgcacaaaacagaatcagagttagaaatgaccttttgctgctagatgtggtctgaaactggagttggcaacatccctgtctgtttgattcaatttataggagagcaattaccgttgcatctttgagagagaccagaagttgtgataatgaataacttgaaattgtctatatcatagttaccatatatctggtacaagtactggtacgtggtacttgtagttgtaggtacagatggccagtttttacattattattactagactttctttaaagagaacacggtatgcagtttgtggtacgttgaatacagcacacaatatgcaggattaactatggtctgtatatttatgcaagccttgagaaggtgaaccatgctccgaaatgggactatttcaagaaaggcacatcgcacctctcctgcagtcgttggtggtgctctaggctggcttctcttgcagtgaggccatttccaagttcatcagatgtttacagacaaatatgtacacattatttgagtggcatatattatttattatagtctgatgttgatcaccaaaaag

SEQ ID NO: 5863 - protein, 235 aa, Glycine max
  peptide (1)..(235): Ceres Seq. ID no. 15169249
  misc_feature (137)..(222): Pfam Name: Pfam Description:  MtN3/saliva family
  misc_feature (1)..(234): NCBI GI NO: 18400517 NR Description: nodulin MtN3 family protein [Arabidopsis thaliana]
  misc_feature (12)..(228): NCBI GI NO: 18394992 NR Description: nodulin MtN3 family protein [Arabidopsis thaliana]
  misc_feature (12)..(215): NCBI GI NO: 34907420 NR Description: P0018C10.36
  misc_feature (8)..(190): NCBI GI NO: 34911484 NR Description: putative MtN3
  misc_feature (18)..(221): NCBI GI NO: 34146818 NR Description: At5g53190 [Arabidopsis thaliana]
  misc_feature (18)..(221): NCBI GI NO: 15238678 NR Description: nodulin MtN3 family protein [Arabidopsis thaliana]
  misc_feature (18)..(219): NCBI GI NO: 15241278 NR Description: nodulin MtN3 family protein [Arabidopsis thaliana]
  misc_feature (18)..(219): NCBI GI NO: 21593109 NR Description: MtN3-like protein [Arabidopsis thaliana]
  misc_feature (18)..(219): NCBI GI NO: 15234863 NR Description: nodulin MtN3 family protein [Arabidopsis thaliana]
  misc_feature (18)..(219): NCBI GI NO: 15237803 NR Description: nodulin MtN3 family protein [Arabidopsis thaliana]
MALFAAFSICKVAKDAAGVAGNVFAFGLFVSPIPTFRRIIRNGSTEMFSGLPYIYSLLNCLICMWYGTPLISADNLLVTTVNSIGAVFQFVYIIIFLMYAEKAKKVRMIGLSLAVLGIFAIILVGSLQIDDIIMRRFFVGFLSCASLISMFASPLFIIKLVIQTKSVEFMPFYLSLSTFLMSTSFLLYGLFNDDAFIYVPNGIGTILGLIQLILYFYFEGKSRVNSREPLIVSYA

SEQ ID NO: 5864 - protein, 189 aa, Glycine max
  peptide (1)..(189): Ceres Seq. ID no. 15169250
  misc_feature (91)..(176): Pfam Name: Pfam Description:  MtN3/saliva family
  misc_feature (1)..(188): NCBI GI NO: 18400517 NR Description: nodulin MtN3 family protein [Arabidopsis thaliana]
  misc_feature (1)..(182): NCBI GI NO: 18394992 NR Description: nodulin MtN3 family protein [Arabidopsis thaliana]
  misc_feature (1)..(169): NCBI GI NO: 34907420 NR Description: P0018C10.36
  misc_feature (1)..(144): NCBI GI NO: 34911484 NR Description: putative MtN3
  misc_feature (1)..(175): NCBI GI NO: 34146818 NR Description: At5g53190 [Arabidopsis thaliana]
  misc_feature (1)..(175): NCBI GI NO: 15238678 NR Description: nodulin MtN3 family protein [Arabidopsis thaliana]
  misc_feature (1)..(173): NCBI GI NO: 15241278 NR Description: nodulin MtN3 family protein [Arabidopsis thaliana]
  misc_feature (1)..(173): NCBI GI NO: 21593109 NR Description: MtN3-like protein [Arabidopsis thaliana]
  misc_feature (1)..(173): NCBI GI NO: 15234863 NR Description: nodulin MtN3 family protein [Arabidopsis thaliana]
  misc_feature (1)..(173): NCBI GI NO: 15237803 NR Description: nodulin MtN3 family protein [Arabidopsis thaliana]
MFSGLPYIYSLLNCLICMWYGTPLISADNLLVTTVNSIGAVFQFVYIIIFLMYAEKAKKVRMIGLSLAVLGIFAIILVGSLQIDDIIMRRFFVGFLSCASLISMFASPLFIIKLVIQTKSVEFMPFYLSLSTFLMSTSFLLYGLFNDDAFIYVPNGIGTILGLIQLILYFYFEGKSRVNSREPLIVSYA

SEQ ID NO: 5865 - protein, 172 aa, Glycine max
  peptide (1)..(172): Ceres Seq. ID no. 15169251
  misc_feature (74)..(159): Pfam Name: Pfam Description:  MtN3/saliva family
  misc_feature (1)..(171): NCBI GI NO: 18400517 NR Description: nodulin MtN3 family protein [Arabidopsis thaliana]
  misc_feature (1)..(165): NCBI GI NO: 18394992 NR Description: nodulin MtN3 family protein [Arabidopsis thaliana]
  misc_feature (1)..(152): NCBI GI NO: 34907420 NR Description: P0018C10.36
  misc_feature (1)..(127): NCBI GI NO: 34911484 NR Description: putative MtN3
  misc_feature (1)..(158): NCBI GI NO: 34146818 NR Description: At5g53190 [Arabidopsis thaliana]
  misc_feature (1)..(158): NCBI GI NO: 15238678 NR Description: nodulin MtN3 family protein [Arabidopsis thaliana]
  misc_feature (1)..(156): NCBI GI NO: 15241278 NR Description: nodulin MtN3 family protein [Arabidopsis thaliana]
  misc_feature (1)..(156): NCBI GI NO: 21593109 NR Description: MtN3-like protein [Arabidopsis thaliana]
  misc_feature (1)..(156): NCBI GI NO: 15234863 NR Description: nodulin MtN3 family protein [Arabidopsis thaliana]
  misc_feature (1)..(156): NCBI GI NO: 15237803 NR Description: nodulin MtN3 family protein [Arabidopsis thaliana]
MWYGTPLISADNLLVTTVNSIGAVFQFVYIIIFLMYAEKAKKVRMIGLSLAVLGIFAIILVGSLQIDDIIMRRFFVGFLSCASLISMFASPLFIIKLVIQTKSVEFMPFYLSLSTFLMSTSFLLYGLFNDDAFIYVPNGIGTILGLIQLILYFYFEGKSRVNSREPLIVSYA

SEQ ID NO: 5866 - DNA, 1799 bp, Glycine max
  misc_feature (1)..(1799): Ceres Seq. ID no. 15169264
atcatttttcaattcttatcatcaaaactggtcccaaggagccagaaacaccaaagccaaaaacacttcctttgttacacaagatgaaaacagtttctcttgtccacaaaacagaagaactggctaataaaacagtggtttttgattttgagggtaccttgttaagatcagcttcactgtttccttacttcatgctggttgcttttgaagctggtgggttgctaaggtctctcgtgttgtttgtctcataccctttggtgtggctggttggtgaagatcaacttggcttgaagatcatggttttcttgaccctttttggcataaaaaaggacacgttcagaatagggtcagctgttctgccaaagttcttcttagaaaacatggggtgggaaggctttggagctattatgcgttgtaacaaaaaggtggcatcaagtaagttgccaagggccatggttgaaggtttcttgaaggactacttgggggttgagggtgttatagcaagagacatcaagtccttcaaagggtattttttgggattgtttgaggaaaagaaggaaaacaacacccctacccatatatatgatgaggctacagcaggcaacgacaacactattagtatcactggtagccatattgagtatattgaccaagagcttttcccttatttcaagaaggtttgcttaatgttaagctcagaggagaggagaaattggcatgtccttccaaaagagaggtatccaaagccattgatcttccatgatggaaggttggcattcaggccaacccctgcatcttctctagctttcttcatgtggttaccccttggactattcctttccatctgcagattcacctttggcactgcattgcccttcaatttatctgctccagtattggccttctcaggaacaagaaccactctttcaagaccccaaaaccctttgtcattggtccaaaatgaggaaaaccaaaagggcatgctctatgtgtgcaaccacagaaccttgcttgaccctctttacattgcatatgttttggacaaacctctctctgcagttacatacagcttgagcagattcaatgagctagtagcccccatcagaaccataagactaacaagggacagagaaagagacagagaaacaatggacaaattgctgagcctaggaaaccttgtggtgtgtcctgagggaacaacttgcagggaaccttatttgctaaggttcagtcctttgtttgctgaactcactgatgacattgttcctgtggcggttgatgttaaggttagcatgttctatggaacaacagctagtggacacaaatgtttggacccgtttttccacttcatgaacccgaatcccacgtacttcattaaaatcctcgacagggtaccgctgtcagaaacatgtcttggaggtggaagatcaagaattgaagttgccaattttgtgcaacgtgagattgggaatgctttaggatttgcatgcaccagcttgaccagaaaagacaagtacatgatcttggcaggtaacgagggtgtcaatgaagggccttgtcataactgcaagtagctactggctttgtgtcaaactttagagagaagaaattattacataatccgagaagtatgatggtgtctaccaattttcatgtaacatgttacggagttttcccgaatctttttcatgaaatgaaattctcaattgcatatcatataaattaagattggttgtatggtggtcgcgcatcatgtaatacttttttcttaagcaacaaatagttatgaatgttacacg

SEQ ID NO: 5867 - protein, 523 aa, Glycine max
  peptide (1)..(523): Ceres Seq. ID no. 15169265
  misc_feature (34)..(514): NCBI GI NO: 18378959 NR Description: phospholipid/glycerol acyltransferase family
  misc_feature (39)..(514): NCBI GI NO: 15235185 NR Description: phospholipid/glycerol acyltransferase family
  misc_feature (11)..(514): NCBI GI NO: 18390661 NR Description: phospholipid/glycerol acyltransferase family
  misc_feature (11)..(514): NCBI GI NO: 21618047 NR Description: unknown [Arabidopsis thaliana]
  misc_feature (38)..(514): NCBI GI NO: 34905450 NR Description: P0487H02.19
  misc_feature (44)..(513): NCBI GI NO: 34894812 NR Description: P0554D10.9
  misc_feature (37)..(513): NCBI GI NO: 38000002 NR Description: unknown protein
  misc_feature (38)..(513): NCBI GI NO: 15224445 NR Description: phospholipid/glycerol acyltransferase family
  misc_feature (44)..(515): NCBI GI NO: 18481713 NR Description: hypothetical protein [Sorghum bicolor]
  misc_feature (51)..(514): NCBI GI NO: 31249749 NR Description: hypothetical protein
HFSILIIKTGPKEPETPKPKTLPLLHKMKTVSLVHKTEELANKTVVFDFEGTLLRSASLFPYFMLVAFEAGGLLRSLVLFVSYPLVWLVGEDQLGLKIMVFLTLFGIKKDTFRIGSAVLPKFFLENMGWEGFGAIMRCNKKVASSKLPRAMVEGFLKDYLGVEGVIARDIKSFKGYFLGLFEEKKENNTPTHIYDEATAGNDNTISITGSHIEYIDQELFPYFKKVCLMLSSEERRNWHVLPKERYPKPLIFHDGRLAFRPTPASSLAFFMWLPLGLFLSICRFTFGTALPFNLSAPVLAFSGTRTTLSRPQNPLSLVQNEENQKGMLYVCNHRTLLDPLYIAYVLDKPLSAVTYSLSRFNELVAPIRTIRLTRDRERDRETMDKLLSLGNLVVCPEGTTCREPYLLRFSPLFAELTDDIVPVAVDVKVSMFYGTTASGHKCLDPFFHFMNPNPTYFIKILDRVPLSETCLGGGRSRIEVANFVQREIGNALGFACTSLTRKDKYMILAGNEGVNEGPCHNCK

SEQ ID NO: 5868 - protein, 496 aa, Glycine max
  peptide (1)..(496): Ceres Seq. ID no. 15169266
  misc_feature (7)..(487): NCBI GI NO: 18378959 NR Description: phospholipid/glycerol acyltransferase family
  misc_feature (12)..(487): NCBI GI NO: 15235185 NR Description: phospholipid/glycerol acyltransferase family
  misc_feature (1)..(487): NCBI GI NO: 18390661 NR Description: phospholipid/glycerol acyltransferase family
  misc_feature (1)..(487): NCBI GI NO: 21618047 NR Description: unknown [Arabidopsis thaliana]
  misc_feature (11)..(487): NCBI GI NO: 34905450 NR Description: P0487H02.19
  misc_feature (17)..(486): NCBI GI NO: 34894812 NR Description: P0554D10.9
  misc_feature (10)..(486): NCBI GI NO: 38000002 NR Description: unknown protein
  misc_feature (11)..(486): NCBI GI NO: 15224445 NR Description: phospholipid/glycerol acyltransferase family
  misc_feature (17)..(488): NCBI GI NO: 18481713 NR Description: hypothetical protein [Sorghum bicolor]
  misc_feature (24)..(487): NCBI GI NO: 31249749 NR Description: hypothetical protein
MKTVSLVHKTEELANKTVVFDFEGTLLRSASLFPYFMLVAFEAGGLLRSLVLFVSYPLVWLVGEDQLGLKIMVFLTLFGIKKDTFRIGSAVLPKFFLENMGWEGFGAIMRCNKKVASSKLPRAMVEGFLKDYLGVEGVIARDIKSFKGYFLGLFEEKKENNTPTHIYDEATAGNDNTISITGSHIEYIDQELFPYFKKVCLMLSSEERRNWHVLPKERYPKPLIFHDGRLAFRPTPASSLAFFMWLPLGLFLSICRFTFGTALPFNLSAPVLAFSGTRTTLSRPQNPLSLVQNEENQKGMLYVCNHRTLLDPLYIAYVLDKPLSAVTYSLSRFNELVAPIRTIRLTRDRERDRETMDKLLSLGNLVVCPEGTTCREPYLLRFSPLFAELTDDIVPVAVDVKVSMFYGTTASGHKCLDPFFHFMNPNPTYFIKILDRVPLSETCLGGGRSRIEVANFVQREIGNALGFACTSLTRKDKYMILAGNEGVNEGPCHNCK

SEQ ID NO: 5869 - protein, 460 aa, Glycine max
  peptide (1)..(460): Ceres Seq. ID no. 15169267
  misc_feature (1)..(451): NCBI GI NO: 18378959 NR Description: phospholipid/glycerol acyltransferase family
  misc_feature (1)..(451): NCBI GI NO: 15235185 NR Description: phospholipid/glycerol acyltransferase family
  misc_feature (1)..(451): NCBI GI NO: 18390661 NR Description: phospholipid/glycerol acyltransferase family
  misc_feature (1)..(451): NCBI GI NO: 21618047 NR Description: unknown [Arabidopsis thaliana]
  misc_feature (1)..(451): NCBI GI NO: 34905450 NR Description: P0487H02.19
  misc_feature (1)..(450): NCBI GI NO: 34894812 NR Description: P0554D10.9
  misc_feature (1)..(450): NCBI GI NO: 38000002 NR Description: unknown protein
  misc_feature (1)..(450): NCBI GI NO: 15224445 NR Description: phospholipid/glycerol acyltransferase family
  misc_feature (1)..(452): NCBI GI NO: 18481713 NR Description: hypothetical protein [Sorghum bicolor]
  misc_feature (1)..(451): NCBI GI NO: 31249749 NR Description: hypothetical protein
MLVAFEAGGLLRSLVLFVSYPLVWLVGEDQLGLKIMVFLTLFGIKKDTFRIGSAVLPKFFLENMGWEGFGAIMRCNKKVASSKLPRAMVEGFLKDYLGVEGVIARDIKSFKGYFLGLFEEKKENNTPTHIYDEATAGNDNTISITGSHIEYIDQELFPYFKKVCLMLSSEERRNWHVLPKERYPKPLIFHDGRLAFRPTPASSLAFFMWLPLGLFLSICRFTFGTALPFNLSAPVLAFSGTRTTLSRPQNPLSLVQNEENQKGMLYVCNHRTLLDPLYIAYVLDKPLSAVTYSLSRFNELVAPIRTIRLTRDRERDRETMDKLLSLGNLVVCPEGTTCREPYLLRFSPLFAELTDDIVPVAVDVKVSMFYGTTASGHKCLDPFFHFMNPNPTYFIKILDRVPLSETCLGGGRSRIEVANFVQREIGNALGFACTSLTRKDKYMILAGNEGVNEGPCHNCK

SEQ ID NO: 5870 - DNA, 1330 bp, Glycine max
  misc_feature (1)..(1330): Ceres Seq. ID no. 15177137
acggactgatgctgttctgttggtgacgattgtatccacattgagacgaaatctgacgatgaaacgtggagcattattgtcagtgcttgcgttcgccttcgcggcggcgatctgggcggcgaacggcaacgacaacctcgtcccgcctaggcgggaagtgtacggcaatggccgaatattcgacatcagtcaccggtaccaacccgagatgccggaatgggaatcgaataacggcattgggcagttcctgtggcttcccaagagcatgaagaacggttccctcgccaacaactccgaaatgaaactcccaacacacaccggcacgcatgtcgacgcccccggccacgtgttcgaccactacttcgatgccggcttcgatgtcgacaccctcgacttggacatcctcaacggacctgctctattagttgatgttccaagagatagtaatataactgctcaagttatgaagtcgttgaatattccaaggggtgttgtacgtgttctcttccgaacgttaaataccgacaggcggcttatgtttcagaaggaatgggacacaagctatgtaggattcacagttgatggagctaagtggctagtggataacacggatatcaaacttgttggaattgattacctatctgttgcttcttatgattacttgattccatctcaccttgtttttctaaaagacagggagatcattctcgtggaaggcttgaagcttgatgatgttccagcaggattatattcagtccattgcttacctcttaggttggctggtgctgagggatcaccaatacggtgcattctgattaaaaattagggaaacagtgctgtttcaaagtagtttttgcatttgcagagcaagagggatgcatcaatctttgcaatacttgaatttggttctcttttgtctgctaggctggaactgataaattggcatagtggtgtggtgtccttatggagcaagatagtttcaatgttgtgcatcaacttttgtggcttacgtttacacttgttaaaaacatgcataagcacttcaagaaatcattttgaaatggaaaataatgtatatatagataatttgcacgtagcattagcacttcgagaaagatgcaatggaataagttggcacaatggtgtgtctttgtggagcaagattagtaatgtttgttaactttagtggctcatgtgtacacttattcttgtttcctagtacagaattgcaactttcgttttgggcttgtttcaatagttagtccatcatagagcaccatgtacttgaaagttgatggattgaagatcaaggtgggattgttattactag

SEQ ID NO: 5871 - protein, 274 aa, Glycine max
  peptide (1)..(274): Ceres Seq. ID no. 15177138
  misc_feature (59)..(259): Pfam Name: Pfam Description:  Putative cyclase
  misc_feature (44)..(272): NCBI GI NO: 18418598 NR Description: expressed protein [Arabidopsis thaliana]
  misc_feature (47)..(273): NCBI GI NO: 35215089 NR Description: hypothetical protein
  misc_feature (20)..(273): NCBI GI NO: 18418393 NR Description: expressed protein [Arabidopsis thaliana]
  misc_feature (5)..(273): NCBI GI NO: 15219416 NR Description: hypothetical protein [Arabidopsis thaliana]
  misc_feature (20)..(236): NCBI GI NO: 7486287 NR Description: hypothetical protein F28A23
  misc_feature (44)..(151): NCBI GI NO: 7486023 NR Description: hypothetical protein F23E12
  misc_feature (59)..(271): NCBI GI NO: 16330650 NR Description: hypothetical protein [Synechocystis sp. PCC 6803]
  misc_feature (58)..(274): NCBI GI NO: 23016903 NR Description: hypothetical protein
  misc_feature (58)..(271): NCBI GI NO: 39998438 NR Description: cyclase, putative [Geobacter sulfurreducens PCA]
  misc_feature (59)..(271): NCBI GI NO: 23056289 NR Description: hypothetical protein [Geobacter metallireducens]
RTDAVLLVTIVSTLRRNLTMKRGALLSVLAFAFAAAIWAANGNDNLVPPRREVYGNGRIFDISHRYQPEMPEWESNNGIGQFLWLPKSMKNGSLANNSEMKLPTHTGTHVDAPGHVFDHYFDAGFDVDTLDLDILNGPALLVDVPRDSNITAQVMKSLNIPRGVVRVLFRTLNTDRRLMFQKEWDTSYVGFTVDGAKWLVDNTDIKLVGIDYLSVASYDYLIPSHLVFLKDREIILVEGLKLDDVPAGLYSVHCLPLRLAGAEGSPIRCILIKN

SEQ ID NO: 5872 - protein, 255 aa, Glycine max
  peptide (1)..(255): Ceres Seq. ID no. 15177139
  misc_feature (40)..(240): Pfam Name: Pfam Description:  Putative cyclase
  misc_feature (25)..(253): NCBI GI NO: 18418598 NR Description: expressed protein [Arabidopsis thaliana]
  misc_feature (28)..(254): NCBI GI NO: 35215089 NR Description: hypothetical protein
  misc_feature (1)..(254): NCBI GI NO: 18418393 NR Description: expressed protein [Arabidopsis thaliana]
  misc_feature (1)..(254): NCBI GI NO: 15219416 NR Description: hypothetical protein [Arabidopsis thaliana]
  misc_feature (1)..(217): NCBI GI NO: 7486287 NR Description: hypothetical protein F28A23
  misc_feature (25)..(132): NCBI GI NO: 7486023 NR Description: hypothetical protein F23E12
  misc_feature (40)..(252): NCBI GI NO: 16330650 NR Description: hypothetical protein [Synechocystis sp. PCC 6803]
  misc_feature (39)..(255): NCBI GI NO: 23016903 NR Description: hypothetical protein
  misc_feature (39)..(252): NCBI GI NO: 39998438 NR Description: cyclase, putative [Geobacter sulfurreducens PCA]
  misc_feature (40)..(252): NCBI GI NO: 23056289 NR Description: hypothetical protein [Geobacter metallireducens]
MKRGALLSVLAFAFAAAIWAANGNDNLVPPRREVYGNGRIFDISHRYQPEMPEWESNNGIGQFLWLPKSMKNGSLANNSEMKLPTHTGTHVDAPGHVFDHYFDAGFDVDTLDLDILNGPALLVDVPRDSNITAQVMKSLNIPRGVVRVLFRTLNTDRRLMFQKEWDTSYVGFTVDGAKWLVDNTDIKLVGIDYLSVASYDYLIPSHLVFLKDREIILVEGLKLDDVPAGLYSVHCLPLRLAGAEGSPIRCILIKN

SEQ ID NO: 5873 - protein, 205 aa, Glycine max
  peptide (1)..(205): Ceres Seq. ID no. 15177140
  misc_feature (1)..(190): Pfam Name: Pfam Description:  Putative cyclase
  misc_feature (1)..(203): NCBI GI NO: 18418598 NR Description: expressed protein [Arabidopsis thaliana]
  misc_feature (1)..(204): NCBI GI NO: 35215089 NR Description: hypothetical protein
  misc_feature (1)..(204): NCBI GI NO: 18418393 NR Description: expressed protein [Arabidopsis thaliana]
  misc_feature (1)..(204): NCBI GI NO: 15219416 NR Description: hypothetical protein [Arabidopsis thaliana]
  misc_feature (1)..(167): NCBI GI NO: 7486287 NR Description: hypothetical protein F28A23
  misc_feature (1)..(82): NCBI GI NO: 7486023 NR Description: hypothetical protein F23E12
  misc_feature (1)..(202): NCBI GI NO: 16330650 NR Description: hypothetical protein [Synechocystis sp. PCC 6803]
  misc_feature (1)..(205): NCBI GI NO: 23016903 NR Description: hypothetical protein
  misc_feature (1)..(202): NCBI GI NO: 39998438 NR Description: cyclase, putative [Geobacter sulfurreducens PCA]
  misc_feature (1)..(202): NCBI GI NO: 23056289 NR Description: hypothetical protein [Geobacter metallireducens]
MPEWESNNGIGQFLWLPKSMKNGSLANNSEMKLPTHTGTHVDAPGHVFDHYFDAGFDVDTLDLDILNGPALLVDVPRDSNITAQVMKSLNIPRGVVRVLFRTLNTDRRLMFQKEWDTSYVGFTVDGAKWLVDNTDIKLVGIDYLSVASYDYLIPSHLVFLKDREIILVEGLKLDDVPAGLYSVHCLPLRLAGAEGSPIRCILIKN

SEQ ID NO: 5874 - DNA, 1371 bp, Glycine max
  misc_feature (1)..(1371): Ceres Seq. ID no. 15170956
gaagaagaagaagaatggaagagaagcagagagtgataatagtgggagcagggccttcggggatatcggcggcagcatgcttcacgaaacagtcgattccgtacataatcctggagagggaagactgttccgcttccctgtggaagaaatattcatacgagcgcctccacctccacctcaggaaacagtactgccagcttccccacaaacccttcccagcatcttttcctccctacgttcccaagaagcagttcttgcagtacctggacgactacgtctcccacttcggaatcacgccgctgtaccgaagaaccgtggagctggccgagtacgaccagggctgccacaactggagggtcatggccctcaacggggactccggtcagctcgaggagtaccgtgggaggtttctggtggtggccactggtgaaaccactgacccttttgtgccggagcttcaaggcctcagtggctttcctgggaagctcattcattccactgggtttcgttctgggaaggatttcaaagatcagcatgttcttgttgttggatcggggaattctggcatggaaatcgcattggaccttgtcaaccatggtgccaaaacttccattctcgttaggagcccggttcattttctatcaagggagatggtgagtttggggttgtttctgttgaaatatttgtcgttgagcaccgtggactcgctgatggtgatgcttagtacaatgatttacggggatgtgaccaaatatggggttgcaaggcccaatgagggtcccttttatatgaaggtcaagtatggaaagtacccagttattgacgttggaacctataaaaaaatcaagtctggagaattgaaggttttgccatcagaaatagaaagcctaagaggcaaggatgtcctattcaagaatggtgagtcgcacccatttgactccattgttttctgcaccggcttcaagagatcaaccaacaagtggcttaagggggatgattaccttctgaatgatgagggtcttccgaagccgagttacccgatccattggaagggaaataatggtttgtactgcgttgggctatcaaggagaggcttctatggcgctgccgcagatgctgaaaatatagcaaatgatgtaagctccttcacgcagcatccatgtccctgagaagtgagaacaaactacaagaccaacgacagttttgctgctgcaagtttttgaaacataattattacgacatatcatggcttcgcagattgccctgttagctgccattgctgctagctagagggacaacaatataatctccaaataatactatgagctctgtatattaagagtctctaacaattaattatttataaatgtc

SEQ ID NO: 5875 - protein, 388 aa, Glycine max
  peptide (1)..(388): Ceres Seq. ID no. 15170957
  misc_feature (12)..(356): Pfam Name: Pfam Description:  Pyridine nucleotide-disulphide oxidoreductase
  misc_feature (6)..(380): NCBI GI NO: 6539579 NR Description: unnamed protein product
  misc_feature (11)..(381): NCBI GI NO: 15221995 NR Description: flavin-containing monooxygenase (FMO)-related
  misc_feature (7)..(387): NCBI GI NO: 6979340 NR Description: hypothetical protein
  misc_feature (6)..(380): NCBI GI NO: 6539582 NR Description: unnamed protein product
  misc_feature (11)..(379): NCBI GI NO: 6979339 NR Description: hypothetical protein
  misc_feature (6)..(381): NCBI GI NO: 15218988 NR Description: flavin-containing monooxygenase (FMO) family
  misc_feature (2)..(381): NCBI GI NO: 15240026 NR Description: flavin-containing monooxygenase (FMO) family
  misc_feature (12)..(381): NCBI GI NO: 15219767 NR Description: flavin-containing monooxygenase (FMO/YUCCA3)
  misc_feature (12)..(379): NCBI GI NO: 15235652 NR Description: flavin-containing monooxygenase (FMO/YUCCA2)
  misc_feature (12)..(384): NCBI GI NO: 15235409 NR Description: flavin-containing monooxygenase (FMO) family
RRRRMEEKQRVIIVGAGPSGISAAACFTKQSIPYIILEREDCSASLWKKYSYERLHLHLRKQYCQLPHKPFPASFPPYVPKKQFLQYLDDYVSHFGITPLYRRTVELAEYDQGCHNWRVMALNGDSGQLEEYRGRFLVVATGETTDPFVPELQGLSGFPGKLIHSTGFRSGKDFKDQHVLVVGSGNSGMEIALDLVNHGAKTSILVRSPVHFLSREMVSLGLFLLKYLSLSTVDSLMVMLSTMIYGDVTKYGVARPNEGPFYMKVKYGKYPVIDVGTYKKIKSGELKVLPSEIESLRGKDVLFKNGESHPFDSIVFCTGFKRSTNKWLKGDDYLLNDEGLPKPSYPIHWKGNNGLYCVGLSRRGFYGAAADAENIANDVSSFTQHPCP

SEQ ID NO: 5876 - protein, 384 aa, Glycine max
  peptide (1)..(384): Ceres Seq. ID no. 15170958
  misc_feature (8)..(352): Pfam Name: Pfam Description:  Pyridine nucleotide-disulphide oxidoreductase
  misc_feature (2)..(376): NCBI GI NO: 6539579 NR Description: unnamed protein product
  misc_feature (7)..(377): NCBI GI NO: 15221995 NR Description: flavin-containing monooxygenase (FMO)-related
  misc_feature (3)..(383): NCBI GI NO: 6979340 NR Description: hypothetical protein
  misc_feature (2)..(376): NCBI GI NO: 6539582 NR Description: unnamed protein product
  misc_feature (7)..(375): NCBI GI NO: 6979339 NR Description: hypothetical protein
  misc_feature (2)..(377): NCBI GI NO: 15218988 NR Description: flavin-containing monooxygenase (FMO) family
  misc_feature (1)..(377): NCBI GI NO: 15240026 NR Description: flavin-containing monooxygenase (FMO) family
  misc_feature (8)..(377): NCBI GI NO: 15219767 NR Description: flavin-containing monooxygenase (FMO/YUCCA3)
  misc_feature (8)..(375): NCBI GI NO: 15235652 NR Description: flavin-containing monooxygenase (FMO/YUCCA2)
  misc_feature (8)..(380): NCBI GI NO: 15235409 NR Description: flavin-containing monooxygenase (FMO) family
MEEKQRVIIVGAGPSGISAAACFTKQSIPYIILEREDCSASLWKKYSYERLHLHLRKQYCQLPHKPFPASFPPYVPKKQFLQYLDDYVSHFGITPLYRRTVELAEYDQGCHNWRVMALNGDSGQLEEYRGRFLVVATGETTDPFVPELQGLSGFPGKLIHSTGFRSGKDFKDQHVLVVGSGNSGMEIALDLVNHGAKTSILVRSPVHFLSREMVSLGLFLLKYLSLSTVDSLMVMLSTMIYGDVTKYGVARPNEGPFYMKVKYGKYPVIDVGTYKKIKSGELKVLPSEIESLRGKDVLFKNGESHPFDSIVFCTGFKRSTNKWLKGDDYLLNDEGLPKPSYPIHWKGNNGLYCVGLSRRGFYGAAADAENIANDVSSFTQHPCP

SEQ ID NO: 5877 - protein, 269 aa, Glycine max
  peptide (1)..(269): Ceres Seq. ID no. 15170959
  misc_feature (1)..(237): Pfam Name: Pfam Description:  Pyridine nucleotide-disulphide oxidoreductase
  misc_feature (1)..(261): NCBI GI NO: 6539579 NR Description: unnamed protein product
  misc_feature (1)..(262): NCBI GI NO: 15221995 NR Description: flavin-containing monooxygenase (FMO)-related
  misc_feature (1)..(268): NCBI GI NO: 6979340 NR Description: hypothetical protein
  misc_feature (1)..(261): NCBI GI NO: 6539582 NR Description: unnamed protein product
  misc_feature (1)..(260): NCBI GI NO: 6979339 NR Description: hypothetical protein
  misc_feature (1)..(262): NCBI GI NO: 15218988 NR Description: flavin-containing monooxygenase (FMO) family
  misc_feature (1)..(262): NCBI GI NO: 15240026 NR Description: flavin-containing monooxygenase (FMO) family
  misc_feature (1)..(262): NCBI GI NO: 15219767 NR Description: flavin-containing monooxygenase (FMO/YUCCA3)
  misc_feature (1)..(260): NCBI GI NO: 15235652 NR Description: flavin-containing monooxygenase (FMO/YUCCA2)
  misc_feature (1)..(265): NCBI GI NO: 15235409 NR Description: flavin-containing monooxygenase (FMO) family
MALNGDSGQLEEYRGRFLVVATGETTDPFVPELQGLSGFPGKLIHSTGFRSGKDFKDQHVLVVGSGNSGMEIALDLVNHGAKTSILVRSPVHFLSREMVSLGLFLLKYLSLSTVDSLMVMLSTMIYGDVTKYGVARPNEGPFYMKVKYGKYPVIDVGTYKKIKSGELKVLPSEIESLRGKDVLFKNGESHPFDSIVFCTGFKRSTNKWLKGDDYLLNDEGLPKPSYPIHWKGNNGLYCVGLSRRGFYGAAADAENIANDVSSFTQHPCP

SEQ ID NO: 5878 - DNA, 1597 bp, Glycine max
  misc_feature (1)..(1597): Ceres Seq. ID no. 14308803
ggcagctgagacactgcaaaaagagttatatagagagagaaaagaaaaatgcactgacacagtgacacagtggttctctcacctctccttctctgtgtaactctgccaccatcttcatttccccaagagaaaaagaaaaaggaaaagaaaaaaactgttcaacttttttttaactgaatcaatcactagcttccatttcttcacaggtggaactgtgaatgtgcaccacagctttttgatcctgttcctaaaattttcctgtgaaagattctgaaggcaattgaagtaaatgccatggatcgtggggaccaaatggcgttatccgggtcttactatatgcagcaaagaggaatacctggatctggagcaccacctgagttacatatttcgcctaatatgcgtccaatctctaatccaaatttaccatttcaatccagcattggtggtggtaccattggatccacattgccattggaatcttcagcaatttcagctcatggtgtcaatgtgggagctcctactggggcacctccaggggaacctgttaagaggaagagaggaaggcctaggaaatatggaaccgacggaagtgtgtcattggcattgactccaactccaacatcatctagctatcctggagccttgacacaaagccagaaacggggcagagggcgcccacccgggactgggaagaaacagcaattggcttcgcttggtgaattgatgtctggttcagctgggatgggattcactcctcatataatcaatattgcaagtggagaagacattacaacaaaaatcatggcattttctcagcagggagctagagctgtatgcattttgtcagccaatggtgctgtctctactgtcacacttcgtcagccatcaacttcaggtggcactgtcacatacgaggggcgctttgagatagtgtgtctgtcaggctcttacttggtcaccgataatggtggctcacgcaatcgaactggtggattgagtgtgtcccttgctagtcctgatggtcgtgtcattggtggtggagttggtggagtgcttattgcatcaagtcctgttcaggtggtagttgggagttttctatggggtggatcaaagacaaagaacaagaaaaaggaatcctcagaaggttcagaagttgctgtggagtcagatcaccagggagttcataatccagtttcactgaatagcagcatctcaccaaatcaaaaccttcctccaacccccccatctttaaatccttggtcgacatcgcgtccattggacatgcgtaattcccatgttgacatcgatttaatgcgtgggtgacacattgttgaatatacactagtgctgtgtatatatatttcagattcatggtcgctcatctaatttttgttgtagtagtaaaatgacagaatgggaagtaccaacagcagagtagagccagctgacttttgcaaattgataaatctcacttatatccatccacccttgatgattattgacttggggttgtactcatatttttgtagctgtgaggaattttcaatttgaaggttgtatgttcctgattggtaatgatacaatttgtcttattttg

SEQ ID NO: 5879 - protein, 342 aa, Glycine max
  peptide (1)..(342): Ceres Seq. ID no. 14308804
  misc_feature (1)..(342): NCBI GI NO: 15225902 NR Description: AT-hook DNA-binding protein -related
  misc_feature (1)..(342): NCBI GI NO: 30695388 NR Description: DNA-binding protein -related
  misc_feature (7)..(342): NCBI GI NO: 11281387 NR Description: probable DNA-binding protein - Arabidopsis thaliana
  misc_feature (1)..(342): NCBI GI NO: 7488825 NR Description: probable DNA-binding protein - garden pea
  misc_feature (1)..(331): NCBI GI NO: 2213534 NR Description: DNA-binding PD1-like protein [Pisum sativum]
  misc_feature (22)..(342): NCBI GI NO: 30696854 NR Description: DNA-binding protein -related
  misc_feature (19)..(342): NCBI GI NO: 6633838 NR Description: F2K11.15 [Arabidopsis thaliana]
  misc_feature (23)..(339): NCBI GI NO: 22328578 NR Description: DNA-binding protein -related
  misc_feature (1)..(342): NCBI GI NO: 22330402 NR Description: DNA-binding protein -related
  misc_feature (23)..(334): NCBI GI NO: 15235790 NR Description: DNA binding protein -related
MDRGDQMALSGSYYMQQRGIPGSGAPPELHISPNMRPISNPNLPFQSSIGGGTIGSTLPLESSAISAHGVNVGAPTGAPPGEPVKRKRGRPRKYGTDGSVSLALTPTPTSSSYPGALTQSQKRGRGRPPGTGKKQQLASLGELMSGSAGMGFTPHIINIASGEDITTKIMAFSQQGARAVCILSANGAVSTVTLRQPSTSGGTVTYEGRFEIVCLSGSYLVTDNGGSRNRTGGLSVSLASPDGRVIGGGVGGVLIASSPVQVVVGSFLWGGSKTKNKKKESSEGSEVAVESDHQGVHNPVSLNSSISPNQNLPPTPPSLNPWSTSRPLDMRNSHVDIDLMRG

SEQ ID NO: 5880 - protein, 336 aa, Glycine max
  peptide (1)..(336): Ceres Seq. ID no. 14308805
  misc_feature (1)..(336): NCBI GI NO: 15225902 NR Description: AT-hook DNA-binding protein -related
  misc_feature (1)..(336): NCBI GI NO: 30695388 NR Description: DNA-binding protein -related
  misc_feature (1)..(336): NCBI GI NO: 11281387 NR Description: probable DNA-binding protein - Arabidopsis thaliana
  misc_feature (1)..(336): NCBI GI NO: 7488825 NR Description: probable DNA-binding protein - garden pea
  misc_feature (1)..(325): NCBI GI NO: 2213534 NR Description: DNA-binding PD1-like protein [Pisum sativum]
  misc_feature (16)..(336): NCBI GI NO: 30696854 NR Description: DNA-binding protein -related
  misc_feature (13)..(336): NCBI GI NO: 6633838 NR Description: F2K11.15 [Arabidopsis thaliana]
  misc_feature (17)..(333): NCBI GI NO: 22328578 NR Description: DNA-binding protein -related
  misc_feature (1)..(336): NCBI GI NO: 22330402 NR Description: DNA-binding protein -related
  misc_feature (17)..(328): NCBI GI NO: 15235790 NR Description: DNA binding protein -related
MALSGSYYMQQRGIPGSGAPPELHISPNMRPISNPNLPFQSSIGGGTIGSTLPLESSAISAHGVNVGAPTGAPPGEPVKRKRGRPRKYGTDGSVSLALTPTPTSSSYPGALTQSQKRGRGRPPGTGKKQQLASLGELMSGSAGMGFTPHIINIASGEDITTKIMAFSQQGARAVCILSANGAVSTVTLRQPSTSGGTVTYEGRFEIVCLSGSYLVTDNGGSRNRTGGLSVSLASPDGRVIGGGVGGVLIASSPVQVVVGSFLWGGSKTKNKKKESSEGSEVAVESDHQGVHNPVSLNSSISPNQNLPPTPPSLNPWSTSRPLDMRNSHVDIDLMRG

SEQ ID NO: 5881 - protein, 328 aa, Glycine max
  peptide (1)..(328): Ceres Seq. ID no. 14308806
  misc_feature (1)..(328): NCBI GI NO: 15225902 NR Description: AT-hook DNA-binding protein -related
  misc_feature (1)..(328): NCBI GI NO: 30695388 NR Description: DNA-binding protein -related
  misc_feature (1)..(328): NCBI GI NO: 11281387 NR Description: probable DNA-binding protein - Arabidopsis thaliana
  misc_feature (1)..(328): NCBI GI NO: 7488825 NR Description: probable DNA-binding protein - garden pea
  misc_feature (1)..(317): NCBI GI NO: 2213534 NR Description: DNA-binding PD1-like protein [Pisum sativum]
  misc_feature (8)..(328): NCBI GI NO: 30696854 NR Description: DNA-binding protein -related
  misc_feature (5)..(328): NCBI GI NO: 6633838 NR Description: F2K11.15 [Arabidopsis thaliana]
  misc_feature (9)..(325): NCBI GI NO: 22328578 NR Description: DNA-binding protein -related
  misc_feature (1)..(328): NCBI GI NO: 22330402 NR Description: DNA-binding protein -related
  misc_feature (9)..(320): NCBI GI NO: 15235790 NR Description: DNA binding protein -related
MQQRGIPGSGAPPELHISPNMRPISNPNLPFQSSIGGGTIGSTLPLESSAISAHGVNVGAPTGAPPGEPVKRKRGRPRKYGTDGSVSLALTPTPTSSSYPGALTQSQKRGRGRPPGTGKKQQLASLGELMSGSAGMGFTPHIINIASGEDITTKIMAFSQQGARAVCILSANGAVSTVTLRQPSTSGGTVTYEGRFEIVCLSGSYLVTDNGGSRNRTGGLSVSLASPDGRVIGGGVGGVLIASSPVQVVVGSFLWGGSKTKNKKKESSEGSEVAVESDHQGVHNPVSLNSSISPNQNLPPTPPSLNPWSTSRPLDMRNSHVDIDLMRG

SEQ ID NO: 5882 - DNA, 1198 bp, Glycine max
  misc_feature (1)..(1198): Ceres Seq. ID no. 14312408
atcatttcttttctcttgttatttgagtaacccattcattaatttccctaatcgaaatggagcagagggatcaaaaccaacggcccatggagtggtgtttagagattcattgggtggaagacacaaagtgtacctgaaggccgatccaaggaacgagataattgtttcagccggtgcacttggaagcccacaacttctaatgttgagtggaattggacccagagagcaccttaaagcccacaacatcagaataacattgaatcagccattagtaggacaggaaatgactgacaaccccatgaacgccatctttgtcccttctcctgtccccgtagaggtctctctgattgaggtggtgggcatcaccagttttggcagctacattgaagctgccagtggtgaaaactttgccggtggttctccaaaagactacggaatgttctcccccaagattgggcaactctccacggtgcctccaaaggaaaggaccccagaggccctggccaaggcaacagaactgatggaaactctagaacaagcagccttcagaggaggattcatattggaaaaaatcatgggtccaatctcaagcgggcatttggagctccgaacccgcgacccgaacgacaacccatcagtgaccttcaactacttccaggaccctcgagacttgcagcgatgcgtgcagggcctgagcaccgtggagaagataatcgagtccaaagctttctctcccttcagataccccaacatgccagtgcccgttctgctcaacctgaccgcaagtgcccccgttaacttgttgcccaagcacaccaattcttcactttctttggaacagtattgcagagacactgtcatgaccatttggcactaccacggtggctgccaagtagggaaggttcttgatagggactacaagcttcttggtgtggatgcactgcgtgttattgatggctccacctttaactactctcctggaactaatcctcaggccactgttatgatgcttggcaggtatatgggagtgaaaatattgagcgagagactaggtggtgcggctgctgctgctgaaacagagcaataagttgtatatttttcctttcaacaaagtgtcttcgtgtcactgaggaaaaacaaattcttgtgagaatgatttgtgaagtaacctttcaatgagaaaaataacaaattaaac

SEQ ID NO: 5883 - protein, 361 aa, Glycine max
  peptide (1)..(361): Ceres Seq. ID no. 14312409
  misc_feature (142)..(341): Pfam Name: Pfam Description:  GMC oxidoreductase
  misc_feature (19)..(351): NCBI GI NO: 38605946 NR Description: OSJNBa0019K04.7
  misc_feature (13)..(349): NCBI GI NO: 37536228 NR Description: putative mandelonitrile lyase
  misc_feature (13)..(349): NCBI GI NO: 11358959 NR Description: probable mandelonitrile lyase (EC 4.1.2.10)
  misc_feature (26)..(349): NCBI GI NO: 27452902 NR Description: Putative mandelonitrile lyase
  misc_feature (24)..(350): NCBI GI NO: 8778640 NR Description: F5O11.31 [Arabidopsis thaliana]
  misc_feature (24)..(350): NCBI GI NO: 17978954 NR Description: At1g12570/T12C24_9 [Arabidopsis thaliana]
  misc_feature (24)..(350): NCBI GI NO: 22329512 NR Description: glucose-methanol-choline
  misc_feature (24)..(350): NCBI GI NO: 9502391 NR Description: T12C24.11 [Arabidopsis thaliana]
  misc_feature (25)..(349): NCBI GI NO: 15242236 NR Description: glucose-methanol-choline
  misc_feature (22)..(354): NCBI GI NO: 37572986 NR Description: putative mandelonitrile lyase
SFLFSCYLSNPFINFPNRNGAEGSKPTAHGVVFRDSLGGRHKVYLKADPRNEIIVSAGALGSPQLLMLSGIGPREHLKAHNIRITLNQPLVGQEMTDNPMNAIFVPSPVPVEVSLIEVVGITSFGSYIEAASGENFAGGSPKDYGMFSPKIGQLSTVPPKERTPEALAKATELMETLEQAAFRGGFILEKIMGPISSGHLELRTRDPNDNPSVTFNYFQDPRDLQRCVQGLSTVEKIIESKAFSPFRYPNMPVPVLLNLTASAPVNLLPKHTNSSLSLEQYCRDTVMTIWHYHGGCQVGKVLDRDYKLLGVDALRVIDGSTFNYSPGTNPQATVMMLGRYMGVKILSERLGGAAAAAETEQ

SEQ ID NO: 5884 - protein, 295 aa, Glycine max
  peptide (1)..(295): Ceres Seq. ID no. 14312410
  misc_feature (76)..(275): Pfam Name: Pfam Description:  GMC oxidoreductase
  misc_feature (1)..(285): NCBI GI NO: 38605946 NR Description: OSJNBa0019K04.7
  misc_feature (1)..(283): NCBI GI NO: 37536228 NR Description: putative mandelonitrile lyase
  misc_feature (1)..(283): NCBI GI NO: 11358959 NR Description: probable mandelonitrile lyase (EC 4.1.2.10)
  misc_feature (1)..(283): NCBI GI NO: 27452902 NR Description: Putative mandelonitrile lyase
  misc_feature (1)..(284): NCBI GI NO: 8778640 NR Description: F5O11.31 [Arabidopsis thaliana]
  misc_feature (1)..(284): NCBI GI NO: 17978954 NR Description: At1g12570/T12C24_9 [Arabidopsis thaliana]
  misc_feature (1)..(284): NCBI GI NO: 22329512 NR Description: glucose-methanol-choline
  misc_feature (1)..(284): NCBI GI NO: 9502391 NR Description: T12C24.11 [Arabidopsis thaliana]
  misc_feature (1)..(283): NCBI GI NO: 15242236 NR Description: glucose-methanol-choline
  misc_feature (1)..(288): NCBI GI NO: 37572986 NR Description: putative mandelonitrile lyase
MLSGIGPREHLKAHNIRITLNQPLVGQEMTDNPMNAIFVPSPVPVEVSLIEVVGITSFGSYIEAASGENFAGGSPKDYGMFSPKIGQLSTVPPKERTPEALAKATELMETLEQAAFRGGFILEKIMGPISSGHLELRTRDPNDNPSVTFNYFQDPRDLQRCVQGLSTVEKIIESKAFSPFRYPNMPVPVLLNLTASAPVNLLPKHTNSSLSLEQYCRDTVMTIWHYHGGCQVGKVLDRDYKLLGVDALRVIDGSTFNYSPGTNPQATVMMLGRYMGVKILSERLGGAAAAAETEQ

SEQ ID NO: 5885 - protein, 267 aa, Glycine max
  peptide (1)..(267): Ceres Seq. ID no. 14312411
  misc_feature (48)..(247): Pfam Name: Pfam Description:  GMC oxidoreductase
  misc_feature (1)..(257): NCBI GI NO: 38605946 NR Description: OSJNBa0019K04.7
  misc_feature (1)..(255): NCBI GI NO: 37536228 NR Description: putative mandelonitrile lyase
  misc_feature (1)..(255): NCBI GI NO: 11358959 NR Description: probable mandelonitrile lyase (EC 4.1.2.10)
  misc_feature (1)..(255): NCBI GI NO: 27452902 NR Description: Putative mandelonitrile lyase
  misc_feature (1)..(256): NCBI GI NO: 8778640 NR Description: F5O11.31 [Arabidopsis thaliana]
  misc_feature (1)..(256): NCBI GI NO: 22329512 NR Description: glucose-methanol-choline
  misc_feature (1)..(256): NCBI GI NO: 17978954 NR Description: At1g12570/T12C24_9 [Arabidopsis thaliana]
  misc_feature (1)..(256): NCBI GI NO: 9502391 NR Description: T12C24.11 [Arabidopsis thaliana]
  misc_feature (1)..(255): NCBI GI NO: 15242236 NR Description: glucose-methanol-choline
  misc_feature (1)..(260): NCBI GI NO: 37572986 NR Description: putative mandelonitrile lyase
MTDNPMNAIFVPSPVPVEVSLIEVVGITSFGSYIEAASGENFAGGSPKDYGMFSPKIGQLSTVPPKERTPEALAKATELMETLEQAAFRGGFILEKIMGPISSGHLELRTRDPNDNPSVTFNYFQDPRDLQRCVQGLSTVEKIIESKAFSPFRYPNMPVPVLLNLTASAPVNLLPKHTNSSLSLEQYCRDTVMTIWHYHGGCQVGKVLDRDYKLLGVDALRVIDGSTFNYSPGTNPQATVMMLGRYMGVKILSERLGGAAAAAETEQ

SEQ ID NO: 5886 - DNA, 1100 bp, Glycine max
  misc_feature (1)..(1100): Ceres Seq. ID no. 15172291
ttatatataccaaaattgaattttatgcagcaaaaagtgatattgaaagtgaagcctatacttgaagaaagcatcaagaggttgtgttgcaccaattttaaaagtaagttgagggtggcggatttaggatgtgcttcgggaccaaatgcacttatggtcatggtacaagaaaggcgagatggagtaggtgcatgcgttgtcaatgcaacaccagggagcttttacggaagactctttccgaataattacattcacttctttcaatcttcctatagcctccattggctctcacaaacccctgaagagttgatcaagggagcaaaaccactaaacaagggaaacatttatataacaactacaagctctccaatagtctttaaagcatacttagagcaattccaaagagatttcagtttttttctaaaatcacgttcagatgaactaaaagttggtggcattatggtactaactttccaaggcagagaaaaagctcatgaaattactcatcctttagtggtgattgggatgctgctcaaagatatgatattagagggtttggttgaggagacaaagttggactcatttaacttgcctatatattttccaacgatggaggaagttagagaagttattgaagcagaaggatcttttaccctacaaacattgaaaactttcaaactgggttgggatgcaaaccttcaagatgaagttaatggttctcttcttgatagtaaaataagaggagagttcatagctaagtccatcagagttgtttttgaacccattttaactgttgaatttggcaatgagatcatggatgaattattctcaaggtttgcaactaagatttcacaactcatagagttcgaagcattggagtatacaaacttggtcatgtccatgggaaaagcataaagggaaggaggaagtgggtgtatgctttactaaagatatctacaattaatccaagtgggttgtatcatgaaatttacttgagctacacttcatcatgttcaatatcttgttagtctccatcttcaaatcaactttaaagtttgaatcttgtacatattgataattcccttgtacactctttaatt

SEQ ID NO: 5887 - protein, 304 aa, Glycine max
  peptide (1)..(304): Ceres Seq. ID no. 15172292
  misc_feature (63)..(303): Pfam Name: Pfam Description:  SAM dependent carboxyl methyltransferase
  misc_feature (63)..(303): NCBI GI NO: 13366161 NR Description: S-adenosyl-L-methionine: salicylic acid carboxylmethyltransferase
  misc_feature (7)..(54): NCBI GI NO: 13366161 NR Description: S-adenosyl-L-methionine: salicylic acid carboxylmethyltransferase
  misc_feature (57)..(303): NCBI GI NO: 13365749 NR Description: theobromine synthase [Coffea arabica]
  misc_feature (5)..(54): NCBI GI NO: 13365749 NR Description: theobromine synthase [Coffea arabica]
  misc_feature (57)..(303): NCBI GI NO: 26453381 NR Description: tentative caffeine synthase 4 [Coffea arabica]
  misc_feature (5)..(54): NCBI GI NO: 26453381 NR Description: tentative caffeine synthase 4 [Coffea arabica]
  misc_feature (57)..(303): NCBI GI NO: 26453379 NR Description: tentative caffeine synthase 3 [Coffea arabica]
  misc_feature (5)..(54): NCBI GI NO: 26453379 NR Description: tentative caffeine synthase 3 [Coffea arabica]
  misc_feature (60)..(303): NCBI GI NO: 28629497 NR Description: S-adenosyl-L-methionine:benzoic acid/ salicylic acidcarboxyl methyltransferase
  misc_feature (7)..(56): NCBI GI NO: 28629497 NR Description: S-adenosyl-L-methionine:benzoic acid/ salicylic acidcarboxyl methyltransferase
LYIPKLNFMQQKVILKVKPILEESIKRLCCTNFKSKLRVADLGCASGPNALMVMVQERRDGVGACVVNATPGSFYGRLFPNNYIHFFQSSYSLHWLSQTPEELIKGAKPLNKGNIYITTTSSPIVFKAYLEQFQRDFSFFLKSRSDELKVGGIMVLTFQGREKAHEITHPLVVIGMLLKDMILEGLVEETKLDSFNLPIYFPTMEEVREVIEAEGSFTLQTLKTFKLGWDANLQDEVNGSLLDSKIRGEFIAKSIRVVFEPILTVEFGNEIMDELFSRFATKISQLIEFEALEYTNLVMSMGKA

SEQ ID NO: 5888 - protein, 296 aa, Glycine max
  peptide (1)..(296): Ceres Seq. ID no. 15172293
  misc_feature (55)..(295): Pfam Name: Pfam Description:  SAM dependent carboxyl methyltransferase
  misc_feature (55)..(295): NCBI GI NO: 13366161 NR Description: S-adenosyl-L-methionine: salicylic acid carboxylmethyltransferase
  misc_feature (1)..(46): NCBI GI NO: 13366161 NR Description: S-adenosyl-L-methionine: salicylic acid carboxylmethyltransferase
  misc_feature (49)..(295): NCBI GI NO: 13365749 NR Description: theobromine synthase [Coffea arabica]
  misc_feature (1)..(46): NCBI GI NO: 13365749 NR Description: theobromine synthase [Coffea arabica]
  misc_feature (49)..(295): NCBI GI NO: 26453381 NR Description: tentative caffeine synthase 4 [Coffea arabica]
  misc_feature (1)..(46): NCBI GI NO: 26453381 NR Description: tentative caffeine synthase 4 [Coffea arabica]
  misc_feature (49)..(295): NCBI GI NO: 26453379 NR Description: tentative caffeine synthase 3 [Coffea arabica]
  misc_feature (1)..(46): NCBI GI NO: 26453379 NR Description: tentative caffeine synthase 3 [Coffea arabica]
  misc_feature (52)..(295): NCBI GI NO: 28629497 NR Description: S-adenosyl-L-methionine:benzoic acid/ salicylic acidcarboxyl methyltransferase
  misc_feature (1)..(48): NCBI GI NO: 28629497 NR Description: S-adenosyl-L-methionine:benzoic acid/ salicylic acidcarboxyl methyltransferase
MQQKVILKVKPILEESIKRLCCTNFKSKLRVADLGCASGPNALMVMVQERRDGVGACVVNATPGSFYGRLFPNNYIHFFQSSYSLHWLSQTPEELIKGAKPLNKGNIYITTTSSPIVFKAYLEQFQRDFSFFLKSRSDELKVGGIMVLTFQGREKAHEITHPLVVIGMLLKDMILEGLVEETKLDSFNLPIYFPTMEEVREVIEAEGSFTLQTLKTFKLGWDANLQDEVNGSLLDSKIRGEFIAKSIRVVFEPILTVEFGNEIMDELFSRFATKISQLIEFEALEYTNLVMSMGKA

SEQ ID NO: 5889 - protein, 253 aa, Glycine max
  peptide (1)..(253): Ceres Seq. ID no. 15172294
  misc_feature (12)..(252): Pfam Name: Pfam Description:  SAM dependent carboxyl methyltransferase
  misc_feature (12)..(252): NCBI GI NO: 13366161 NR Description: S-adenosyl-L-methionine: salicylic acid carboxylmethyltransferase
  misc_feature (6)..(252): NCBI GI NO: 13365749 NR Description: theobromine synthase [Coffea arabica]
  misc_feature (6)..(252): NCBI GI NO: 26453381 NR Description: tentative caffeine synthase 4 [Coffea arabica]
  misc_feature (6)..(252): NCBI GI NO: 26453379 NR Description: tentative caffeine synthase 3 [Coffea arabica]
  misc_feature (9)..(252): NCBI GI NO: 28629497 NR Description: S-adenosyl-L-methionine:benzoic acid/ salicylic acidcarboxyl methyltransferase
  misc_feature (9)..(252): NCBI GI NO: 28629495 NR Description: S-adenosyl-L-methionine:benzoic acid/ salicylic acidcarboxyl methyltransferase
  misc_feature (6)..(252): NCBI GI NO: 20271026 NR Description: N-methyltransferase [Coffea canephora]
  misc_feature (12)..(252): NCBI GI NO: 9789277 NR Description: SAM:benzoic acid carboxyl methyltransferase
  misc_feature (7)..(234): NCBI GI NO: 8885604 NR Description: S-adenosyl-L-methionine: salicylic acid carboxylmethyltransferase-like
  misc_feature (7)..(234): NCBI GI NO: 15240823 NR Description: S-adenosyl-L-methionine: carboxyl methyltransferasefamily
MVMVQERRDGVGACVVNATPGSFYGRLFPNNYIHFFQSSYSLHWLSQTPEELIKGAKPLNKGNIYITTTSSPIVFKAYLEQFQRDFSFFLKSRSDELKVGGIMVLTFQGREKAHEITHPLVVIGMLLKDMILEGLVEETKLDSFNLPIYFPTMEEVREVIEAEGSFTLQTLKTFKLGWDANLQDEVNGSLLDSKIRGEFIAKSIRVVFEPILTVEFGNEIMDELFSRFATKISQLIEFEALEYTNLVMSMGKA

SEQ ID NO: 5890 - DNA, 1368 bp, Glycine max
  misc_feature (1)..(1368): Ceres Seq. ID no. 14310419
gacatccaaaaaacatgaaacgaaaccataatttccccttccaccaccggccacgcaagtgggcgatggtgatccccaccgtcacaatatgcttcctcctcctcttcctcccgctccttcccctcaccaaaccctcatcttcatcttcttctttttctgcgacatggtcttcttcttcgctgaatttaacggaagaactagaagtgggtgttccgagattggcgtacatgttgacggcgacgaaaggggagggggcgcagctgaagagggtccttcaggcagtgtaccatcccaggaactactacctgctccatctcgatctagaggcttctgatgcggagaggctggagctggccaaatacgtcaagtccgagactgtgcttgcggcgtttgggaacgtcttggtggtgggtaagcctgatttggtcacctacaagggccccaccatgattgcttctactcttcacggtattgcccttttgctcaagagggccccacactgggactggttaatcaatctcagcgcctctgattatcctctcctctcccaggacgatatcttgcacatcttttcattcttgcccagggatctaaatttcattgagcatacaagtaatattggttggaaagagcatcaaagagctaggcctatcattatagatccaggcttatatcattcaaagaaatctggtgtttactgggctaaagagaagagatctgttccatcttcgttcaagttattcacagggtctgcatgggttgtcctgacaaaatcatttcttgagttttgtgtttggggttgggataatcttcctcgaactctccttatgtattacacaaattttctttcatcccctgagggttacttccatacggtcatttgcaatcataaggactatcaaaacacaaccattaatcatgatttacgttacataaggtgggacaacccgccaaagcagcatccagttttcttgaaattggagcattttgatgacatggtccatagtggtgcaccttttgctcgaaagtttaccaaggatgatccagttctcaacaaaattgataaggaacttttgagaagatcagatggtcactttacaccgggaggttggtgtattggcaatcctcttttgggaaaagatccttgtgctgtttatggaaatccaattgtagttaaacctaccttacaatcaaagaagctagaaaaactaatagtgaaactattagattctgaaaattttaggccgaaacaatgtaaatagtagtcactctgcaacgtgaaatttttatacacaattctattggcatttttaatgcgtcgtctgttcaaatttaacattatgaattgttatgaaacatctttctagc

SEQ ID NO: 5891 - protein, 419 aa, Glycine max
  peptide (1)..(419): Ceres Seq. ID no. 14310420
  misc_feature (74)..(298): Pfam Name: Pfam Description:  Core-2/I-Branching enzyme
  misc_feature (5)..(362): NCBI GI NO: 18404468 NR Description: N-acetylglucosaminyltransferase family
  misc_feature (376)..(419): NCBI GI NO: 18404468 NR Description: N-acetylglucosaminyltransferase family
  misc_feature (18)..(419): NCBI GI NO: 15242199 NR Description: N-acetylglucosaminyltransferase family
  misc_feature (43)..(362): NCBI GI NO: 7485441 NR Description: probable RING zinc finger protein
  misc_feature (376)..(419): NCBI GI NO: 7485441 NR Description: probable RING zinc finger protein
  misc_feature (1)..(419): NCBI GI NO: 15242532 NR Description: N-acetylglucosaminyltransferase family
  misc_feature (18)..(418): NCBI GI NO: 15218824 NR Description: N-acetylglucosaminyltransferase family
  misc_feature (3)..(418): NCBI GI NO: 15236287 NR Description: N-acetylglucosaminyltransferase family
  misc_feature (70)..(419): NCBI GI NO: 15146308 NR Description: AT3g15350/K7L4_15 [Arabidopsis thaliana]
  misc_feature (70)..(419): NCBI GI NO: 18400725 NR Description: N-acetylglucosaminyltransferase family
HPKNMKRNHNFPFHHRPRKWAMVIPTVTICFLLLFLPLLPLTKPSSSSSSFSATWSSSSLNLTEELEVGVPRLAYMLTATKGEGAQLKRVLQAVYHPRNYYLLHLDLEASDAERLELAKYVKSETVLAAFGNVLVVGKPDLVTYKGPTMIASTLHGIALLLKRAPHWDWLINLSASDYPLLSQDDILHIFSFLPRDLNFIEHTSNIGWKEHQRARPIIIDPGLYHSKKSGVYWAKEKRSVPSSFKLFTGSAWVVLTKSFLEFCVWGWDNLPRTLLMYYTNFLSSPEGYFHTVICNHKDYQNTTINHDLRYIRWDNPPKQHPVFLKLEHFDDMVHSGAPFARKFTKDDPVLNKIDKELLRRSDGHFTPGGWCIGNPLLGKDPCAVYGNPIVVKPTLQSKKLEKLIVKLLDSENFRPKQCK

SEQ ID NO: 5892 - protein, 415 aa, Glycine max
  peptide (1)..(415): Ceres Seq. ID no. 14310421
  misc_feature (70)..(294): Pfam Name: Pfam Description:  Core-2/I-Branching enzyme
  misc_feature (1)..(358): NCBI GI NO: 18404468 NR Description: N-acetylglucosaminyltransferase family
  misc_feature (372)..(415): NCBI GI NO: 18404468 NR Description: N-acetylglucosaminyltransferase family
  misc_feature (14)..(415): NCBI GI NO: 15242199 NR Description: N-acetylglucosaminyltransferase family
  misc_feature (39)..(358): NCBI GI NO: 7485441 NR Description: probable RING zinc finger protein
  misc_feature (372)..(415): NCBI GI NO: 7485441 NR Description: probable RING zinc finger protein
  misc_feature (1)..(415): NCBI GI NO: 15242532 NR Description: N-acetylglucosaminyltransferase family
  misc_feature (14)..(414): NCBI GI NO: 15218824 NR Description: N-acetylglucosaminyltransferase family
  misc_feature (1)..(414): NCBI GI NO: 15236287 NR Description: N-acetylglucosaminyltransferase family
  misc_feature (66)..(415): NCBI GI NO: 15146308 NR Description: AT3g15350/K7L4_15 [Arabidopsis thaliana]
  misc_feature (66)..(415): NCBI GI NO: 18400725 NR Description: N-acetylglucosaminyltransferase family
MKRNHNFPFHHRPRKWAMVIPTVTICFLLLFLPLLPLTKPSSSSSSFSATWSSSSLNLTEELEVGVPRLAYMLTATKGEGAQLKRVLQAVYHPRNYYLLHLDLEASDAERLELAKYVKSETVLAAFGNVLVVGKPDLVTYKGPTMIASTLHGIALLLKRAPHWDWLINLSASDYPLLSQDDILHIFSFLPRDLNFIEHTSNIGWKEHQRARPIIIDPGLYHSKKSGVYWAKEKRSVPSSFKLFTGSAWVVLTKSFLEFCVWGWDNLPRTLLMYYTNFLSSPEGYFHTVICNHKDYQNTTINHDLRYIRWDNPPKQHPVFLKLEHFDDMVHSGAPFARKFTKDDPVLNKIDKELLRRSDGHFTPGGWCIGNPLLGKDPCAVYGNPIVVKPTLQSKKLEKLIVKLLDSENFRPKQCK

SEQ ID NO: 5893 - protein, 398 aa, Glycine max
  peptide (1)..(398): Ceres Seq. ID no. 14310422
  misc_feature (53)..(277): Pfam Name: Pfam Description:  Core-2/I-Branching enzyme
  misc_feature (1)..(341): NCBI GI NO: 18404468 NR Description: N-acetylglucosaminyltransferase family
  misc_feature (355)..(398): NCBI GI NO: 18404468 NR Description: N-acetylglucosaminyltransferase family
  misc_feature (1)..(398): NCBI GI NO: 15242199 NR Description: N-acetylglucosaminyltransferase family
  misc_feature (22)..(341): NCBI GI NO: 7485441 NR Description: probable RING zinc finger protein
  misc_feature (355)..(398): NCBI GI NO: 7485441 NR Description: probable RING zinc finger protein
  misc_feature (1)..(398): NCBI GI NO: 15242532 NR Description: N-acetylglucosaminyltransferase family
  misc_feature (1)..(397): NCBI GI NO: 15218824 NR Description: N-acetylglucosaminyltransferase family
  misc_feature (1)..(397): NCBI GI NO: 15236287 NR Description: N-acetylglucosaminyltransferase family
  misc_feature (49)..(398): NCBI GI NO: 15146308 NR Description: AT3g15350/K7L4_15 [Arabidopsis thaliana]
  misc_feature (49)..(398): NCBI GI NO: 18400725 NR Description: N-acetylglucosaminyltransferase family
MVIPTVTICFLLLFLPLLPLTKPSSSSSSFSATWSSSSLNLTEELEVGVPRLAYMLTATKGEGAQLKRVLQAVYHPRNYYLLHLDLEASDAERLELAKYVKSETVLAAFGNVLVVGKPDLVTYKGPTMIASTLHGIALLLKRAPHWDWLINLSASDYPLLSQDDILHIFSFLPRDLNFIEHTSNIGWKEHQRARPIIIDPGLYHSKKSGVYWAKEKRSVPSSFKLFTGSAWVVLTKSFLEFCVWGWDNLPRTLLMYYTNFLSSPEGYFHTVICNHKDYQNTTINHDLRYIRWDNPPKQHPVFLKLEHFDDMVHSGAPFARKFTKDDPVLNKIDKELLRRSDGHFTPGGWCIGNPLLGKDPCAVYGNPIVVKPTLQSKKLEKLIVKLLDSENFRPKQCK

SEQ ID NO: 5894 - DNA, 1440 bp, Glycine max
  misc_feature (1)..(1440): Ceres Seq. ID no. 13638058
aattgattgatactgcaatctcaacctgcctgaaagaaagcaagcctgtgtacataagcataagttgtaacttgcctggcattcctcaccccacattcagtcgcgagccggttccattttctctgtctccaagattgagtaacaagatggggttggaggctgcagtggaagcagcagcagagttcctaaacaaggcagtgaagcctgtaatggttggaggtcctaaactaagggtggctaatgcatgtgatgcatttgttgagcttgctgatgcatgtggctatccatttgctgtgatgccatcagccaagggactagtcccggagcacaaaccccacttcattggcacattctggggtgctgtgagcaccgcattctgtgctgaaatcgtcgaatctgctgatgcatacttgtttgctggccccattttcaatgactacagctctgttgggtactcactcctcctcaagaaggagaaggccatcatcgtgcagccggagcgcgttgtgatctccaatggacccgcattcgggtgtgtcctcatgaaggacttcctcagggaactcgcaaagcgtctcaagcacaacaacactgcttatgaaaattactcaaggatttttgtccctgagggaaagcctgtgaaagctgaacccagagagcctttgagggttaatgttctgtttaagcatatacaagatatgctgtctggcgaaaccgcggtgattgctgagacaggggactcttggtttaactgccagaagctgaagttgccaaaggggtgtgggtatgagttccaaatgcaatatggttcaattggttggtctgttggtgctacacttggttatgctcaggcggttcctgagaagcgagtgatttcttgcattggtgatggaagctttcaggtgacagctcaggatgtgtccacaatgctgcgaaatgagcagaagaccatcatcttcctgataaacaatggtggatacaccattgaagttgaaattcatgatgggccatacaatgtgattaagaactggaactacactggcttggttgatgcaatccacaatggtgaaggaaaatgctggaccactaaggttacatgtgaagaggagcttgttgaggcaattcagacagcaacaggtgacaagaaagattgcttgtgcttcattgaagtgattgttcacaaggatgacacaagcaaagaattgcttgaatggggctcaagggtttgtgctgctaacggtcgtcctcccaatcctcagtgaatttcaaacacttaattgagccattacaaatttgctggagtttctccctatttcaaacacttactcttgctgatagaaaaaagaaaatagaacaatttaatttcatgttttatttaacaaagacaataactaccatgagatttacttatatttatttttaaataaaattgagtttttt

SEQ ID NO: 5895 - protein, 419 aa, Glycine max
  peptide (1)..(419): Ceres Seq. ID no. 13638059
  misc_feature (2)..(419): NCBI GI NO: 29373077 NR Description: pyruvate decarboxylase 1 [Lotus corniculatus]
  misc_feature (2)..(419): NCBI GI NO: 10732644 NR Description: pyruvate decarboxylase 1 [Vitis vinifera]
  misc_feature (1)..(419): NCBI GI NO: 10121330 NR Description: pyruvate decarboxylase [Fragaria x ananassa]
  misc_feature (1)..(419): NCBI GI NO: 17225598 NR Description: pyruvate decarboxylase [Fragaria x ananassa]
  misc_feature (1)..(419): NCBI GI NO: 24745919 NR Description: pyruvate decarboxylase [Solanum tuberosum]
  misc_feature (2)..(262): NCBI GI NO: 1706330 NR Description: Pyruvate decarboxylase isozyme 2 (PDC)
  misc_feature (260)..(419): NCBI GI NO: 1706330 NR Description: Pyruvate decarboxylase isozyme 2 (PDC)
  misc_feature (2)..(419): NCBI GI NO: 15234062 NR Description: pyruvate decarboxylase-1 (Pdc1)
  misc_feature (15)..(419): NCBI GI NO: 1706329 NR Description: Pyruvate decarboxylase isozyme 2 (PDC)
  misc_feature (2)..(419): NCBI GI NO: 15240950 NR Description: pyruvate decarboxylase-related protein
LIDTAISTCLKESKPVYISISCNLPGIPHPTFSREPVPFSLSPRLSNKMGLEAAVEAAAEFLNKAVKPVMVGGPKLRVANACDAFVELADACGYPFAVMPSAKGLVPEHKPHFIGTFWGAVSTAFCAEIVESADAYLFAGPIFNDYSSVGYSLLLKKEKAIIVQPERVVISNGPAFGCVLMKDFLRELAKRLKHNNTAYENYSRIFVPEGKPVKAEPREPLRVNVLFKHIQDMLSGETAVIAETGDSWFNCQKLKLPKGCGYEFQMQYGSIGWSVGATLGYAQAVPEKRVISCIGDGSFQVTAQDVSTMLRNEQKTIIFLINNGGYTIEVEIHDGPYNVIKNWNYTGLVDAIHNGEGKCWTTKVTCEEELVEAIQTATGDKKDCLCFIEVIVHKDDTSKELLEWGSRVCAANGRPPNPQ

SEQ ID NO: 5896 - protein, 371 aa, Glycine max
  peptide (1)..(371): Ceres Seq. ID no. 13638060
  misc_feature (1)..(371): NCBI GI NO: 29373077 NR Description: pyruvate decarboxylase 1 [Lotus corniculatus]
  misc_feature (1)..(371): NCBI GI NO: 10732644 NR Description: pyruvate decarboxylase 1 [Vitis vinifera]
  misc_feature (1)..(371): NCBI GI NO: 10121330 NR Description: pyruvate decarboxylase [Fragaria x ananassa]
  misc_feature (1)..(371): NCBI GI NO: 17225598 NR Description: pyruvate decarboxylase [Fragaria x ananassa]
  misc_feature (1)..(371): NCBI GI NO: 24745919 NR Description: pyruvate decarboxylase [Solanum tuberosum]
  misc_feature (1)..(214): NCBI GI NO: 1706330 NR Description: Pyruvate decarboxylase isozyme 2 (PDC)
  misc_feature (212)..(371): NCBI GI NO: 1706330 NR Description: Pyruvate decarboxylase isozyme 2 (PDC)
  misc_feature (1)..(371): NCBI GI NO: 15234062 NR Description: pyruvate decarboxylase-1 (Pdc1)
  misc_feature (1)..(371): NCBI GI NO: 1706329 NR Description: Pyruvate decarboxylase isozyme 2 (PDC)
  misc_feature (1)..(371): NCBI GI NO: 15240950 NR Description: pyruvate decarboxylase-related protein
MGLEAAVEAAAEFLNKAVKPVMVGGPKLRVANACDAFVELADACGYPFAVMPSAKGLVPEHKPHFIGTFWGAVSTAFCAEIVESADAYLFAGPIFNDYSSVGYSLLLKKEKAIIVQPERVVISNGPAFGCVLMKDFLRELAKRLKHNNTAYENYSRIFVPEGKPVKAEPREPLRVNVLFKHIQDMLSGETAVIAETGDSWFNCQKLKLPKGCGYEFQMQYGSIGWSVGATLGYAQAVPEKRVISCIGDGSFQVTAQDVSTMLRNEQKTIIFLINNGGYTIEVEIHDGPYNVIKNWNYTGLVDAIHNGEGKCWTTKVTCEEELVEAIQTATGDKKDCLCFIEVIVHKDDTSKELLEWGSRVCAANGRPPNPQ

SEQ ID NO: 5897 - protein, 350 aa, Glycine max
  peptide (1)..(350): Ceres Seq. ID no. 13638061
  misc_feature (1)..(350): NCBI GI NO: 29373077 NR Description: pyruvate decarboxylase 1 [Lotus corniculatus]
  misc_feature (1)..(350): NCBI GI NO: 10732644 NR Description: pyruvate decarboxylase 1 [Vitis vinifera]
  misc_feature (1)..(350): NCBI GI NO: 10121330 NR Description: pyruvate decarboxylase [Fragaria x ananassa]
  misc_feature (1)..(350): NCBI GI NO: 17225598 NR Description: pyruvate decarboxylase [Fragaria x ananassa]
  misc_feature (1)..(350): NCBI GI NO: 24745919 NR Description: pyruvate decarboxylase [Solanum tuberosum]
  misc_feature (1)..(193): NCBI GI NO: 1706330 NR Description: Pyruvate decarboxylase isozyme 2 (PDC)
  misc_feature (191)..(350): NCBI GI NO: 1706330 NR Description: Pyruvate decarboxylase isozyme 2 (PDC)
  misc_feature (1)..(350): NCBI GI NO: 15234062 NR Description: pyruvate decarboxylase-1 (Pdc1)
  misc_feature (1)..(350): NCBI GI NO: 1706329 NR Description: Pyruvate decarboxylase isozyme 2 (PDC)
  misc_feature (1)..(350): NCBI GI NO: 15240950 NR Description: pyruvate decarboxylase-related protein
MVGGPKLRVANACDAFVELADACGYPFAVMPSAKGLVPEHKPHFIGTFWGAVSTAFCAEIVESADAYLFAGPIFNDYSSVGYSLLLKKEKAIIVQPERVVISNGPAFGCVLMKDFLRELAKRLKHNNTAYENYSRIFVPEGKPVKAEPREPLRVNVLFKHIQDMLSGETAVIAETGDSWFNCQKLKLPKGCGYEFQMQYGSIGWSVGATLGYAQAVPEKRVISCIGDGSFQVTAQDVSTMLRNEQKTIIFLINNGGYTIEVEIHDGPYNVIKNWNYTGLVDAIHNGEGKCWTTKVTCEEELVEAIQTATGDKKDCLCFIEVIVHKDDTSKELLEWGSRVCAANGRPPNPQ

SEQ ID NO: 5898 - DNA, 1254 bp, Glycine max
  misc_feature (1)..(1254): Ceres Seq. ID no. 15176238
aactcccaaaaattattctgattgaatttatatttatatttatataaatggaagacacgttaacgttgtggggaaaaaagatagaagaggaaaagtcataaaaagcataagaatctgcaacaaatagtcatggctgcgcttggggaccaatcagaggaacaagccatggctgcccaacctaaacctcagaaccgacccatttctaacatcgtcatcgtcgttgctatgcagacggaggcacttcccattgttaacagattccagctcactgaggaccctgacaccccgtttccgcaaggggttccttgggtccgttatcaggggacatacaaagatcttaatataagcttgatttggccgggaaaagatccaactttgggggttgatagtgtaggcacgatatcatctgctcttgtaacgtatgctgctattcaagcattacaaccagacttgatcatcaatgcaggcactgctggtggcttcaaggccaaaggagctagtattggtgatgttttcattgtatcagattgtgcttttcacgacagaagaatacccatacctgtttttgatctgtatggagttggtttacgtaaagcctttgtagcacccaaccttgtaaaggagcttaatctaaaggtgggtaaattgtctactggtgactctttagatatgacacagcaggatgaatcgtcaatcattgcaaatgatgccacagttaaagatatggagggagcagctattgcttatgtttctgaccttctgaaagttcctgcaatatttgtaaaagctgtgactgatatcattgatggtgacaaaccaactgcagaagaattcctgcaaaatttggcagctgtaactactgcacttgatctggcagttgaacaagttattaattttattaatggaaagtgcgaatctgaactttgacaacccaatttcaccttccagagtttttttttgtatgcaatgttacacggtgggctccaattgtacactactaccattatttggttgggaatttgtgagatttaagtaaaaatacaaacttataaactgaagatattgcagccccacctcccatctctcttttgtactgttctggccctgcaggctgtataagttatctggcaaagattgtggcaatcattgtaaacatgtacgatgacatactttagtgaatcacatgtagcatatggatgattatttgtctctgaaattttccatgatgatggaatgattgagtaagttgatttc

SEQ ID NO: 5899 - protein, 265 aa, Glycine max
  peptide (1)..(265): Ceres Seq. ID no. 15176239
  misc_feature (27)..(247): Pfam Name: Pfam Description:  Phosphorylase family
  misc_feature (1)..(265): NCBI GI NO: 7406708 NR Description: putative ripening-related protein [Vitis vinifera]
  misc_feature (24)..(265): NCBI GI NO: 34897892 NR Description: ESTs C28489
  misc_feature (24)..(265): NCBI GI NO: 18087497 NR Description: methylthioadenosine/ S-adenosyl homocysteinenucleosidase
  misc_feature (1)..(265): NCBI GI NO: 15234791 NR Description: expressed protein [Arabidopsis thaliana]
  misc_feature (20)..(265): NCBI GI NO: 30690140 NR Description: expressed protein [Arabidopsis thaliana]
  misc_feature (67)..(265): NCBI GI NO: 7486865 NR Description: hypothetical protein T11I11
  misc_feature (63)..(250): NCBI GI NO: 23467396 NR Description: hypothetical protein [Haemophilus somnus 129PT]
  misc_feature (78)..(254): NCBI GI NO: 15642376 NR Description: MTA/SAH nucleosidase [Vibrio cholerae]
  misc_feature (78)..(236): NCBI GI NO: 23037085 NR Description: hypothetical protein [Oenococcus oeni MCW]
MAALGDQSEEQAMAAQPKPQNRPISNIVIVVAMQTEALPIVNRFQLTEDPDTPFPQGVPWVRYQGTYKDLNISLIWPGKDPTLGVDSVGTISSALVTYAAIQALQPDLIINAGTAGGFKAKGASIGDVFIVSDCAFHDRRIPIPVFDLYGVGLRKAFVAPNLVKELNLKVGKLSTGDSLDMTQQDESSIIANDATVKDMEGAAIAYVSDLLKVPAIFVKAVTDIIDGDKPTAEEFLQNLAAVTTALDLAVEQVINFINGKCESEL

SEQ ID NO: 5900 - protein, 253 aa, Glycine max
  peptide (1)..(253): Ceres Seq. ID no. 15176240
  misc_feature (15)..(235): Pfam Name: Pfam Description:  Phosphorylase family
  misc_feature (1)..(253): NCBI GI NO: 7406708 NR Description: putative ripening-related protein [Vitis vinifera]
  misc_feature (12)..(253): NCBI GI NO: 34897892 NR Description: ESTs C28489
  misc_feature (12)..(253): NCBI GI NO: 18087497 NR Description: methylthioadenosine/ S-adenosyl homocysteinenucleosidase
  misc_feature (1)..(253): NCBI GI NO: 15234791 NR Description: expressed protein [Arabidopsis thaliana]
  misc_feature (8)..(253): NCBI GI NO: 30690140 NR Description: expressed protein [Arabidopsis thaliana]
  misc_feature (55)..(253): NCBI GI NO: 7486865 NR Description: hypothetical protein T11I11
  misc_feature (51)..(238): NCBI GI NO: 23467396 NR Description: hypothetical protein [Haemophilus somnus 129PT]
  misc_feature (66)..(242): NCBI GI NO: 15642376 NR Description: MTA/SAH nucleosidase [Vibrio cholerae]
  misc_feature (66)..(224): NCBI GI NO: 23037085 NR Description: hypothetical protein [Oenococcus oeni MCW]
MAAQPKPQNRPISNIVIVVAMQTEALPIVNRFQLTEDPDTPFPQGVPWVRYQGTYKDLNISLIWPGKDPTLGVDSVGTISSALVTYAAIQALQPDLIINAGTAGGFKAKGASIGDVFIVSDCAFHDRRIPIPVFDLYGVGLRKAFVAPNLVKELNLKVGKLSTGDSLDMTQQDESSIIANDATVKDMEGAAIAYVSDLLKVPAIFVKAVTDIIDGDKPTAEEFLQNLAAVTTALDLAVEQVINFINGKCESEL

SEQ ID NO: 5901 - protein, 233 aa, Glycine max
  peptide (1)..(233): Ceres Seq. ID no. 15176241
  misc_feature (1)..(215): Pfam Name: Pfam Description:  Phosphorylase family
  misc_feature (1)..(233): NCBI GI NO: 7406708 NR Description: putative ripening-related protein [Vitis vinifera]
  misc_feature (1)..(233): NCBI GI NO: 34897892 NR Description: ESTs C28489
  misc_feature (1)..(233): NCBI GI NO: 18087497 NR Description: methylthioadenosine/ S-adenosyl homocysteinenucleosidase
  misc_feature (1)..(233): NCBI GI NO: 15234791 NR Description: expressed protein [Arabidopsis thaliana]
  misc_feature (1)..(233): NCBI GI NO: 30690140 NR Description: expressed protein [Arabidopsis thaliana]
  misc_feature (35)..(233): NCBI GI NO: 7486865 NR Description: hypothetical protein T11I11
  misc_feature (31)..(218): NCBI GI NO: 23467396 NR Description: hypothetical protein [Haemophilus somnus 129PT]
  misc_feature (46)..(222): NCBI GI NO: 15642376 NR Description: MTA/SAH nucleosidase [Vibrio cholerae]
  misc_feature (46)..(204): NCBI GI NO: 23037085 NR Description: hypothetical protein [Oenococcus oeni MCW]
MQTEALPIVNRFQLTEDPDTPFPQGVPWVRYQGTYKDLNISLIWPGKDPTLGVDSVGTISSALVTYAAIQALQPDLIINAGTAGGFKAKGASIGDVFIVSDCAFHDRRIPIPVFDLYGVGLRKAFVAPNLVKELNLKVGKLSTGDSLDMTQQDESSIIANDATVKDMEGAAIAYVSDLLKVPAIFVKAVTDIIDGDKPTAEEFLQNLAAVTTALDLAVEQVINFINGKCESEL

SEQ ID NO: 5902 - DNA, 2254 bp, Glycine max
  misc_feature (1)..(2254): Ceres Seq. ID no. 15169439
gaagatgacgcgtcgataagtaaaaaaccctagaaaccacactgatatactcttagtgtcttacacacactgtggctttggcagcgcgactcgtcttcgttccttaccctcgggttgatctgtgagaggggcttgatagccctctctctctgctgctgcaattcagattgttggcaactattttttatacagacgatttgtcttcacatggaagcattgcttgcttgagggacgcctttgtctcaaaggagttggaattttcgggttttttgtgggattggagatttagagagtgcccttgcactccctgttttatttcatcaccatgattgccactgaaactatagtaccaagtacaaaattgaagatcaagttctcaaccaaaaggatagagattgattctgggccaaaatgtgagtttggacagaaagtgtatcacaatgataaaaacaggcgctgtaattctaatgaaaattcctcagcactgaattctaacaagaggggaccaccagtaagtgttgagggccaaaaggagaaaagacaaaagattgatcggaaagggtcgatgcagtgtgctacaatacttaagagtttaatgtctcactcatatagttgggtgtttcttaagccagtggaccctgtagcattgagtattccagattattttacaatcatatctcatccaatggatttgggcacaattaaatctaagctggagagaaacatttattctggcactgaggagtttgcagatgatgtcagactgaccttctcaaatgcaatgaaatataatcctcccggtaatgatgttcatatgatggcgaaggaactcagcaaaatatttgacagaaaatggaaagactttggtaggaaatggaagtttgaagatgagcatgataaaagcgaaactgaaacaattaaggaaactgggagaaaaagtcttgatgcaatgcttccccggcataaagattccttgcccaaaaaaacacaattattcgaacacataggaatgcacaagattagatcattggcaacaaaagatgccagagtggagacacctaaattatcacagattccttgcaagttgattgagaaagacttgcacaaaggcagcaaaggtaatcatgatgtggaacagccttctggctctctaaagtcatatttttcagtacgttttgtcacatccaagtgtagaatttgtggcaatatcatatgccattgtgaaaatcctagcaattcaacacaggtgtcatcagacatatcatccgaaggatctgaaggaagggacctaattgcacgtggtgccgattcattgagacaggattgccggactaaatgtacatcacctatggagaagaaatctgatcttgattctgatggagctgtaagttctttggacagtgaacatgtttgtcctagttctcagcatgtaactcctactactgatgcctcttctggggaagtatggagcatgcctgttttgcccgtccagctttctcctaaaaaggctcttcgtgctgctatacttaaaagccgctttgcagataccattttgaaagcacagcaaaagacccttcttgatcatggtgataaaggtaatcctcaaaaaatgcagcaggaaaaggagagattggaaaggattcagcgtgaagaaagagctaggatcgaagcccaaattaaaactgctgaagctgctgcaagaatgagggctgaggaagagtcaaggcagcggagagaaaaggaaagagaagcttcacgagctgcaatagaaaagatgaaaagaaccgttgatatagaacataatatggagattattaaagaacttgaaagtttgagtggatgcacgctatcttataaggccgttggcggtagaaatggctacaaagttgcattggagacattggataaacatcagtttgagaacccattggagcggcttggtttatttatcaaggaagacttcaccacagatcttgatgaggaggttttgaacggaggctttgaagaaggggaaatttttaactgaatgcaccttcatgcagttctgccagctctaagtgtttatatcccttttagacatggaaacagacaattattgtaaatgcacatattgtttggaatcaagtctttcgactatatctgccttaattaccctcttgtctgggaattagataactacacacgcttgcaattttgttttacaatattaaagtattccttccagcaaacatataaagaaagctcttacaggcga

SEQ ID NO: 5903 - protein, 566 aa, Glycine max
  peptide (1)..(566): Ceres Seq. ID no. 15169440
  misc_feature (292)..(512): NCBI GI NO: 8885596 NR Description: contains similarity to kinase~gene_id:F10E10.2
  misc_feature (1)..(183): NCBI GI NO: 8885596 NR Description: contains similarity to kinase~gene_id:F10E10.2
  misc_feature (292)..(512): NCBI GI NO: 30694987 NR Description: DNA-binding protein family [Arabidopsis thaliana]
  misc_feature (50)..(183): NCBI GI NO: 30694987 NR Description: DNA-binding protein family [Arabidopsis thaliana]
  misc_feature (82)..(564): NCBI GI NO: 18395937 NR Description: DNA-binding protein family [Arabidopsis thaliana]
  misc_feature (350)..(553): NCBI GI NO: 15232127 NR Description: DNA-binding protein family [Arabidopsis thaliana]
  misc_feature (48)..(183): NCBI GI NO: 15232127 NR Description: DNA-binding protein family [Arabidopsis thaliana]
  misc_feature (350)..(553): NCBI GI NO: 9294219 NR Description: gb|AAF01563
  misc_feature (48)..(183): NCBI GI NO: 9294219 NR Description: gb|AAF01563
  misc_feature (389)..(564): NCBI GI NO: 6016737 NR Description: hypothetical protein [Arabidopsis thaliana]
MIATETIVPSTKLKIKFSTKRIEIDSGPKCEFGQKVYHNDKNRRCNSNENSSALNSNKRGPPVSVEGQKEKRQKIDRKGSMQCATILKSLMSHSYSWVFLKPVDPVALSIPDYFTIISHPMDLGTIKSKLERNIYSGTEEFADDVRLTFSNAMKYNPPGNDVHMMAKELSKIFDRKWKDFGRKWKFEDEHDKSETETIKETGRKSLDAMLPRHKDSLPKKTQLFEHIGMHKIRSLATKDARVETPKLSQIPCKLIEKDLHKGSKGNHDVEQPSGSLKSYFSVRFVTSKCRICGNIICHCENPSNSTQVSSDISSEGSEGRDLIARGADSLRQDCRTKCTSPMEKKSDLDSDGAVSSLDSEHVCPSSQHVTPTTDASSGEVWSMPVLPVQLSPKKALRAAILKSRFADTILKAQQKTLLDHGDKGNPQKMQQEKERLERIQREERARIEAQIKTAEAAARMRAEEESRQRREKEREASRAAIEKMKRTVDIEHNMEIIKELESLSGCTLSYKAVGGRNGYKVALETLDKHQFENPLERLGLFIKEDFTTDLDEEVLNGGFEEGEIFN

SEQ ID NO: 5904 - protein, 486 aa, Glycine max
  peptide (1)..(486): Ceres Seq. ID no. 15169441
  misc_feature (212)..(432): NCBI GI NO: 8885596 NR Description: contains similarity to kinase~gene_id:F10E10.2
  misc_feature (1)..(103): NCBI GI NO: 8885596 NR Description: contains similarity to kinase~gene_id:F10E10.2
  misc_feature (212)..(432): NCBI GI NO: 30694987 NR Description: DNA-binding protein family [Arabidopsis thaliana]
  misc_feature (1)..(103): NCBI GI NO: 30694987 NR Description: DNA-binding protein family [Arabidopsis thaliana]
  misc_feature (2)..(484): NCBI GI NO: 18395937 NR Description: DNA-binding protein family [Arabidopsis thaliana]
  misc_feature (270)..(473): NCBI GI NO: 15232127 NR Description: DNA-binding protein family [Arabidopsis thaliana]
  misc_feature (1)..(103): NCBI GI NO: 15232127 NR Description: DNA-binding protein family [Arabidopsis thaliana]
  misc_feature (270)..(473): NCBI GI NO: 9294219 NR Description: gb|AAF01563
  misc_feature (1)..(103): NCBI GI NO: 9294219 NR Description: gb|AAF01563
  misc_feature (309)..(484): NCBI GI NO: 6016737 NR Description: hypothetical protein [Arabidopsis thaliana]
MQCATILKSLMSHSYSWVFLKPVDPVALSIPDYFTIISHPMDLGTIKSKLERNIYSGTEEFADDVRLTFSNAMKYNPPGNDVHMMAKELSKIFDRKWKDFGRKWKFEDEHDKSETETIKETGRKSLDAMLPRHKDSLPKKTQLFEHIGMHKIRSLATKDARVETPKLSQIPCKLIEKDLHKGSKGNHDVEQPSGSLKSYFSVRFVTSKCRICGNIICHCENPSNSTQVSSDISSEGSEGRDLIARGADSLRQDCRTKCTSPMEKKSDLDSDGAVSSLDSEHVCPSSQHVTPTTDASSGEVWSMPVLPVQLSPKKALRAAILKSRFADTILKAQQKTLLDHGDKGNPQKMQQEKERLERIQREERARIEAQIKTAEAAARMRAEEESRQRREKEREASRAAIEKMKRTVDIEHNMEIIKELESLSGCTLSYKAVGGRNGYKVALETLDKHQFENPLERLGLFIKEDFTTDLDEEVLNGGFEEGEIFN

SEQ ID NO: 5905 - protein, 476 aa, Glycine max
  peptide (1)..(476): Ceres Seq. ID no. 15169442
  misc_feature (202)..(422): NCBI GI NO: 8885596 NR Description: contains similarity to kinase~gene_id:F10E10.2
  misc_feature (1)..(93): NCBI GI NO: 8885596 NR Description: contains similarity to kinase~gene_id:F10E10.2
  misc_feature (202)..(422): NCBI GI NO: 30694987 NR Description: DNA-binding protein family [Arabidopsis thaliana]
  misc_feature (1)..(93): NCBI GI NO: 30694987 NR Description: DNA-binding protein family [Arabidopsis thaliana]
  misc_feature (1)..(474): NCBI GI NO: 18395937 NR Description: DNA-binding protein family [Arabidopsis thaliana]
  misc_feature (260)..(463): NCBI GI NO: 15232127 NR Description: DNA-binding protein family [Arabidopsis thaliana]
  misc_feature (1)..(93): NCBI GI NO: 15232127 NR Description: DNA-binding protein family [Arabidopsis thaliana]
  misc_feature (260)..(463): NCBI GI NO: 9294219 NR Description: gb|AAF01563
  misc_feature (1)..(93): NCBI GI NO: 9294219 NR Description: gb|AAF01563
  misc_feature (299)..(474): NCBI GI NO: 6016737 NR Description: hypothetical protein [Arabidopsis thaliana]
MSHSYSWVFLKPVDPVALSIPDYFTIISHPMDLGTIKSKLERNIYSGTEEFADDVRLTFSNAMKYNPPGNDVHMMAKELSKIFDRKWKDFGRKWKFEDEHDKSETETIKETGRKSLDAMLPRHKDSLPKKTQLFEHIGMHKIRSLATKDARVETPKLSQIPCKLIEKDLHKGSKGNHDVEQPSGSLKSYFSVRFVTSKCRICGNIICHCENPSNSTQVSSDISSEGSEGRDLIARGADSLRQDCRTKCTSPMEKKSDLDSDGAVSSLDSEHVCPSSQHVTPTTDASSGEVWSMPVLPVQLSPKKALRAAILKSRFADTILKAQQKTLLDHGDKGNPQKMQQEKERLERIQREERARIEAQIKTAEAAARMRAEEESRQRREKEREASRAAIEKMKRTVDIEHNMEIIKELESLSGCTLSYKAVGGRNGYKVALETLDKHQFENPLERLGLFIKEDFTTDLDEEVLNGGFEEGEIFN

SEQ ID NO: 5906 - DNA, 1151 bp, Glycine max
  misc_feature (1)..(1151): Ceres Seq. ID no. 14310498
aattctgagaaaaactccaacgaacttcgcatttccacgaaaatggcttcccaaaacccagcggaggaagaaaattcaaagcgacattggtcccttgaagacttcgagatcggaaaacctctcggtaggggcaaattcggtagagtttacgtcgccagagaagttaagagcaaatttgttgtggcgttgaaggttatatttaaggaacaaattgataagtacagagttcatcaccaactgaggagagagatggagatacagaccagtctccggcacgcaaacatcctgcgtctttacggttggtttcatgatgctgaccgtgttttcttgattcttgagtatgctcataagggagagctttacaaggagctgagaaaaaagggtcatctcactgagaagcaagctgccacgtatattttgagcctcacaaaggcgttggcatattgtcatgagaaacatgttattcatagggatatcaagccagaaaatttgttgcttgaccatgaggggcgtcttaaaattgcagactttggttggtctgttcagtctagaagcaaaagacataccatgtgtggaacattggattatttagcaccagaaatggttgaaaacaaagctcatgactatgcagttgacaactggactttgggtatcctttgttatgagttcctctatggtgctcctccatttgaggctgagagtcaatctgataccttcaaaaggataatgaaggttgatctaagcttcccttccaccccttctgtctctatagaggcgaaaaatctgattagtcggctcctggtgaaagactcctcacgaaggctctctcttcagaagataatggagcatccttggataatcaagaatgcagattttgtgggtatttgctagtagcatcaactcactaatttaactttggccacgagggattaagactgaattctgtatatgatgttataaaatgcatgtaagtgttttgcagtgttcaagtgtttaatcaacttgaatgacacattacctttgctgcgaggttaggaacattaggatggtatatctgcctatttgtaatagttgtattgtaggtgtaatttcttccagttctttgtgcatctaaaccaggcatgactaatgacttgcacagatttattttg

SEQ ID NO: 5907 - protein, 296 aa, Glycine max
  peptide (1)..(296): Ceres Seq. ID no. 14310499
  misc_feature (35)..(286): Pfam Name: Pfam Description:  Protein kinase domain
  misc_feature (25)..(296): NCBI GI NO: 15225495 NR Description: protein kinase, putative [Arabidopsis thaliana]
  misc_feature (27)..(296): NCBI GI NO: 31415939 NR Description: putative aurora-related kinase
  misc_feature (8)..(295): NCBI GI NO: 15233958 NR Description: protein kinase, putative [Arabidopsis thaliana]
  misc_feature (8)..(295): NCBI GI NO: 21592557 NR Description: putative serine/threonine protein kinase
  misc_feature (21)..(295): NCBI GI NO: 15225210 NR Description: serine/threonine protein kinase, putative
  misc_feature (15)..(295): NCBI GI NO: 34906424 NR Description: putative protein kinase
  misc_feature (22)..(290): NCBI GI NO: 1079309 NR Description: protein kinase (EC 2
  misc_feature (22)..(290): NCBI GI NO: 27923859 NR Description: Serine/threonine protein kinase Eg2-like
  misc_feature (22)..(290): NCBI GI NO: 27923860 NR Description: Serine/threonine protein kinase Eg2
  misc_feature (14)..(296): NCBI GI NO: 27923855 NR Description: Serine/threonine kinase 6
NSEKNSNELRISTKMASQNPAEEENSKRHWSLEDFEIGKPLGRGKFGRVYVAREVKSKFVVALKVIFKEQIDKYRVHHQLRREMEIQTSLRHANILRLYGWFHDADRVFLILEYAHKGELYKELRKKGHLTEKQAATYILSLTKALAYCHEKHVIHRDIKPENLLLDHEGRLKIADFGWSVQSRSKRHTMCGTLDYLAPEMVENKAHDYAVDNWTLGILCYEFLYGAPPFEAESQSDTFKRIMKVDLSFPSTPSVSIEAKNLISRLLVKDSSRRLSLQKIMEHPWIIKNADFVGIC

SEQ ID NO: 5908 - protein, 282 aa, Glycine max
  peptide (1)..(282): Ceres Seq. ID no. 14310500
  misc_feature (21)..(272): Pfam Name: Pfam Description:  Protein kinase domain
  misc_feature (11)..(282): NCBI GI NO: 15225495 NR Description: protein kinase, putative [Arabidopsis thaliana]
  misc_feature (13)..(282): NCBI GI NO: 31415939 NR Description: putative aurora-related kinase
  misc_feature (1)..(281): NCBI GI NO: 15233958 NR Description: protein kinase, putative [Arabidopsis thaliana]
  misc_feature (1)..(281): NCBI GI NO: 21592557 NR Description: putative serine/threonine protein kinase
  misc_feature (7)..(281): NCBI GI NO: 15225210 NR Description: serine/threonine protein kinase, putative
  misc_feature (1)..(281): NCBI GI NO: 34906424 NR Description: putative protein kinase
  misc_feature (8)..(276): NCBI GI NO: 1079309 NR Description: protein kinase (EC 2
  misc_feature (8)..(276): NCBI GI NO: 27923859 NR Description: Serine/threonine protein kinase Eg2-like
  misc_feature (8)..(276): NCBI GI NO: 27923860 NR Description: Serine/threonine protein kinase Eg2
  misc_feature (1)..(282): NCBI GI NO: 27923855 NR Description: Serine/threonine kinase 6
MASQNPAEEENSKRHWSLEDFEIGKPLGRGKFGRVYVAREVKSKFVVALKVIFKEQIDKYRVHHQLRREMEIQTSLRHANILRLYGWFHDADRVFLILEYAHKGELYKELRKKGHLTEKQAATYILSLTKALAYCHEKHVIHRDIKPENLLLDHEGRLKIADFGWSVQSRSKRHTMCGTLDYLAPEMVENKAHDYAVDNWTLGILCYEFLYGAPPFEAESQSDTFKRIMKVDLSFPSTPSVSIEAKNLISRLLVKDSSRRLSLQKIMEHPWIIKNADFVGIC

SEQ ID NO: 5909 - protein, 213 aa, Glycine max
  peptide (1)..(213): Ceres Seq. ID no. 14310501
  misc_feature (1)..(203): Pfam Name: Pfam Description:  Protein kinase domain
  misc_feature (1)..(213): NCBI GI NO: 15225495 NR Description: protein kinase, putative [Arabidopsis thaliana]
  misc_feature (1)..(213): NCBI GI NO: 31415939 NR Description: putative aurora-related kinase
  misc_feature (1)..(212): NCBI GI NO: 15233958 NR Description: protein kinase, putative [Arabidopsis thaliana]
  misc_feature (1)..(212): NCBI GI NO: 21592557 NR Description: putative serine/threonine protein kinase
  misc_feature (1)..(212): NCBI GI NO: 15225210 NR Description: serine/threonine protein kinase, putative
  misc_feature (1)..(212): NCBI GI NO: 34906424 NR Description: putative protein kinase
  misc_feature (1)..(207): NCBI GI NO: 1079309 NR Description: protein kinase (EC 2
  misc_feature (1)..(207): NCBI GI NO: 27923859 NR Description: Serine/threonine protein kinase Eg2-like
  misc_feature (1)..(207): NCBI GI NO: 27923860 NR Description: Serine/threonine protein kinase Eg2
  misc_feature (1)..(213): NCBI GI NO: 27923855 NR Description: Serine/threonine kinase 6
MEIQTSLRHANILRLYGWFHDADRVFLILEYAHKGELYKELRKKGHLTEKQAATYILSLTKALAYCHEKHVIHRDIKPENLLLDHEGRLKIADFGWSVQSRSKRHTMCGTLDYLAPEMVENKAHDYAVDNWTLGILCYEFLYGAPPFEAESQSDTFKRIMKVDLSFPSTPSVSIEAKNLISRLLVKDSSRRLSLQKIMEHPWIIKNADFVGIC

SEQ ID NO: 5910 - DNA, 1353 bp, Glycine max
  misc_feature (1)..(1353): Ceres Seq. ID no. 14312391
aaggtctggacagtggcgtggaaggcgaatcagccactggcactgaacaattaaccattaacaagaacaagaacatttcaagggaggacatagtaatggacatggttctgcattcagccttgtacccaccatctctgtcttgttcctcttctactactggaacaagatggcccaattcccgggttggtgttagtttgagttggaggagcttgtccttggtgccttgtgcactgaaggcatattatgattctgaattggagaataaaaagcatctacttctgacctctgtccaagacacgcaaaggggcctcttaacaactcctgatcaacgctcttgtatcgaggaggctctggtgagtctcgaaggatgcaacattggctctcaccctatcaatctctccaacttggatggaacatggcgcctccagtacacttctgcctctgatgttctcattcttctccaagctgctgctactcttcctttctttcaagttggacagatctttcaaaaatttgaatgtcgtgatcaatctaatggaggtgttatccgcaatgttgttcgatggagcattccaaatttgttagaggaacaagaaggtgctacactgcttgtatccgccaagtttaatgtagtatctgtccgtaatatctaccttcagtttcaagagatcacaatccaagatataaatattagtgaagagctgcaggctctaatagctccagcaatactaccaagatcttttataagtcttcagattttgcaatttctccgcactttcaaagcttaaatccctgtgagggatccaggaaggcaatcagttggaggactatattaccttagctatttggatgataatatgcttttgggtcgtgctgttggtggaggaggggtatttgtgtttacgagagcccaatctctctactgatgagcaccgagcaggagttaaaacttgtgtttgccagcaataacactcaatgagcctctgtttatagaagtgaccccatggagagagcaagaaattgattcaaagcatatagcgcataaggaattctgcaaagcttattgaagaaggctattatgtgcagttgtcgtgttgactttagtcgaactgcttttttgtttatgtatgtatatttgcattgtttgtatcaatttggttatatattggcaaagtacgaagatggtgagtgttcaatgtaagtgatacaactcgtgggaaaatgataaggagcccagtcctcgctatgtgcagtgtaggcatcttataattatgttatgttgcataggatagatagtattatgtctcttgttagttttcttatctagttagtttaatctgtgatttttaactt

SEQ ID NO: 5911 - protein, 261 aa, Glycine max
  peptide (1)..(261): Ceres Seq. ID no. 14312392
  misc_feature (86)..(261): Pfam Name: Pfam Description:  PAP_fibrillin
  misc_feature (84)..(261): NCBI GI NO: 18407205 NR Description: plastid-lipid associated protein PAP/fibrillinfamily
  misc_feature (84)..(261): NCBI GI NO: 21553852 NR Description: unknown [Arabidopsis thaliana]
  misc_feature (203)..(261): NCBI GI NO: 37535940 NR Description: unknown protein
  misc_feature (88)..(221): NCBI GI NO: 17231810 NR Description: fibrillin [Nostoc sp. PCC 7120]
  misc_feature (89)..(225): NCBI GI NO: 23126201 NR Description: hypothetical protein [Nostoc punctiforme]
GLDSGVEGESATGTEQLTINKNKNISREDIVMDMVLHSALYPPSLSCSSSTTGTRWPNSRVGVSLSWRSLSLVPCALKAYYDSELENKKHLLLTSVQDTQRGLLTTPDQRSCIEEALVSLEGCNIGSHPINLSNLDGTWRLQYTSASDVLILLQAAATLPFFQVGQIFQKFECRDQSNGGVIRNVVRWSIPNLLEEQEGATLLVSAKFNVVSVRNIYLQFQEITIQDINISEELQALIAPAILPRSFISLQILQFLRTFKA

SEQ ID NO: 5912 - protein, 230 aa, Glycine max
  peptide (1)..(230): Ceres Seq. ID no. 14312393
  misc_feature (55)..(230): Pfam Name: Pfam Description:  PAP_fibrillin
  misc_feature (53)..(230): NCBI GI NO: 18407205 NR Description: plastid-lipid associated protein PAP/fibrillinfamily
  misc_feature (53)..(230): NCBI GI NO: 21553852 NR Description: unknown [Arabidopsis thaliana]
  misc_feature (172)..(230): NCBI GI NO: 37535940 NR Description: unknown protein
  misc_feature (57)..(190): NCBI GI NO: 17231810 NR Description: fibrillin [Nostoc sp. PCC 7120]
  misc_feature (58)..(194): NCBI GI NO: 23126201 NR Description: hypothetical protein [Nostoc punctiforme]
MDMVLHSALYPPSLSCSSSTTGTRWPNSRVGVSLSWRSLSLVPCALKAYYDSELENKKHLLLTSVQDTQRGLLTTPDQRSCIEEALVSLEGCNIGSHPINLSNLDGTWRLQYTSASDVLILLQAAATLPFFQVGQIFQKFECRDQSNGGVIRNVVRWSIPNLLEEQEGATLLVSAKFNVVSVRNIYLQFQEITIQDINISEELQALIAPAILPRSFISLQILQFLRTFKA

SEQ ID NO: 5913 - protein, 228 aa, Glycine max
  peptide (1)..(228): Ceres Seq. ID no. 14312394
  misc_feature (53)..(228): Pfam Name: Pfam Description:  PAP_fibrillin
  misc_feature (51)..(228): NCBI GI NO: 18407205 NR Description: plastid-lipid associated protein PAP/fibrillinfamily
  misc_feature (51)..(228): NCBI GI NO: 21553852 NR Description: unknown [Arabidopsis thaliana]
  misc_feature (170)..(228): NCBI GI NO: 37535940 NR Description: unknown protein
  misc_feature (55)..(188): NCBI GI NO: 17231810 NR Description: fibrillin [Nostoc sp. PCC 7120]
  misc_feature (56)..(192): NCBI GI NO: 23126201 NR Description: hypothetical protein [Nostoc punctiforme]
MVLHSALYPPSLSCSSSTTGTRWPNSRVGVSLSWRSLSLVPCALKAYYDSELENKKHLLLTSVQDTQRGLLTTPDQRSCIEEALVSLEGCNIGSHPINLSNLDGTWRLQYTSASDVLILLQAAATLPFFQVGQIFQKFECRDQSNGGVIRNVVRWSIPNLLEEQEGATLLVSAKFNVVSVRNIYLQFQEITIQDINISEELQALIAPAILPRSFISLQILQFLRTFKA

SEQ ID NO: 5914 - DNA, 580 bp, Glycine max
  misc_feature (1)..(580): Ceres Seq. ID no. 15169825
aacattctttccatattaactagttaacatcatggctcatggcttgagttatattttacttttcaactaacatgttaatgttcttgaagatgtttgttatactttgtttgatgcaggatgtgatggatgacccttgtgttgctgctgatggatatacatatgatcgcaaagcaattgaaaagtggcttgaagagaacgacaaatcaccaatgacgaacatggctttacctcataagcatttaattcctaattacacactgctctcagcaattttggagtggaagtccagagaatcgtgatatcagcattatctttctccatgttaatattgagaccaatgatttctctgatgtagagagtggctagaaagtttggtgggtatgacctttagcagtgtcttggatgcagatttttttcgtagttgtaccattccaagcatgctgtctggttaatttaggtagagcgatttcaagtgtagataaatttgattctattgtctgattctgtgtatacatacatatgtcaaatcttgttcttactataaataaaataagaaccatgtatacattcaaggctagct

SEQ ID NO: 5915 - protein, 75 aa, Glycine max
  peptide (1)..(75): Ceres Seq. ID no. 15169826
  misc_feature (11)..(74): Pfam Name: Pfam Description:  U-box domain
  misc_feature (11)..(73): NCBI GI NO: 29367517 NR Description: putative serine/threonine protein kinase
  misc_feature (11)..(74): NCBI GI NO: 15240280 NR Description: protein kinase family [Arabidopsis thaliana]
  misc_feature (11)..(72): NCBI GI NO: 15234952 NR Description: protein kinase family [Arabidopsis thaliana]
  misc_feature (13)..(73): NCBI GI NO: 15241414 NR Description: protein kinase family [Arabidopsis thaliana]
  misc_feature (13)..(73): NCBI GI NO: 9758471 NR Description: contains similarity to receptor-like proteinkinase~gene_id:K11J9
  misc_feature (13)..(73): NCBI GI NO: 30697549 NR Description: protein kinase family [Arabidopsis thaliana]
  misc_feature (11)..(72): NCBI GI NO: 37536860 NR Description: putative protein kinase
  misc_feature (13)..(73): NCBI GI NO: 22327904 NR Description: protein kinase family [Arabidopsis thaliana]
  misc_feature (13)..(73): NCBI GI NO: 15224775 NR Description: protein kinase family [Arabidopsis thaliana]
  misc_feature (1)..(70): NCBI GI NO: 7488259 NR Description: protein kinase homolog F4I18
MLMFLKMFVILCLMQDVMDDPCVAADGYTYDRKAIEKWLEENDKSPMTNMALPHKHLIPNYTLLSAILEWKSRES

SEQ ID NO: 5916 - protein, 73 aa, Glycine max
  peptide (1)..(73): Ceres Seq. ID no. 15169827
  misc_feature (9)..(72): Pfam Name: Pfam Description:  U-box domain
  misc_feature (9)..(71): NCBI GI NO: 29367517 NR Description: putative serine/threonine protein kinase
  misc_feature (9)..(72): NCBI GI NO: 15240280 NR Description: protein kinase family [Arabidopsis thaliana]
  misc_feature (9)..(70): NCBI GI NO: 15234952 NR Description: protein kinase family [Arabidopsis thaliana]
  misc_feature (11)..(71): NCBI GI NO: 15241414 NR Description: protein kinase family [Arabidopsis thaliana]
  misc_feature (11)..(71): NCBI GI NO: 9758471 NR Description: contains similarity to receptor-like proteinkinase~gene_id:K11J9
  misc_feature (11)..(71): NCBI GI NO: 30697549 NR Description: protein kinase family [Arabidopsis thaliana]
  misc_feature (9)..(70): NCBI GI NO: 37536860 NR Description: putative protein kinase
  misc_feature (11)..(71): NCBI GI NO: 22327904 NR Description: protein kinase family [Arabidopsis thaliana]
  misc_feature (11)..(71): NCBI GI NO: 15224775 NR Description: protein kinase family [Arabidopsis thaliana]
  misc_feature (1)..(68): NCBI GI NO: 7488259 NR Description: protein kinase homolog F4I18
MFLKMFVILCLMQDVMDDPCVAADGYTYDRKAIEKWLEENDKSPMTNMALPHKHLIPNYTLLSAILEWKSRES

SEQ ID NO: 5917 - protein, 69 aa, Glycine max
  peptide (1)..(69): Ceres Seq. ID no. 15169828
  misc_feature (5)..(68): Pfam Name: Pfam Description:  U-box domain
  misc_feature (5)..(67): NCBI GI NO: 29367517 NR Description: putative serine/threonine protein kinase
  misc_feature (5)..(68): NCBI GI NO: 15240280 NR Description: protein kinase family [Arabidopsis thaliana]
  misc_feature (5)..(66): NCBI GI NO: 15234952 NR Description: protein kinase family [Arabidopsis thaliana]
  misc_feature (7)..(67): NCBI GI NO: 15241414 NR Description: protein kinase family [Arabidopsis thaliana]
  misc_feature (7)..(67): NCBI GI NO: 9758471 NR Description: contains similarity to receptor-like proteinkinase~gene_id:K11J9
  misc_feature (7)..(67): NCBI GI NO: 30697549 NR Description: protein kinase family [Arabidopsis thaliana]
  misc_feature (5)..(66): NCBI GI NO: 37536860 NR Description: putative protein kinase
  misc_feature (7)..(67): NCBI GI NO: 22327904 NR Description: protein kinase family [Arabidopsis thaliana]
  misc_feature (7)..(67): NCBI GI NO: 15224775 NR Description: protein kinase family [Arabidopsis thaliana]
  misc_feature (1)..(64): NCBI GI NO: 7488259 NR Description: protein kinase homolog F4I18
MFVILCLMQDVMDDPCVAADGYTYDRKAIEKWLEENDKSPMTNMALPHKHLIPNYTLLSAILEWKSRES

SEQ ID NO: 5918 - DNA, 1255 bp, Glycine max
  misc_feature (1)..(1255): Ceres Seq. ID no. 12581768
cagctacgtaggcccccccccccgaatatcagagcattagtaaatctaattaatataagttcaagcaaaccacatatgaccgaaaagaagcctgttcatattctaataagctcaacattagctacaattgttgttactgctttaaccaaccctctcgatgtgttgaaggtgagaattcaaaataacgataagaattgcagcactatcaaccacactcattgcgtgactcgatcaagttctcactctgctcccaattccttacgacaagcttccttatatcgtcttgtaatgacaccgaaccttcaagaacattatcaagtcttgtgtgattgcctcccctttagatcaaacgcaaaagcccttgtttacttgactcgtaaagagggatacagagtacttaccaacggattggctcaaggtttgatgggttctgtactgagcaccgtaacttacttttactgctacgaggctgcaagaaagcgtgtgaagcaatatacttcacacaatattggtcttccattgttgacagctctgacagccagaaccatcacgacatgtatcgctttcccatttgaatattggaagaccttgcaacaaagttcggttggtgtgagtggaaagtcttcaatgaaactcggaacaaaaataaatgcaggattcggtactttgctcggaagagacttgatgttttctgggctttattgggtgttggtggaaaatatcagaagacatgtgaagagctggagccaacaaaatgaagagggatatcaagataaaggaagtctattgctttctaatgtgattgccggtggtttggcaggaggaatatcagcatccgtgacattacccttggatgtggtaaaaacaagaaaacaattgaatccaaaagaatataagaagaaatccacaattcgaattctcaaggatatctattataatgaaggaaaggatgctttgacagcaggtatgagacaaagagtgaccaaggttactatggcatgtgcaggcatcttgacattatatgagctcttctctgacatgttgagagaagacaatgtttactgagtggagtagttaggtttgcttgattgattttttaaattaaatattttggctgatttcgtacatttttattgtaattttagctagtgctcttcctttcgaataatgtctttttatctctttgtttatttatctatccctgtataaagataattaaatatcgtattgtataaccatatcatgaaaattattg

SEQ ID NO: 5919 - protein, 354 aa, Glycine max
  peptide (1)..(354): Ceres Seq. ID no. 12581769
  misc_feature (31)..(354): NCBI GI NO: 32766523 NR Description: Unknown (protein for MGC:63736) [Danio rerio]
  misc_feature (120)..(353): NCBI GI NO: 34854043 NR Description: similar to mitochondrial carrier family protein
  misc_feature (31)..(353): NCBI GI NO: 7706306 NR Description: CGI-69 protein [Homo sapiens]
  misc_feature (31)..(353): NCBI GI NO: 11359936 NR Description: hypothetical protein DKFZp434C119.1 - human
  misc_feature (31)..(342): NCBI GI NO: 13386046 NR Description: RIKEN cDNA 3010027G13 [Mus musculus]
  misc_feature (114)..(353): NCBI GI NO: 26337655 NR Description: unnamed protein product [Mus musculus]
  misc_feature (114)..(353): NCBI GI NO: 30520231 NR Description: RIKEN cDNA B230315F11 gene [Mus musculus]
  misc_feature (31)..(353): NCBI GI NO: 20137934 NR Description: Mitochondrial carrier protein CGI-69 (PRO2163)
  misc_feature (35)..(353): NCBI GI NO: 7770165 NR Description: PRO2163 [Homo sapiens]
  misc_feature (36)..(200): NCBI GI NO: 40253478 NR Description: putative mitochondrial carrier protein
QLRRPPPPNIRALVNLINISSSKPHMTEKKPVHILISSTLATIVVTALTNPLDVLKVRIQNNDKNCSTINHTHCVTRSSSHSAPNSLRQASLYRLVMTPNLQEHYQVLCDCLPFRSNAKALVYLTRKEGYRVLTNGLAQGLMGSVLSTVTYFYCYEAARKRVKQYTSHNIGLPLLTALTARTITTCIAFPFEYWKTLQQSSVGVSGKSSMKLGTKINAGFGTLLGRDLMFSGLYWVLVENIRRHVKSWSQQNEEGYQDKGSLLLSNVIAGGLAGGISASVTLPLDVVKTRKQLNPKEYKKKSTIRILKDIYYNEGKDALTAGMRQRVTKVTMACAGILTLYELFSDMLREDNVY

SEQ ID NO: 5920 - protein, 329 aa, Glycine max
  peptide (1)..(329): Ceres Seq. ID no. 12581770
  misc_feature (6)..(329): NCBI GI NO: 32766523 NR Description: Unknown (protein for MGC:63736) [Danio rerio]
  misc_feature (95)..(328): NCBI GI NO: 34854043 NR Description: similar to mitochondrial carrier family protein
  misc_feature (6)..(328): NCBI GI NO: 7706306 NR Description: CGI-69 protein [Homo sapiens]
  misc_feature (6)..(328): NCBI GI NO: 11359936 NR Description: hypothetical protein DKFZp434C119.1 - human
  misc_feature (6)..(317): NCBI GI NO: 13386046 NR Description: RIKEN cDNA 3010027G13 [Mus musculus]
  misc_feature (89)..(328): NCBI GI NO: 26337655 NR Description: unnamed protein product [Mus musculus]
  misc_feature (89)..(328): NCBI GI NO: 30520231 NR Description: RIKEN cDNA B230315F11 gene [Mus musculus]
  misc_feature (6)..(328): NCBI GI NO: 20137934 NR Description: Mitochondrial carrier protein CGI-69 (PRO2163)
  misc_feature (10)..(328): NCBI GI NO: 7770165 NR Description: PRO2163 [Homo sapiens]
  misc_feature (11)..(175): NCBI GI NO: 40253478 NR Description: putative mitochondrial carrier protein
MTEKKPVHILISSTLATIVVTALTNPLDVLKVRIQNNDKNCSTINHTHCVTRSSSHSAPNSLRQASLYRLVMTPNLQEHYQVLCDCLPFRSNAKALVYLTRKEGYRVLTNGLAQGLMGSVLSTVTYFYCYEAARKRVKQYTSHNIGLPLLTALTARTITTCIAFPFEYWKTLQQSSVGVSGKSSMKLGTKINAGFGTLLGRDLMFSGLYWVLVENIRRHVKSWSQQNEEGYQDKGSLLLSNVIAGGLAGGISASVTLPLDVVKTRKQLNPKEYKKKSTIRILKDIYYNEGKDALTAGMRQRVTKVTMACAGILTLYELFSDMLREDNVY

SEQ ID NO: 5921 - protein, 258 aa, Glycine max
  peptide (1)..(258): Ceres Seq. ID no. 12581771
  misc_feature (1)..(258): NCBI GI NO: 32766523 NR Description: Unknown (protein for MGC:63736) [Danio rerio]
  misc_feature (24)..(257): NCBI GI NO: 34854043 NR Description: similar to mitochondrial carrier family protein
  misc_feature (1)..(257): NCBI GI NO: 7706306 NR Description: CGI-69 protein [Homo sapiens]
  misc_feature (1)..(257): NCBI GI NO: 11359936 NR Description: hypothetical protein DKFZp434C119.1 - human
  misc_feature (1)..(246): NCBI GI NO: 13386046 NR Description: RIKEN cDNA 3010027G13 [Mus musculus]
  misc_feature (18)..(257): NCBI GI NO: 26337655 NR Description: unnamed protein product [Mus musculus]
  misc_feature (18)..(257): NCBI GI NO: 30520231 NR Description: RIKEN cDNA B230315F11 gene [Mus musculus]
  misc_feature (1)..(257): NCBI GI NO: 20137934 NR Description: Mitochondrial carrier protein CGI-69 (PRO2163)
  misc_feature (1)..(257): NCBI GI NO: 7770165 NR Description: PRO2163 [Homo sapiens]
  misc_feature (1)..(104): NCBI GI NO: 40253478 NR Description: putative mitochondrial carrier protein
MTPNLQEHYQVLCDCLPFRSNAKALVYLTRKEGYRVLTNGLAQGLMGSVLSTVTYFYCYEAARKRVKQYTSHNIGLPLLTALTARTITTCIAFPFEYWKTLQQSSVGVSGKSSMKLGTKINAGFGTLLGRDLMFSGLYWVLVENIRRHVKSWSQQNEEGYQDKGSLLLSNVIAGGLAGGISASVTLPLDVVKTRKQLNPKEYKKKSTIRILKDIYYNEGKDALTAGMRQRVTKVTMACAGILTLYELFSDMLREDNVY

SEQ ID NO: 5922 - DNA, 1295 bp, Glycine max
  misc_feature (1)..(1295): Ceres Seq. ID no. 14308401
atgtgtggcaggctccttccactgcgcaccatttggtggcatgatatagataacagctagtaattaggaagttggcgttacaagaacaagaacaaaaccccactcactcaatgcacataataatacaataatttcttagggagtgaatggcgaacttgccccaatccatctccacaagcggcgcgacgtcgtttggagcttcttctgccaccgccaaggatcgcagcaggatagcgtctgtggaacacctcgttctccaactcaacaaccccgatctccgagaaaacgctctccatgaactctccaagaagagagagttatttcaggatcttgctccattattgtggaattcttttggtaccatgtcagcacttttacaggaaatagtttcaatattccctgttatttcacctccaaaccttactccagcacaatcaactcgagtgtgcaatgctcttgctctttttcagtgtgtggcatctcaccttgatacaaggatgcaattcctccatgctcatatacctctatatctgtatcccttccttaatacaaccagtaagtccagaccatttgagtatttgaggcttaccagtcttggagtcattggtgccttagtgaaggttgatgatacaaaagttataagtttccttctttcaacagagattattccgttgtgcctgcgcagtatggaaatgggcagtgaattgtcaaaaactgttgcaacctttatagttcaaaaaattctgttggacgaaattggtttgaaatatatttgtactacagcagagcgcttttatgcagtagctcaagttttgggaaacatggtggaaactcttgttgagcaaccttcaagtcgtcttttgaagcacattattcgttgttatcttcgtctgtcagataatcagagtgcttgcaaggcattaagaacctgtcttccagacatgttaagagatgctacattcagtaattgccttcgtgaagacccaacagctaggatgtggctacagcagttgcttcataatattggagacaatcgggttcctgcactacaaggtggaggaggattcgatcgtatgatggggtcgtgagaacaaagacttgctactttgtgaaaattatcaactagctacatacataaaataggattttcagttgggcatgtattgagaatgaagaattgaatgggaagggaactatctttccgtaagatgttaagagtgaagtatacatgagaatagtgacctcttaattgaatacaaatattaaaatcataatgagccatatattttaaactg

SEQ ID NO: 5923 - protein, 313 aa, Glycine max
  peptide (1)..(313): Ceres Seq. ID no. 14308402
  misc_feature (35)..(294): Pfam Name: Pfam Description:  Cell differentiation family, Rcd1-like
  misc_feature (1)..(311): NCBI GI NO: 15232369 NR Description: cell differentiation protein -related
  misc_feature (1)..(311): NCBI GI NO: 21537250 NR Description: putative cell differentiation protein
  misc_feature (9)..(311): NCBI GI NO: 9294407 NR Description: RCD1 [Arabidopsis thaliana]
  misc_feature (1)..(299): NCBI GI NO: 15239962 NR Description: expressed protein [Arabidopsis thaliana]
  misc_feature (5)..(312): NCBI GI NO: 34897134 NR Description: putative cell differentiation protein
  misc_feature (5)..(312): NCBI GI NO: 34899762 NR Description: putative cell differentiation protein
  misc_feature (22)..(296): NCBI GI NO: 23613099 NR Description: cell differentiation protein rcd1, putative
  misc_feature (13)..(303): NCBI GI NO: 38174128 NR Description: Unknown (protein for MGC:76003)
  misc_feature (13)..(303): NCBI GI NO: 10946722 NR Description: rcd1
  misc_feature (17)..(296): NCBI GI NO: 23480586 NR Description: hypothetical protein [Plasmodium yoelii yoelii]
MANLPQSISTSGATSFGASSATAKDRSRIASVEHLVLQLNNPDLRENALHELSKKRELFQDLAPLLWNSFGTMSALLQEIVSIFPVISPPNLTPAQSTRVCNALALFQCVASHLDTRMQFLHAHIPLYLYPFLNTTSKSRPFEYLRLTSLGVIGALVKVDDTKVISFLLSTEIIPLCLRSMEMGSELSKTVATFIVQKILLDEIGLKYICTTAERFYAVAQVLGNMVETLVEQPSSRLLKHIIRCYLRLSDNQSACKALRTCLPDMLRDATFSNCLREDPTARMWLQQLLHNIGDNRVPALQGGGGFDRMMGS

SEQ ID NO: 5924 - protein, 241 aa, Glycine max
  peptide (1)..(241): Ceres Seq. ID no. 14308403
  misc_feature (1)..(222): Pfam Name: Pfam Description:  Cell differentiation family, Rcd1-like
  misc_feature (1)..(239): NCBI GI NO: 15232369 NR Description: cell differentiation protein -related
  misc_feature (1)..(239): NCBI GI NO: 21537250 NR Description: putative cell differentiation protein
  misc_feature (1)..(239): NCBI GI NO: 9294407 NR Description: RCD1 [Arabidopsis thaliana]
  misc_feature (1)..(227): NCBI GI NO: 15239962 NR Description: expressed protein [Arabidopsis thaliana]
  misc_feature (1)..(240): NCBI GI NO: 34897134 NR Description: putative cell differentiation protein
  misc_feature (1)..(240): NCBI GI NO: 34899762 NR Description: putative cell differentiation protein
  misc_feature (1)..(224): NCBI GI NO: 23613099 NR Description: cell differentiation protein rcd1, putative
  misc_feature (1)..(231): NCBI GI NO: 38174128 NR Description: Unknown (protein for MGC:76003)
  misc_feature (1)..(231): NCBI GI NO: 10946722 NR Description: rcd1
  misc_feature (1)..(224): NCBI GI NO: 23480586 NR Description: hypothetical protein [Plasmodium yoelii yoelii]
MSALLQEIVSIFPVISPPNLTPAQSTRVCNALALFQCVASHLDTRMQFLHAHIPLYLYPFLNTTSKSRPFEYLRLTSLGVIGALVKVDDTKVISFLLSTEIIPLCLRSMEMGSELSKTVATFIVQKILLDEIGLKYICTTAERFYAVAQVLGNMVETLVEQPSSRLLKHIIRCYLRLSDNQSACKALRTCLPDMLRDATFSNCLREDPTARMWLQQLLHNIGDNRVPALQGGGGFDRMMGS

SEQ ID NO: 5925 - protein, 196 aa, Glycine max
  peptide (1)..(196): Ceres Seq. ID no. 14308404
  misc_feature (1)..(177): Pfam Name: Pfam Description:  Cell differentiation family, Rcd1-like
  misc_feature (1)..(194): NCBI GI NO: 15232369 NR Description: cell differentiation protein -related
  misc_feature (1)..(194): NCBI GI NO: 21537250 NR Description: putative cell differentiation protein
  misc_feature (1)..(194): NCBI GI NO: 9294407 NR Description: RCD1 [Arabidopsis thaliana]
  misc_feature (1)..(182): NCBI GI NO: 15239962 NR Description: expressed protein [Arabidopsis thaliana]
  misc_feature (1)..(195): NCBI GI NO: 34897134 NR Description: putative cell differentiation protein
  misc_feature (1)..(195): NCBI GI NO: 34899762 NR Description: putative cell differentiation protein
  misc_feature (1)..(179): NCBI GI NO: 23613099 NR Description: cell differentiation protein rcd1, putative
  misc_feature (1)..(186): NCBI GI NO: 38174128 NR Description: Unknown (protein for MGC:76003)
  misc_feature (1)..(186): NCBI GI NO: 10946722 NR Description: rcd1
  misc_feature (1)..(179): NCBI GI NO: 23480586 NR Description: hypothetical protein [Plasmodium yoelii yoelii]
MQFLHAHIPLYLYPFLNTTSKSRPFEYLRLTSLGVIGALVKVDDTKVISFLLSTEIIPLCLRSMEMGSELSKTVATFIVQKILLDEIGLKYICTTAERFYAVAQVLGNMVETLVEQPSSRLLKHIIRCYLRLSDNQSACKALRTCLPDMLRDATFSNCLREDPTARMWLQQLLHNIGDNRVPALQGGGGFDRMMGS

SEQ ID NO: 5926 - DNA, 1202 bp, Glycine max
  misc_feature (1)..(1202): Ceres Seq. ID no. 15176487
gaacaaaaggagtagataaggaactcttgtgaagtctatacttgtcttagcattgttttcactcttgtttcttcatctgaatcaagtaagaagagcatggaggtggatttcaagtctccttcccttgaaaaaacagaagctgagcctcaagtagaagaaaacatgcgctttcacaagtctcttcaggttcatatataactatatatgcacatgtactctgttgtataatatttgtatgtaatctatttctttctgttgttctagtattcttctacagtttttctatgaagttctgtgttttggttatggtggttttaggagctaagagaatcgcagtctcagttgcaccatgctgcagattattgtgaaacaactttcttgaaaagtgaagctaagagagatgtgttggaaaatacaaaagaatacatatgcagggccatggttactgttgttgatcatcttgggaacgtctcggctaatcttgatgaccttatttctcaaacaaatgcattttctgaggctgagtctagaatccggtgcctcaaacaaagacttttctcatgtgaacaatatgctgataagcttgcgctcacaaaaatgagatggagggagaaagtgccaagactccatacacgatatttatcatcaccacccatccttgagagatcaagcagcgagaaattaagagattctaaaactgaagatacctcaaaattagatgataaacacatactagaaaagcatgaggatttgccactctttttgtacacccaaaagccacatggagataagaatttgaagccaaccagctttactacattgaaggagcataatttgaccatggtggtaccgattcgggatggtttgtcagtcttaacaaaagtttcaaatcctacatttcatttccaaggttccccgaaggttgcacgccatagaagatccttgcatggcagtgacatcttatggttcatacggcgtacaaaaagaatccaataaaaaacaatgttgcctattgcttcatgtgctattagccttaagtactcatggtggtggtctatcattttcatgtggcagttcaatgttagttgtttgattcaggaaccaaacattatttacaaatatttatattttgaggcactttgaagtagttatttatgtaattttggtaggaaacgtcatcatggttataatgatttagattt

SEQ ID NO: 5927 - protein, 185 aa, Glycine max
  peptide (1)..(185): Ceres Seq. ID no. 15176488
  misc_feature (1)..(174): NCBI GI NO: 18407012 NR Description: expressed protein [Arabidopsis thaliana]
  misc_feature (1)..(174): NCBI GI NO: 26452761 NR Description: unknown protein [Arabidopsis thaliana]
  misc_feature (1)..(88): NCBI GI NO: 34912804 NR Description: P0501G01.11
  misc_feature (1)..(89): NCBI GI NO: 15229112 NR Description: expressed protein [Arabidopsis thaliana]
  misc_feature (1)..(37): NCBI GI NO: 34909742 NR Description: hypothetical protein
  misc_feature (1)..(153): NCBI GI NO: 15238265 NR Description: expressed protein [Arabidopsis thaliana]
  misc_feature (1)..(153): NCBI GI NO: 21618229 NR Description: unknown [Arabidopsis thaliana]
  misc_feature (1)..(87): NCBI GI NO: 25408977 NR Description: hypothetical protein At2g46220
  misc_feature (1)..(84): NCBI GI NO: 30689382 NR Description: expressed protein [Arabidopsis thaliana]
  misc_feature (1)..(84): NCBI GI NO: 10177091 NR Description: emb|CAB66408
MVTVVDHLGNVSANLDDLISQTNAFSEAESRIRCLKQRLFSCEQYADKLALTKMRWREKVPRLHTRYLSSPPILERSSSEKLRDSKTEDTSKLDDKHILEKHEDLPLFLYTQKPHGDKNLKPTSFTTLKEHNLTMVVPIRDGLSVLTKVSNPTFHFQGSPKVARHRRSLHGSDILWFIRRTKRIQ

SEQ ID NO: 5928 - protein, 132 aa, Glycine max
  peptide (1)..(132): Ceres Seq. ID no. 15176489
  misc_feature (1)..(121): NCBI GI NO: 18407012 NR Description: expressed protein [Arabidopsis thaliana]
  misc_feature (1)..(121): NCBI GI NO: 26452761 NR Description: unknown protein [Arabidopsis thaliana]
  misc_feature (1)..(35): NCBI GI NO: 34912804 NR Description: P0501G01.11
  misc_feature (1)..(36): NCBI GI NO: 15229112 NR Description: expressed protein [Arabidopsis thaliana]
  misc_feature (1)..(100): NCBI GI NO: 15238265 NR Description: expressed protein [Arabidopsis thaliana]
  misc_feature (1)..(100): NCBI GI NO: 21618229 NR Description: unknown [Arabidopsis thaliana]
  misc_feature (1)..(34): NCBI GI NO: 25408977 NR Description: hypothetical protein At2g46220
  misc_feature (1)..(31): NCBI GI NO: 30689382 NR Description: expressed protein [Arabidopsis thaliana]
  misc_feature (1)..(31): NCBI GI NO: 10177091 NR Description: emb|CAB66408
  misc_feature (1)..(15): NCBI GI NO: 34913914 NR Description: OSJNBa0066C06.8
MRWREKVPRLHTRYLSSPPILERSSSEKLRDSKTEDTSKLDDKHILEKHEDLPLFLYTQKPHGDKNLKPTSFTTLKEHNLTMVVPIRDGLSVLTKVSNPTFHFQGSPKVARHRRSLHGSDILWFIRRTKRIQ

SEQ ID NO: 5929 - DNA, 1555 bp, Glycine max
  misc_feature (1)..(1555): Ceres Seq. ID no. 15225530
actcctttcccccctcccgttcccaacttttcttgtgtttaaacagcgaaytgggtaccggcccccccctcgagtcagctacgtaggccccccccccactgtctgcctttgttgtcatctttcttggtgctttatttgattgaaagagttctgggaattattatgcattgtggaaaccttcatgctgagaatgcttttacaggaagctccagtgcttgggaagccaacaatttttaccagtgatagtgtgggtgaaaagatccagtgggctcaatgtgaagattgtttcaagtggcgcaaattgccagcaagtgcgcttcttccatcaaaatggacgtgttctgataattcatgggatccagaaagattttcttgttcagctgcgcaagagctgacagcagagcaacttgagaatttgctacctccttgtaattcagctgttcccaagaaaatgaaggccaccaaacaggatcccgataatgctgaagctttggagggacttgacacccttgcaaatctakctatcctgggagagggtgaggcactcccagcatccgcccaggccacaactaagcatccacgccatagacctggctgctcttgcattgtttgcattcagcctcccagtggaaagggccccaagcataagcagacatgcacatgtaatgtatgcttaacagtgaagcgacgattccgtacccttatgttacggcgtgagaagaaacaatcagaaaaagaagcagagacaactcgtaaaaagcaacagcaacaacatcctctaccattaccttcatctgaaattttgcttgatgaagattccttgccctgtagtaacacaggtgatagtagcccaaaccagaaccaaaagagggtaatgatggttctgatgatgatcctagccgaataaaatcatctgcttcgccgttcaaaggcaaaattgacctcaatatccmaccagagcgagaagaagaattatcacctggttcggattctggcggcatgatgaagttgctccatgatgctactgagcgatatctcaaacagcagactgktgaactctggtactggagattcatcaggcagtcagtcacagctggtaggagatgcaatgagggaagataaacttagcaatggtgttgcccatggcagtagtagtcataatactgataaggaacatgcccaatctttgcctatgaatgtgtgaaaatcatattggcgctagccataattgatacgttcttgcaaagctatattgaagtggggaaagattttgctgtacattttatccacttcggcttcttgctttttcttgtttgtacataaagaggagtaggaaaaaatggtgagaaaccaatatattccggtaatataagtgggcatcatagtggtttgtgtaggaaaactatgaaatgcagctgaatgggtagtaggttgaagctgtttagtttctttgagagctcaccgtgccacctgatttcaacaacgttgaaaatgtaactatgcctaatttgttctcccaatttattcttagcctgtaagatgtttatactttctt

SEQ ID NO: 5930 - protein, 241 aa, Glycine max
  peptide (1)..(241): Ceres Seq. ID no. 15225531
  misc_feature (27)..(79): Pfam Name: Pfam Description:  ELM2 domain
  misc_feature (7)..(205): NCBI GI NO: 34898718 NR Description: similar to VP1/ABI3 family regulatory protein
  misc_feature (8)..(192): NCBI GI NO: 34394741 NR Description: VP1/ABI3 family regulatory protein-like
  misc_feature (8)..(234): NCBI GI NO: 25408077 NR Description: probable VP1/ABI3 family regulatory protein
  misc_feature (8)..(234): NCBI GI NO: 30684597 NR Description: transcriptional factor B3 family
  misc_feature (118)..(196): NCBI GI NO: 15234504 NR Description: transcriptional factor B3 family
  misc_feature (118)..(196): NCBI GI NO: 7485714 NR Description: hypothetical protein F18E5
  misc_feature (89)..(212): NCBI GI NO: 15236645 NR Description: transcriptional factor B3 family
  misc_feature (114)..(114): Xaa is any aa, unknown or other
MLRMLLQEAPVLGKPTIFTSDSVGEKIQWAQCEDCFKWRKLPASALLPSKWTCSDNSWDPERFSCSAAQELTAEQLENLLPPCNSAVPKKMKATKQDPDNAEALEGLDTLANLXILGEGEALPASAQATTKHPRHRPGCSCIVCIQPPSGKGPKHKQTCTCNVCLTVKRRFRTLMLRREKKQSEKEAETTRKKQQQQHPLPLPSSEILLDEDSLPCSNTGDSSPNQNQKRVMMVLMMILAE

SEQ ID NO: 5931 - protein, 238 aa, Glycine max
  peptide (1)..(238): Ceres Seq. ID no. 15225532
  misc_feature (24)..(76): Pfam Name: Pfam Description:  ELM2 domain
  misc_feature (4)..(202): NCBI GI NO: 34898718 NR Description: similar to VP1/ABI3 family regulatory protein
  misc_feature (5)..(189): NCBI GI NO: 34394741 NR Description: VP1/ABI3 family regulatory protein-like
  misc_feature (5)..(231): NCBI GI NO: 25408077 NR Description: probable VP1/ABI3 family regulatory protein
  misc_feature (5)..(231): NCBI GI NO: 30684597 NR Description: transcriptional factor B3 family
  misc_feature (115)..(193): NCBI GI NO: 15234504 NR Description: transcriptional factor B3 family
  misc_feature (115)..(193): NCBI GI NO: 7485714 NR Description: hypothetical protein F18E5
  misc_feature (86)..(209): NCBI GI NO: 15236645 NR Description: transcriptional factor B3 family
  misc_feature (111)..(111): Xaa is any aa, unknown or other
MLLQEAPVLGKPTIFTSDSVGEKIQWAQCEDCFKWRKLPASALLPSKWTCSDNSWDPERFSCSAAQELTAEQLENLLPPCNSAVPKKMKATKQDPDNAEALEGLDTLANLXILGEGEALPASAQATTKHPRHRPGCSCIVCIQPPSGKGPKHKQTCTCNVCLTVKRRFRTLMLRREKKQSEKEAETTRKKQQQQHPLPLPSSEILLDEDSLPCSNTGDSSPNQNQKRVMMVLMMILAE

SEQ ID NO: 5932 - protein, 151 aa, Glycine max
  peptide (1)..(151): Ceres Seq. ID no. 15225533
  misc_feature (1)..(115): NCBI GI NO: 34898718 NR Description: similar to VP1/ABI3 family regulatory protein
  misc_feature (1)..(102): NCBI GI NO: 34394741 NR Description: VP1/ABI3 family regulatory protein-like
  misc_feature (1)..(144): NCBI GI NO: 25408077 NR Description: probable VP1/ABI3 family regulatory protein
  misc_feature (1)..(144): NCBI GI NO: 30684597 NR Description: transcriptional factor B3 family
  misc_feature (28)..(106): NCBI GI NO: 15234504 NR Description: transcriptional factor B3 family
  misc_feature (28)..(106): NCBI GI NO: 7485714 NR Description: hypothetical protein F18E5
  misc_feature (1)..(122): NCBI GI NO: 15236645 NR Description: transcriptional factor B3 family
  misc_feature (24)..(24): Xaa is any aa, unknown or other
MKATKQDPDNAEALEGLDTLANLXILGEGEALPASAQATTKHPRHRPGCSCIVCIQPPSGKGPKHKQTCTCNVCLTVKRRFRTLMLRREKKQSEKEAETTRKKQQQQHPLPLPSSEILLDEDSLPCSNTGDSSPNQNQKRVMMVLMMILAE

SEQ ID NO: 5933 - DNA, 2086 bp, Glycine max
  misc_feature (1)..(2086): Ceres Seq. ID no. 15169400
gtccctttgcagcagtcaaagaaatcagaacctgagaagccaaattatagtgaagccaacaagggtgaaccagctcatgaaacatttatgcaacaaacaaagggtaaggataaacaatctgcaactgctactgcagaaacagatgataatcaagaagttagtggcctacctactaatattccaggaagcaacactaaaacagttatcaaaaatgagttaaaggcagtcagttctgttgccacacagaatactgaattaccttcagcgagagcttggaaacctgctcctggtttcaaggcaaaatctctcttagaaattcaactggaagaacaaaaaaagtcactgacagaaaagcttgtatctgaggttgctactcctgtcaattccatgagctcaacaactccctgggttggagttgtcgccaatccagactctatgaaggtgtcaaatgatggccacagagaagcagaaaatactgaatatctggctaaagctgaaaaatctcaaaatagtaaaagcaagaaaagcccattacatgatctattggcagaagatcttgtaccaaaatctagtgaaagagatggcaaggttcctgacagtatgctcccctcacaaaatatagctgttcactcaaaactggtagatgatggagactttattgaagctaaagacactaaaagaagccggaaaaaatctgcaaagttgaagagttcaggagctaaggtttcaatgccagttgcctctagtgaagtacccataagcccaattcacattgaaaaggtaaaaagctcccgttctgttcagcaggagaaagaacaactgccttccattccttcaggaccctctttgggagattttgttctttggaaaggagagccaacaagcccatctcctcctccagcatggactactgattctgctaggattcctaaaccaacatcattaagggacattctaaaggagcaggagaagaagtcctctgcagtactcccaaatcaactgcctactcctcaaaaatcacaaactgcccaagctgcacggagtagtggttcttcacgcccaatttcagcttcatctccatcaaaaactgcaccttctagccagataaactcccaagcttctctgtcaaaatacagaggggatgatgatatgttttggggtccagtcgagcaatccaagcaagaaaataagcagtcaaatttccctcaacttgctaggcaggggagctggggttctaaaagtgttcccatgaaaggtaattcacctggatcattgagtcgacaaaaatctgggagtggcaaaccaactgagcaatctctatcatcatcacctgcctcttctcaatcactgctaaaactgaaaaaagatgcaatgaccaagaattctgaagccatggacttcagagtttggtgtgagaatgaatgtgcgaggctcattgggacaaaagatacaagtttccttgagttttgcttgaagcagacaagatctgaagcagagatatttctcacagaaaacctgggattatatgaccatgatcatgaattcattgataaattcctcaattacatggacctactaccatcagatgttttggaaatagcttttcaaaccgtgaatgatcggaaagttgatgcaaatacagatgtactagagctaggttacactgatggatccttttcaaaagttggaaagaagaaaggcggcaacaaaggaaaaaaggtaagctcttcagttttgggattcaatgtcgtgagtaacaggatcatgatgggtgagatccagacagtagaagactaacataacataggttattgcggaacgtgtaaatattttttggccatacgtgtattttgtaaatgtattttctgttattcatttaactttttttggcttttttaacagtagcagcatcaattgtatctgctcaatcagttttgttgtcttaaatgtattttgacgtttgatcacgctgacaaacataatattgtgtcagccttaacttgattcaattaatttgctgtttatcttttgtaagcaagctaattgattcgtaggcagagtctgtagcttgtaaagcccgttttgg

SEQ ID NO: 5934 - protein, 598 aa, Glycine max
  peptide (1)..(598): Ceres Seq. ID no. 15169401
  misc_feature (1)..(294): Pfam Name: Pfam Description:  Protein of unknown function, DUF612
  misc_feature (8)..(598): NCBI GI NO: 15239132 NR Description: expressed protein [Arabidopsis thaliana]
  misc_feature (83)..(598): NCBI GI NO: 34394390 NR Description: unknown protein
  misc_feature (7)..(464): NCBI GI NO: 32477034 NR Description: hypothetical protein-signal peptide prediction
VPLQQSKKSEPEKPNYSEANKGEPAHETFMQQTKGKDKQSATATAETDDNQEVSGLPTNIPGSNTKTVIKNELKAVSSVATQNTELPSARAWKPAPGFKAKSLLEIQLEEQKKSLTEKLVSEVATPVNSMSSTTPWVGVVANPDSMKVSNDGHREAENTEYLAKAEKSQNSKSKKSPLHDLLAEDLVPKSSERDGKVPDSMLPSQNIAVHSKLVDDGDFIEAKDTKRSRKKSAKLKSSGAKVSMPVASSEVPISPIHIEKVKSSRSVQQEKEQLPSIPSGPSLGDFVLWKGEPTSPSPPPAWTTDSARIPKPTSLRDILKEQEKKSSAVLPNQLPTPQKSQTAQAARSSGSSRPISASSPSKTAPSSQINSQASLSKYRGDDDMFWGPVEQSKQENKQSNFPQLARQGSWGSKSVPMKGNSPGSLSRQKSGSGKPTEQSLSSSPASSQSLLKLKKDAMTKNSEAMDFRVWCENECARLIGTKDTSFLEFCLKQTRSEAEIFLTENLGLYDHDHEFIDKFLNYMDLLPSDVLEIAFQTVNDRKVDANTDVLELGYTDGSFSKVGKKKGGNKGKKVSSSVLGFNVVSNRIMMGEIQTVED

SEQ ID NO: 5935 - protein, 569 aa, Glycine max
  peptide (1)..(569): Ceres Seq. ID no. 15169402
  misc_feature (1)..(265): Pfam Name: Pfam Description:  Protein of unknown function, DUF612
  misc_feature (1)..(569): NCBI GI NO: 15239132 NR Description: expressed protein [Arabidopsis thaliana]
  misc_feature (54)..(569): NCBI GI NO: 34394390 NR Description: unknown protein
  misc_feature (1)..(435): NCBI GI NO: 32477034 NR Description: hypothetical protein-signal peptide prediction
MQQTKGKDKQSATATAETDDNQEVSGLPTNIPGSNTKTVIKNELKAVSSVATQNTELPSARAWKPAPGFKAKSLLEIQLEEQKKSLTEKLVSEVATPVNSMSSTTPWVGVVANPDSMKVSNDGHREAENTEYLAKAEKSQNSKSKKSPLHDLLAEDLVPKSSERDGKVPDSMLPSQNIAVHSKLVDDGDFIEAKDTKRSRKKSAKLKSSGAKVSMPVASSEVPISPIHIEKVKSSRSVQQEKEQLPSIPSGPSLGDFVLWKGEPTSPSPPPAWTTDSARIPKPTSLRDILKEQEKKSSAVLPNQLPTPQKSQTAQAARSSGSSRPISASSPSKTAPSSQINSQASLSKYRGDDDMFWGPVEQSKQENKQSNFPQLARQGSWGSKSVPMKGNSPGSLSRQKSGSGKPTEQSLSSSPASSQSLLKLKKDAMTKNSEAMDFRVWCENECARLIGTKDTSFLEFCLKQTRSEAEIFLTENLGLYDHDHEFIDKFLNYMDLLPSDVLEIAFQTVNDRKVDANTDVLELGYTDGSFSKVGKKKGGNKGKKVSSSVLGFNVVSNRIMMGEIQTVED

SEQ ID NO: 5936 - protein, 469 aa, Glycine max
  peptide (1)..(469): Ceres Seq. ID no. 15169403
  misc_feature (1)..(165): Pfam Name: Pfam Description:  Protein of unknown function, DUF612
  misc_feature (1)..(469): NCBI GI NO: 15239132 NR Description: expressed protein [Arabidopsis thaliana]
  misc_feature (1)..(469): NCBI GI NO: 34394390 NR Description: unknown protein
  misc_feature (1)..(335): NCBI GI NO: 32477034 NR Description: hypothetical protein-signal peptide prediction
MSSTTPWVGVVANPDSMKVSNDGHREAENTEYLAKAEKSQNSKSKKSPLHDLLAEDLVPKSSERDGKVPDSMLPSQNIAVHSKLVDDGDFIEAKDTKRSRKKSAKLKSSGAKVSMPVASSEVPISPIHIEKVKSSRSVQQEKEQLPSIPSGPSLGDFVLWKGEPTSPSPPPAWTTDSARIPKPTSLRDILKEQEKKSSAVLPNQLPTPQKSQTAQAARSSGSSRPISASSPSKTAPSSQINSQASLSKYRGDDDMFWGPVEQSKQENKQSNFPQLARQGSWGSKSVPMKGNSPGSLSRQKSGSGKPTEQSLSSSPASSQSLLKLKKDAMTKNSEAMDFRVWCENECARLIGTKDTSFLEFCLKQTRSEAEIFLTENLGLYDHDHEFIDKFLNYMDLLPSDVLEIAFQTVNDRKVDANTDVLELGYTDGSFSKVGKKKGGNKGKKVSSSVLGFNVVSNRIMMGEIQTVED

SEQ ID NO: 5937 - DNA, 1758 bp, Glycine max
  misc_feature (1)..(1758): Ceres Seq. ID no. 14308359
gcgaccaacttttcctgactcatccacaccactgcttccctttcttccatcacttttcttcctcataacttgcattttctccaaaaaccaaagaaagaaagaaacacacacacacacacctctctctctctctcactcacacatggcagctttttcataccaataccatccttttcttgttgaccctgcattcttccccaacaacttaaacaccccttcccctcctcctcatcagtttcaacaactccctcatgaaacatcatcttttaatgtcacaaaccaggagactagctgtgttgatcagagctccaagatcaccatcagtgacaatgagccttctgtcactgaaaaccttagccctcagtcctccatggtagtggacaagcttgaaactggggagcaggtcactcagaaggtgaacactcctgtggagaagaaaaggaaaaccagaaatggatcttccttgactagtaacccccaatccaaggatgctgcaacagaaaggaaaaacaagaaacaaaggaagggcaatggtgggttgaaagaagaggacaaggcaaaagaagagaagaaggaacagagaaagtgtcccgaagagcctccaacaggctatatccatgtcagagcaagaaggggtcaggcaacggatagccacagccttgctgaaagggtgagaagagagaagataagtgaaaggatgaaggtgttgcaacggcttgtgccaggctgtgacaaggtgactggaaaggcccttatgttggacgaaataatcaattatgttcagtctctacagaatcaagttgagttcttgtcaatgaagcttgcttcagtgaatcccatgttttatgacttggcaacggatctagacaccctcttggttagaccagagaaactaaatagcatggcatcaccatcaccaccactaccatctgtgtcacattgcaacagccctaacaaccaagccactacttttgctgatacaaccaccatgacccccaccaacatcttccacattgctagtgactatcttttggataattcagtctcattttttcttcaagggcagaggtcaaatgtgttctctgaggaggatactggtagtcatttctgggacgcagaggaccagcggcaaaagtttcttcatccatgtggattcagcaacaacttatgttcctttcattaatataaaattcatagagctgccctacaaaactacgaacatgttgatttagcttttacactagctaggtaaggaaattccaaagaggcatgagaatgagccaacaagaagttaggcattaggaggaaaaaccaaagctacgcttggtatcggtatataagtacatcatcattccagggtaattcgtagcgtaaagagtctggcttggttcctagtccatcagattaaagtggcctttgaagatgaataattaaggggcaccaaaattaatggatgaagaaccaaaaggacagaaaataccgaccaaataagaccatatctttttctagatccattgttctgtttcagtgattgttgactctccaaggacttatgatgcacaaattccgagagactatcaatcctatatacagagcagacattgaaattaatttctgttccatgtaaattatatccaagtattgattcttgtggtggcagttattctgttggtacagttaatttcaccattattgagaaatgaggggttgatgcaactgatcatgttcttgacatgactggccatgcatttgtttgtt

SEQ ID NO: 5938 - protein, 393 aa, Glycine max
  peptide (1)..(393): Ceres Seq. ID no. 14308360
  misc_feature (214)..(264): Pfam Name: Pfam Description:  Helix-loop-helix DNA-binding domain
  misc_feature (77)..(305): NCBI GI NO: 5923912 NR Description: bHLH transcription factor GBOF-1
  misc_feature (83)..(304): NCBI GI NO: 18423212 NR Description: bHLH protein family [Arabidopsis thaliana]
  misc_feature (93)..(379): NCBI GI NO: 15239013 NR Description: bHLH protein family [Arabidopsis thaliana]
  misc_feature (93)..(379): NCBI GI NO: 20127085 NR Description: putative bHLH transcription factor
  misc_feature (85)..(331): NCBI GI NO: 20127044 NR Description: putative bHLH transcription factor
  misc_feature (85)..(331): NCBI GI NO: 30697769 NR Description: DNA-binding protein -related
  misc_feature (93)..(326): NCBI GI NO: 29647487 NR Description: OJ1191_A10.7
  misc_feature (85)..(331): NCBI GI NO: 15221563 NR Description: DNA-binding protein -related
  misc_feature (102)..(382): NCBI GI NO: 22331295 NR Description: bHLH protein [Arabidopsis thaliana]
  misc_feature (161)..(323): NCBI GI NO: 30681559 NR Description: expressed protein [Arabidopsis thaliana]
RPTFPDSSTPLLPFLPSLFFLITCIFSKNQRKKETHTHTPLSLSHSHMAAFSYQYHPFLVDPAFFPNNLNTPSPPPHQFQQLPHETSSFNVTNQETSCVDQSSKITISDNEPSVTENLSPQSSMVVDKLETGEQVTQKVNTPVEKKRKTRNGSSLTSNPQSKDAATERKNKKQRKGNGGLKEEDKAKEEKKEQRKCPEEPPTGYIHVRARRGQATDSHSLAERVRREKISERMKVLQRLVPGCDKVTGKALMLDEIINYVQSLQNQVEFLSMKLASVNPMFYDLATDLDTLLVRPEKLNSMASPSPPLPSVSHCNSPNNQATTFADTTTMTPTNIFHIASDYLLDNSVSFFLQGQRSNVFSEEDTGSHFWDAEDQRQKFLHPCGFSNNLCSFH

SEQ ID NO: 5939 - protein, 346 aa, Glycine max
  peptide (1)..(346): Ceres Seq. ID no. 14308361
  misc_feature (167)..(217): Pfam Name: Pfam Description:  Helix-loop-helix DNA-binding domain
  misc_feature (30)..(258): NCBI GI NO: 5923912 NR Description: bHLH transcription factor GBOF-1
  misc_feature (36)..(257): NCBI GI NO: 18423212 NR Description: bHLH protein family [Arabidopsis thaliana]
  misc_feature (46)..(332): NCBI GI NO: 15239013 NR Description: bHLH protein family [Arabidopsis thaliana]
  misc_feature (46)..(332): NCBI GI NO: 20127085 NR Description: putative bHLH transcription factor
  misc_feature (38)..(284): NCBI GI NO: 20127044 NR Description: putative bHLH transcription factor
  misc_feature (38)..(284): NCBI GI NO: 30697769 NR Description: DNA-binding protein -related
  misc_feature (46)..(279): NCBI GI NO: 29647487 NR Description: OJ1191_A10.7
  misc_feature (38)..(284): NCBI GI NO: 15221563 NR Description: DNA-binding protein -related
  misc_feature (55)..(335): NCBI GI NO: 22331295 NR Description: bHLH protein [Arabidopsis thaliana]
  misc_feature (114)..(276): NCBI GI NO: 30681559 NR Description: expressed protein [Arabidopsis thaliana]
MAAFSYQYHPFLVDPAFFPNNLNTPSPPPHQFQQLPHETSSFNVTNQETSCVDQSSKITISDNEPSVTENLSPQSSMVVDKLETGEQVTQKVNTPVEKKRKTRNGSSLTSNPQSKDAATERKNKKQRKGNGGLKEEDKAKEEKKEQRKCPEEPPTGYIHVRARRGQATDSHSLAERVRREKISERMKVLQRLVPGCDKVTGKALMLDEIINYVQSLQNQVEFLSMKLASVNPMFYDLATDLDTLLVRPEKLNSMASPSPPLPSVSHCNSPNNQATTFADTTTMTPTNIFHIASDYLLDNSVSFFLQGQRSNVFSEEDTGSHFWDAEDQRQKFLHPCGFSNNLCSFH

SEQ ID NO: 5940 - protein, 270 aa, Glycine max
  peptide (1)..(270): Ceres Seq. ID no. 14308362
  misc_feature (91)..(141): Pfam Name: Pfam Description:  Helix-loop-helix DNA-binding domain
  misc_feature (1)..(182): NCBI GI NO: 5923912 NR Description: bHLH transcription factor GBOF-1
  misc_feature (1)..(181): NCBI GI NO: 18423212 NR Description: bHLH protein family [Arabidopsis thaliana]
  misc_feature (1)..(256): NCBI GI NO: 15239013 NR Description: bHLH protein family [Arabidopsis thaliana]
  misc_feature (1)..(256): NCBI GI NO: 20127085 NR Description: putative bHLH transcription factor
  misc_feature (1)..(208): NCBI GI NO: 20127044 NR Description: putative bHLH transcription factor
  misc_feature (1)..(208): NCBI GI NO: 30697769 NR Description: DNA-binding protein -related
  misc_feature (1)..(203): NCBI GI NO: 29647487 NR Description: OJ1191_A10.7
  misc_feature (1)..(208): NCBI GI NO: 15221563 NR Description: DNA-binding protein -related
  misc_feature (1)..(259): NCBI GI NO: 22331295 NR Description: bHLH protein [Arabidopsis thaliana]
  misc_feature (38)..(200): NCBI GI NO: 30681559 NR Description: expressed protein [Arabidopsis thaliana]
MVVDKLETGEQVTQKVNTPVEKKRKTRNGSSLTSNPQSKDAATERKNKKQRKGNGGLKEEDKAKEEKKEQRKCPEEPPTGYIHVRARRGQATDSHSLAERVRREKISERMKVLQRLVPGCDKVTGKALMLDEIINYVQSLQNQVEFLSMKLASVNPMFYDLATDLDTLLVRPEKLNSMASPSPPLPSVSHCNSPNNQATTFADTTTMTPTNIFHIASDYLLDNSVSFFLQGQRSNVFSEEDTGSHFWDAEDQRQKFLHPCGFSNNLCSFH

SEQ ID NO: 5941 - DNA, 1865 bp, Glycine max
  misc_feature (1)..(1865): Ceres Seq. ID no. 15170990
gagtgatgctatgttatggcttgggtgtttgagttgcggagtcgttccctctgcacgtcctcctcctcgaaatggagggtgaagcaggtgacaacctccaacttccaagagtccctgcaagagataaagacgcacatctccaactccgactttgtcgccatttccatgggaaaaacgggctctccctccgcgccgtcgtggctccgccctctacccttcgacaccgcccagactgcctactccaaggcccgccgcgccgcccagagattccagctcctccacttcgccgtctgccccttctccgtctcccgctccgacaaactcctcgctcacccgtataatttcatgttgtttccaagagatgaaatgaagatggggatgcccacttacagcttttcgtgccagacttcgctacttgcctccatggctcgccaggggtttgatttcaatgcttgcgtctacaatggcatatcatatctatccagagcacaagagtcagcagctagaattcgtcttgggactgctctcccttctcttcgtgtgatgaaatcttcttcaccctctactgttgctgatacagtgtttgttgagaggattagatcaaaggttaaatattggagagagtcatgtaaaagctccgacacaaacaaaagcagagatgaagaacttgtcaactcccttaggaatattgtcctgggcaatgaacagttcagatcaagaccttgcatgactgtagatgtttgcagtgaacgtcaagtgcaacttattctggagatggtgttagactactcagatgatcttcttcctttgccaatccctactaagagtgggaccattcatgcagtacgaattgttttggcaaattctaaagaagataaggatttattggagagagagcttcgaaatcttgaagaggaggaaagcaagaaaattcgtggattccgagagattgtacactaattcattcaaaattcattgctccacttccgcctgagatagatgaatttgtgagctccttgtgctcggttttccctgaggtgcttgacataaattatttgatgaagaaacatggaaccatgagaaaagtgaccaacattccgagtgctatatcctacttgaataatcatttttttgcaccagttgatttggaaattcctgaccaagctacagtaaaagaaggcaagattcacggacttactgcattaaggctatcctatttatttatgaagctttgctctatattgaaaatttccccaaatgttactgaatctggcaacaagcatttggcccccgagcttgaagacttcaccaatgtattccatccattctcaacccctatccaagattcatttaatggtggggatgtcggcatgtggaccaataatacaaaaaaagtcagttgtgagcatttggttttcttatggggattcaaaattggtatcacagctggcatgctgaagagtttacttcgttcttcccatgatatcttttcacgagagtttgatgttaaattggtggacaagagttgtgccattgttgttttctggcaatctggggtatcaaaaagatttctagacatattgaatagtgaagaaataagaggagacttaaaggagttagtgtcagatggcatgagggtaaccagttatgagacctacaacacaatatgtaggttaggtttgtgggagatggatcttgcagaatcattagaaagagccttggaaagttcttgctgtgatattgagagtaattgtgagagaaaatcttctgagattcattggtataatgacaatgtaattaacttggatgatctttaatgttgtcatgaaccaattattgaaatgttagttctatcattcattgag

SEQ ID NO: 5942 - protein, 314 aa, Glycine max
  peptide (1)..(314): Ceres Seq. ID no. 15170991
  misc_feature (23)..(162): Pfam Name: Pfam Description:  CAF1 family ribonuclease
  misc_feature (14)..(314): NCBI GI NO: 15230837 NR Description: hypothetical protein; protein id: At3g25430
  misc_feature (14)..(314): NCBI GI NO: 9279724 NR Description: gb|AAD21483
  misc_feature (1)..(313): NCBI GI NO: 15222792 NR Description: poly(A)-specific ribonuclease -related
  misc_feature (1)..(313): NCBI GI NO: 8778305 NR Description: F14J16.11 [Arabidopsis thaliana]
  misc_feature (24)..(164): NCBI GI NO: 14495249 NR Description: poly(A)-specific ribonuclease [Xenopus laevis]
  misc_feature (24)..(217): NCBI GI NO: 4505611 NR Description: poly
  misc_feature (24)..(164): NCBI GI NO: 29791562 NR Description: Similar to poly
  misc_feature (24)..(164): NCBI GI NO: 20891791 NR Description: poly
  misc_feature (24)..(164): NCBI GI NO: 18256918 NR Description: poly
  misc_feature (21)..(164): NCBI GI NO: 34868070 NR Description: similar to poly
MAWVFELRSRSLCTSSSSKWRVKQVTTSNFQESLQEIKTHISNSDFVAISMGKTGSPSAPSWLRPLPFDTAQTAYSKARRAAQRFQLLHFAVCPFSVSRSDKLLAHPYNFMLFPRDEMKMGMPTYSFSCQTSLLASMARQGFDFNACVYNGISYLSRAQESAARIRLGTALPSLRVMKSSSPSTVADTVFVERIRSKVKYWRESCKSSDTNKSRDEELVNSLRNIVLGNEQFRSRPCMTVDVCSERQVQLILEMVLDYSDDLLPLPIPTKSGTIHAVRIVLANSKEDKDLLERELRNLEEEESKKIRGFREIVH

SEQ ID NO: 5943 - protein, 264 aa, Glycine max
  peptide (1)..(264): Ceres Seq. ID no. 15170992
  misc_feature (1)..(112): Pfam Name: Pfam Description:  CAF1 family ribonuclease
  misc_feature (1)..(264): NCBI GI NO: 15230837 NR Description: hypothetical protein; protein id: At3g25430
  misc_feature (1)..(264): NCBI GI NO: 9279724 NR Description: gb|AAD21483
  misc_feature (1)..(263): NCBI GI NO: 15222792 NR Description: poly(A)-specific ribonuclease -related
  misc_feature (1)..(263): NCBI GI NO: 8778305 NR Description: F14J16.11 [Arabidopsis thaliana]
  misc_feature (1)..(114): NCBI GI NO: 14495249 NR Description: poly(A)-specific ribonuclease [Xenopus laevis]
  misc_feature (1)..(167): NCBI GI NO: 4505611 NR Description: poly
  misc_feature (1)..(114): NCBI GI NO: 29791562 NR Description: Similar to poly
  misc_feature (1)..(114): NCBI GI NO: 20891791 NR Description: poly
  misc_feature (1)..(114): NCBI GI NO: 18256918 NR Description: poly
  misc_feature (1)..(114): NCBI GI NO: 34868070 NR Description: similar to poly
MGKTGSPSAPSWLRPLPFDTAQTAYSKARRAAQRFQLLHFAVCPFSVSRSDKLLAHPYNFMLFPRDEMKMGMPTYSFSCQTSLLASMARQGFDFNACVYNGISYLSRAQESAARIRLGTALPSLRVMKSSSPSTVADTVFVERIRSKVKYWRESCKSSDTNKSRDEELVNSLRNIVLGNEQFRSRPCMTVDVCSERQVQLILEMVLDYSDDLLPLPIPTKSGTIHAVRIVLANSKEDKDLLERELRNLEEEESKKIRGFREIVH

SEQ ID NO: 5944 - protein, 252 aa, Glycine max
  peptide (1)..(252): Ceres Seq. ID no. 15170993
  misc_feature (1)..(63): Pfam Name: Pfam Description:  CAF1 family ribonuclease
  misc_feature (1)..(252): NCBI GI NO: 15230837 NR Description: hypothetical protein; protein id: At3g25430
  misc_feature (1)..(239): NCBI GI NO: 9279724 NR Description: gb|AAD21483
  misc_feature (1)..(20): NCBI GI NO: 15222792 NR Description: poly(A)-specific ribonuclease -related
  misc_feature (1)..(20): NCBI GI NO: 8778305 NR Description: F14J16.11 [Arabidopsis thaliana]
MKKHGTMRKVTNIPSAISYLNNHFFAPVDLEIPDQATVKEGKIHGLTALRLSYLFMKLCSILKISPNVTESGNKHLAPELEDFTNVFHPFSTPIQDSFNGGDVGMWTNNTKKVSCEHLVFLWGFKIGITAGMLKSLLRSSHDIFSREFDVKLVDKSCAIVVFWQSGVSKRFLDILNSEEIRGDLKELVSDGMRVTSYETYNTICRLGLWEMDLAESLERALESSCCDIESNCERKSSEIHWYNDNVINLDDL

SEQ ID NO: 5945 - DNA, 1186 bp, Glycine max
  misc_feature (1)..(1186): Ceres Seq. ID no. 14310460
agttagcacttagcagactctgctgcagtgaggtgaggggaggtttgtttgttgtttcgtttttcctttcctttccgccagaatccgttgagaatggcgttgccggtagtcgtcgatgcagagtacctcaaggaggtcgacaaggctcgccgcgatctccgcgcactcatcgctaacaggaactgcgctcctctcatgctccgattagcctggcacgatgccggaacttacgatgctaagaccaagaccggtggacctaacggttcgatccggaacgaggaagagtattctcacggagccaataatggcttgaagaaagctattgatttctgccaggaagtgaaggcaaaatatcctaaaattacatatgcagatctcttccagcttgcgggtgttgttgcagttgaggttactgggggtccaacaattgatttcgttcctggtagaagagattcaaaagtatctcctaatgaagggcggcttcctgatgctaaaaaaggtgttccacatctccgtgatatcttttatcgaatgggcttgactgaccgagatattgttgcactatctggaggacatacactggggagagcacatccagagagatcagggtttgatggcccttggacggaggaccctctgaagtttgataactcatactttgtggaacttttgaaagaagattctgctgggctgcttaaacttccaacagacaaggctttattggaggatgctgaatttcgctgttatgttgagctatatgcaaaggatgaggatgcattttttcgagattatgctgaatcacataagaaactttcagagctaggctttgtgccaagttcaaagccgatttctattaaggaagggaccatactggcacaaggtgctgtaggagttgtagttgctaccgcagtggtgatcctcagttacttgtatgaagttcgcaaaagagggaagtaaactggatttgttcatctcttggctgttacggttgcgtgaccctgaccctgacccatagtgtgcaaaacagggttcatttttgcagcttcagtttctgtttacttagtaacaataaagaataatgctacagacattcagacttttatatgaatagactaaaaacatccctgagtactcaaattgagagcaacttcattatacgtaaatacaaattttaacattcttagtt

SEQ ID NO: 5946 - protein, 287 aa, Glycine max
  peptide (1)..(287): Ceres Seq. ID no. 14310461
  misc_feature (18)..(225): Pfam Name: Pfam Description:  Peroxidase
  misc_feature (1)..(287): NCBI GI NO: 15430584 NR Description: peroxisomal ascorbate peroxidase
  misc_feature (1)..(287): NCBI GI NO: 4835909 NR Description: cytosolic ascorbate peroxidase
  misc_feature (1)..(287): NCBI GI NO: 7484726 NR Description: L-ascorbate peroxidase (EC 1
  misc_feature (1)..(287): NCBI GI NO: 17066705 NR Description: ascorbate peroxidase [Capsicum annuum]
  misc_feature (1)..(287): NCBI GI NO: 15236239 NR Description: ascorbate peroxidase, putative (APX)
  misc_feature (1)..(287): NCBI GI NO: 5442410 NR Description: ascorbate peroxidase [Zantedeschia aethiopica]
  misc_feature (1)..(287): NCBI GI NO: 3288066 NR Description: ascorbate peroxidase [Arabidopsis thaliana]
  misc_feature (1)..(287): NCBI GI NO: 15080682 NR Description: peroxisome type ascorbate peroxidase
  misc_feature (1)..(285): NCBI GI NO: 38344123 NR Description: OSJNBb0072N21.2
  misc_feature (1)..(285): NCBI GI NO: 37030052 NR Description: putative peroxisome-bound ascorbate peroxidase
MALPVVVDAEYLKEVDKARRDLRALIANRNCAPLMLRLAWHDAGTYDAKTKTGGPNGSIRNEEEYSHGANNGLKKAIDFCQEVKAKYPKITYADLFQLAGVVAVEVTGGPTIDFVPGRRDSKVSPNEGRLPDAKKGVPHLRDIFYRMGLTDRDIVALSGGHTLGRAHPERSGFDGPWTEDPLKFDNSYFVELLKEDSAGLLKLPTDKALLEDAEFRCYVELYAKDEDAFFRDYAESHKKLSELGFVPSSKPISIKEGTILAQGAVGVVVATAVVILSYLYEVRKRGK

SEQ ID NO: 5947 - protein, 253 aa, Glycine max
  peptide (1)..(253): Ceres Seq. ID no. 14310462
  misc_feature (1)..(191): Pfam Name: Pfam Description:  Peroxidase
  misc_feature (1)..(253): NCBI GI NO: 15430584 NR Description: peroxisomal ascorbate peroxidase
  misc_feature (1)..(253): NCBI GI NO: 4835909 NR Description: cytosolic ascorbate peroxidase
  misc_feature (1)..(253): NCBI GI NO: 7484726 NR Description: L-ascorbate peroxidase (EC 1
  misc_feature (1)..(253): NCBI GI NO: 17066705 NR Description: ascorbate peroxidase [Capsicum annuum]
  misc_feature (1)..(253): NCBI GI NO: 15236239 NR Description: ascorbate peroxidase, putative (APX)
  misc_feature (1)..(253): NCBI GI NO: 5442410 NR Description: ascorbate peroxidase [Zantedeschia aethiopica]
  misc_feature (1)..(253): NCBI GI NO: 3288066 NR Description: ascorbate peroxidase [Arabidopsis thaliana]
  misc_feature (1)..(253): NCBI GI NO: 15080682 NR Description: peroxisome type ascorbate peroxidase
  misc_feature (1)..(251): NCBI GI NO: 38344123 NR Description: OSJNBb0072N21.2
  misc_feature (1)..(251): NCBI GI NO: 37030052 NR Description: putative peroxisome-bound ascorbate peroxidase
MLRLAWHDAGTYDAKTKTGGPNGSIRNEEEYSHGANNGLKKAIDFCQEVKAKYPKITYADLFQLAGVVAVEVTGGPTIDFVPGRRDSKVSPNEGRLPDAKKGVPHLRDIFYRMGLTDRDIVALSGGHTLGRAHPERSGFDGPWTEDPLKFDNSYFVELLKEDSAGLLKLPTDKALLEDAEFRCYVELYAKDEDAFFRDYAESHKKLSELGFVPSSKPISIKEGTILAQGAVGVVVATAVVILSYLYEVRKRGK

SEQ ID NO: 5948 - DNA, 1564 bp, Glycine max
  misc_feature (1)..(1564): Ceres Seq. ID no. 14308455
aaagcaaaactgtcaagggttctgtaattgccaaaaataatcctaaatcttctggtttaatgaagccaaacaagttaaagtctacacatagaaatgggattttaagcagcacgatatctgagactgtggctgatacaggaaaagatatcaaaattctaaacaaggctcctcatttgcgttctaattttccagcagccactgctccaaatacatatcaccaaataggaaaattttcatcattagccaacccaacatgccatgtttccccccccacaaaccacaggccaaatacctctactaactacagaccaactgggagagtgtctaatgtaaatgatcgagttttgttgggtgacaacaaattcaggagtggacaatctgaaatgtcaatggagatgactcggggtcctcggggtcattacaacaattttcttctacaaccatcacttgttaaggatgcacttgcaatcacaatatgtagagacgaatataacctttcagatttccaaactgaatacgaaattgctaaattttatgtgattaaatctttcaatgaagatgacgttcataagagtgttaaatataatgtttggacaagtactccaaatggaaataagaagttgaacgccgcattccttgatgcagaagctaaattgagacagacagggactaagtgtccagttttcctcttcttctcggttaatgctagcagacagtttgttggagtggctgagatgcttggaccggtggactttaaaaacgacatgaacttttggaaacttgataagtacaacggtttcttcccaattaagtggcacataataaaagatgttcccaacaatcagtttgtgcatatcatccttccaagcaatgagaacaagcctgtaacttacactagggacacacaagagattggattgaaggagggcctggagatgctgaatatttttagaagttatacagctaagacatctctattggatgattttgacttctatgagaggcgagaaaagttatttcgttcccagaggagtactaagcacaagcatgcaaggccggaacaggaagtatatggcaatgacaattatcaaaacactgtcaaagccagagagaagaaaatggagatgcaatcgagtggtaccaagcaaggtactctcatcaaacataccaaaaacctttctctcaacaactctggatttagatagcaagattgggagaggagaaaaagagagcccgatatttatttctacacgtatgtaggcatttaagagttgcagacgcaattgcagtttggtttgtttagagcttctgaagcacacgcacgcttcctttttgatttgtgtgatatgccgataagatgaccacgacaacacattttaagtttgaccaattatttttatattactcaatgagttgatgtttgccattggcaaatgaggaggtatttgatagtatggttcgatgtctccaatatttccgtataactcattggctttggtctgtatttactattttgtttcacgtggatgagcgcccagttccatagttgtgttttgtttggttg

SEQ ID NO: 5949 - protein, 400 aa, Glycine max
  peptide (1)..(400): Ceres Seq. ID no. 14308456
  misc_feature (229)..(319): Pfam Name: Pfam Description:  YT521-B-like family
  misc_feature (5)..(400): NCBI GI NO: 30681366 NR Description: expressed protein [Arabidopsis thaliana]
  misc_feature (156)..(343): NCBI GI NO: 34911170 NR Description: B1144G04.32
  misc_feature (91)..(336): NCBI GI NO: 38346520 NR Description: OSJNBa0027H09.15
  misc_feature (147)..(400): NCBI GI NO: 25402579 NR Description: hypothetical protein
  misc_feature (20)..(338): NCBI GI NO: 7487895 NR Description: hypothetical protein YUP8H12R
  misc_feature (20)..(338): NCBI GI NO: 18412316 NR Description: expressed protein [Arabidopsis thaliana]
  misc_feature (99)..(386): NCBI GI NO: 18087662 NR Description: putative RNA-binding protein [Oryza sativa]
  misc_feature (98)..(391): NCBI GI NO: 30684473 NR Description: expressed protein [Arabidopsis thaliana]
  misc_feature (101)..(343): NCBI GI NO: 22773231 NR Description: Putative RNA-binding protein
  misc_feature (67)..(366): NCBI GI NO: 18405397 NR Description: expressed protein [Arabidopsis thaliana]
SKTVKGSVIAKNNPKSSGLMKPNKLKSTHRNGILSSTISETVADTGKDIKILNKAPHLRSNFPAATAPNTYHQIGKFSSLANPTCHVSPPTNHRPNTSTNYRPTGRVSNVNDRVLLGDNKFRSGQSEMSMEMTRGPRGHYNNFLLQPSLVKDALAITICRDEYNLSDFQTEYEIAKFYVIKSFNEDDVHKSVKYNVWTSTPNGNKKLNAAFLDAEAKLRQTGTKCPVFLFFSVNASRQFVGVAEMLGPVDFKNDMNFWKLDKYNGFFPIKWHIIKDVPNNQFVHIILPSNENKPVTYTRDTQEIGLKEGLEMLNIFRSYTAKTSLLDDFDFYERREKLFRSQRSTKHKHARPEQEVYGNDNYQNTVKAREKKMEMQSSGTKQGTLIKHTKNLSLNNSGFR

SEQ ID NO: 5950 - protein, 381 aa, Glycine max
  peptide (1)..(381): Ceres Seq. ID no. 14308457
  misc_feature (210)..(300): Pfam Name: Pfam Description:  YT521-B-like family
  misc_feature (1)..(381): NCBI GI NO: 30681366 NR Description: expressed protein [Arabidopsis thaliana]
  misc_feature (137)..(324): NCBI GI NO: 34911170 NR Description: B1144G04.32
  misc_feature (72)..(317): NCBI GI NO: 38346520 NR Description: OSJNBa0027H09.15
  misc_feature (128)..(381): NCBI GI NO: 25402579 NR Description: hypothetical protein
  misc_feature (1)..(319): NCBI GI NO: 7487895 NR Description: hypothetical protein YUP8H12R
  misc_feature (1)..(319): NCBI GI NO: 18412316 NR Description: expressed protein [Arabidopsis thaliana]
  misc_feature (80)..(367): NCBI GI NO: 18087662 NR Description: putative RNA-binding protein [Oryza sativa]
  misc_feature (79)..(372): NCBI GI NO: 30684473 NR Description: expressed protein [Arabidopsis thaliana]
  misc_feature (82)..(324): NCBI GI NO: 22773231 NR Description: Putative RNA-binding protein
  misc_feature (48)..(347): NCBI GI NO: 18405397 NR Description: expressed protein [Arabidopsis thaliana]
MKPNKLKSTHRNGILSSTISETVADTGKDIKILNKAPHLRSNFPAATAPNTYHQIGKFSSLANPTCHVSPPTNHRPNTSTNYRPTGRVSNVNDRVLLGDNKFRSGQSEMSMEMTRGPRGHYNNFLLQPSLVKDALAITICRDEYNLSDFQTEYEIAKFYVIKSFNEDDVHKSVKYNVWTSTPNGNKKLNAAFLDAEAKLRQTGTKCPVFLFFSVNASRQFVGVAEMLGPVDFKNDMNFWKLDKYNGFFPIKWHIIKDVPNNQFVHIILPSNENKPVTYTRDTQEIGLKEGLEMLNIFRSYTAKTSLLDDFDFYERREKLFRSQRSTKHKHARPEQEVYGNDNYQNTVKAREKKMEMQSSGTKQGTLIKHTKNLSLNNSGFR

SEQ ID NO: 5951 - protein, 273 aa, Glycine max
  peptide (1)..(273): Ceres Seq. ID no. 14308458
  misc_feature (102)..(192): Pfam Name: Pfam Description:  YT521-B-like family
  misc_feature (1)..(273): NCBI GI NO: 30681366 NR Description: expressed protein [Arabidopsis thaliana]
  misc_feature (29)..(216): NCBI GI NO: 34911170 NR Description: B1144G04.32
  misc_feature (1)..(209): NCBI GI NO: 38346520 NR Description: OSJNBa0027H09.15
  misc_feature (20)..(273): NCBI GI NO: 25402579 NR Description: hypothetical protein
  misc_feature (1)..(211): NCBI GI NO: 7487895 NR Description: hypothetical protein YUP8H12R
  misc_feature (1)..(211): NCBI GI NO: 18412316 NR Description: expressed protein [Arabidopsis thaliana]
  misc_feature (1)..(259): NCBI GI NO: 18087662 NR Description: putative RNA-binding protein [Oryza sativa]
  misc_feature (1)..(264): NCBI GI NO: 30684473 NR Description: expressed protein [Arabidopsis thaliana]
  misc_feature (1)..(216): NCBI GI NO: 22773231 NR Description: Putative RNA-binding protein
  misc_feature (1)..(239): NCBI GI NO: 18405397 NR Description: expressed protein [Arabidopsis thaliana]
MSMEMTRGPRGHYNNFLLQPSLVKDALAITICRDEYNLSDFQTEYEIAKFYVIKSFNEDDVHKSVKYNVWTSTPNGNKKLNAAFLDAEAKLRQTGTKCPVFLFFSVNASRQFVGVAEMLGPVDFKNDMNFWKLDKYNGFFPIKWHIIKDVPNNQFVHIILPSNENKPVTYTRDTQEIGLKEGLEMLNIFRSYTAKTSLLDDFDFYERREKLFRSQRSTKHKHARPEQEVYGNDNYQNTVKAREKKMEMQSSGTKQGTLIKHTKNLSLNNSGFR

SEQ ID NO: 5952 - DNA, 1382 bp, Glycine max
  misc_feature (1)..(1382): Ceres Seq. ID no. 14308294
gttagaatcgaaactccacagtccagtgagaggaagagaaagcatgaagttcacagactcgccggtgatcgagcttgcggtgaacgacgccgttctgtcgcttcagcaagacaacgggtccatgcacgtgggaaccaccgtgtggccatgctccctcgtcctcgtcaaattcgcggagcgctggggcccaccctctgacaacaacccctacgctcgcgtgctcgacttccaaggcaagcgggccgtggagctcggcacgggctgcggcgtggcgggaatgggcctctacctgttgggcctgacggacctgctcctcaccgacatcgcacccgtcatgccggccctgaagcgcaacctgaaagtcaacaagcccatcctccgcaaggccctcaaacactccgtgctctactggaacaacccgcagcagatcgctgccctaaatcctcccttcgatttcgttatcgcaaccgatgtcgtttacattccggaatctgttccttccttggtttctgcaatggaaaccctcgtctctgacgacggcgtcgttttgcttgggtaccagcttagggcacccgaggcgcacgagcttttctgggaactgtgtcaacaagtcttccacgttgagaaagtcccgcacgagcatctgcatcccgattacgcttacgaagaaaccgatgtttatctgttgaagaagaaaaacaagaaacagtgactgattatagctaatagggtgtgatagaaagttgttagccgtggtgtttatgttgacccttcaaatgattgccaacaaaggatcctggaatatacctgagacgcgtgtgcttgctgctgtttttgtctttgtttttctgagctttaggctcccttgacataagggggaaaaagttagtgaatggagggtattaaatatgagagtaaagctacctatatctaattgttacataaattttattatttaatcatagctcatttaaccttctttttaatcattaatattcggattctggtatatgtcccatgtgtgagtaggagtgtgcagacctggtttgcaatacatctcattgtaaataaatgaatatgcaaatcataggcaaatacaaatttcttatggttgaaggtatggctctgcaagacttggtttggtggcataaagtagtagacttgattgcaccacaagtcaatacaccatcagtattattttattttagtacaaacaagctaccgaatggcagatggtgaatagtctgccactgatgtaagaacaagaccgagaagaagacgcagatgaagagaagctgactatttatgtgtgcactttgccctttctgtatacaaagataattttgatttcatgcatcatcgaatataaatgttagttaatc

SEQ ID NO: 5953 - protein, 236 aa, Glycine max
  peptide (1)..(236): Ceres Seq. ID no. 14308295
  misc_feature (15)..(235): NCBI GI NO: 15241427 NR Description: expressed protein [Arabidopsis thaliana]
  misc_feature (44)..(235): NCBI GI NO: 15219438 NR Description: tumor-related protein -related
  misc_feature (16)..(236): NCBI GI NO: 29126226 NR Description: similar to hepatocellular carcinoma-associatedantigen HCA557b
  misc_feature (16)..(236): NCBI GI NO: 21752748 NR Description: unnamed protein product [Homo sapiens]
  misc_feature (97)..(233): NCBI GI NO: 28973317 NR Description: unknown protein [Arabidopsis thaliana]
  misc_feature (77)..(159): NCBI GI NO: 25407025 NR Description: protein T6D22.22 [imported] - Arabidopsis thaliana
  misc_feature (84)..(236): NCBI GI NO: 14388497 NR Description: hypothetical protein [Macaca fascicularis]
  misc_feature (82)..(235): NCBI GI NO: 33146776 NR Description: unknown protein
  misc_feature (32)..(94): NCBI GI NO: 26452646 NR Description: putative DNA ligase [Arabidopsis thaliana]
LESKLHSPVRGRESMKFTDSPVIELAVNDAVLSLQQDNGSMHVGTTVWPCSLVLVKFAERWGPPSDNNPYARVLDFQGKRAVELGTGCGVAGMGLYLLGLTDLLLTDIAPVMPALKRNLKVNKPILRKALKHSVLYWNNPQQIAALNPPFDFVIATDVVYIPESVPSLVSAMETLVSDDGVVLLGYQLRAPEAHELFWELCQQVFHVEKVPHEHLHPDYAYEETDVYLLKKKNKKQ

SEQ ID NO: 5954 - protein, 222 aa, Glycine max
  peptide (1)..(222): Ceres Seq. ID no. 14308296
  misc_feature (1)..(221): NCBI GI NO: 15241427 NR Description: expressed protein [Arabidopsis thaliana]
  misc_feature (30)..(221): NCBI GI NO: 15219438 NR Description: tumor-related protein -related
  misc_feature (2)..(222): NCBI GI NO: 29126226 NR Description: similar to hepatocellular carcinoma-associatedantigen HCA557b
  misc_feature (2)..(222): NCBI GI NO: 21752748 NR Description: unnamed protein product [Homo sapiens]
  misc_feature (83)..(219): NCBI GI NO: 28973317 NR Description: unknown protein [Arabidopsis thaliana]
  misc_feature (63)..(145): NCBI GI NO: 25407025 NR Description: protein T6D22.22 [imported] - Arabidopsis thaliana
  misc_feature (70)..(222): NCBI GI NO: 14388497 NR Description: hypothetical protein [Macaca fascicularis]
  misc_feature (68)..(221): NCBI GI NO: 33146776 NR Description: unknown protein
  misc_feature (18)..(80): NCBI GI NO: 26452646 NR Description: putative DNA ligase [Arabidopsis thaliana]
MKFTDSPVIELAVNDAVLSLQQDNGSMHVGTTVWPCSLVLVKFAERWGPPSDNNPYARVLDFQGKRAVELGTGCGVAGMGLYLLGLTDLLLTDIAPVMPALKRNLKVNKPILRKALKHSVLYWNNPQQIAALNPPFDFVIATDVVYIPESVPSLVSAMETLVSDDGVVLLGYQLRAPEAHELFWELCQQVFHVEKVPHEHLHPDYAYEETDVYLLKKKNKKQ

SEQ ID NO: 5955 - protein, 196 aa, Glycine max
  peptide (1)..(196): Ceres Seq. ID no. 14308297
  misc_feature (1)..(195): NCBI GI NO: 15241427 NR Description: expressed protein [Arabidopsis thaliana]
  misc_feature (4)..(195): NCBI GI NO: 15219438 NR Description: tumor-related protein -related
  misc_feature (1)..(196): NCBI GI NO: 29126226 NR Description: similar to hepatocellular carcinoma-associatedantigen HCA557b
  misc_feature (1)..(196): NCBI GI NO: 21752748 NR Description: unnamed protein product [Homo sapiens]
  misc_feature (57)..(193): NCBI GI NO: 28973317 NR Description: unknown protein [Arabidopsis thaliana]
  misc_feature (37)..(119): NCBI GI NO: 25407025 NR Description: protein T6D22.22 [imported] - Arabidopsis thaliana
  misc_feature (44)..(196): NCBI GI NO: 14388497 NR Description: hypothetical protein [Macaca fascicularis]
  misc_feature (42)..(195): NCBI GI NO: 33146776 NR Description: unknown protein
  misc_feature (1)..(54): NCBI GI NO: 26452646 NR Description: putative DNA ligase [Arabidopsis thaliana]
MHVGTTVWPCSLVLVKFAERWGPPSDNNPYARVLDFQGKRAVELGTGCGVAGMGLYLLGLTDLLLTDIAPVMPALKRNLKVNKPILRKALKHSVLYWNNPQQIAALNPPFDFVIATDVVYIPESVPSLVSAMETLVSDDGVVLLGYQLRAPEAHELFWELCQQVFHVEKVPHEHLHPDYAYEETDVYLLKKKNKKQ

SEQ ID NO: 5956 - DNA, 1912 bp, Glycine max
  misc_feature (1)..(1912): Ceres Seq. ID no. 15172237
gccgagcaacagtgaatttggccaccataccataccatgagcataagggcgcgcgcgcgcaaaggattagggtttcgaacgtagcgattttggagcttccatttcgatttatacttgcgcacgatctgatgcaaaaaatgccagggacaaagcagagagatacatcccaaaatccagactcaccagaggggaacagtgagcctgagaaacctacagattctgatgagcgagtagactttgatggggacaatgatcaagaggagacaatggaggaagaagttgagtatgaagaagtagaggaggaggaagaagaggaggaggaggaggaggaagaagaagaagaagaagagactaagctctcagataagacaagagtggcagacactaaggatgaagttgagaaaaagaagcatgctgagcttcttgcacttccacctcatgggtctgaggtttacattgggggcattcctcaaaatgtttctgaagaagatttgagggtcttctgtcaatctgtgggagaagtttcagaggttaggataatgaagggaaaagaatccggtgaagcaaaaggttatgcttttgtgaccttcatgacaaaggaattggcatctaaggctattgaggagctgaacaactctgaatttaagggaaaaagaataaagtgctccacatctcaagttaagcacaagttgttcattggtaatgttcctaaatattggactgaaggagatatgaaaaaagttgttgctgaaattggccctggagtaatttgtgtggaactgttgaaggacccacagaattctagccgtaaccgaggatatgcttttatagagtattacaatcatgcttgtgcagagtattcaaggcagaagatgtcaaactcaaactttaaacttggcagcaatgctccaacggtgagctgggctgatccaaggaattctgaatcatctgcaatctctctggtaaaatcagtgtatgtaaagaaccttccagaaaacattactcaggatcgtctcaaggagctgtttgaacatcatggaaagatcacaaaagtggttctcccttctgctaaatcgggtcaagaaaagagcagatttggttttgttcactttgctgaaaggtcaagtgccatgaaggctttgaagaacacagagaaatatgaaattgatggacaattgctggagtgttcgctagcaaagccacaagcaaattcacaaaaaccagctttacttcccacttatccacctcatcttggttatggtatggttggtggtgctataggtgcaggatatggtgctgctggctttgcacaaccactgatgtatggtcccggaccaacccctggtggcatggcaatgatgccaatgatgttatcagatggaaggattgcatacatagtgcaacagccagggtttcaacagcctgccccagtatcccgacatgggaggagtggtggcagtagctccagtggtgggaaatgcagtaatgatgataatcgcaatcgtgggcatggccgctatcatccctactaacttaatgggctttaaggagctagcaaaacaaggaattgcacctgaggcctaaaagtgttgacgattcaaggcacagcgcccaactgattaagacaaacagggcgctgctgtgaatgcagttatgattttgtaatacatctacctagggccaagattcagttaagcatctaagtcaggttttcgtataattttacttatcttgtccatcaattttttgatctcaaattcttaaagagaccacagtgatctatctgaaggacatgataaatcttactagattgatgaaaaattatgtagaggtgtttcagatgtttagcttgcggttcatgtattcatgtttctaaccgtcgttctagaagaattggaacgatgtttgaatg

SEQ ID NO: 5957 - protein, 509 aa, Glycine max
  peptide (1)..(509): Ceres Seq. ID no. 15172238
  misc_feature (230)..(305): Pfam Name: a.k.a. RRM, RBD, or RNP domain Pfam Description: RNA recognition motif.
  misc_feature (65)..(509): NCBI GI NO: 15231284 NR Description: RNA recognition motif (RRM)-containing protein
  misc_feature (45)..(492): NCBI GI NO: 29371361 NR Description: putative RNA-binding protein
  misc_feature (52)..(504): NCBI GI NO: 18411454 NR Description: RNA recognition motif (RRM)-containing protein
  misc_feature (56)..(509): NCBI GI NO: 37531112 NR Description: putative RNA-binding protein
  misc_feature (50)..(504): NCBI GI NO: 7485284 NR Description: hypothetical protein A_TM018A10
  misc_feature (291)..(389): NCBI GI NO: 22327128 NR Description: RNA recognition motif (RRM)-containing protein
  misc_feature (432)..(509): NCBI GI NO: 22327128 NR Description: RNA recognition motif (RRM)-containing protein
  misc_feature (291)..(389): NCBI GI NO: 15241771 NR Description: RNA recognition motif (RRM)-containing protein
  misc_feature (432)..(509): NCBI GI NO: 15241771 NR Description: RNA recognition motif (RRM)-containing protein
  misc_feature (144)..(406): NCBI GI NO: 31242563 NR Description: ENSANGP00000023817 [Anopheles gambiae]
RATVNLATIPYHEHKGARAQRIRVSNVAILELPFRFILAHDLMQKMPGTKQRDTSQNPDSPEGNSEPEKPTDSDERVDFDGDNDQEETMEEEVEYEEVEEEEEEEEEEEEEEEEEETKLSDKTRVADTKDEVEKKKHAELLALPPHGSEVYIGGIPQNVSEEDLRVFCQSVGEVSEVRIMKGKESGEAKGYAFVTFMTKELASKAIEELNNSEFKGKRIKCSTSQVKHKLFIGNVPKYWTEGDMKKVVAEIGPGVICVELLKDPQNSSRNRGYAFIEYYNHACAEYSRQKMSNSNFKLGSNAPTVSWADPRNSESSAISLVKSVYVKNLPENITQDRLKELFEHHGKITKVVLPSAKSGQEKSRFGFVHFAERSSAMKALKNTEKYEIDGQLLECSLAKPQANSQKPALLPTYPPHLGYGMVGGAIGAGYGAAGFAQPLMYGPGPTPGGMAMMPMMLSDGRIAYIVQQPGFQQPAPVSRHGRSGGSSSSGGKCSNDDNRNRGHGRYHPY

SEQ ID NO: 5958 - protein, 467 aa, Glycine max
  peptide (1)..(467): Ceres Seq. ID no. 15172239
  misc_feature (188)..(263): Pfam Name: a.k.a. RRM, RBD, or RNP domain Pfam Description: RNA recognition motif.
  misc_feature (23)..(467): NCBI GI NO: 15231284 NR Description: RNA recognition motif (RRM)-containing protein
  misc_feature (3)..(450): NCBI GI NO: 29371361 NR Description: putative RNA-binding protein
  misc_feature (10)..(462): NCBI GI NO: 18411454 NR Description: RNA recognition motif (RRM)-containing protein
  misc_feature (14)..(467): NCBI GI NO: 37531112 NR Description: putative RNA-binding protein
  misc_feature (8)..(462): NCBI GI NO: 7485284 NR Description: hypothetical protein A_TM018A10
  misc_feature (249)..(347): NCBI GI NO: 22327128 NR Description: RNA recognition motif (RRM)-containing protein
  misc_feature (390)..(467): NCBI GI NO: 22327128 NR Description: RNA recognition motif (RRM)-containing protein
  misc_feature (249)..(347): NCBI GI NO: 15241771 NR Description: RNA recognition motif (RRM)-containing protein
  misc_feature (390)..(467): NCBI GI NO: 15241771 NR Description: RNA recognition motif (RRM)-containing protein
  misc_feature (102)..(364): NCBI GI NO: 31242563 NR Description: ENSANGP00000023817 [Anopheles gambiae]
MQKMPGTKQRDTSQNPDSPEGNSEPEKPTDSDERVDFDGDNDQEETMEEEVEYEEVEEEEEEEEEEEEEEEEEETKLSDKTRVADTKDEVEKKKHAELLALPPHGSEVYIGGIPQNVSEEDLRVFCQSVGEVSEVRIMKGKESGEAKGYAFVTFMTKELASKAIEELNNSEFKGKRIKCSTSQVKHKLFIGNVPKYWTEGDMKKVVAEIGPGVICVELLKDPQNSSRNRGYAFIEYYNHACAEYSRQKMSNSNFKLGSNAPTVSWADPRNSESSAISLVKSVYVKNLPENITQDRLKELFEHHGKITKVVLPSAKSGQEKSRFGFVHFAERSSAMKALKNTEKYEIDGQLLECSLAKPQANSQKPALLPTYPPHLGYGMVGGAIGAGYGAAGFAQPLMYGPGPTPGGMAMMPMMLSDGRIAYIVQQPGFQQPAPVSRHGRSGGSSSSGGKCSNDDNRNRGHGRYHPY

SEQ ID NO: 5959 - protein, 464 aa, Glycine max
  peptide (1)..(464): Ceres Seq. ID no. 15172240
  misc_feature (185)..(260): Pfam Name: a.k.a. RRM, RBD, or RNP domain Pfam Description: RNA recognition motif.
  misc_feature (20)..(464): NCBI GI NO: 15231284 NR Description: RNA recognition motif (RRM)-containing protein
  misc_feature (1)..(447): NCBI GI NO: 29371361 NR Description: putative RNA-binding protein
  misc_feature (7)..(459): NCBI GI NO: 18411454 NR Description: RNA recognition motif (RRM)-containing protein
  misc_feature (11)..(464): NCBI GI NO: 37531112 NR Description: putative RNA-binding protein
  misc_feature (5)..(459): NCBI GI NO: 7485284 NR Description: hypothetical protein A_TM018A10
  misc_feature (246)..(344): NCBI GI NO: 22327128 NR Description: RNA recognition motif (RRM)-containing protein
  misc_feature (387)..(464): NCBI GI NO: 22327128 NR Description: RNA recognition motif (RRM)-containing protein
  misc_feature (246)..(344): NCBI GI NO: 15241771 NR Description: RNA recognition motif (RRM)-containing protein
  misc_feature (387)..(464): NCBI GI NO: 15241771 NR Description: RNA recognition motif (RRM)-containing protein
  misc_feature (99)..(361): NCBI GI NO: 31242563 NR Description: ENSANGP00000023817 [Anopheles gambiae]
MPGTKQRDTSQNPDSPEGNSEPEKPTDSDERVDFDGDNDQEETMEEEVEYEEVEEEEEEEEEEEEEEEEEETKLSDKTRVADTKDEVEKKKHAELLALPPHGSEVYIGGIPQNVSEEDLRVFCQSVGEVSEVRIMKGKESGEAKGYAFVTFMTKELASKAIEELNNSEFKGKRIKCSTSQVKHKLFIGNVPKYWTEGDMKKVVAEIGPGVICVELLKDPQNSSRNRGYAFIEYYNHACAEYSRQKMSNSNFKLGSNAPTVSWADPRNSESSAISLVKSVYVKNLPENITQDRLKELFEHHGKITKVVLPSAKSGQEKSRFGFVHFAERSSAMKALKNTEKYEIDGQLLECSLAKPQANSQKPALLPTYPPHLGYGMVGGAIGAGYGAAGFAQPLMYGPGPTPGGMAMMPMMLSDGRIAYIVQQPGFQQPAPVSRHGRSGGSSSSGGKCSNDDNRNRGHGRYHPY

SEQ ID NO: 5960 - DNA, 1927 bp, Glycine max
  misc_feature (1)..(1927): Ceres Seq. ID no. 15171856
gctcttccaaaccttcccttcaccttctataccctgccttgcaaaacaatattccaccccctcatcttcttttcttacacaaaccaatattttcataaaacagaaaccatggtgtcatcaaaacctagtggcttctatgaacaaaggagctttccatcaatcaaaatcctcatacttatactccttaattctatacttcacaaagccaactcaggctgcagcaactctgtttccaactccttagttccatttctatctcatgagatactctcatcattgcaaacactacctctagatggccactttagcctaagggacaatgaggatgctgccaaggactttggcaacatacaccattttcctcccctagcagtgctgtatccaaaaacagtttctgacatatcactcaccatcaagcatgtttttgaaatggggtttgccgcacagctgaagattgctgctagaggccatggccattcacttcaaggccaagcacaagtacatggaggcctagtcattaacatggagtctttacagggtcctgaaatgaaagttcacaatggagaattgccttatgtggatgtctcaggaggtgagttgtggataaacattctgcatgagactcttaaacttgggttggcaccaaagtcatggacagattaccttcacctcactgttgggggtactctttcaaatgctggcataagtgggcaagccttcaaacatggacctcagatcaataacatctttcagcttgaagtgatcacaggaaaaggagaggtggttacctgctcagggaaccgaaacgctgaccttttttatggtgttcttggagggcttggtcaatttggcatcattacaagggctagaatttctcttgaaccagcacctaagatggttaaatggattagggtgctctactcagagttctctacatttactagggatcaagagtatttggtatcacttaacaacacatttgattatattgaagggtttgtgatcataaacagaactggcatccttaacaattggagatcatcctttgatcccaaaaaccaacttcaagccagccaattcagttctgatgggaaaaccttctactgtctagagatggcaaaatatttcaaccctggtgaagctgaagccatgaatcagagtgtagcttacctactgtcaaagttgagttacattccatccacactcttcctatcagaagtttcttacgtggaattcttagacagagtgcatgtttctgagaaaaagctaagagcacaaggcttgtgggaagttccccatccttggctgaaccttctgatcccaaggagtgagattcataactttgctgaagaagtatttggcaatattcttaaagacacaaacaatggacccatactcattcaccccgtcaaccaaacacggtggaacagcaaaacatcattgattaccccagaggaagatattttttacctagtagcattcctatccttagctctcccaaattctaccggtgcagacagtttagaacacattctagcccaaaacaaaagagtcatagatttctacactggtgccaaaatgagagtgaagcaataccttccccattacagcacacaggaagaatggcaagtccattttgggtcacgatgggagacattcgtggaaagaaaaagggcctatgacccactagcactgctagcccctggccacaaaatctttcaaaaggctgtctcctcttcgtgttagttttctagtgtgttgtaaggttgtgaactaatgataaattacgtaagagtgttgcttcctgcacctctctggcatcccattacattacggaatgtccaatctgtaatgtaatttaatcattctgtaatgtaatggggcatgaagcaaaatttgaaggtgcacgaagtttcacttgttaatc

SEQ ID NO: 5961 - protein, 581 aa, Glycine max
  peptide (1)..(581): Ceres Seq. ID no. 15171857
  misc_feature (122)..(282): Pfam Name: Pfam Description:  FAD binding domain
  misc_feature (45)..(575): NCBI GI NO: 15227374 NR Description: cytokinin oxidase family [Arabidopsis thaliana]
  misc_feature (85)..(579): NCBI GI NO: 23267157 NR Description: cytokinin dehydrogenase 2 [Hordeum vulgare]
  misc_feature (85)..(579): NCBI GI NO: 27312007 NR Description: cytokinin dehydrogenase 2 [Hordeum vulgare]
  misc_feature (88)..(576): NCBI GI NO: 20161335 NR Description: putative cytokinin oxidase
  misc_feature (88)..(576): NCBI GI NO: 38520861 NR Description: cytokinin oxidase 2 [Zea mays var. nobilis]
  misc_feature (77)..(579): NCBI GI NO: 28883584 NR Description: cytokinin dehydrogenase 3 [Hordeum vulgare]
  misc_feature (88)..(576): NCBI GI NO: 38520863 NR Description: cytokinin oxidase 3 [Zea mays]
  misc_feature (88)..(576): NCBI GI NO: 38520865 NR Description: cytokinin oxidase 3 [Zea mays]
  misc_feature (90)..(580): NCBI GI NO: 15229433 NR Description: cytokinin oxidase family [Arabidopsis thaliana]
  misc_feature (90)..(574): NCBI GI NO: 22330649 NR Description: cytokinin oxidase family [Arabidopsis thaliana]
ALPNLPFTFYTLPCKTIFHPLIFFSYTNQYFHKTETMVSSKPSGFYEQRSFPSIKILILILLNSILHKANSGCSNSVSNSLVPFLSHEILSSLQTLPLDGHFSLRDNEDAAKDFGNIHHFPPLAVLYPKTVSDISLTIKHVFEMGFAAQLKIAARGHGHSLQGQAQVHGGLVINMESLQGPEMKVHNGELPYVDVSGGELWINILHETLKLGLAPKSWTDYLHLTVGGTLSNAGISGQAFKHGPQINNIFQLEVITGKGEVVTCSGNRNADLFYGVLGGLGQFGIITRARISLEPAPKMVKWIRVLYSEFSTFTRDQEYLVSLNNTFDYIEGFVIINRTGILNNWRSSFDPKNQLQASQFSSDGKTFYCLEMAKYFNPGEAEAMNQSVAYLLSKLSYIPSTLFLSEVSYVEFLDRVHVSEKKLRAQGLWEVPHPWLNLLIPRSEIHNFAEEVFGNILKDTNNGPILIHPVNQTRWNSKTSLITPEEDIFYLVAFLSLALPNSTGADSLEHILAQNKRVIDFYTGAKMRVKQYLPHYSTQEEWQVHFGSRWETFVERKRAYDPLALLAPGHKIFQKAVSSSC

SEQ ID NO: 5962 - protein, 545 aa, Glycine max
  peptide (1)..(545): Ceres Seq. ID no. 15171858
  misc_feature (86)..(246): Pfam Name: Pfam Description:  FAD binding domain
  misc_feature (9)..(539): NCBI GI NO: 15227374 NR Description: cytokinin oxidase family [Arabidopsis thaliana]
  misc_feature (49)..(543): NCBI GI NO: 23267157 NR Description: cytokinin dehydrogenase 2 [Hordeum vulgare]
  misc_feature (49)..(543): NCBI GI NO: 27312007 NR Description: cytokinin dehydrogenase 2 [Hordeum vulgare]
  misc_feature (52)..(540): NCBI GI NO: 20161335 NR Description: putative cytokinin oxidase
  misc_feature (52)..(540): NCBI GI NO: 38520861 NR Description: cytokinin oxidase 2 [Zea mays var. nobilis]
  misc_feature (41)..(543): NCBI GI NO: 28883584 NR Description: cytokinin dehydrogenase 3 [Hordeum vulgare]
  misc_feature (52)..(540): NCBI GI NO: 38520863 NR Description: cytokinin oxidase 3 [Zea mays]
  misc_feature (52)..(540): NCBI GI NO: 38520865 NR Description: cytokinin oxidase 3 [Zea mays]
  misc_feature (54)..(544): NCBI GI NO: 15229433 NR Description: cytokinin oxidase family [Arabidopsis thaliana]
  misc_feature (54)..(538): NCBI GI NO: 22330649 NR Description: cytokinin oxidase family [Arabidopsis thaliana]
MVSSKPSGFYEQRSFPSIKILILILLNSILHKANSGCSNSVSNSLVPFLSHEILSSLQTLPLDGHFSLRDNEDAAKDFGNIHHFPPLAVLYPKTVSDISLTIKHVFEMGFAAQLKIAARGHGHSLQGQAQVHGGLVINMESLQGPEMKVHNGELPYVDVSGGELWINILHETLKLGLAPKSWTDYLHLTVGGTLSNAGISGQAFKHGPQINNIFQLEVITGKGEVVTCSGNRNADLFYGVLGGLGQFGIITRARISLEPAPKMVKWIRVLYSEFSTFTRDQEYLVSLNNTFDYIEGFVIINRTGILNNWRSSFDPKNQLQASQFSSDGKTFYCLEMAKYFNPGEAEAMNQSVAYLLSKLSYIPSTLFLSEVSYVEFLDRVHVSEKKLRAQGLWEVPHPWLNLLIPRSEIHNFAEEVFGNILKDTNNGPILIHPVNQTRWNSKTSLITPEEDIFYLVAFLSLALPNSTGADSLEHILAQNKRVIDFYTGAKMRVKQYLPHYSTQEEWQVHFGSRWETFVERKRAYDPLALLAPGHKIFQKAVSSSC

SEQ ID NO: 5963 - protein, 438 aa, Glycine max
  peptide (1)..(438): Ceres Seq. ID no. 15171859
  misc_feature (1)..(139): Pfam Name: Pfam Description:  FAD binding domain
  misc_feature (1)..(432): NCBI GI NO: 15227374 NR Description: cytokinin oxidase family [Arabidopsis thaliana]
  misc_feature (1)..(436): NCBI GI NO: 23267157 NR Description: cytokinin dehydrogenase 2 [Hordeum vulgare]
  misc_feature (1)..(436): NCBI GI NO: 27312007 NR Description: cytokinin dehydrogenase 2 [Hordeum vulgare]
  misc_feature (1)..(433): NCBI GI NO: 20161335 NR Description: putative cytokinin oxidase
  misc_feature (1)..(433): NCBI GI NO: 38520861 NR Description: cytokinin oxidase 2 [Zea mays var. nobilis]
  misc_feature (1)..(436): NCBI GI NO: 28883584 NR Description: cytokinin dehydrogenase 3 [Hordeum vulgare]
  misc_feature (1)..(433): NCBI GI NO: 38520863 NR Description: cytokinin oxidase 3 [Zea mays]
  misc_feature (1)..(433): NCBI GI NO: 38520865 NR Description: cytokinin oxidase 3 [Zea mays]
  misc_feature (1)..(437): NCBI GI NO: 15229433 NR Description: cytokinin oxidase family [Arabidopsis thaliana]
  misc_feature (1)..(431): NCBI GI NO: 22330649 NR Description: cytokinin oxidase family [Arabidopsis thaliana]
MGFAAQLKIAARGHGHSLQGQAQVHGGLVINMESLQGPEMKVHNGELPYVDVSGGELWINILHETLKLGLAPKSWTDYLHLTVGGTLSNAGISGQAFKHGPQINNIFQLEVITGKGEVVTCSGNRNADLFYGVLGGLGQFGIITRARISLEPAPKMVKWIRVLYSEFSTFTRDQEYLVSLNNTFDYIEGFVIINRTGILNNWRSSFDPKNQLQASQFSSDGKTFYCLEMAKYFNPGEAEAMNQSVAYLLSKLSYIPSTLFLSEVSYVEFLDRVHVSEKKLRAQGLWEVPHPWLNLLIPRSEIHNFAEEVFGNILKDTNNGPILIHPVNQTRWNSKTSLITPEEDIFYLVAFLSLALPNSTGADSLEHILAQNKRVIDFYTGAKMRVKQYLPHYSTQEEWQVHFGSRWETFVERKRAYDPLALLAPGHKIFQKAVSSSC

SEQ ID NO: 5964 - DNA, 1192 bp, Glycine max
  misc_feature (1)..(1192): Ceres Seq. ID no. 14308776
atatcacgttgttcttcacctctgtttcacttcactagctgctaatcaagccctctcttcctacatttctcaggggggacttgaagcaagcacattaatggagagggacccaaacatgggcaaggaaaaagtggtttcaaattccacattgcttccctcgtccacaaaagggttcaaggacaagggcatccccaacaatagcatgccctcctggcttctcaccaacatttctgacttggaggagaggatgaaagtgttggcaatgagtacaacagaagatgaagaaatgggagacacatttgctgatagagcagaaacttactaccaaaagaggcctcagctactgtcccttctgcaggacttgtacaatggctacataaccttatctgaccgttacatccaaacactggccaaacacaagcaccatagtagacactcttctcaagtttcaactgtagatgaaggcttctctgaccaagaagaagaagctagtggtgtgagccacagtgattcagacattgaaagctcaatctcctaccaacacccccaacacatgatgatgccaataggcctcccaaaaagctccatgcttgatgttgatgctattgttgctgagcttttgataaggaatattgagtatgacatgttgatgcatgaagttggtgtcatggagaggaggtactgtgagtcctcaaggaaaagtgagcttcaaaagagccttcttgaggtgttggagtctgagaggattgttcttttgaatgagaatgctagcttgggctatagggtcaacactttggtggaagaaaacaaggagcttgcatctgagtcagtgttcatcaagagaaaagccggtgagcttgctaagtgtgtgctgaagatgagggaggatcatagagtgtacttgctgcacaggaaaattgaggatcttcaggctcagatacatgccttggagaagaggaacaaggagtactatgataagcttctgagaagagatggtcatgaagatggtaaaaaaggtgtggctttggaggtttgtgttcagatggacaagcaaaagaggttcaagtggaaagatggcaacacttctgggatgaagaaatttcatgggaagaagtcccccccaagtttgtggaaaaagctgaagaacatggatttgttgttgtgtggtactaatccaacttgtgcttgatga

SEQ ID NO: 5965 - protein, 395 aa, Glycine max
  peptide (1)..(395): Ceres Seq. ID no. 14308777
  misc_feature (69)..(327): NCBI GI NO: 24431596 NR Description: Unknown protein
  misc_feature (51)..(361): NCBI GI NO: 9294158 NR Description: contains similarity to unknownprotein~gb|AAD49756
  misc_feature (67)..(361): NCBI GI NO: 30684631 NR Description: expressed protein [Arabidopsis thaliana]
  misc_feature (171)..(338): NCBI GI NO: 22330107 NR Description: hypothetical protein [Arabidopsis thaliana]
  misc_feature (73)..(178): NCBI GI NO: 8778711 NR Description: T1N15.1 [Arabidopsis thaliana]
  misc_feature (73)..(178): NCBI GI NO: 22330107 NR Description: hypothetical protein [Arabidopsis thaliana]
  misc_feature (66)..(271): NCBI GI NO: 9280668 NR Description: F21B7.9 [Arabidopsis thaliana]
  misc_feature (66)..(271): NCBI GI NO: 30678573 NR Description: expressed protein [Arabidopsis thaliana]
  misc_feature (71)..(248): NCBI GI NO: 22326709 NR Description: expressed protein [Arabidopsis thaliana]
  misc_feature (76)..(271): NCBI GI NO: 7485917 NR Description: hypothetical protein F21B7
YHVVLHLCFTSLAANQALSSYISQGGLEASTLMERDPNMGKEKVVSNSTLLPSSTKGFKDKGIPNNSMPSWLLTNISDLEERMKVLAMSTTEDEEMGDTFADRAETYYQKRPQLLSLLQDLYNGYITLSDRYIQTLAKHKHHSRHSSQVSTVDEGFSDQEEEASGVSHSDSDIESSISYQHPQHMMMPIGLPKSSMLDVDAIVAELLIRNIEYDMLMHEVGVMERRYCESSRKSELQKSLLEVLESERIVLLNENASLGYRVNTLVEENKELASESVFIKRKAGELAKCVLKMREDHRVYLLHRKIEDLQAQIHALEKRNKEYYDKLLRRDGHEDGKKGVALEVCVQMDKQKRFKWKDGNTSGMKKFHGKKSPPSLWKKLKNMDLLLCGTNPTCA

SEQ ID NO: 5966 - protein, 363 aa, Glycine max
  peptide (1)..(363): Ceres Seq. ID no. 14308778
  misc_feature (37)..(295): NCBI GI NO: 24431596 NR Description: Unknown protein
  misc_feature (19)..(329): NCBI GI NO: 9294158 NR Description: contains similarity to unknownprotein~gb|AAD49756
  misc_feature (35)..(329): NCBI GI NO: 30684631 NR Description: expressed protein [Arabidopsis thaliana]
  misc_feature (139)..(306): NCBI GI NO: 22330107 NR Description: hypothetical protein [Arabidopsis thaliana]
  misc_feature (41)..(146): NCBI GI NO: 8778711 NR Description: T1N15.1 [Arabidopsis thaliana]
  misc_feature (41)..(146): NCBI GI NO: 22330107 NR Description: hypothetical protein [Arabidopsis thaliana]
  misc_feature (34)..(239): NCBI GI NO: 9280668 NR Description: F21B7.9 [Arabidopsis thaliana]
  misc_feature (34)..(239): NCBI GI NO: 30678573 NR Description: expressed protein [Arabidopsis thaliana]
  misc_feature (39)..(216): NCBI GI NO: 22326709 NR Description: expressed protein [Arabidopsis thaliana]
  misc_feature (44)..(239): NCBI GI NO: 7485917 NR Description: hypothetical protein F21B7
MERDPNMGKEKVVSNSTLLPSSTKGFKDKGIPNNSMPSWLLTNISDLEERMKVLAMSTTEDEEMGDTFADRAETYYQKRPQLLSLLQDLYNGYITLSDRYIQTLAKHKHHSRHSSQVSTVDEGFSDQEEEASGVSHSDSDIESSISYQHPQHMMMPIGLPKSSMLDVDAIVAELLIRNIEYDMLMHEVGVMERRYCESSRKSELQKSLLEVLESERIVLLNENASLGYRVNTLVEENKELASESVFIKRKAGELAKCVLKMREDHRVYLLHRKIEDLQAQIHALEKRNKEYYDKLLRRDGHEDGKKGVALEVCVQMDKQKRFKWKDGNTSGMKKFHGKKSPPSLWKKLKNMDLLLCGTNPTCA

SEQ ID NO: 5967 - protein, 357 aa, Glycine max
  peptide (1)..(357): Ceres Seq. ID no. 14308779
  misc_feature (31)..(289): NCBI GI NO: 24431596 NR Description: Unknown protein
  misc_feature (13)..(323): NCBI GI NO: 9294158 NR Description: contains similarity to unknownprotein~gb|AAD49756
  misc_feature (29)..(323): NCBI GI NO: 30684631 NR Description: expressed protein [Arabidopsis thaliana]
  misc_feature (133)..(300): NCBI GI NO: 22330107 NR Description: hypothetical protein [Arabidopsis thaliana]
  misc_feature (35)..(140): NCBI GI NO: 8778711 NR Description: T1N15.1 [Arabidopsis thaliana]
  misc_feature (35)..(140): NCBI GI NO: 22330107 NR Description: hypothetical protein [Arabidopsis thaliana]
  misc_feature (28)..(233): NCBI GI NO: 9280668 NR Description: F21B7.9 [Arabidopsis thaliana]
  misc_feature (28)..(233): NCBI GI NO: 30678573 NR Description: expressed protein [Arabidopsis thaliana]
  misc_feature (33)..(210): NCBI GI NO: 22326709 NR Description: expressed protein [Arabidopsis thaliana]
  misc_feature (38)..(233): NCBI GI NO: 7485917 NR Description: hypothetical protein F21B7
MGKEKVVSNSTLLPSSTKGFKDKGIPNNSMPSWLLTNISDLEERMKVLAMSTTEDEEMGDTFADRAETYYQKRPQLLSLLQDLYNGYITLSDRYIQTLAKHKHHSRHSSQVSTVDEGFSDQEEEASGVSHSDSDIESSISYQHPQHMMMPIGLPKSSMLDVDAIVAELLIRNIEYDMLMHEVGVMERRYCESSRKSELQKSLLEVLESERIVLLNENASLGYRVNTLVEENKELASESVFIKRKAGELAKCVLKMREDHRVYLLHRKIEDLQAQIHALEKRNKEYYDKLLRRDGHEDGKKGVALEVCVQMDKQKRFKWKDGNTSGMKKFHGKKSPPSLWKKLKNMDLLLCGTNPTCA

SEQ ID NO: 5968 - DNA, 2255 bp, Glycine max
  misc_feature (1)..(2255): Ceres Seq. ID no. 15176771
gaattaagattgcattgcattaggctttcacaacacctcagcgtcactgtaccagttggaaatggagacaataacagagaacggatcagatggtgtgagtttggcaagaaatacatccaacaacgcccgtcgagggttgccaatgatccaaacaaacatgaagccaacggattcggaattccaagtgtgccacgacgacagcaccccgccggtcagagcccaaaccattcacgagctccattctctgcagaagaaaaagtcaaccccttccactcccctctcagcaacgcaaggccccttcgccactgtttccgatgaggaacgccagaaacagcaactccaatcaatcagtgcgtcgttggcgtcgttgacgagggagtcagggcctaaggtggtgaaaggagacccagccactaaggcagagaaggggacacatgttcatcaccatccgcaaccacattactttgcttcaacggcgtttgatgtcagtgacagtgcgctcaaattcacccacgtcctctacaatctctcccccgctgagctgtatgagcaagcgattaagcacgagaaaggatcattcataacggcaacgggagcgttagctacactttctggagcaaaaacgggacgctctccccgagacaaacgggttgtcagggacgacaccaccgagcatgacctctggtggggaaagggctcgcccaatattgaaatggacgaacataccttcttaatcaacagagaaagagcagttgattacttgaactcccttgaaaaggtttatgtgaatgatcaatttctgaattgggatccagaacacagaatcaaagtccggatagtatctgcaagagcttatcactccctatttatgcacaatatgtgcatccgacccactcctgaagagctagaggaatttggaactccagacttcactatatacaatgcaggacagttcccttgtaatcgttacacacactacatgacttcatcaactagtattgacatcaacattgcaaggaaagaaatggtcatccttggcacacaatatgctggggaaatgaagaaaggtctctttggtttaatgcactacctcatgcccaagcgcaatattctctccctacattctgggtgcaatatgggcaaagatggcgatgttgcactcttttttggattatcaggtactggaaagacaactctgtctaccgatcataaccggtacttaattggagatgatgagcattgctggagtgaaaatggagtggcaaatattgaagggggttgctatgcaaagtgtgtcgatctttcaaaggataaagaaccagacatctggaatgccatcaaatttgggacagtactcgaaaatgttgtttttgatgagcatactcgagaggtagatttctctgacaaatctgtgaccgagaacactcgtgcagcatatcctattgagtacatacccaatgctaagataccgtgtgttgctccccatgcaaagaatgtcatccttctagcttgtgatgcatttggggtgctccccccagtaagcaagctgagcttggcccaaacaatgtaccatttcatcagtggctacacagccctggttgctgggacagaggatggtataaaagaaccacaggctacattctctgcttgtttcggggcagcgtttataatgatgcaccctaccaaatatgcagcaatgctagccgaaaagatgcagaagcatggggctactggatggcttgtcaatactggctggtcaggaggaagttatggattaggcaatcggattaagttagcgtatactaggaaaatcattgatgctattcactctgggagccttttgaatgcacagtacactaagactgaagtgtttgggcttgagatcccaacagcactagagggagtcccttctgaaatcttggaccctgtgaatacttggtctgacaagaaggcctatcaagatacacgcttgaaactagcaagcttattcaagaagaattttgatggattcacgacctacaagataggaggggatcagaagttgactgaagagattgtctctgctggtcctatattctgatgagagcatttcctatttagcgaaaaaaaaaatgaagtccaaaagcattcggttgattatttctacttaaaggttttcactgtatttagcttgcttgactataagacgatccctttattattgacacttacgagacaatacacaaatctgttattttgcgagcgtttaattattc

SEQ ID NO: 5969 - protein, 672 aa, Glycine max
  peptide (1)..(672): Ceres Seq. ID no. 15176772
  misc_feature (148)..(619): Pfam Name: Pfam Description:  Phosphoenolpyruvate carboxykinase
  misc_feature (4)..(672): NCBI GI NO: 13785467 NR Description: phosphoenolpyruvate carboxykinase
  misc_feature (4)..(672): NCBI GI NO: 13785471 NR Description: phosphoenolpyruvate carboxykinase
  misc_feature (4)..(672): NCBI GI NO: 13785469 NR Description: phosphoenolpyruvate carboxykinase
  misc_feature (9)..(672): NCBI GI NO: 16950587 NR Description: phosphoenolpyruvate carboxykinase
  misc_feature (26)..(672): NCBI GI NO: 15235730 NR Description: phosphoenolpyruvate carboxykinase
  misc_feature (19)..(670): NCBI GI NO: 1172571 NR Description: Phosphoenolpyruvate carboxykinase
  misc_feature (22)..(672): NCBI GI NO: 22328084 NR Description: phosphoenolpyruvate carboxykinase
  misc_feature (25)..(672): NCBI GI NO: 12230480 NR Description: Phosphoenolpyruvate carboxykinase
  misc_feature (86)..(672): NCBI GI NO: 37532252 NR Description: putative phosphoenolpyruvate carboxykinase
  misc_feature (22)..(138): NCBI GI NO: 37532252 NR Description: putative phosphoenolpyruvate carboxykinase
METITENGSDGVSLARNTSNNARRGLPMIQTNMKPTDSEFQVCHDDSTPPVRAQTIHELHSLQKKKSTPSTPLSATQGPFATVSDEERQKQQLQSISASLASLTRESGPKVVKGDPATKAEKGTHVHHHPQPHYFASTAFDVSDSALKFTHVLYNLSPAELYEQAIKHEKGSFITATGALATLSGAKTGRSPRDKRVVRDDTTEHDLWWGKGSPNIEMDEHTFLINRERAVDYLNSLEKVYVNDQFLNWDPEHRIKVRIVSARAYHSLFMHNMCIRPTPEELEEFGTPDFTIYNAGQFPCNRYTHYMTSSTSIDINIARKEMVILGTQYAGEMKKGLFGLMHYLMPKRNILSLHSGCNMGKDGDVALFFGLSGTGKTTLSTDHNRYLIGDDEHCWSENGVANIEGGCYAKCVDLSKDKEPDIWNAIKFGTVLENVVFDEHTREVDFSDKSVTENTRAAYPIEYIPNAKIPCVAPHAKNVILLACDAFGVLPPVSKLSLAQTMYHFISGYTALVAGTEDGIKEPQATFSACFGAAFIMMHPTKYAAMLAEKMQKHGATGWLVNTGWSGGSYGLGNRIKLAYTRKIIDAIHSGSLLNAQYTKTEVFGLEIPTALEGVPSEILDPVNTWSDKKAYQDTRLKLASLFKKNFDGFTTYKIGGDQKLTEEIVSAGPIF

SEQ ID NO: 5970 - protein, 645 aa, Glycine max
  peptide (1)..(645): Ceres Seq. ID no. 15176773
  misc_feature (121)..(592): Pfam Name: Pfam Description:  Phosphoenolpyruvate carboxykinase
  misc_feature (1)..(645): NCBI GI NO: 13785467 NR Description: phosphoenolpyruvate carboxykinase
  misc_feature (1)..(645): NCBI GI NO: 13785471 NR Description: phosphoenolpyruvate carboxykinase
  misc_feature (1)..(645): NCBI GI NO: 13785469 NR Description: phosphoenolpyruvate carboxykinase
  misc_feature (1)..(645): NCBI GI NO: 16950587 NR Description: phosphoenolpyruvate carboxykinase
  misc_feature (1)..(645): NCBI GI NO: 15235730 NR Description: phosphoenolpyruvate carboxykinase
  misc_feature (1)..(643): NCBI GI NO: 1172571 NR Description: Phosphoenolpyruvate carboxykinase
  misc_feature (1)..(645): NCBI GI NO: 22328084 NR Description: phosphoenolpyruvate carboxykinase
  misc_feature (1)..(645): NCBI GI NO: 12230480 NR Description: Phosphoenolpyruvate carboxykinase
  misc_feature (59)..(645): NCBI GI NO: 37532252 NR Description: putative phosphoenolpyruvate carboxykinase
  misc_feature (1)..(111): NCBI GI NO: 37532252 NR Description: putative phosphoenolpyruvate carboxykinase
MIQTNMKPTDSEFQVCHDDSTPPVRAQTIHELHSLQKKKSTPSTPLSATQGPFATVSDEERQKQQLQSISASLASLTRESGPKVVKGDPATKAEKGTHVHHHPQPHYFASTAFDVSDSALKFTHVLYNLSPAELYEQAIKHEKGSFITATGALATLSGAKTGRSPRDKRVVRDDTTEHDLWWGKGSPNIEMDEHTFLINRERAVDYLNSLEKVYVNDQFLNWDPEHRIKVRIVSARAYHSLFMHNMCIRPTPEELEEFGTPDFTIYNAGQFPCNRYTHYMTSSTSIDINIARKEMVILGTQYAGEMKKGLFGLMHYLMPKRNILSLHSGCNMGKDGDVALFFGLSGTGKTTLSTDHNRYLIGDDEHCWSENGVANIEGGCYAKCVDLSKDKEPDIWNAIKFGTVLENVVFDEHTREVDFSDKSVTENTRAAYPIEYIPNAKIPCVAPHAKNVILLACDAFGVLPPVSKLSLAQTMYHFISGYTALVAGTEDGIKEPQATFSACFGAAFIMMHPTKYAAMLAEKMQKHGATGWLVNTGWSGGSYGLGNRIKLAYTRKIIDAIHSGSLLNAQYTKTEVFGLEIPTALEGVPSEILDPVNTWSDKKAYQDTRLKLASLFKKNFDGFTTYKIGGDQKLTEEIVSAGPIF

SEQ ID NO: 5971 - protein, 640 aa, Glycine max
  peptide (1)..(640): Ceres Seq. ID no. 15176774
  misc_feature (116)..(587): Pfam Name: Pfam Description:  Phosphoenolpyruvate carboxykinase
  misc_feature (1)..(640): NCBI GI NO: 13785467 NR Description: phosphoenolpyruvate carboxykinase
  misc_feature (1)..(640): NCBI GI NO: 13785471 NR Description: phosphoenolpyruvate carboxykinase
  misc_feature (1)..(640): NCBI GI NO: 13785469 NR Description: phosphoenolpyruvate carboxykinase
  misc_feature (1)..(640): NCBI GI NO: 16950587 NR Description: phosphoenolpyruvate carboxykinase
  misc_feature (1)..(640): NCBI GI NO: 15235730 NR Description: phosphoenolpyruvate carboxykinase
  misc_feature (1)..(638): NCBI GI NO: 1172571 NR Description: Phosphoenolpyruvate carboxykinase
  misc_feature (1)..(640): NCBI GI NO: 22328084 NR Description: phosphoenolpyruvate carboxykinase
  misc_feature (1)..(640): NCBI GI NO: 12230480 NR Description: Phosphoenolpyruvate carboxykinase
  misc_feature (54)..(640): NCBI GI NO: 37532252 NR Description: putative phosphoenolpyruvate carboxykinase
  misc_feature (1)..(106): NCBI GI NO: 37532252 NR Description: putative phosphoenolpyruvate carboxykinase
MKPTDSEFQVCHDDSTPPVRAQTIHELHSLQKKKSTPSTPLSATQGPFATVSDEERQKQQLQSISASLASLTRESGPKVVKGDPATKAEKGTHVHHHPQPHYFASTAFDVSDSALKFTHVLYNLSPAELYEQAIKHEKGSFITATGALATLSGAKTGRSPRDKRVVRDDTTEHDLWWGKGSPNIEMDEHTFLINRERAVDYLNSLEKVYVNDQFLNWDPEHRIKVRIVSARAYHSLFMHNMCIRPTPEELEEFGTPDFTIYNAGQFPCNRYTHYMTSSTSIDINIARKEMVILGTQYAGEMKKGLFGLMHYLMPKRNILSLHSGCNMGKDGDVALFFGLSGTGKTTLSTDHNRYLIGDDEHCWSENGVANIEGGCYAKCVDLSKDKEPDIWNAIKFGTVLENVVFDEHTREVDFSDKSVTENTRAAYPIEYIPNAKIPCVAPHAKNVILLACDAFGVLPPVSKLSLAQTMYHFISGYTALVAGTEDGIKEPQATFSACFGAAFIMMHPTKYAAMLAEKMQKHGATGWLVNTGWSGGSYGLGNRIKLAYTRKIIDAIHSGSLLNAQYTKTEVFGLEIPTALEGVPSEILDPVNTWSDKKAYQDTRLKLASLFKKNFDGFTTYKIGGDQKLTEEIVSAGPIF

SEQ ID NO: 5972 - DNA, 1523 bp, Glycine max
  misc_feature (1)..(1523): Ceres Seq. ID no. 14310547
atccaaaatgaagcttgaagaatctgtgtccagctccaacatcattgcccggctgcttccaccggaagatccgaatccgcaaaatggatcaatctccggagcggtgttcaacataacaaccaccatgatcggtgccggaatcatgtccattccggcgaccatgaaggttttaggcatagttccggggttggtggtgatcgtgttggtggcactgataacagatgtgactgtggagtttatgctaaggtacacaagttccggtaaatcctctacttacgctggcatgatggcagagtcctttgcctccataggatccctcgccgttaagatttgcgtcatcatatccaatttgggggtcctcatcatctatttcattatccttggagacgtgctctctggaaacgagtcgaacggaatcacacacttgggtattctacaagaatggtttggcatcaactggtggacctctcgtgcttttgctcttcttattgttgcactcttcataatgcttccacttgttatgttacgacgtgttgattcactgaagtatagttctgctatagcaatcctactagcatttgtgtttgttgtaatatgttcatcaatggcggttagtgcattgttgtctggaaaaactcaaacactaagaatagtgcctgatttctctcaagccaccgtccttgaccttttcaccactatcccagtgtttgtcacgggtttcggattccatgtcaatgttcatccaattagagcagagctaggaaaagttgcacacatgggtttggctgcacggatttcgttgataatctgcgtggctatttactttgctattggtttctttgggtaccttttatttggggactccatcatgcccgatgtgttggtaaactttgaccaaaactcccatacaagtgctggtcgattactcaataccattgttcggttaagttatgcactccatcttgcacttgtgttcccaatcatgaactattccttgagggccaacatagatgaactaattttctcaaacaaaaataagcctccccttgcatcagataccccaagatttgtgtcactcactttgactttgctagccctcacatactttgtggctgtggccatcccaaatatatggtttttttttcagttcttgggatccacaaccattgtttgcacctcattcatcttccctgccgcaattgttctaagggacatgcatggcatatcaaagacaaaagatcaagtgatggcaatagtggtgattgttttggctgtaggaacaagcggaattgctatatggaccaacttgaatggttcaggggctgctcaatgattaaccatgatgctatataacacccagtcttttcaagttttagggaagcctagtgaacagctgcatcaatttggtccttaatttgattaatttatcttatagaaattaatttaataacatttaaaggtgagattgagaattgcacatcttgtattttgaaactatagacgatcctactttgattcaaacg

SEQ ID NO: 5973 - protein, 443 aa, Glycine max
  peptide (1)..(443): Ceres Seq. ID no. 14310548
  misc_feature (14)..(436): NCBI GI NO: 15228851 NR Description: amino acid transporter family
  misc_feature (11)..(436): NCBI GI NO: 30688270 NR Description: amino acid transporter family
  misc_feature (30)..(414): NCBI GI NO: 34907894 NR Description: P0439E11.11
  misc_feature (18)..(435): NCBI GI NO: 34898706 NR Description: hypothetical protein
  misc_feature (8)..(435): NCBI GI NO: 18406463 NR Description: amino acid transporter family
  misc_feature (28)..(435): NCBI GI NO: 9758059 NR Description: amino acid transporter-like protein
  misc_feature (28)..(435): NCBI GI NO: 15241555 NR Description: amino acid transporter family
  misc_feature (66)..(436): NCBI GI NO: 25408697 NR Description: hypothetical protein At2g40420
  misc_feature (27)..(429): NCBI GI NO: 18412864 NR Description: amino acid transporter family
  misc_feature (27)..(319): NCBI GI NO: 24461850 NR Description: CTV.3 [Poncirus trifoliata]
SKMKLEESVSSSNIIARLLPPEDPNPQNGSISGAVFNITTTMIGAGIMSIPATMKVLGIVPGLVVIVLVALITDVTVEFMLRYTSSGKSSTYAGMMAESFASIGSLAVKICVIISNLGVLIIYFIILGDVLSGNESNGITHLGILQEWFGINWWTSRAFALLIVALFIMLPLVMLRRVDSLKYSSAIAILLAFVFVVICSSMAVSALLSGKTQTLRIVPDFSQATVLDLFTTIPVFVTGFGFHVNVHPIRAELGKVAHMGLAARISLIICVAIYFAIGFFGYLLFGDSIMPDVLVNFDQNSHTSAGRLLNTIVRLSYALHLALVFPIMNYSLRANIDELIFSNKNKPPLASDTPRFVSLTLTLLALTYFVAVAIPNIWFFFQFLGSTTIVCTSFIFPAAIVLRDMHGISKTKDQVMAIVVIVLAVGTSGIAIWTNLNGSGAAQ

SEQ ID NO: 5974 - protein, 441 aa, Glycine max
  peptide (1)..(441): Ceres Seq. ID no. 14310549
  misc_feature (12)..(434): NCBI GI NO: 15228851 NR Description: amino acid transporter family
  misc_feature (9)..(434): NCBI GI NO: 30688270 NR Description: amino acid transporter family
  misc_feature (28)..(412): NCBI GI NO: 34907894 NR Description: P0439E11.11
  misc_feature (16)..(433): NCBI GI NO: 34898706 NR Description: hypothetical protein
  misc_feature (6)..(433): NCBI GI NO: 18406463 NR Description: amino acid transporter family
  misc_feature (26)..(433): NCBI GI NO: 9758059 NR Description: amino acid transporter-like protein
  misc_feature (26)..(433): NCBI GI NO: 15241555 NR Description: amino acid transporter family
  misc_feature (64)..(434): NCBI GI NO: 25408697 NR Description: hypothetical protein At2g40420
  misc_feature (25)..(427): NCBI GI NO: 18412864 NR Description: amino acid transporter family
  misc_feature (25)..(317): NCBI GI NO: 24461850 NR Description: CTV.3 [Poncirus trifoliata]
MKLEESVSSSNIIARLLPPEDPNPQNGSISGAVFNITTTMIGAGIMSIPATMKVLGIVPGLVVIVLVALITDVTVEFMLRYTSSGKSSTYAGMMAESFASIGSLAVKICVIISNLGVLIIYFIILGDVLSGNESNGITHLGILQEWFGINWWTSRAFALLIVALFIMLPLVMLRRVDSLKYSSAIAILLAFVFVVICSSMAVSALLSGKTQTLRIVPDFSQATVLDLFTTIPVFVTGFGFHVNVHPIRAELGKVAHMGLAARISLIICVAIYFAIGFFGYLLFGDSIMPDVLVNFDQNSHTSAGRLLNTIVRLSYALHLALVFPIMNYSLRANIDELIFSNKNKPPLASDTPRFVSLTLTLLALTYFVAVAIPNIWFFFQFLGSTTIVCTSFIFPAAIVLRDMHGISKTKDQVMAIVVIVLAVGTSGIAIWTNLNGSGAAQ

SEQ ID NO: 5975 - protein, 402 aa, Glycine max
  peptide (1)..(402): Ceres Seq. ID no. 14310550
  misc_feature (1)..(395): NCBI GI NO: 15228851 NR Description: amino acid transporter family
  misc_feature (1)..(395): NCBI GI NO: 30688270 NR Description: amino acid transporter family
  misc_feature (1)..(373): NCBI GI NO: 34907894 NR Description: P0439E11.11
  misc_feature (1)..(394): NCBI GI NO: 34898706 NR Description: hypothetical protein
  misc_feature (1)..(394): NCBI GI NO: 18406463 NR Description: amino acid transporter family
  misc_feature (1)..(394): NCBI GI NO: 9758059 NR Description: amino acid transporter-like protein
  misc_feature (1)..(394): NCBI GI NO: 15241555 NR Description: amino acid transporter family
  misc_feature (25)..(395): NCBI GI NO: 25408697 NR Description: hypothetical protein At2g40420
  misc_feature (1)..(388): NCBI GI NO: 18412864 NR Description: amino acid transporter family
  misc_feature (1)..(278): NCBI GI NO: 24461850 NR Description: CTV.3 [Poncirus trifoliata]
MIGAGIMSIPATMKVLGIVPGLVVIVLVALITDVTVEFMLRYTSSGKSSTYAGMMAESFASIGSLAVKICVIISNLGVLIIYFIILGDVLSGNESNGITHLGILQEWFGINWWTSRAFALLIVALFIMLPLVMLRRVDSLKYSSAIAILLAFVFVVICSSMAVSALLSGKTQTLRIVPDFSQATVLDLFTTIPVFVTGFGFHVNVHPIRAELGKVAHMGLAARISLIICVAIYFAIGFFGYLLFGDSIMPDVLVNFDQNSHTSAGRLLNTIVRLSYALHLALVFPIMNYSLRANIDELIFSNKNKPPLASDTPRFVSLTLTLLALTYFVAVAIPNIWFFFQFLGSTTIVCTSFIFPAAIVLRDMHGISKTKDQVMAIVVIVLAVGTSGIAIWTNLNGSGAAQ

SEQ ID NO: 5976 - DNA, 1507 bp, Glycine max
  misc_feature (1)..(1507): Ceres Seq. ID no. 12612470
acctcccaagctccctagcaccatatgctaaggtcgttaacaacttcaatgggaattgtatcagtagcaccaactcagactgtggtgtatttggtccctcggtatcctccatcaatctccacatatctctatgcttcttctcttaccaaggctaagaccattcatcaacccacacaatcttatgttcactccaaatcagtagaaactgcaatagagagtacatcacagttggtgccattcccattgttgacgaatgggaattacacagcatgcaccattccttggaggttcccttcagacgatccaagcattcccactcccaccgagctatcttggattaatctcctcctcaatactatccccaccttcaagaagcatgctgagaatgatacttctgttcctgatgctgcaaataaagctgaaaattttgctcaaaggtatgctagaatacttgaagatttcaagaaagatcctgcaagtcaaggcaggcctcttgatatccttattctatgcagacttcgtgagcaagtccttagagaacagggattcagagatatcttcaagaaaataaaggatgtagagaatgcaaatgccatatccctatttcagaatgttgttcatcttaatgatgccattgaagatgaagggaaacgactggagaatttggttagaggaatttttgcagggaacatatttgatcttggtgctacacagcttgcagaggttttctcaagggatggagtatctttttcgactacttgtcaaaatcttgtccctcgaccctggattattgatgaccttgaaactttcagaatagcatggagcaagaagtcctggaagaaggtaatcatatttgtggataactctggtgcagatgtcattttgggtattctgccatttgcaagggagctccttcgacgtgggagtcaggttatattggctgctaatgacttaccttccatcaatgatgtgacttactctgacctaattgaaattataccaaagttaaaggatgaagaaggacgtctcacgggtgtcagtacttcaaatcttctaattgccaactccggaaatgatttacctgttattgatcttacaagggtgtcacaagaacttgcataccttgctaatgatgtagatcttgtcatcttagaagggatgggtcgtggaatagaaacaaatctctatgctcaatttaaatgtgattcccttaagattgggatggtaaaacatcctgaggttgcagaatttcttgggtcacgtttgtatgactgcgtgatcaaatacgatgaagtttagagcttataattaagttgattctttactttgataaatacctaacactacatttgcaatttcaactgcaaatttccaaataatcaaaattgaaatttccaaacaattactttttcaatgtacaagtccgaatttggatcaacaatgctggaaaaaaaaaatctgaacccattaaatttaattagattgaattaaaaaaatatttattatt

SEQ ID NO: 5977 - protein, 424 aa, Glycine max
  peptide (1)..(424): Ceres Seq. ID no. 12612471
  misc_feature (98)..(421): Pfam Name: Pfam Description:  Protein of unknown function DUF89
  misc_feature (63)..(424): NCBI GI NO: 21554574 NR Description: unknown [Arabidopsis thaliana]
  misc_feature (63)..(424): NCBI GI NO: 18398388 NR Description: expressed protein; protein id: At2g17340
  misc_feature (63)..(424): NCBI GI NO: 21554145 NR Description: unknown [Arabidopsis thaliana]
  misc_feature (63)..(424): NCBI GI NO: 18418688 NR Description: putative protein; protein id: At4g35360
  misc_feature (63)..(226): NCBI GI NO: 25370535 NR Description: hypothetical protein At2g17340
  misc_feature (302)..(424): NCBI GI NO: 25370535 NR Description: hypothetical protein At2g17340
  misc_feature (69)..(248): NCBI GI NO: 15227811 NR Description: unknown protein; protein id: At2g17320.1
  misc_feature (323)..(424): NCBI GI NO: 15227811 NR Description: unknown protein; protein id: At2g17320.1
  misc_feature (161)..(397): NCBI GI NO: 7486028 NR Description: hypothetical protein F23E12
  misc_feature (57)..(422): NCBI GI NO: 17570183 NR Description: Unidentified Vitellogenin-linked Transcript UVT-3
MLRSLTTSMGIVSVAPTQTVVYLVPRYPPSISTYLYASSLTKAKTIHQPTQSYVHSKSVETAIESTSQLVPFPLLTNGNYTACTIPWRFPSDDPSIPTPTELSWINLLLNTIPTFKKHAENDTSVPDAANKAENFAQRYARILEDFKKDPASQGRPLDILILCRLREQVLREQGFRDIFKKIKDVENANAISLFQNVVHLNDAIEDEGKRLENLVRGIFAGNIFDLGATQLAEVFSRDGVSFSTTCQNLVPRPWIIDDLETFRIAWSKKSWKKVIIFVDNSGADVILGILPFARELLRRGSQVILAANDLPSINDVTYSDLIEIIPKLKDEEGRLTGVSTSNLLIANSGNDLPVIDLTRVSQELAYLANDVDLVILEGMGRGIETNLYAQFKCDSLKIGMVKHPEVAEFLGSRLYDCVIKYDEV

SEQ ID NO: 5978 - protein, 416 aa, Glycine max
  peptide (1)..(416): Ceres Seq. ID no. 12612472
  misc_feature (90)..(413): Pfam Name: Pfam Description:  Protein of unknown function DUF89
  misc_feature (55)..(416): NCBI GI NO: 21554574 NR Description: unknown [Arabidopsis thaliana]
  misc_feature (55)..(416): NCBI GI NO: 18398388 NR Description: expressed protein; protein id: At2g17340
  misc_feature (55)..(416): NCBI GI NO: 21554145 NR Description: unknown [Arabidopsis thaliana]
  misc_feature (55)..(416): NCBI GI NO: 18418688 NR Description: putative protein; protein id: At4g35360
  misc_feature (55)..(218): NCBI GI NO: 25370535 NR Description: hypothetical protein At2g17340
  misc_feature (294)..(416): NCBI GI NO: 25370535 NR Description: hypothetical protein At2g17340
  misc_feature (61)..(240): NCBI GI NO: 15227811 NR Description: unknown protein; protein id: At2g17320.1
  misc_feature (315)..(416): NCBI GI NO: 15227811 NR Description: unknown protein; protein id: At2g17320.1
  misc_feature (153)..(389): NCBI GI NO: 7486028 NR Description: hypothetical protein F23E12
  misc_feature (49)..(414): NCBI GI NO: 17570183 NR Description: Unidentified Vitellogenin-linked Transcript UVT-3
MGIVSVAPTQTVVYLVPRYPPSISTYLYASSLTKAKTIHQPTQSYVHSKSVETAIESTSQLVPFPLLTNGNYTACTIPWRFPSDDPSIPTPTELSWINLLLNTIPTFKKHAENDTSVPDAANKAENFAQRYARILEDFKKDPASQGRPLDILILCRLREQVLREQGFRDIFKKIKDVENANAISLFQNVVHLNDAIEDEGKRLENLVRGIFAGNIFDLGATQLAEVFSRDGVSFSTTCQNLVPRPWIIDDLETFRIAWSKKSWKKVIIFVDNSGADVILGILPFARELLRRGSQVILAANDLPSINDVTYSDLIEIIPKLKDEEGRLTGVSTSNLLIANSGNDLPVIDLTRVSQELAYLANDVDLVILEGMGRGIETNLYAQFKCDSLKIGMVKHPEVAEFLGSRLYDCVIKYDEV

SEQ ID NO: 5979 - DNA, 1215 bp, Glycine max
  misc_feature (1)..(1215): Ceres Seq. ID no. 14308632
agcaatacatgtaacaaagcttcagttcaaattgaagccagaaaatcaggtgcagtttctagtgcttctgagaaatatgattgccatagagactatgcagacaggggaatggttgattcttttcaaggttcaattcagtcatcagagcaagcatcatccaagaatgggtccatgtttatcaaggaaaagaagagggaaatgttggtcaatggtggtgtcagtggttcttcctcaagagcatcaaatcttgatggtgctgttcatggtggagtgaagggaaagagaagcgagagggagaggaatcaaagccgggatcagagcagacaaaattctattggcagagctggacgcatgtcactggacagtagccaaaatgagaacaaaccaaaagctaagaagcaaaagagtactgctagtggacatgataggtttatggaagcaaaggaatctgctcgtttaccaattcatgatacaatcaataatgatagcaaagatggggctacgttatctggtaaccaggacacttctcaaataaaggaatccaatgactttgggaatttgccgctacctgacttaagttcaatagaagaatttggtggtgcgcaagatcttagttcatggttgaactttgaagaagatggtttgccagaccatgattctattggccttgatattccaatggatgacctatcggatttaaatatgcttatgtgaagggatgtacacgtgttatatctgaaggagagtttgtatgtactcagtgaaccttgtggggcgtcaagatcttgatggtatacttgggtttctctggaggggaaatttttgtgattggaattatgaattttgacacatttatagggtgaacgggagatggggagtgacttaaaattgcaatttgatatttttgtggacgttgtatagaggaagctacaatcatggatttcatgaaattgctgtcagatatctcccttctcccatgaatcaaactagttttgctgtgttaaagtcatgatctcagaaatggcttttctataggagattagattaattaaagtgctatagcctgagagtggtttcatttctgaagctgtgacttcagctaccatactatgtaaaatgtttattgttcttgtagaccgaaactcgcacaattttgattgttttctcctgaataatggagaatgagtttttaattaagtttttctaggattaaag

SEQ ID NO: 5980 - protein, 237 aa, Glycine max
  peptide (1)..(237): Ceres Seq. ID no. 14308633
  misc_feature (37)..(237): NCBI GI NO: 15233709 NR Description: expressed protein [Arabidopsis thaliana]
  misc_feature (69)..(236): NCBI GI NO: 34905908 NR Description: P0458E05.30
  misc_feature (49)..(235): NCBI GI NO: 7486242 NR Description: hypothetical protein At2g19390
  misc_feature (49)..(235): NCBI GI NO: 18399028 NR Description: expressed protein [Arabidopsis thaliana]
  misc_feature (49)..(235): NCBI GI NO: 16604627 NR Description: unknown protein [Arabidopsis thaliana]
SNTCNKASVQIEARKSGAVSSASEKYDCHRDYADRGMVDSFQGSIQSSEQASSKNGSMFIKEKKREMLVNGGVSGSSSRASNLDGAVHGGVKGKRSERERNQSRDQSRQNSIGRAGRMSLDSSQNENKPKAKKQKSTASGHDRFMEAKESARLPIHDTINNDSKDGATLSGNQDTSQIKESNDFGNLPLPDLSSIEEFGGAQDLSSWLNFEEDGLPDHDSIGLDIPMDDLSDLNMLM

SEQ ID NO: 5981 - protein, 201 aa, Glycine max
  peptide (1)..(201): Ceres Seq. ID no. 14308634
  misc_feature (1)..(201): NCBI GI NO: 15233709 NR Description: expressed protein [Arabidopsis thaliana]
  misc_feature (33)..(200): NCBI GI NO: 34905908 NR Description: P0458E05.30
  misc_feature (13)..(199): NCBI GI NO: 7486242 NR Description: hypothetical protein At2g19390
  misc_feature (13)..(199): NCBI GI NO: 18399028 NR Description: expressed protein [Arabidopsis thaliana]
  misc_feature (13)..(199): NCBI GI NO: 16604627 NR Description: unknown protein [Arabidopsis thaliana]
MVDSFQGSIQSSEQASSKNGSMFIKEKKREMLVNGGVSGSSSRASNLDGAVHGGVKGKRSERERNQSRDQSRQNSIGRAGRMSLDSSQNENKPKAKKQKSTASGHDRFMEAKESARLPIHDTINNDSKDGATLSGNQDTSQIKESNDFGNLPLPDLSSIEEFGGAQDLSSWLNFEEDGLPDHDSIGLDIPMDDLSDLNMLM

SEQ ID NO: 5982 - protein, 180 aa, Glycine max
  peptide (1)..(180): Ceres Seq. ID no. 14308635
  misc_feature (1)..(180): NCBI GI NO: 15233709 NR Description: expressed protein [Arabidopsis thaliana]
  misc_feature (12)..(179): NCBI GI NO: 34905908 NR Description: P0458E05.30
  misc_feature (1)..(178): NCBI GI NO: 7486242 NR Description: hypothetical protein At2g19390
  misc_feature (1)..(178): NCBI GI NO: 18399028 NR Description: expressed protein [Arabidopsis thaliana]
  misc_feature (1)..(178): NCBI GI NO: 16604627 NR Description: unknown protein [Arabidopsis thaliana]
MFIKEKKREMLVNGGVSGSSSRASNLDGAVHGGVKGKRSERERNQSRDQSRQNSIGRAGRMSLDSSQNENKPKAKKQKSTASGHDRFMEAKESARLPIHDTINNDSKDGATLSGNQDTSQIKESNDFGNLPLPDLSSIEEFGGAQDLSSWLNFEEDGLPDHDSIGLDIPMDDLSDLNMLM

SEQ ID NO: 5983 - DNA, 1232 bp, Glycine max
  misc_feature (1)..(1232): Ceres Seq. ID no. 14308586
aaagaatgcaatgactcaactccagatagtagatagtgagtgagtgaagctaaagctacaaaaacaacaaccaaacaaaaaactcaattctcttctgttcttggtttttgcttttcctcattctctcattctcaacaccaccaaaatgggccttgtttcccaggatgccctcaaccaactccaagctctcatggatcaagtgctacttgaggaggagccactgcagagaacgtttcagaatgttcatcaaggatgtgtcgccgaaaccttaacgcggtttctaaaagcaagggagtggaatgctaccaaggcccataaaatgatagtcgattgtttaaagtggagagtacaaaatgagattgacaacatattatctaaaccaataatccctactgatttatacagaggcattcgtgattcacaacttataggattgtccgggtactccagagagggtctgccagtctttgcaattggtgttgggcttagcacatttgacaaagcgtctgtccattattatgtgcagtctcacattcaaattaatgaatatcgtgatcgtgtaatcttgccttcagcatcaaagaagcatgagcggcctattaccacatgtgtaaaggttttggatatgactggtctgaagttgtcagccctgaatcagataaagttgttaacaataatatcatccattgatgatctgaactaccccgagaaaacaaatacttattacattgtaaatgccccatacatattttcagcttgttggaaggttgtgaagccacttttacaagagaggacaagaagaaaagtacaagtcttacaaggttgtgggcgagatgagctattaaagatcatggattacacgtctctgccacatttctgtagaagagaaggctctggatcatcaagacattcagagaatggaaatgaaaattgctattccgtggatcatcctttccataagcagctctacaactacatcaaggagcaatccagaatccatgaagctgttgaacccatcaagcagggatcgttccatgtagattttcccgaacctcctgccgagaaagcagagattgtcaagactttagagtctgagctacacaagtttaagatcagcaatgagaatggtgattgaagattgatactgttaccaatggtgtcttggccatgttgtcttttacctgtcctactaaccatttgaaccaaactaatgatgtaacaacggttcttcc

SEQ ID NO: 5984 - protein, 329 aa, Glycine max
  peptide (1)..(329): Ceres Seq. ID no. 14308587
  misc_feature (138)..(242): Pfam Name: Pfam Description:  CRAL/TRIO domain
  misc_feature (1)..(328): NCBI GI NO: 7488694 NR Description: phosphatidylinositol-phosphatidylcholine transfer protein SEC14 homolog Ssh1
  misc_feature (1)..(328): NCBI GI NO: 15238794 NR Description: sec14 cytosolic factor, putative
  misc_feature (1)..(320): NCBI GI NO: 15222786 NR Description: sec14 cytosolic factor, putative
  misc_feature (1)..(320): NCBI GI NO: 25295905 NR Description: protein F14J16.8 [imported] - Arabidopsis thaliana
  misc_feature (1)..(224): NCBI GI NO: 14532536 NR Description: AT5g47730/MCA23_5 [Arabidopsis thaliana]
  misc_feature (2)..(244): NCBI GI NO: 28411929 NR Description: OSJNBa0027N13.10
  misc_feature (41)..(257): NCBI GI NO: 15230198 NR Description: phosphatidylinositol transfer protein -related
  misc_feature (41)..(257): NCBI GI NO: 11994666 NR Description: phosphatidylinositol/phosphatidylcholine transfer protein-like
  misc_feature (1)..(262): NCBI GI NO: 25412048 NR Description: hypothetical protein At2g21540
  misc_feature (1)..(262): NCBI GI NO: 15234966 NR Description: SEC14 - like protein [Arabidopsis thaliana]
MGLVSQDALNQLQALMDQVLLEEEPLQRTFQNVHQGCVAETLTRFLKAREWNATKAHKMIVDCLKWRVQNEIDNILSKPIIPTDLYRGIRDSQLIGLSGYSREGLPVFAIGVGLSTFDKASVHYYVQSHIQINEYRDRVILPSASKKHERPITTCVKVLDMTGLKLSALNQIKLLTIISSIDDLNYPEKTNTYYIVNAPYIFSACWKVVKPLLQERTRRKVQVLQGCGRDELLKIMDYTSLPHFCRREGSGSSRHSENGNENCYSVDHPFHKQLYNYIKEQSRIHEAVEPIKQGSFHVDFPEPPAEKAEIVKTLESELHKFKISNENGD

SEQ ID NO: 5985 - protein, 314 aa, Glycine max
  peptide (1)..(314): Ceres Seq. ID no. 14308588
  misc_feature (123)..(227): Pfam Name: Pfam Description:  CRAL/TRIO domain
  misc_feature (1)..(313): NCBI GI NO: 7488694 NR Description: phosphatidylinositol-phosphatidylcholine transfer protein SEC14 homolog Ssh1
  misc_feature (1)..(313): NCBI GI NO: 15238794 NR Description: sec14 cytosolic factor, putative
  misc_feature (1)..(305): NCBI GI NO: 15222786 NR Description: sec14 cytosolic factor, putative
  misc_feature (1)..(305): NCBI GI NO: 25295905 NR Description: protein F14J16.8 [imported] - Arabidopsis thaliana
  misc_feature (1)..(209): NCBI GI NO: 14532536 NR Description: AT5g47730/MCA23_5 [Arabidopsis thaliana]
  misc_feature (1)..(229): NCBI GI NO: 28411929 NR Description: OSJNBa0027N13.10
  misc_feature (26)..(242): NCBI GI NO: 15230198 NR Description: phosphatidylinositol transfer protein -related
  misc_feature (26)..(242): NCBI GI NO: 11994666 NR Description: phosphatidylinositol/phosphatidylcholine transfer protein-like
  misc_feature (1)..(247): NCBI GI NO: 25412048 NR Description: hypothetical protein At2g21540
  misc_feature (1)..(247): NCBI GI NO: 15234966 NR Description: SEC14 - like protein [Arabidopsis thaliana]
MDQVLLEEEPLQRTFQNVHQGCVAETLTRFLKAREWNATKAHKMIVDCLKWRVQNEIDNILSKPIIPTDLYRGIRDSQLIGLSGYSREGLPVFAIGVGLSTFDKASVHYYVQSHIQINEYRDRVILPSASKKHERPITTCVKVLDMTGLKLSALNQIKLLTIISSIDDLNYPEKTNTYYIVNAPYIFSACWKVVKPLLQERTRRKVQVLQGCGRDELLKIMDYTSLPHFCRREGSGSSRHSENGNENCYSVDHPFHKQLYNYIKEQSRIHEAVEPIKQGSFHVDFPEPPAEKAEIVKTLESELHKFKISNENGD

SEQ ID NO: 5986 - protein, 271 aa, Glycine max
  peptide (1)..(271): Ceres Seq. ID no. 14308589
  misc_feature (80)..(184): Pfam Name: Pfam Description:  CRAL/TRIO domain
  misc_feature (1)..(270): NCBI GI NO: 7488694 NR Description: phosphatidylinositol-phosphatidylcholine transfer protein SEC14 homolog Ssh1
  misc_feature (1)..(270): NCBI GI NO: 15238794 NR Description: sec14 cytosolic factor, putative
  misc_feature (1)..(262): NCBI GI NO: 15222786 NR Description: sec14 cytosolic factor, putative
  misc_feature (1)..(262): NCBI GI NO: 25295905 NR Description: protein F14J16.8 [imported] - Arabidopsis thaliana
  misc_feature (1)..(166): NCBI GI NO: 14532536 NR Description: AT5g47730/MCA23_5 [Arabidopsis thaliana]
  misc_feature (1)..(186): NCBI GI NO: 28411929 NR Description: OSJNBa0027N13.10
  misc_feature (1)..(199): NCBI GI NO: 15230198 NR Description: phosphatidylinositol transfer protein -related
  misc_feature (1)..(199): NCBI GI NO: 11994666 NR Description: phosphatidylinositol/phosphatidylcholine transfer protein-like
  misc_feature (1)..(204): NCBI GI NO: 25412048 NR Description: hypothetical protein At2g21540
  misc_feature (1)..(204): NCBI GI NO: 15234966 NR Description: SEC14 - like protein [Arabidopsis thaliana]
MIVDCLKWRVQNEIDNILSKPIIPTDLYRGIRDSQLIGLSGYSREGLPVFAIGVGLSTFDKASVHYYVQSHIQINEYRDRVILPSASKKHERPITTCVKVLDMTGLKLSALNQIKLLTIISSIDDLNYPEKTNTYYIVNAPYIFSACWKVVKPLLQERTRRKVQVLQGCGRDELLKIMDYTSLPHFCRREGSGSSRHSENGNENCYSVDHPFHKQLYNYIKEQSRIHEAVEPIKQGSFHVDFPEPPAEKAEIVKTLESELHKFKISNENGD

SEQ ID NO: 5987 - DNA, 1434 bp, Glycine max
  misc_feature (1)..(1434): Ceres Seq. ID no. 15176254
gaaaaataggtattttcagtgtgaagctgcaccagaaatcgcgtagtggctgcatctccgttcaccactgatcgcttacgagctcgaaaaggttaatgaaggagcacgtcattgcgcttctactactcttccactttcacagataaccctattgcataatcgcgctccttcctctctagggtttcttcaacttcatggcttcccctactcatttcgacgatgacttcgatttcggaggcggatttggcggaaggcattcaggtaataagaggtcgtctcccgattacgacgacgaggattatgacaacgatccttttgcaccgaagaaggctataacaaaagctgaagaagcttctggtgtaacaacaggaatgatcttgtcacttcgtgagagtctccagaactgtaaggatacacttgcaacatgccaaaatgaacttgaggctgcaaaatcagagattcagagttggcattctacacttaaaaatcagccatccatacttgccgggatcactccagagcccaagatgttgattaattatctgcaggccttgaaatcctctgaagagtctttaagagagcagcttgaaaaggcaaagaaaaaggaagctgcattcattgtaacatttgcaaaacgagaacaagagatagcagagttgaagtctgcggtgcgagatctgaaagtgcaactcaagccaccatcaatgcaggctaggaggttgttactagatccagctgttcatgaagagttcacgcgtttaaagaacttagttgaggaaaaggataaaaaagtaaaggagttgcaagataacattgctgctgtaagttttactccccaaagcaagatggggaagatgctgatggctaaatgtagaaccctgcaagaggaaaatgaagagattggaaatcaagcgtctgaggggaagatgcatgaattagggatgaaacttgcattgcagaagtcccaaaattcacaacttagaaatcaatttgaagggttgcagaagcacatggaaggactgacaaatgatgtggaaagatccaatgaaatggttcttatgttacaagaaaaattagaagagaaggatcggcagatacagagactaaaacatgagattaaacagaagaacttggaggatcaaagactaaaacatgagcttcaacagaaaaacttggaggatcaaagactaaaacatgaacttcaacagaagaacttggaggatggaaatgacaataatgccggggaggctgctaactaatttgatatatatatatatatatatatatatatatatatatatatatatttactgctgtacattatattaattttttttgcgaaaactgtggatatttatgaggaatgattatgcttctgctttgaatggaattatggaaaatatagtagatggagctactttttaatacaaaaag

SEQ ID NO: 5988 - protein, 354 aa, Glycine max
  peptide (1)..(354): Ceres Seq. ID no. 15176255
  misc_feature (35)..(338): Pfam Name: Pfam Description:  Myosin tail
  misc_feature (8)..(317): NCBI GI NO: 15232439 NR Description: FKBP12 interacting protein (FIP37)
  misc_feature (115)..(309): NCBI GI NO: 38648992 NR Description: Unknown (protein for MGC:75954)
  misc_feature (115)..(310): NCBI GI NO: 10334526 NR Description: WTAP protein [Homo sapiens]
  misc_feature (115)..(310): NCBI GI NO: 11322455 NR Description: WTAP protein [Mus musculus]
  misc_feature (115)..(310): NCBI GI NO: 21361159 NR Description: Wilms' tumour 1-associating protein isoform 1
  misc_feature (115)..(304): NCBI GI NO: 33416867 NR Description: Unknown (protein for MGC:66202) [Danio rerio]
  misc_feature (117)..(310): NCBI GI NO: 31239559 NR Description: ENSANGP00000011593 [Anopheles gambiae]
  misc_feature (79)..(322): NCBI GI NO: 24653459 NR Description: female lethal d CG6315-PA
  misc_feature (127)..(322): NCBI GI NO: 5441313 NR Description: FL(2)D-s protein [Drosophila melanogaster]
  misc_feature (127)..(322): NCBI GI NO: 24653461 NR Description: female lethal d CG6315-PB
MASPTHFDDDFDFGGGFGGRHSGNKRSSPDYDDEDYDNDPFAPKKAITKAEEASGVTTGMILSLRESLQNCKDTLATCQNELEAAKSEIQSWHSTLKNQPSILAGITPEPKMLINYLQALKSSEESLREQLEKAKKKEAAFIVTFAKREQEIAELKSAVRDLKVQLKPPSMQARRLLLDPAVHEEFTRLKNLVEEKDKKVKELQDNIAAVSFTPQSKMGKMLMAKCRTLQEENEEIGNQASEGKMHELGMKLALQKSQNSQLRNQFEGLQKHMEGLTNDVERSNEMVLMLQEKLEEKDRQIQRLKHEIKQKNLEDQRLKHELQQKNLEDQRLKHELQQKNLEDGNDNNAGEAAN

SEQ ID NO: 5989 - protein, 295 aa, Glycine max
  peptide (1)..(295): Ceres Seq. ID no. 15176256
  misc_feature (1)..(279): Pfam Name: Pfam Description:  Myosin tail
  misc_feature (1)..(258): NCBI GI NO: 15232439 NR Description: FKBP12 interacting protein (FIP37)
  misc_feature (56)..(250): NCBI GI NO: 38648992 NR Description: Unknown (protein for MGC:75954)
  misc_feature (56)..(251): NCBI GI NO: 10334526 NR Description: WTAP protein [Homo sapiens]
  misc_feature (56)..(251): NCBI GI NO: 11322455 NR Description: WTAP protein [Mus musculus]
  misc_feature (56)..(251): NCBI GI NO: 21361159 NR Description: Wilms' tumour 1-associating protein isoform 1
  misc_feature (56)..(245): NCBI GI NO: 33416867 NR Description: Unknown (protein for MGC:66202) [Danio rerio]
  misc_feature (58)..(251): NCBI GI NO: 31239559 NR Description: ENSANGP00000011593 [Anopheles gambiae]
  misc_feature (20)..(263): NCBI GI NO: 24653459 NR Description: female lethal d CG6315-PA
  misc_feature (68)..(263): NCBI GI NO: 5441313 NR Description: FL(2)D-s protein [Drosophila melanogaster]
  misc_feature (68)..(263): NCBI GI NO: 24653461 NR Description: female lethal d CG6315-PB
MILSLRESLQNCKDTLATCQNELEAAKSEIQSWHSTLKNQPSILAGITPEPKMLINYLQALKSSEESLREQLEKAKKKEAAFIVTFAKREQEIAELKSAVRDLKVQLKPPSMQARRLLLDPAVHEEFTRLKNLVEEKDKKVKELQDNIAAVSFTPQSKMGKMLMAKCRTLQEENEEIGNQASEGKMHELGMKLALQKSQNSQLRNQFEGLQKHMEGLTNDVERSNEMVLMLQEKLEEKDRQIQRLKHEIKQKNLEDQRLKHELQQKNLEDQRLKHELQQKNLEDGNDNNAGEAAN

SEQ ID NO: 5990 - protein, 243 aa, Glycine max
  peptide (1)..(243): Ceres Seq. ID no. 15176257
  misc_feature (1)..(227): Pfam Name: Pfam Description:  Myosin tail
  misc_feature (1)..(206): NCBI GI NO: 15232439 NR Description: FKBP12 interacting protein (FIP37)
  misc_feature (4)..(198): NCBI GI NO: 38648992 NR Description: Unknown (protein for MGC:75954)
  misc_feature (4)..(199): NCBI GI NO: 10334526 NR Description: WTAP protein [Homo sapiens]
  misc_feature (4)..(199): NCBI GI NO: 11322455 NR Description: WTAP protein [Mus musculus]
  misc_feature (4)..(199): NCBI GI NO: 21361159 NR Description: Wilms' tumour 1-associating protein isoform 1
  misc_feature (4)..(193): NCBI GI NO: 33416867 NR Description: Unknown (protein for MGC:66202) [Danio rerio]
  misc_feature (6)..(199): NCBI GI NO: 31239559 NR Description: ENSANGP00000011593 [Anopheles gambiae]
  misc_feature (1)..(211): NCBI GI NO: 24653459 NR Description: female lethal d CG6315-PA
  misc_feature (16)..(211): NCBI GI NO: 5441313 NR Description: FL(2)D-s protein [Drosophila melanogaster]
  misc_feature (16)..(211): NCBI GI NO: 24653461 NR Description: female lethal d CG6315-PB
MLINYLQALKSSEESLREQLEKAKKKEAAFIVTFAKREQEIAELKSAVRDLKVQLKPPSMQARRLLLDPAVHEEFTRLKNLVEEKDKKVKELQDNIAAVSFTPQSKMGKMLMAKCRTLQEENEEIGNQASEGKMHELGMKLALQKSQNSQLRNQFEGLQKHMEGLTNDVERSNEMVLMLQEKLEEKDRQIQRLKHEIKQKNLEDQRLKHELQQKNLEDQRLKHELQQKNLEDGNDNNAGEAAN

SEQ ID NO: 5991 - DNA, 1129 bp, Glycine max
  misc_feature (1)..(1129): Ceres Seq. ID no. 14312572
aattatttattataacacgtacattaaactaaaacatagttacatacgtaaaaaaacttgcaattgttttataaggaatcagattagttacacttccattcccttccagcagctgggtttgagaagacaattgattatataggttttgttagtaaacaaaagaaaaggaaacatgaaggacgcagatgtgtcaaggcagatccagcagatgatcaggttcatccgtcaagaggctgaagagaaagctaatgaaatatctgttgctgctgaagaggaattcaatattgagaaactgcaattgcttgaagctgaaaaaagaaagatcaggcaagagtacgaacgaaaagccaaacaaattgacgttcgaagaaagattgaatactcaacacaactgaatgcagcccgaataaaagtgcttcaagcacaagatgatgcggtgggtgctatgaaggacgctgctaaaaaggggcttttacgtatctcaaatgataagaaagtatacaggaaactcgtcaaagacatgattgttcagggtttactacgcctgagggaaccatcagtgctattaagatgcagagagagtgaccgtaagcttgttgagtcattgatagaggaagccaaaaaagaatactcggagaaagccaatatgcaagcccctaagattgcccttgatgatcgtgtttacctcccaccgtcgccaaagaacagtgccgtggattcccatgaaccttattgcaccggaggaatagtattggcctcagaggatgggaagattgtgttggaaaatacccttgatgcacggcttgatgtcattttccggcagaaactacctgaggtaaggaagcgcctgttaggttgaacaacatactgcaatttgaattctcgctttatgtcagcaaatggaagagcaaggatgttgccacttcttttccgctgagcctgatcaaagcaaatgcaccaccccttttgttttttcttttctctaagaccaagttttaaatgttaagtctctttatttttgtaatttttaattctaataagctagactagaggaagaacatttcagtaatgtttttccggtacatttttttttctcagaagagagtaataaaatagactatttaaaatt

SEQ ID NO: 5992 - protein, 228 aa, Glycine max
  peptide (1)..(228): Ceres Seq. ID no. 14312573
  misc_feature (16)..(227): Pfam Name: E/31 kDa Pfam Description: ATP synthase
  misc_feature (1)..(228): NCBI GI NO: 15231933 NR Description: vacuolar ATP synthase subunit E -related
  misc_feature (1)..(228): NCBI GI NO: 15237054 NR Description: H+-transporting ATPase chain E, vacuolar
  misc_feature (1)..(228): NCBI GI NO: 1143394 NR Description: V-type proton-ATPase [Arabidopsis thaliana]
  misc_feature (1)..(228): NCBI GI NO: 34912000 NR Description: putative YLP
  misc_feature (1)..(227): NCBI GI NO: 12585492 NR Description: Vacuolar ATP synthase subunit E
  misc_feature (1)..(227): NCBI GI NO: 12585474 NR Description: Vacuolar ATP synthase subunit E
  misc_feature (1)..(228): NCBI GI NO: 3334405 NR Description: Vacuolar ATP synthase subunit E
  misc_feature (1)..(228): NCBI GI NO: 20340245 NR Description: vacuolar ATPase subunit E-like protein
  misc_feature (1)..(227): NCBI GI NO: 4099148 NR Description: YLP [Hordeum vulgare]
  misc_feature (1)..(226): NCBI GI NO: 3334410 NR Description: Vacuolar ATP synthase subunit E
MKDADVSRQIQQMIRFIRQEAEEKANEISVAAEEEFNIEKLQLLEAEKRKIRQEYERKAKQIDVRRKIEYSTQLNAARIKVLQAQDDAVGAMKDAAKKGLLRISNDKKVYRKLVKDMIVQGLLRLREPSVLLRCRESDRKLVESLIEEAKKEYSEKANMQAPKIALDDRVYLPPSPKNSAVDSHEPYCTGGIVLASEDGKIVLENTLDARLDVIFRQKLPEVRKRLLG

SEQ ID NO: 5993 - protein, 216 aa, Glycine max
  peptide (1)..(216): Ceres Seq. ID no. 14312574
  misc_feature (4)..(215): Pfam Name: E/31 kDa Pfam Description: ATP synthase
  misc_feature (1)..(216): NCBI GI NO: 15231933 NR Description: vacuolar ATP synthase subunit E -related
  misc_feature (1)..(216): NCBI GI NO: 15237054 NR Description: H+-transporting ATPase chain E, vacuolar
  misc_feature (1)..(216): NCBI GI NO: 1143394 NR Description: V-type proton-ATPase [Arabidopsis thaliana]
  misc_feature (1)..(216): NCBI GI NO: 34912000 NR Description: putative YLP
  misc_feature (1)..(215): NCBI GI NO: 12585492 NR Description: Vacuolar ATP synthase subunit E
  misc_feature (1)..(215): NCBI GI NO: 12585474 NR Description: Vacuolar ATP synthase subunit E
  misc_feature (1)..(216): NCBI GI NO: 3334405 NR Description: Vacuolar ATP synthase subunit E
  misc_feature (1)..(216): NCBI GI NO: 20340245 NR Description: vacuolar ATPase subunit E-like protein
  misc_feature (1)..(215): NCBI GI NO: 4099148 NR Description: YLP [Hordeum vulgare]
  misc_feature (1)..(214): NCBI GI NO: 3334410 NR Description: Vacuolar ATP synthase subunit E
MIRFIRQEAEEKANEISVAAEEEFNIEKLQLLEAEKRKIRQEYERKAKQIDVRRKIEYSTQLNAARIKVLQAQDDAVGAMKDAAKKGLLRISNDKKVYRKLVKDMIVQGLLRLREPSVLLRCRESDRKLVESLIEEAKKEYSEKANMQAPKIALDDRVYLPPSPKNSAVDSHEPYCTGGIVLASEDGKIVLENTLDARLDVIFRQKLPEVRKRLLG

SEQ ID NO: 5994 - protein, 137 aa, Glycine max
  peptide (1)..(137): Ceres Seq. ID no. 14312575
  misc_feature (1)..(136): Pfam Name: E/31 kDa Pfam Description: ATP synthase
  misc_feature (1)..(137): NCBI GI NO: 15231933 NR Description: vacuolar ATP synthase subunit E -related
  misc_feature (1)..(137): NCBI GI NO: 15237054 NR Description: H+-transporting ATPase chain E, vacuolar
  misc_feature (1)..(137): NCBI GI NO: 1143394 NR Description: V-type proton-ATPase [Arabidopsis thaliana]
  misc_feature (1)..(137): NCBI GI NO: 34912000 NR Description: putative YLP
  misc_feature (1)..(136): NCBI GI NO: 12585492 NR Description: Vacuolar ATP synthase subunit E
  misc_feature (1)..(136): NCBI GI NO: 12585474 NR Description: Vacuolar ATP synthase subunit E
  misc_feature (1)..(137): NCBI GI NO: 3334405 NR Description: Vacuolar ATP synthase subunit E
  misc_feature (1)..(137): NCBI GI NO: 20340245 NR Description: vacuolar ATPase subunit E-like protein
  misc_feature (1)..(136): NCBI GI NO: 4099148 NR Description: YLP [Hordeum vulgare]
  misc_feature (1)..(135): NCBI GI NO: 3334410 NR Description: Vacuolar ATP synthase subunit E
MKDAAKKGLLRISNDKKVYRKLVKDMIVQGLLRLREPSVLLRCRESDRKLVESLIEEAKKEYSEKANMQAPKIALDDRVYLPPSPKNSAVDSHEPYCTGGIVLASEDGKIVLENTLDARLDVIFRQKLPEVRKRLLG

SEQ ID NO: 5995 - DNA, 1461 bp, Glycine max
  misc_feature (1)..(1461): Ceres Seq. ID no. 14308061
aaagaaaggaatgaatgaaagagggatggtaggagaaaaatgagaatggcgtgaatgtgaggagagaagagcctgaatattagaatcggatacccttaaagaagcggagataggagtgtgcgcctccaaacccaaggggcttcggaggggctcttcatcggaggcggtgctatattcccctccggatattcccaccatgaagagcctcttcaagcccaagccccgcacttttccgatatcgtcaaacaaacgcgagatcttcttctccgtctcacctcccgagatgacgataacatgcccgacttgaccaaaaacctcagggacttaaagtcaatcctctatggtaacagtgaatccgaacccgtccccgaagcttgtgcacagctcactcaggaattcttcgccgacaacaccttacgcctccttatccaatatcttcccaaactcaacttggaggctagaaaagatgccactcagattgttgcaaatttacagaggcagcaggttcagtccaagctcatcgcctctgattacttggatactaatttggatcttatggatgtcttggtatctggatatgaaaacacagacatggctttacactacggtgcaatgttgagggagtgcataagacaccagattgttgcaaaatatgttctggactcacctcatatgaagaagttttttgactacattcagcttccaaattttgacatagctgcagatgccgcagcaacttttaaggagctaatgacaaggcataaatctactgtagctgatttccttagcaattattatgaatggttttttgatgaatataactctaaactgttggaatcttccaattatattacaaggcgccaagctgtcaagttgctgggagatatgttacttgatcgcacaaattcagcagtaatgacaagatatgtcagctcacgagacaacttaaggattttaatgaatcttctacgtgagtcaagcaagagcatacagatagaagcatttcatgttttcaagctgtttgctgctaaccaaaagaaaccagctgatatcatcagcatatttgttgcaaacagaagcaagcttcttagacttttgggtgacttaaaaaccgataaagaggatgaacagttcgaagctgataaagctcaagttataaaagaaattgcggctcttgaacctagggacctcgcttgagcttcagtttgtgtcgagtaacaagttgcattgtggcattttaccttatttaattgtctattgttatagttcttttagtcttcatcaagatgagactaacattcaacacaaattccagtgttttctttctgaattttcatttcggttctgtaattcctagatgaataaattgctgaaagagctacatgcagtggcagtattcggctttcatggtgttagaaagctttgcttgcctagcagttagtttataaattatacgatgcc

SEQ ID NO: 5996 - protein, 300 aa, Glycine max
  peptide (1)..(300): Ceres Seq. ID no. 14308062
  misc_feature (1)..(296): Pfam Name: Pfam Description:  Mo25 protein family
  misc_feature (1)..(300): NCBI GI NO: 15214076 NR Description: Hypothetical MO25-like protein At5g47540
  misc_feature (1)..(300): NCBI GI NO: 15238126 NR Description: MO25 protein family [Arabidopsis thaliana]
  misc_feature (1)..(300): NCBI GI NO: 15236013 NR Description: MO25 protein family [Arabidopsis thaliana]
  misc_feature (1)..(300): NCBI GI NO: 7485184 NR Description: hypothetical protein - Arabidopsis thaliana
  misc_feature (1)..(294): NCBI GI NO: 34901086 NR Description: putative MO25 protein (CGI-66)
  misc_feature (1)..(299): NCBI GI NO: 15227629 NR Description: MO25 protein family [Arabidopsis thaliana]
  misc_feature (1)..(295): NCBI GI NO: 7706481 NR Description: MO25 protein [Homo sapiens]
  misc_feature (1)..(295): NCBI GI NO: 34877516 NR Description: similar to MO25 protein [Rattus norvegicus]
  misc_feature (1)..(295): NCBI GI NO: 18044843 NR Description: MO25 protein [Mus musculus]
  misc_feature (1)..(295): NCBI GI NO: 31982582 NR Description: MO25 protein
MPDLTKNLRDLKSILYGNSESEPVPEACAQLTQEFFADNTLRLLIQYLPKLNLEARKDATQIVANLQRQQVQSKLIASDYLDTNLDLMDVLVSGYENTDMALHYGAMLRECIRHQIVAKYVLDSPHMKKFFDYIQLPNFDIAADAAATFKELMTRHKSTVADFLSNYYEWFFDEYNSKLLESSNYITRRQAVKLLGDMLLDRTNSAVMTRYVSSRDNLRILMNLLRESSKSIQIEAFHVFKLFAANQKKPADIISIFVANRSKLLRLLGDLKTDKEDEQFEADKAQVIKEIAALEPRDLA

SEQ ID NO: 5997 - protein, 213 aa, Glycine max
  peptide (1)..(213): Ceres Seq. ID no. 14308063
  misc_feature (1)..(209): Pfam Name: Pfam Description:  Mo25 protein family
  misc_feature (1)..(213): NCBI GI NO: 15214076 NR Description: Hypothetical MO25-like protein At5g47540
  misc_feature (1)..(213): NCBI GI NO: 15238126 NR Description: MO25 protein family [Arabidopsis thaliana]
  misc_feature (1)..(213): NCBI GI NO: 15236013 NR Description: MO25 protein family [Arabidopsis thaliana]
  misc_feature (1)..(213): NCBI GI NO: 7485184 NR Description: hypothetical protein - Arabidopsis thaliana
  misc_feature (1)..(207): NCBI GI NO: 34901086 NR Description: putative MO25 protein (CGI-66)
  misc_feature (1)..(212): NCBI GI NO: 15227629 NR Description: MO25 protein family [Arabidopsis thaliana]
  misc_feature (1)..(208): NCBI GI NO: 7706481 NR Description: MO25 protein [Homo sapiens]
  misc_feature (1)..(208): NCBI GI NO: 34877516 NR Description: similar to MO25 protein [Rattus norvegicus]
  misc_feature (1)..(208): NCBI GI NO: 18044843 NR Description: MO25 protein [Mus musculus]
  misc_feature (1)..(208): NCBI GI NO: 31982582 NR Description: MO25 protein
MDVLVSGYENTDMALHYGAMLRECIRHQIVAKYVLDSPHMKKFFDYIQLPNFDIAADAAATFKELMTRHKSTVADFLSNYYEWFFDEYNSKLLESSNYITRRQAVKLLGDMLLDRTNSAVMTRYVSSRDNLRILMNLLRESSKSIQIEAFHVFKLFAANQKKPADIISIFVANRSKLLRLLGDLKTDKEDEQFEADKAQVIKEIAALEPRDLA

SEQ ID NO: 5998 - protein, 201 aa, Glycine max
  peptide (1)..(201): Ceres Seq. ID no. 14308064
  misc_feature (1)..(197): Pfam Name: Pfam Description:  Mo25 protein family
  misc_feature (1)..(201): NCBI GI NO: 15214076 NR Description: Hypothetical MO25-like protein At5g47540
  misc_feature (1)..(201): NCBI GI NO: 15238126 NR Description: MO25 protein family [Arabidopsis thaliana]
  misc_feature (1)..(201): NCBI GI NO: 15236013 NR Description: MO25 protein family [Arabidopsis thaliana]
  misc_feature (1)..(201): NCBI GI NO: 7485184 NR Description: hypothetical protein - Arabidopsis thaliana
  misc_feature (1)..(195): NCBI GI NO: 34901086 NR Description: putative MO25 protein (CGI-66)
  misc_feature (1)..(200): NCBI GI NO: 15227629 NR Description: MO25 protein family [Arabidopsis thaliana]
  misc_feature (1)..(196): NCBI GI NO: 7706481 NR Description: MO25 protein [Homo sapiens]
  misc_feature (1)..(196): NCBI GI NO: 34877516 NR Description: similar to MO25 protein [Rattus norvegicus]
  misc_feature (1)..(196): NCBI GI NO: 18044843 NR Description: MO25 protein [Mus musculus]
  misc_feature (1)..(196): NCBI GI NO: 31982582 NR Description: MO25 protein
MALHYGAMLRECIRHQIVAKYVLDSPHMKKFFDYIQLPNFDIAADAAATFKELMTRHKSTVADFLSNYYEWFFDEYNSKLLESSNYITRRQAVKLLGDMLLDRTNSAVMTRYVSSRDNLRILMNLLRESSKSIQIEAFHVFKLFAANQKKPADIISIFVANRSKLLRLLGDLKTDKEDEQFEADKAQVIKEIAALEPRDLA

SEQ ID NO: 5999 - DNA, 911 bp, Glycine max
  misc_feature (1)..(911): Ceres Seq. ID no. 15226780
aaatttttgtcgtctccctgttggtccaaagaaatattttcaggcttttggactctattagctgcatctacaggaaagaaatgaagctgtcacaagaagagcttgtccctagcccagtcatccataaggaaaagaaaaagggtatattcagctctgttatcaaagattttactggcagtaaagaaaagcatgctcccattttggaaacagaagatactaaagaaagcatcctggaactctcagctatcttctcaaatgaaaattttccatgtgatgctgataataatgataatctgactgttgatgaagatgagattgaattaaacatagatgacattgacctggatgatcatgaagaaaaacgcaaagatcaaagtatattgggagctcttaataagaagaaattgactgggaagtttcaggttctaaaaggtagattgaaagagatgaagggcaacatccagaaaacatcaagcaaggaaaagcaacaagatgagcaagctggttcagtcgatcaaattaagaagaaatatggattttcttcttccaatgaaacaagcgtcgctaaattggcagaaagcaagctacaggagaacatgaaaaaactgcagggtatcaaccttcgaaccacagaaatgcaagataaagcaaaatcattttcaacattggcaaaccaagtgctgtggactgcagaacaggaaaggcgaaattaagaagcaccaacctcatggattacaccaaaaattacaaagccccccttttacccctcttgtacttatgcttctttattttgtgactggattctcatctcagtttttgggttgatattgaatgaaagtaaattaagaacaatgtcttcccttttttgccaattacataattctaccgagaatgaagtgaaaagccctact

SEQ ID NO: 6000 - protein, 236 aa, Glycine max
  peptide (1)..(236): Ceres Seq. ID no. 15226781
  misc_feature (169)..(226): Pfam Name: Pfam Description:  Synaptobrevin
  misc_feature (1)..(236): NCBI GI NO: 15237037 NR Description: expressed protein [Arabidopsis thaliana]
  misc_feature (2)..(234): NCBI GI NO: 38345401 NR Description: OSJNBa0017B10.7
IFVVSLLVQRNIFRLLDSISCIYRKEMKLSQEELVPSPVIHKEKKKGIFSSVIKDFTGSKEKHAPILETEDTKESILELSAIFSNENFPCDADNNDNLTVDEDEIELNIDDIDLDDHEEKRKDQSILGALNKKKLTGKFQVLKGRLKEMKGNIQKTSSKEKQQDEQAGSVDQIKKKYGFSSSNETSVAKLAESKLQENMKKLQGINLRTTEMQDKAKSFSTLANQVLWTAEQERRN

SEQ ID NO: 6001 - protein, 210 aa, Glycine max
  peptide (1)..(210): Ceres Seq. ID no. 15226782
  misc_feature (143)..(200): Pfam Name: Pfam Description:  Synaptobrevin
  misc_feature (1)..(210): NCBI GI NO: 15237037 NR Description: expressed protein [Arabidopsis thaliana]
  misc_feature (1)..(208): NCBI GI NO: 38345401 NR Description: OSJNBa0017B10.7
MKLSQEELVPSPVIHKEKKKGIFSSVIKDFTGSKEKHAPILETEDTKESILELSAIFSNENFPCDADNNDNLTVDEDEIELNIDDIDLDDHEEKRKDQSILGALNKKKLTGKFQVLKGRLKEMKGNIQKTSSKEKQQDEQAGSVDQIKKKYGFSSSNETSVAKLAESKLQENMKKLQGINLRTTEMQDKAKSFSTLANQVLWTAEQERRN

SEQ ID NO: 6002 - DNA, 1384 bp, Glycine max
  misc_feature (1)..(1384): Ceres Seq. ID no. 15170945
agcagctcccattccaacagattctagaagcacttagttgctcaacgataatcttaattgaagaagccaattcgtttattcttcttctgctttggaacatggctgataatattgttacctccagcaattcttctacggcctcgctgaaccctactcggataatctgtcacgtatgtcagaagcagttttcccagtacacgtgtcctcgatgcaattcgcgatactgttccctccaatgttacaaatcccatagtctccgttgcactgaatccttcatgaaagaaaatgtagttcagcaacttcaccaaatgcagcctgatgaacaaactaaaaataagatgttggacatactgaaaagatttcattcacaagaggaaatggatgaggattgacaggaaatcagctttgacgatttatcacttgaagaaaagaaacggtttcacatagcaattgcttatggggaactgagcaagatgatcaaaccatgggatccatggtggtcaaagccttctgcaagaaacatctgtctcagtaaggaaggaactcagcttgttcaacctattccagatcaggaattgctagatgatgatattggaagtgatgaattcagcaaagttcctcttggacctgaaactccacttcctcctctaagcaggcttagttccaaggagccatcaccccttttaacagttcacctagtcgatattctgtatagctattgcttcactcttcgtctctacaatggagattggaggtcagatgccttagggtcagtcatggttgtattgagtgtgtcctcggtgttgggtcaaggtgcacagccggagacagtactagaagccctttctcattgcttggagcaggtatgctgtccagcttacagacacattggaggattgcaatttggtttgggtgtcattgatgatgtgatcagtctgcttggtttgggaactcctgcattggtttgtgcccttcgtgatatgcattggtgcattcaagaaggcgaaaaggaggccaaatcagaaaggccaagaaagtcccagagaggtgggactagaagtgccattaagctggctgaaaggaagatatatttcatcatgtgttgggttcatgagcagccagaggaagtctggtcttccttagcagccattgtaagagcagaaaagacatcagccatggaatttcaacagatcaatagatctgaagatttgaacaataagacagaggccaaaggcaaaagtttaatccaggagatttaatgatttacgtagactgctaccccttacggttgtagtggactacgaggggtccgggagttcttgcagtggcaagaaagttaagtttcaaactagtttgggttgataatctatctacatttctttcg

SEQ ID NO: 6003 - protein, 261 aa, Glycine max
  peptide (1)..(261): Ceres Seq. ID no. 15170946
  misc_feature (1)..(261): NCBI GI NO: 15237537 NR Description: expressed protein [Arabidopsis thaliana]
  misc_feature (118)..(261): NCBI GI NO: 37536148 NR Description: hypothetical protein
  misc_feature (1)..(240): NCBI GI NO: 34861831 NR Description: similar to Protein C11orf5 homolog (Protein FON)
  misc_feature (1)..(240): NCBI GI NO: 7305357 NR Description: open reading frame 6
  misc_feature (1)..(240): NCBI GI NO: 18044459 NR Description: open reading frame 6 [Mus musculus]
  misc_feature (1)..(240): NCBI GI NO: 26352237 NR Description: unnamed protein product [Mus musculus]
  misc_feature (1)..(67): NCBI GI NO: 27469505 NR Description: Similar to chromosome 11 open reading frame 5
  misc_feature (1)..(68): NCBI GI NO: 7656936 NR Description: chromosome 11 open reading frame 5
  misc_feature (1)..(32): NCBI GI NO: 23613640 NR Description: hypothetical protein [Plasmodium falciparum 3D7]
MIKPWDPWWSKPSARNICLSKEGTQLVQPIPDQELLDDDIGSDEFSKVPLGPETPLPPLSRLSSKEPSPLLTVHLVDILYSYCFTLRLYNGDWRSDALGSVMVVLSVSSVLGQGAQPETVLEALSHCLEQVCCPAYRHIGGLQFGLGVIDDVISLLGLGTPALVCALRDMHWCIQEGEKEAKSERPRKSQRGGTRSAIKLAERKIYFIMCWVHEQPEEVWSSLAAIVRAEKTSAMEFQQINRSEDLNNKTEAKGKSLIQEI

SEQ ID NO: 6004 - protein, 160 aa, Glycine max
  peptide (1)..(160): Ceres Seq. ID no. 15170947
  misc_feature (1)..(160): NCBI GI NO: 15237537 NR Description: expressed protein [Arabidopsis thaliana]
  misc_feature (17)..(160): NCBI GI NO: 37536148 NR Description: hypothetical protein
  misc_feature (1)..(139): NCBI GI NO: 34861831 NR Description: similar to Protein C11orf5 homolog (Protein FON)
  misc_feature (1)..(139): NCBI GI NO: 7305357 NR Description: open reading frame 6
  misc_feature (1)..(139): NCBI GI NO: 26352237 NR Description: unnamed protein product [Mus musculus]
  misc_feature (1)..(139): NCBI GI NO: 18044459 NR Description: open reading frame 6 [Mus musculus]
MVVLSVSSVLGQGAQPETVLEALSHCLEQVCCPAYRHIGGLQFGLGVIDDVISLLGLGTPALVCALRDMHWCIQEGEKEAKSERPRKSQRGGTRSAIKLAERKIYFIMCWVHEQPEEVWSSLAAIVRAEKTSAMEFQQINRSEDLNNKTEAKGKSLIQEI

SEQ ID NO: 6005 - DNA, 1252 bp, Glycine max
  misc_feature (1)..(1252): Ceres Seq. ID no. 15175697
atacattaccgtttttttccccttcttattcgtcgttcagttcaatttctcgcgagtttttcttccatatgctaccaatcgttgccgttgatccacgcgccggcgaatttcagttttgattctccgccaccgttttggctgttgttactttggttcttccgagagaagggagccatatatagaaagtattttatggtgcgccgatgagcagaactgatgttattggcagtagaaggaggaggattcttctctgcttcggcttcagggtatactaagggcctgagccttctcctcttgggtcagaggaatgaggataaacccatgagagtagcgccgtggaaccagtatcagttggtagaccaagaatctgaccctgagctccagctggcttccacaaagaatcgcctctcccgcggctgtgcctcctttgtttgctttggtcgcacttccgcaggacttgatactccgtctcctcttaaagtgggccctgctcaacaacatgatgtctcaccagggccactggtttccaacaagggaaaggatccttctgcacatgtagatgatgaaagtgataacagaaaggctacactaaaaagtagcataaagaagccacaaaatagaaaatccgttcctgttgaggttgctaatgaacatgaagcatcaagtggacaggggatttgtactcctggaggtcaacccgaaagaaggaaagtgcagtggacagataattgtggtagtgagcttgtggaaattcgagaatttgagcccagtgaagtggatggatcagatgatgaatttgatagtggaaatgacagaacttgttcctgtgcgattatgtaaattggagtttcattaagttgataggttcatcgggtcattcactgctaacatccatcactcgatttgagacaaaagaggcaaaggtttcagttctgtggagatatatacacaaacatcttgcctgagtgatgtgtctgttattgcttgctgcggctttaaattttgctcctctgcccctcatcaatttgtataattcttgtcatgtgtgaattctttgcctttgattcatcatttttatgctactttatgttcttatttttataaggattaacaaagttttctttctatgatctggcattatcttgaaaaaaggtaatacaagtgtaagattttgtaaaaaaatcagtgtgccaacctggtaacaaacttgtgatgagactaggatttgttaaggcttatctgttgaaagtat

SEQ ID NO: 6006 - protein, 207 aa, Glycine max
  peptide (1)..(207): Ceres Seq. ID no. 15175698
  misc_feature (1)..(207): NCBI GI NO: 18395162 NR Description: expressed protein [Arabidopsis thaliana]
  misc_feature (1)..(187): NCBI GI NO: 2505872 NR Description: hypothetical protein [Arabidopsis thaliana]
  misc_feature (1)..(206): NCBI GI NO: 34912224 NR Description: P0415C01.14
  misc_feature (20)..(187): NCBI GI NO: 7452500 NR Description: hypothetical protein T22J18
  misc_feature (102)..(207): NCBI GI NO: 30692973 NR Description: expressed protein [Arabidopsis thaliana]
  misc_feature (1)..(92): NCBI GI NO: 30692973 NR Description: expressed protein [Arabidopsis thaliana]
  misc_feature (1)..(92): NCBI GI NO: 10092447 NR Description: unknown protein; 15226-14726
  misc_feature (1)..(92): NCBI GI NO: 25334118 NR Description: F12G12.17 protein - Arabidopsis thaliana
  misc_feature (102)..(184): NCBI GI NO: 10092447 NR Description: unknown protein; 15226-14726
  misc_feature (102)..(184): NCBI GI NO: 25334118 NR Description: F12G12.17 protein - Arabidopsis thaliana
MLLAVEGGGFFSASASGYTKGLSLLLLGQRNEDKPMRVAPWNQYQLVDQESDPELQLASTKNRLSRGCASFVCFGRTSAGLDTPSPLKVGPAQQHDVSPGPLVSNKGKDPSAHVDDESDNRKATLKSSIKKPQNRKSVPVEVANEHEASSGQGICTPGGQPERRKVQWTDNCGSELVEIREFEPSEVDGSDDEFDSGNDRTCSCAIM

SEQ ID NO: 6007 - protein, 172 aa, Glycine max
  peptide (1)..(172): Ceres Seq. ID no. 15175699
  misc_feature (1)..(172): NCBI GI NO: 18395162 NR Description: expressed protein [Arabidopsis thaliana]
  misc_feature (1)..(152): NCBI GI NO: 2505872 NR Description: hypothetical protein [Arabidopsis thaliana]
  misc_feature (1)..(171): NCBI GI NO: 34912224 NR Description: P0415C01.14
  misc_feature (1)..(152): NCBI GI NO: 7452500 NR Description: hypothetical protein T22J18
  misc_feature (67)..(172): NCBI GI NO: 30692973 NR Description: expressed protein [Arabidopsis thaliana]
  misc_feature (1)..(57): NCBI GI NO: 30692973 NR Description: expressed protein [Arabidopsis thaliana]
  misc_feature (1)..(57): NCBI GI NO: 10092447 NR Description: unknown protein; 15226-14726
  misc_feature (1)..(57): NCBI GI NO: 25334118 NR Description: F12G12.17 protein - Arabidopsis thaliana
  misc_feature (67)..(149): NCBI GI NO: 10092447 NR Description: unknown protein; 15226-14726
  misc_feature (67)..(149): NCBI GI NO: 25334118 NR Description: F12G12.17 protein - Arabidopsis thaliana
MRVAPWNQYQLVDQESDPELQLASTKNRLSRGCASFVCFGRTSAGLDTPSPLKVGPAQQHDVSPGPLVSNKGKDPSAHVDDESDNRKATLKSSIKKPQNRKSVPVEVANEHEASSGQGICTPGGQPERRKVQWTDNCGSELVEIREFEPSEVDGSDDEFDSGNDRTCSCAIM

SEQ ID NO: 6008 - DNA, 1448 bp, Glycine max
  misc_feature (1)..(1448): Ceres Seq. ID no. 15176596
ggcattggcttacaaatctcaaccaccctatcttaaaatcttctgtgcaaccagaaaaaaacggaccttgccctcagtctcttttttccatcatcacttcattaaacattattcactctctttctctgtctctagtttttacaacatggctactgcggtaactgctgcagtgtcctttccagccaccaagtccacttctctttcaagcagaacctctatcactgccccagatagaattgtcttcaagaaggtttcgttgcaatacagagatgtttcaaccagtggaagggtagtttcaatcagagcacaagtgaccacagaggcacctgctaaggttgaaaaggaatcaaagaaacaggaggaaggtgtgatcgtgaacaagttcaaacccaagaacccatatattggtaggtgtcttctcaacacaaagatcactggggatgatgcacctggagaaacttggcacatggtcttcagcactgagggagaagttccttacagagaaggacaatcaatcggggtaattcctgatggggttgacaagaatggcaagcctcacaagctgagattgtattcaattgctagcagtgcccttggtgattttggagattccaaaactgtttctttatgcgtgaaacgtcttgtgtacacaaatgaaaacggagaacttgtcaaaggagtttgctcaaatttcttgtgcgacttgaagccaggagccgaagtaaagattactggacctgttggtaaagaaatgcttatgccaaaagatcctaatgcaaccgtcatcatgttggcaactggaacaggaattgccccattccgctcatttttatggaaaatgttctttgagaagcatgatgattacaagttcaatggtttggcatggctcttcttgggtgtccccacaagcagctcactactttataaggaggaatttgaaaagatgaaggagaaagcacctgacaacttcaggcttgactttgctgtgagcagagagcaaacaaacgaaaaaggagagaaaatgtacatccaaacacgaatggctcaatatgcagaagagttatgggaattactgaagaaagataacacttttgtctatatgtgtggactgaagggaatggaaaagggtatagatgacataatggtttcattggctgcaaaagatggtattgattggattgagtacaagaggcaattgaagaaggcagagcaatggaatgtcgaagtctactaattaatatcacttgcacttgctcagatatcatgccctactttgtgcagcagcaaatctattttgctgtcatgcgctgtgtagatagattacggccctgtaatttttctatgatgggattttttaccttccttatgaacgtacaagcttcattgcaacagccttgcatgaaataattttgaggatctatcaatatagatgaagtcaacttctgttt

SEQ ID NO: 6009 - protein, 410 aa, Glycine max
  peptide (1)..(410): Ceres Seq. ID no. 15176597
  misc_feature (258)..(380): Pfam Name: Pfam Description:  Oxidoreductase NAD-binding domain
  misc_feature (49)..(410): NCBI GI NO: 119905 NR Description: Ferredoxin--NADP reductase
  misc_feature (49)..(410): NCBI GI NO: 6899972 NR Description: chloroplast ferredoxin-NADP+ oxidoreductaseprecursor
  misc_feature (49)..(410): NCBI GI NO: 729479 NR Description: Ferredoxin--NADP reductase, chloroplast precursor
  misc_feature (49)..(410): NCBI GI NO: 170111 NR Description: ferredoxin-NADP oxidoreductase
  misc_feature (49)..(410): NCBI GI NO: 3913651 NR Description: Ferredoxin--NADP reductase
  misc_feature (49)..(410): NCBI GI NO: 119906 NR Description: Ferredoxin--NADP reductase, chloroplast precursor
  misc_feature (49)..(410): NCBI GI NO: 729477 NR Description: Ferredoxin--NADP reductase, chloroplast precursor
  misc_feature (49)..(410): NCBI GI NO: 15239282 NR Description: ferredoxin--NADP
  misc_feature (49)..(410): NCBI GI NO: 5730139 NR Description: ferredoxin-NADP+ reductase [Arabidopsis thaliana]
  misc_feature (103)..(410): NCBI GI NO: 4930123 NR Description: Chain A, Wild-Type Pea Fnr
ALAYKSQPPYLKIFCATRKKRTLPSVSFFHHHFIKHYSLSFSVSSFYNMATAVTAAVSFPATKSTSLSSRTSITAPDRIVFKKVSLQYRDVSTSGRVVSIRAQVTTEAPAKVEKESKKQEEGVIVNKFKPKNPYIGRCLLNTKITGDDAPGETWHMVFSTEGEVPYREGQSIGVIPDGVDKNGKPHKLRLYSIASSALGDFGDSKTVSLCVKRLVYTNENGELVKGVCSNFLCDLKPGAEVKITGPVGKEMLMPKDPNATVIMLATGTGIAPFRSFLWKMFFEKHDDYKFNGLAWLFLGVPTSSSLLYKEEFEKMKEKAPDNFRLDFAVSREQTNEKGEKMYIQTRMAQYAEELWELLKKDNTFVYMCGLKGMEKGIDDIMVSLAAKDGIDWIEYKRQLKKAEQWNVEVY

SEQ ID NO: 6010 - protein, 362 aa, Glycine max
  peptide (1)..(362): Ceres Seq. ID no. 15176598
  misc_feature (210)..(332): Pfam Name: Pfam Description:  Oxidoreductase NAD-binding domain
  misc_feature (1)..(362): NCBI GI NO: 119905 NR Description: Ferredoxin--NADP reductase
  misc_feature (1)..(362): NCBI GI NO: 6899972 NR Description: chloroplast ferredoxin-NADP+ oxidoreductaseprecursor
  misc_feature (1)..(362): NCBI GI NO: 729479 NR Description: Ferredoxin--NADP reductase, chloroplast precursor
  misc_feature (1)..(362): NCBI GI NO: 170111 NR Description: ferredoxin-NADP oxidoreductase
  misc_feature (1)..(362): NCBI GI NO: 3913651 NR Description: Ferredoxin--NADP reductase
  misc_feature (1)..(362): NCBI GI NO: 119906 NR Description: Ferredoxin--NADP reductase, chloroplast precursor
  misc_feature (1)..(362): NCBI GI NO: 729477 NR Description: Ferredoxin--NADP reductase, chloroplast precursor
  misc_feature (1)..(362): NCBI GI NO: 15239282 NR Description: ferredoxin--NADP
  misc_feature (1)..(362): NCBI GI NO: 5730139 NR Description: ferredoxin-NADP+ reductase [Arabidopsis thaliana]
  misc_feature (55)..(362): NCBI GI NO: 4930123 NR Description: Chain A, Wild-Type Pea Fnr
MATAVTAAVSFPATKSTSLSSRTSITAPDRIVFKKVSLQYRDVSTSGRVVSIRAQVTTEAPAKVEKESKKQEEGVIVNKFKPKNPYIGRCLLNTKITGDDAPGETWHMVFSTEGEVPYREGQSIGVIPDGVDKNGKPHKLRLYSIASSALGDFGDSKTVSLCVKRLVYTNENGELVKGVCSNFLCDLKPGAEVKITGPVGKEMLMPKDPNATVIMLATGTGIAPFRSFLWKMFFEKHDDYKFNGLAWLFLGVPTSSSLLYKEEFEKMKEKAPDNFRLDFAVSREQTNEKGEKMYIQTRMAQYAEELWELLKKDNTFVYMCGLKGMEKGIDDIMVSLAAKDGIDWIEYKRQLKKAEQWNVEVY

SEQ ID NO: 6011 - protein, 255 aa, Glycine max
  peptide (1)..(255): Ceres Seq. ID no. 15176599
  misc_feature (103)..(225): Pfam Name: Pfam Description:  Oxidoreductase NAD-binding domain
  misc_feature (1)..(255): NCBI GI NO: 119905 NR Description: Ferredoxin--NADP reductase
  misc_feature (1)..(255): NCBI GI NO: 6899972 NR Description: chloroplast ferredoxin-NADP+ oxidoreductaseprecursor
  misc_feature (1)..(255): NCBI GI NO: 729479 NR Description: Ferredoxin--NADP reductase, chloroplast precursor
  misc_feature (1)..(255): NCBI GI NO: 170111 NR Description: ferredoxin-NADP oxidoreductase
  misc_feature (1)..(255): NCBI GI NO: 3913651 NR Description: Ferredoxin--NADP reductase
  misc_feature (1)..(255): NCBI GI NO: 119906 NR Description: Ferredoxin--NADP reductase, chloroplast precursor
  misc_feature (1)..(255): NCBI GI NO: 729477 NR Description: Ferredoxin--NADP reductase, chloroplast precursor
  misc_feature (1)..(255): NCBI GI NO: 15239282 NR Description: ferredoxin--NADP
  misc_feature (1)..(255): NCBI GI NO: 5730139 NR Description: ferredoxin-NADP+ reductase [Arabidopsis thaliana]
  misc_feature (1)..(255): NCBI GI NO: 4930123 NR Description: Chain A, Wild-Type Pea Fnr
MVFSTEGEVPYREGQSIGVIPDGVDKNGKPHKLRLYSIASSALGDFGDSKTVSLCVKRLVYTNENGELVKGVCSNFLCDLKPGAEVKITGPVGKEMLMPKDPNATVIMLATGTGIAPFRSFLWKMFFEKHDDYKFNGLAWLFLGVPTSSSLLYKEEFEKMKEKAPDNFRLDFAVSREQTNEKGEKMYIQTRMAQYAEELWELLKKDNTFVYMCGLKGMEKGIDDIMVSLAAKDGIDWIEYKRQLKKAEQWNVEVY

SEQ ID NO: 6012 - DNA, 1377 bp, Glycine max
  misc_feature (1)..(1377): Ceres Seq. ID no. 15170994
agtgcaggcttcagtcatgccaggctttgggagcctcttacctcaaagattaaagcaattagctcaaacaataacaggttctgctggcaaaaatcttggccttgataactcagtttttggcagagttaaagaagtcagattatcttctttcttgaagaatacactacatgcttcctcaccttctcctgctcctgctccatctccacagttaattgatcactctgagccatcaacttcaccacatcgtgctagtccttacactccaatatcaccagcagctgctgaacaacctccttgtttcgattgtgaagtaccctcacctgcaccttctatggtgcctgcgcatcctccagatccctgtctatatagtggcttccttcatcatccaatcccttcgccaaaatcttattctaaaccatcctttccccctgattattcacctgctgctgcccctacctcaaattctgctagccacaccagtgaggaagcttctgatccgtctcgtgaagccgaggtgtcccatggatccaagcttcggcagggtgaagagacgtctaataaactggtgtctcatctacttgctccatcctctttatcttcagcgagtggtgatttccgtggggaaatgttgctaatgggattttgtatggtattaatttcatttgtttttctcaatgataccacattttgatgatatggagatgttgcctgctgaaggatcctggagacatgcgaggactactacaacagcctaatgacgtgctttgcaagttttgtttagataatggaaggaagaaacttccgtccaattttaatttgccttaattttacttcaagtatgcaaccgaccaccatgtaaagctccggtgggtaaagggtcaaagccagaaagttggcaggcctctcatctagtactacatatttctatgaagcatgaaattgatcccaaaggggtcaactaacaaacatcatgatcgagagcaaaattggctttcagatgtcagaagaaccatcccttgtattcgatcaagtgtatgatatgcaaagaaatgtgggttctttgagcatctgaatctgtaaaacaaccatagtaatatctagcaaaaagataaattagtcacacttgtatagctctatgctcccccccttctccctacttttgaaagaaaataagaattcaaattcatccatgaagaaacgcgtgttctttgtagtctagacagatcttttactctggaaaaaagtggtcaaaggaaaacatatagagaaaagtgaatgttaactacatgtgttagagtttcttgggactagcaagtgtcaagataaagaaaaataataagagggttcggaacagatgttctgcccagatttctgttt

SEQ ID NO: 6013 - protein, 229 aa, Glycine max
  peptide (1)..(229): Ceres Seq. ID no. 15170995
  misc_feature (55)..(145): Pfam Name: Pfam Description:  Extensin-like region
  misc_feature (1)..(158): NCBI GI NO: 30694478 NR Description: proline-rich protein family [Arabidopsis thaliana]
  misc_feature (1)..(201): NCBI GI NO: 15228375 NR Description: zinc finger
  misc_feature (58)..(151): NCBI GI NO: 7488674 NR Description: extensin homolog HRGP2 - soybean (fragment)
  misc_feature (59)..(177): NCBI GI NO: 1076211 NR Description: hypothetical protein VSP-3 - Chlamydomonasreinhardtii
  misc_feature (56)..(151): NCBI GI NO: 7488674 NR Description: extensin homolog HRGP2 - soybean (fragment)
VQASVMPGFGSLLPQRLKQLAQTITGSAGKNLGLDNSVFGRVKEVRLSSFLKNTLHASSPSPAPAPSPQLIDHSEPSTSPHRASPYTPISPAAAEQPPCFDCEVPSPAPSMVPAHPPDPCLYSGFLHHPIPSPKSYSKPSFPPDYSPAAAPTSNSASHTSEEASDPSREAEVSHGSKLRQGEETSNKLVSHLLAPSSLSSASGDFRGEMLLMGFCMVLISFVFLNDTTF

SEQ ID NO: 6014 - protein, 224 aa, Glycine max
  peptide (1)..(224): Ceres Seq. ID no. 15170996
  misc_feature (50)..(140): Pfam Name: Pfam Description:  Extensin-like region
  misc_feature (1)..(153): NCBI GI NO: 30694478 NR Description: proline-rich protein family [Arabidopsis thaliana]
  misc_feature (1)..(196): NCBI GI NO: 15228375 NR Description: zinc finger
  misc_feature (53)..(146): NCBI GI NO: 7488674 NR Description: extensin homolog HRGP2 - soybean (fragment)
  misc_feature (54)..(172): NCBI GI NO: 1076211 NR Description: hypothetical protein VSP-3 - Chlamydomonasreinhardtii
  misc_feature (51)..(146): NCBI GI NO: 7488674 NR Description: extensin homolog HRGP2 - soybean (fragment)
MPGFGSLLPQRLKQLAQTITGSAGKNLGLDNSVFGRVKEVRLSSFLKNTLHASSPSPAPAPSPQLIDHSEPSTSPHRASPYTPISPAAAEQPPCFDCEVPSPAPSMVPAHPPDPCLYSGFLHHPIPSPKSYSKPSFPPDYSPAAAPTSNSASHTSEEASDPSREAEVSHGSKLRQGEETSNKLVSHLLAPSSLSSASGDFRGEMLLMGFCMVLISFVFLNDTTF

SEQ ID NO: 6015 - protein, 119 aa, Glycine max
  peptide (1)..(119): Ceres Seq. ID no. 15170997
  misc_feature (1)..(48): NCBI GI NO: 30694478 NR Description: proline-rich protein family [Arabidopsis thaliana]
  misc_feature (1)..(91): NCBI GI NO: 15228375 NR Description: zinc finger
  misc_feature (1)..(41): NCBI GI NO: 7488674 NR Description: extensin homolog HRGP2 - soybean (fragment)
  misc_feature (1)..(67): NCBI GI NO: 1076211 NR Description: hypothetical protein VSP-3 - Chlamydomonasreinhardtii
  misc_feature (1)..(41): NCBI GI NO: 7488674 NR Description: extensin homolog HRGP2 - soybean (fragment)
MVPAHPPDPCLYSGFLHHPIPSPKSYSKPSFPPDYSPAAAPTSNSASHTSEEASDPSREAEVSHGSKLRQGEETSNKLVSHLLAPSSLSSASGDFRGEMLLMGFCMVLISFVFLNDTTF

SEQ ID NO: 6016 - DNA, 1857 bp, Glycine max
  misc_feature (1)..(1857): Ceres Seq. ID no. 15169274
aggattcaaatccatttttcagtccatatgttgtccaagcttgaagaatgtaggaacgagaatgtctcatcaagaaggaaagagtagtcaggatttagtgccaggtaacatggaacatggaatagatgctactccaataacctgttgggcagaaaacaatagcctttccaaactgtgtttgcaatcaaataagtttgaagtatctactgggggaaatgatgccggtctgtcctcgcagcctaagattaaacctctaaatttttttaactgtcatgaaagcagcaaaaacaacccagtggagactaaaaattattccatcttgggccatagtaaggacaaggaagaagtggcatcacattcatcttcaaccaaacaaaatacagataataatgataacatcgattctaatgtgctatgtgatagaaaggaagaagagaatatctgtcacagaagagataatctgggaagtctgtggataactcgtttttctccaaaattcactgctcccttgagagaacaacctgccaatgacacagaggtctctactgatcttaaggaagataagggaaataatgatcataaatcaatgtatttgttcaaacccctttcatcttccccaggattcagaaatttagagccaacggcttcaatgtttggaaggagatttggtgccatcaaacaaatcataccaacaaatgcaacagatactaccacacaggttaatatgttgtgttttttttgtggaacaagaggacatcaactctctgattgcttagctattgcagaaaacaagttagaagatctccagaagaatatagattcatatggaggattggaagaacatcattgtctatgcatcaaatgttttcagcccaaccattgggcaatttcatgtcccacttcaatctcaactaggaaacatgaactgaaagctaatgccttggtcaatgattgtggaaaacatttaatctcgatcaatgaagggagtgccaggctgctgactgatgaggatgaccgagttttatctggaggttctattaatgatgaaacagatcaacgagcaggtcaaaatattaatttgaagtggaaatcaaatgaaattataacccataaggtagggtgcaatgcatcattcaagaaataccgtggtttgagttcagaggaaaacaaattcagagaaaatcctacattatctccatccaaattggctgaaaggcagatttcacaggtgccaaaggaaatatttgaagcagtaaaaaagcttcaattgtcccgcaccgacatcttgaaatggatcaatactcgtgggtcaatctctcaacttgatggttttttcctacgcctgcggctcggaaagtgggaagaagggccagggggaactggataccatgtggcatacataaatgagacccagtcccagagacagtgttcagagcagaatacaagaaaatctctctcagtgaaagtggggagtatcaagtgtatggtcgaaagtcagtatatatccaatcatgattttcttgaggaagaaatcatggaatggtggtccaacacctcacaagctggtgccgagatttcatctgaagaatatataatagaaaaatttaaaaagaaagaaatgttaggtctctaggcatttattaaattaaatgttaatatattcataagcaaggttactctcacttttagaaaaaagttatgtttcctttttattatccaattaattgtatatcaaaggaagcttaaaaaattgaagatggtggcaactcaccatcatgattttgtgaatgtcttaccaaaacattcctatacaaagaattgctttatcttacgcaatgaaagttatagtaattcatt

SEQ ID NO: 6017 - protein, 543 aa, Glycine max
  peptide (1)..(543): Ceres Seq. ID no. 15169275
  misc_feature (416)..(521): Pfam Name: Pfam Description:  Plus-3 domain
  misc_feature (1)..(322): NCBI GI NO: 15239925 NR Description: expressed protein [Arabidopsis thaliana]
  misc_feature (385)..(542): NCBI GI NO: 15239925 NR Description: expressed protein [Arabidopsis thaliana]
  misc_feature (385)..(541): NCBI GI NO: 34909996 NR Description: P0490D09.22
GFKSIFQSICCPSLKNVGTRMSHQEGKSSQDLVPGNMEHGIDATPITCWAENNSLSKLCLQSNKFEVSTGGNDAGLSSQPKIKPLNFFNCHESSKNNPVETKNYSILGHSKDKEEVASHSSSTKQNTDNNDNIDSNVLCDRKEEENICHRRDNLGSLWITRFSPKFTAPLREQPANDTEVSTDLKEDKGNNDHKSMYLFKPLSSSPGFRNLEPTASMFGRRFGAIKQIIPTNATDTTTQVNMLCFFCGTRGHQLSDCLAIAENKLEDLQKNIDSYGGLEEHHCLCIKCFQPNHWAISCPTSISTRKHELKANALVNDCGKHLISINEGSARLLTDEDDRVLSGGSINDETDQRAGQNINLKWKSNEIITHKVGCNASFKKYRGLSSEENKFRENPTLSPSKLAERQISQVPKEIFEAVKKLQLSRTDILKWINTRGSISQLDGFFLRLRLGKWEEGPGGTGYHVAYINETQSQRQCSEQNTRKSLSVKVGSIKCMVESQYISNHDFLEEEIMEWWSNTSQAGAEISSEEYIIEKFKKKEMLGL

SEQ ID NO: 6018 - protein, 523 aa, Glycine max
  peptide (1)..(523): Ceres Seq. ID no. 15169276
  misc_feature (396)..(501): Pfam Name: Pfam Description:  Plus-3 domain
  misc_feature (1)..(302): NCBI GI NO: 15239925 NR Description: expressed protein [Arabidopsis thaliana]
  misc_feature (365)..(522): NCBI GI NO: 15239925 NR Description: expressed protein [Arabidopsis thaliana]
  misc_feature (365)..(521): NCBI GI NO: 34909996 NR Description: P0490D09.22
MSHQEGKSSQDLVPGNMEHGIDATPITCWAENNSLSKLCLQSNKFEVSTGGNDAGLSSQPKIKPLNFFNCHESSKNNPVETKNYSILGHSKDKEEVASHSSSTKQNTDNNDNIDSNVLCDRKEEENICHRRDNLGSLWITRFSPKFTAPLREQPANDTEVSTDLKEDKGNNDHKSMYLFKPLSSSPGFRNLEPTASMFGRRFGAIKQIIPTNATDTTTQVNMLCFFCGTRGHQLSDCLAIAENKLEDLQKNIDSYGGLEEHHCLCIKCFQPNHWAISCPTSISTRKHELKANALVNDCGKHLISINEGSARLLTDEDDRVLSGGSINDETDQRAGQNINLKWKSNEIITHKVGCNASFKKYRGLSSEENKFRENPTLSPSKLAERQISQVPKEIFEAVKKLQLSRTDILKWINTRGSISQLDGFFLRLRLGKWEEGPGGTGYHVAYINETQSQRQCSEQNTRKSLSVKVGSIKCMVESQYISNHDFLEEEIMEWWSNTSQAGAEISSEEYIIEKFKKKEMLGL

SEQ ID NO: 6019 - protein, 507 aa, Glycine max
  peptide (1)..(507): Ceres Seq. ID no. 15169277
  misc_feature (380)..(485): Pfam Name: Pfam Description:  Plus-3 domain
  misc_feature (1)..(286): NCBI GI NO: 15239925 NR Description: expressed protein [Arabidopsis thaliana]
  misc_feature (349)..(506): NCBI GI NO: 15239925 NR Description: expressed protein [Arabidopsis thaliana]
  misc_feature (349)..(505): NCBI GI NO: 34909996 NR Description: P0490D09.22
MEHGIDATPITCWAENNSLSKLCLQSNKFEVSTGGNDAGLSSQPKIKPLNFFNCHESSKNNPVETKNYSILGHSKDKEEVASHSSSTKQNTDNNDNIDSNVLCDRKEEENICHRRDNLGSLWITRFSPKFTAPLREQPANDTEVSTDLKEDKGNNDHKSMYLFKPLSSSPGFRNLEPTASMFGRRFGAIKQIIPTNATDTTTQVNMLCFFCGTRGHQLSDCLAIAENKLEDLQKNIDSYGGLEEHHCLCIKCFQPNHWAISCPTSISTRKHELKANALVNDCGKHLISINEGSARLLTDEDDRVLSGGSINDETDQRAGQNINLKWKSNEIITHKVGCNASFKKYRGLSSEENKFRENPTLSPSKLAERQISQVPKEIFEAVKKLQLSRTDILKWINTRGSISQLDGFFLRLRLGKWEEGPGGTGYHVAYINETQSQRQCSEQNTRKSLSVKVGSIKCMVESQYISNHDFLEEEIMEWWSNTSQAGAEISSEEYIIEKFKKKEMLGL

SEQ ID NO: 6020 - DNA, 1611 bp, Glycine max
  misc_feature (1)..(1611): Ceres Seq. ID no. 15169005
gatttgtcgtagtttattttcatccacaccacagagtaaaactacaacctcaggaggagaatgttcctctgaatccgaagcccgtgctctacccagcgactttgccagaagtccaccatttcttgatttttggaggttaacagtcttcatattcaacactttgctatttcttaacttcaagtgcaagagaacaaagagcataaaatcctttagagtgtcagcagtcaagaatgcatacaggaatggcttcgttaactcaactccattataaagtacatgcctccactctcagaagggtgcattcaagaagccaagggctattgaagtctggaaaactatcccaactccaacgatctgcctttcctagtattcacattaatcaatcctgcatatgctgcacaaagttaactccatgggagtcatcacctgtcacatatgctcctactgataatcaaattgatacttttttgccgcaaaatgccaatatatttgaaactcttgaatctagtaaaacagctgattcatcaataacaaatgctgaaggggttgtagagacagaatctcagccaggcctgcagcttcaggttttcaaatggccattgtggcttttgggcccttccgttctcctagcaactggcatggtcccaacattgtggttaccgatatcatcaatctttctcggccccaatatagccagcctactttccttaattggacttgattgcatatttaacctcggtgcaaccctttttctcctcatggctgatgcttgttcacgaccaaagtctccaacacaagactgcaaaagcaaggctcccttcagttaccaattctggaacattgttgcaactcttaccggttttgttatcccactgttgatgatgtttggatctcagaagggttttctccaacctcaactacctttcatcccatttgcagttctacttggtccatatcttcttcttttgtctgtacagtttctgactgagatgttgacttggcattggcaatcaccagtctggcttgttacccctgtcatttacgagtcctaccgtgtcttgcagctaatgaggggattaaagcttggggttgagctcagtgcaccggcatgggtgatgcatacaattagggggctggtttgctggtgggtgctaattcttggtctgcagttgatgagggttgcttggtttgctggcttagctgcacgagctcgtaagcagcaattgtcttctgatacttctagtgttaatggtgattagtgattaatacattgtaaaaatattctgaaagagacagattatagaataagtagatgttgtttattttagttatggatgttttccatcccatccatataccatagtgatagtggtacacatctaatagatatatacacaagtaaattgcatacaagacttactttatcactgggctttatgctgtatcaatggttttgtctgtgctatcttcaagttgtgaacaaagtggtttatctgtttttacctcaacttatgaagatggaaaaattatatagtggttggttcaagtaaaagtttatggatttattatttttgataaattataggtaataaaataagttatattaattag

SEQ ID NO: 6021 - protein, 342 aa, Glycine max
  peptide (1)..(342): Ceres Seq. ID no. 15169006
  misc_feature (4)..(338): NCBI GI NO: 11281196 NR Description: hypothetical protein T8B10
  misc_feature (5)..(323): NCBI GI NO: 38605903 NR Description: OSJNBb0020O11.15
  misc_feature (107)..(338): NCBI GI NO: 30695235 NR Description: expressed protein [Arabidopsis thaliana]
  misc_feature (177)..(338): NCBI GI NO: 30695238 NR Description: expressed protein [Arabidopsis thaliana]
  misc_feature (107)..(290): NCBI GI NO: 34910348 NR Description: P0684B02.8
  misc_feature (124)..(290): NCBI GI NO: 21592953 NR Description: unknown [Arabidopsis thaliana]
  misc_feature (124)..(290): NCBI GI NO: 9758304 NR Description: emb|CAB81845
  misc_feature (124)..(290): NCBI GI NO: 18424658 NR Description: expressed protein [Arabidopsis thaliana]
MHTGMASLTQLHYKVHASTLRRVHSRSQGLLKSGKLSQLQRSAFPSIHINQSCICCTKLTPWESSPVTYAPTDNQIDTFLPQNANIFETLESSKTADSSITNAEGVVETESQPGLQLQVFKWPLWLLGPSVLLATGMVPTLWLPISSIFLGPNIASLLSLIGLDCIFNLGATLFLLMADACSRPKSPTQDCKSKAPFSYQFWNIVATLTGFVIPLLMMFGSQKGFLQPQLPFIPFAVLLGPYLLLLSVQFLTEMLTWHWQSPVWLVTPVIYESYRVLQLMRGLKLGVELSAPAWVMHTIRGLVCWWVLILGLQLMRVAWFAGLAARARKQQLSSDTSSVNGD

SEQ ID NO: 6022 - protein, 338 aa, Glycine max
  peptide (1)..(338): Ceres Seq. ID no. 15169007
  misc_feature (1)..(334): NCBI GI NO: 11281196 NR Description: hypothetical protein T8B10
  misc_feature (1)..(319): NCBI GI NO: 38605903 NR Description: OSJNBb0020O11.15
  misc_feature (103)..(334): NCBI GI NO: 30695235 NR Description: expressed protein [Arabidopsis thaliana]
  misc_feature (173)..(334): NCBI GI NO: 30695238 NR Description: expressed protein [Arabidopsis thaliana]
  misc_feature (103)..(286): NCBI GI NO: 34910348 NR Description: P0684B02.8
  misc_feature (120)..(286): NCBI GI NO: 21592953 NR Description: unknown [Arabidopsis thaliana]
  misc_feature (120)..(286): NCBI GI NO: 9758304 NR Description: emb|CAB81845
  misc_feature (120)..(286): NCBI GI NO: 18424658 NR Description: expressed protein [Arabidopsis thaliana]
MASLTQLHYKVHASTLRRVHSRSQGLLKSGKLSQLQRSAFPSIHINQSCICCTKLTPWESSPVTYAPTDNQIDTFLPQNANIFETLESSKTADSSITNAEGVVETESQPGLQLQVFKWPLWLLGPSVLLATGMVPTLWLPISSIFLGPNIASLLSLIGLDCIFNLGATLFLLMADACSRPKSPTQDCKSKAPFSYQFWNIVATLTGFVIPLLMMFGSQKGFLQPQLPFIPFAVLLGPYLLLLSVQFLTEMLTWHWQSPVWLVTPVIYESYRVLQLMRGLKLGVELSAPAWVMHTIRGLVCWWVLILGLQLMRVAWFAGLAARARKQQLSSDTSSVNGD

SEQ ID NO: 6023 - protein, 206 aa, Glycine max
  peptide (1)..(206): Ceres Seq. ID no. 15169008
  misc_feature (1)..(202): NCBI GI NO: 11281196 NR Description: hypothetical protein T8B10
  misc_feature (1)..(187): NCBI GI NO: 38605903 NR Description: OSJNBb0020O11.15
  misc_feature (1)..(202): NCBI GI NO: 30695235 NR Description: expressed protein [Arabidopsis thaliana]
  misc_feature (41)..(202): NCBI GI NO: 30695238 NR Description: expressed protein [Arabidopsis thaliana]
  misc_feature (1)..(154): NCBI GI NO: 34910348 NR Description: P0684B02.8
  misc_feature (1)..(154): NCBI GI NO: 21592953 NR Description: unknown [Arabidopsis thaliana]
  misc_feature (1)..(154): NCBI GI NO: 9758304 NR Description: emb|CAB81845
  misc_feature (1)..(154): NCBI GI NO: 18424658 NR Description: expressed protein [Arabidopsis thaliana]
MVPTLWLPISSIFLGPNIASLLSLIGLDCIFNLGATLFLLMADACSRPKSPTQDCKSKAPFSYQFWNIVATLTGFVIPLLMMFGSQKGFLQPQLPFIPFAVLLGPYLLLLSVQFLTEMLTWHWQSPVWLVTPVIYESYRVLQLMRGLKLGVELSAPAWVMHTIRGLVCWWVLILGLQLMRVAWFAGLAARARKQQLSSDTSSVNGD

SEQ ID NO: 6024 - DNA, 1373 bp, Glycine max
  misc_feature (1)..(1373): Ceres Seq. ID no. 14311625
atccaacttgttcttatatgatgaataccttgatgagtacatgtccacaatagctgtggaacatttaccacaaaataggccactatgggaacttcacattataaaatacccaacaagcaatgctaagggtaccttggtgttcaaactccaccatgcccttggggatggtttttctctcatgggtgcccttctttcatgcatgcaaagagctgacaacacctctcttcccttcacactcccatcaagccaaaggcccaaagcatcatcaatttccaacaccaaagggtttttcaagaaattgccctccattttcttccaaactatatccgaatttggatggagtttcttgaaaagtaagttgattgaagatgatcaaacaccaataaggtcttgtgcggaagacttcaagactcgccaaatgaccatctcagatgtcaccttctcattggatcttatcaaagacgtgaaatccaaacttggagtgagcataaatgatgtgcttgctggagtaattttttttggcattcggctatacatgcaagaaattaatctgaaatcaagccaaacccaatccacagcattggtgttgctgaacacaagaaacattgaaggttacaagtctgttaaggagatgattgagaagaccaatagtcgttctgcatgggggaatcaatatgcctttttgcatgtttcaattccagagcttagtgactccaaatatgcaaacccacttgagtttataagggaagcccataaggatatgaccaaaaagaaaaattctttggccactcctctcactggcatgcttctagatatgctcagaaaactcaggggtcctgaggctgcagctagctacttacgcagtactttgagaaactcaagcacaacaatctcaaacatcattggaccagtggagcaaatggctgtggctaatcatccaattaaagggttttacttcatggtagctggttcacctgagagtctcaccatgacgatcatgagctacatgggaaagataagaattgcatttggagtagagaagaacttcatcgacaagcaattattcaagtcgtgtttggagaattctcttgagatgataaaggaagcagcaaaaaagatttccgcataaaatcaaatatggaagatatgtactttttttgttgttgttgtggaagatatgtactaccactatattctatctatattcttgttaatatttaattattttatttaaatatatgtgatgtggtgattctgtaatagaaatttgtttctgagtggaatgtattttattgaactggaacagtatcattacggccgggcatggctgtttttagttgggaagtccctacattacatcaaaaagtagaatt

SEQ ID NO: 6025 - protein, 375 aa, Glycine max
  peptide (1)..(375): Ceres Seq. ID no. 14311626
  misc_feature (9)..(179): Pfam Name: Pfam Description:  Condensation domain
  misc_feature (7)..(369): NCBI GI NO: 9759186 NR Description: emb|CAB66399
  misc_feature (7)..(369): NCBI GI NO: 30696326 NR Description: expressed protein [Arabidopsis thaliana]
  misc_feature (7)..(369): NCBI GI NO: 26451548 NR Description: unknown protein [Arabidopsis thaliana]
  misc_feature (7)..(370): NCBI GI NO: 34909900 NR Description: P0665A11.10
  misc_feature (1)..(370): NCBI GI NO: 30687731 NR Description: hypothetical protein [Arabidopsis thaliana]
  misc_feature (9)..(369): NCBI GI NO: 15242259 NR Description: hypothetical protein [Arabidopsis thaliana]
  misc_feature (7)..(372): NCBI GI NO: 15218351 NR Description: expressed protein [Arabidopsis thaliana]
  misc_feature (1)..(371): NCBI GI NO: 9758716 NR Description: emb|CAB66398
  misc_feature (1)..(371): NCBI GI NO: 18421632 NR Description: expressed protein [Arabidopsis thaliana]
  misc_feature (194)..(370): NCBI GI NO: 34909902 NR Description: P0665A11.11
SNLFLYDEYLDEYMSTIAVEHLPQNRPLWELHIIKYPTSNAKGTLVFKLHHALGDGFSLMGALLSCMQRADNTSLPFTLPSSQRPKASSISNTKGFFKKLPSIFFQTISEFGWSFLKSKLIEDDQTPIRSCAEDFKTRQMTISDVTFSLDLIKDVKSKLGVSINDVLAGVIFFGIRLYMQEINLKSSQTQSTALVLLNTRNIEGYKSVKEMIEKTNSRSAWGNQYAFLHVSIPELSDSKYANPLEFIREAHKDMTKKKNSLATPLTGMLLDMLRKLRGPEAAASYLRSTLRNSSTTISNIIGPVEQMAVANHPIKGFYFMVAGSPESLTMTIMSYMGKIRIAFGVEKNFIDKQLFKSCLENSLEMIKEAAKKISA

SEQ ID NO: 6026 - protein, 362 aa, Glycine max
  peptide (1)..(362): Ceres Seq. ID no. 14311627
  misc_feature (1)..(166): Pfam Name: Pfam Description:  Condensation domain
  misc_feature (1)..(356): NCBI GI NO: 9759186 NR Description: emb|CAB66399
  misc_feature (1)..(356): NCBI GI NO: 30696326 NR Description: expressed protein [Arabidopsis thaliana]
  misc_feature (1)..(356): NCBI GI NO: 26451548 NR Description: unknown protein [Arabidopsis thaliana]
  misc_feature (1)..(357): NCBI GI NO: 34909900 NR Description: P0665A11.10
  misc_feature (1)..(357): NCBI GI NO: 30687731 NR Description: hypothetical protein [Arabidopsis thaliana]
  misc_feature (1)..(356): NCBI GI NO: 15242259 NR Description: hypothetical protein [Arabidopsis thaliana]
  misc_feature (1)..(359): NCBI GI NO: 15218351 NR Description: expressed protein [Arabidopsis thaliana]
  misc_feature (1)..(358): NCBI GI NO: 9758716 NR Description: emb|CAB66398
  misc_feature (1)..(358): NCBI GI NO: 18421632 NR Description: expressed protein [Arabidopsis thaliana]
  misc_feature (181)..(357): NCBI GI NO: 34909902 NR Description: P0665A11.11
MSTIAVEHLPQNRPLWELHIIKYPTSNAKGTLVFKLHHALGDGFSLMGALLSCMQRADNTSLPFTLPSSQRPKASSISNTKGFFKKLPSIFFQTISEFGWSFLKSKLIEDDQTPIRSCAEDFKTRQMTISDVTFSLDLIKDVKSKLGVSINDVLAGVIFFGIRLYMQEINLKSSQTQSTALVLLNTRNIEGYKSVKEMIEKTNSRSAWGNQYAFLHVSIPELSDSKYANPLEFIREAHKDMTKKKNSLATPLTGMLLDMLRKLRGPEAAASYLRSTLRNSSTTISNIIGPVEQMAVANHPIKGFYFMVAGSPESLTMTIMSYMGKIRIAFGVEKNFIDKQLFKSCLENSLEMIKEAAKKISA

SEQ ID NO: 6027 - protein, 316 aa, Glycine max
  peptide (1)..(316): Ceres Seq. ID no. 14311628
  misc_feature (1)..(120): Pfam Name: Pfam Description:  Condensation domain
  misc_feature (1)..(310): NCBI GI NO: 9759186 NR Description: emb|CAB66399
  misc_feature (1)..(310): NCBI GI NO: 30696326 NR Description: expressed protein [Arabidopsis thaliana]
  misc_feature (1)..(310): NCBI GI NO: 26451548 NR Description: unknown protein [Arabidopsis thaliana]
  misc_feature (1)..(311): NCBI GI NO: 34909900 NR Description: P0665A11.10
  misc_feature (1)..(311): NCBI GI NO: 30687731 NR Description: hypothetical protein [Arabidopsis thaliana]
  misc_feature (1)..(310): NCBI GI NO: 15242259 NR Description: hypothetical protein [Arabidopsis thaliana]
  misc_feature (1)..(313): NCBI GI NO: 15218351 NR Description: expressed protein [Arabidopsis thaliana]
  misc_feature (1)..(312): NCBI GI NO: 9758716 NR Description: emb|CAB66398
  misc_feature (1)..(312): NCBI GI NO: 18421632 NR Description: expressed protein [Arabidopsis thaliana]
  misc_feature (135)..(311): NCBI GI NO: 34909902 NR Description: P0665A11.11
MGALLSCMQRADNTSLPFTLPSSQRPKASSISNTKGFFKKLPSIFFQTISEFGWSFLKSKLIEDDQTPIRSCAEDFKTRQMTISDVTFSLDLIKDVKSKLGVSINDVLAGVIFFGIRLYMQEINLKSSQTQSTALVLLNTRNIEGYKSVKEMIEKTNSRSAWGNQYAFLHVSIPELSDSKYANPLEFIREAHKDMTKKKNSLATPLTGMLLDMLRKLRGPEAAASYLRSTLRNSSTTISNIIGPVEQMAVANHPIKGFYFMVAGSPESLTMTIMSYMGKIRIAFGVEKNFIDKQLFKSCLENSLEMIKEAAKKISA

SEQ ID NO: 6028 - DNA, 1733 bp, Glycine max
  misc_feature (1)..(1733): Ceres Seq. ID no. 15176200
atagacatctgcgatgatattgctatcaaacacttcacgtatataccaatgctgtttgtttcagtcgcactctgcaatcctatcttgtttgcatgtcaaaatctcattcatcatcatcttcttcttaaaagttaaaaggttaagagagagagagaaagatgagtagcgtgttggagcatggtgttgtgggatgttgcaaatcagggccaggctatgctaccccactggaagccatgtctggtccaagagagtctcttatttatgtaactgctgtctacacagggacaggaatagagaagccggactatttggccacagtggacatagatccaaactctccaacttattccaaagtcatccataggcttcgtgttccttatttaggtgacgaattgcatcacactggttggaattcatgcagctcttgccatggagacccctcggcagaccgacgatttctcatcgcacctgcactcgtttcaggtcgcatatatgtggttgatgtgaaaacaaatccaagggctccatctttgcacaaagttgttgagcctgccgatatcatacagaagactggattagcttatccacacacatctcactgccttgcttctggtgacataatgatctcatgtcttggagataaagatggaaatgctgcaggaaatggatttcttcttcttgattcagagtttaatgtgaagggaaggtgggagaaaccgggtcacagtccactatttggatatgacttttggtaccaaccacgtcacaataccatgattagcacatcatggggtgctcctagtgcttttacaaaaggttttaacttacagcatctttctgatggattatacgggaggcatctccatgtatatagctggcctgggggcgaactgagacaaacactggaccttggtgattcagggcttttacccttagagataaggttcttgcatgatcctgctaaagatacaggttttgtcgggagtgcattgacaagtaacatgatacgattttttaagacccaagatgaatcatggagccatgaggttgccatatcagtgaaaccactgaaagtgcaaaactggattcttcctgaaatgcctgggcttataactgattttttgatttctcttgatgatcggtttctgtactttgtaaactggcttcatggggatatcagacagtataacattgagaaccttaaaaatcctaaactgaccggacaagtatgggttggtggacttatccagaaaggaagccctgtagtagctataactgatgatggtgaaacttggcaagctgaagtgcctgagattcagggcaacaagttgagagggggccctcagatgattcaattgagtttagatgggaaacggctctatgctaccaactcactatttagtacatgggacaaacagttttatccagagtttgtccagaaaggctcccacataatacagattgatgttgatactgagaaaggtggcctgaaaatcaaccccaacttctttgtggactttggagctgagcctgatggtccttctcttgcccatgagatgagatatcctggtggtgactgcacttcagatatatggatttaagcttacgtgtcgttatttccctttaataaacggtatctgtcatatggttgtaatgagctattatgctttataaataatgctcctgtgaatcttcaacatttcgaagacagtttgcagttgcataaatatatg

SEQ ID NO: 6029 - protein, 480 aa, Glycine max
  peptide (1)..(480): Ceres Seq. ID no. 15176201
  misc_feature (13)..(480): Pfam Name: SBP56 Pfam Description: 56kDa selenium binding protein
  misc_feature (1)..(480): NCBI GI NO: 15485720 NR Description: selenium binding protein [Medicago sativa]
  misc_feature (1)..(480): NCBI GI NO: 15485716 NR Description: selenium binding protein
  misc_feature (3)..(480): NCBI GI NO: 15236385 NR Description: selenium-binding protein like
  misc_feature (1)..(480): NCBI GI NO: 13605825 NR Description: AT4g14040/dl3061c [Arabidopsis thaliana]
  misc_feature (1)..(480): NCBI GI NO: 15236386 NR Description: selenium-binding protein like
  misc_feature (1)..(480): NCBI GI NO: 22530900 NR Description: selenium-binding protein-like protein
  misc_feature (12)..(480): NCBI GI NO: 15485722 NR Description: selenium binding protein [Glycine max]
  misc_feature (12)..(480): NCBI GI NO: 34906970 NR Description: putative selenium binding protein
  misc_feature (16)..(480): NCBI GI NO: 15485232 NR Description: selenium binding protein [Arabidopsis thaliana]
  misc_feature (1)..(387): NCBI GI NO: 7488184 NR Description: probable selenium-binding protein - Arabidopsisthaliana
MSSVLEHGVVGCCKSGPGYATPLEAMSGPRESLIYVTAVYTGTGIEKPDYLATVDIDPNSPTYSKVIHRLRVPYLGDELHHTGWNSCSSCHGDPSADRRFLIAPALVSGRIYVVDVKTNPRAPSLHKVVEPADIIQKTGLAYPHTSHCLASGDIMISCLGDKDGNAAGNGFLLLDSEFNVKGRWEKPGHSPLFGYDFWYQPRHNTMISTSWGAPSAFTKGFNLQHLSDGLYGRHLHVYSWPGGELRQTLDLGDSGLLPLEIRFLHDPAKDTGFVGSALTSNMIRFFKTQDESWSHEVAISVKPLKVQNWILPEMPGLITDFLISLDDRFLYFVNWLHGDIRQYNIENLKNPKLTGQVWVGGLIQKGSPVVAITDDGETWQAEVPEIQGNKLRGGPQMIQLSLDGKRLYATNSLFSTWDKQFYPEFVQKGSHIIQIDVDTEKGGLKINPNFFVDFGAEPDGPSLAHEMRYPGGDCTSDIWI

SEQ ID NO: 6030 - protein, 455 aa, Glycine max
  peptide (1)..(455): Ceres Seq. ID no. 15176202
  misc_feature (1)..(455): Pfam Name: SBP56 Pfam Description: 56kDa selenium binding protein
  misc_feature (1)..(455): NCBI GI NO: 15485720 NR Description: selenium binding protein [Medicago sativa]
  misc_feature (1)..(455): NCBI GI NO: 15485716 NR Description: selenium binding protein
  misc_feature (1)..(455): NCBI GI NO: 15236385 NR Description: selenium-binding protein like
  misc_feature (1)..(455): NCBI GI NO: 13605825 NR Description: AT4g14040/dl3061c [Arabidopsis thaliana]
  misc_feature (1)..(455): NCBI GI NO: 15236386 NR Description: selenium-binding protein like
  misc_feature (1)..(455): NCBI GI NO: 22530900 NR Description: selenium-binding protein-like protein
  misc_feature (1)..(455): NCBI GI NO: 15485722 NR Description: selenium binding protein [Glycine max]
  misc_feature (1)..(455): NCBI GI NO: 34906970 NR Description: putative selenium binding protein
  misc_feature (1)..(455): NCBI GI NO: 15485232 NR Description: selenium binding protein [Arabidopsis thaliana]
  misc_feature (1)..(362): NCBI GI NO: 7488184 NR Description: probable selenium-binding protein - Arabidopsisthaliana
MSGPRESLIYVTAVYTGTGIEKPDYLATVDIDPNSPTYSKVIHRLRVPYLGDELHHTGWNSCSSCHGDPSADRRFLIAPALVSGRIYVVDVKTNPRAPSLHKVVEPADIIQKTGLAYPHTSHCLASGDIMISCLGDKDGNAAGNGFLLLDSEFNVKGRWEKPGHSPLFGYDFWYQPRHNTMISTSWGAPSAFTKGFNLQHLSDGLYGRHLHVYSWPGGELRQTLDLGDSGLLPLEIRFLHDPAKDTGFVGSALTSNMIRFFKTQDESWSHEVAISVKPLKVQNWILPEMPGLITDFLISLDDRFLYFVNWLHGDIRQYNIENLKNPKLTGQVWVGGLIQKGSPVVAITDDGETWQAEVPEIQGNKLRGGPQMIQLSLDGKRLYATNSLFSTWDKQFYPEFVQKGSHIIQIDVDTEKGGLKINPNFFVDFGAEPDGPSLAHEMRYPGGDCTSDIWI

SEQ ID NO: 6031 - protein, 326 aa, Glycine max
  peptide (1)..(326): Ceres Seq. ID no. 15176203
  misc_feature (1)..(326): Pfam Name: SBP56 Pfam Description: 56kDa selenium binding protein
  misc_feature (1)..(326): NCBI GI NO: 15485720 NR Description: selenium binding protein [Medicago sativa]
  misc_feature (1)..(326): NCBI GI NO: 15485716 NR Description: selenium binding protein
  misc_feature (1)..(326): NCBI GI NO: 15236385 NR Description: selenium-binding protein like
  misc_feature (1)..(326): NCBI GI NO: 13605825 NR Description: AT4g14040/dl3061c [Arabidopsis thaliana]
  misc_feature (1)..(326): NCBI GI NO: 15236386 NR Description: selenium-binding protein like
  misc_feature (1)..(326): NCBI GI NO: 22530900 NR Description: selenium-binding protein-like protein
  misc_feature (1)..(326): NCBI GI NO: 15485722 NR Description: selenium binding protein [Glycine max]
  misc_feature (1)..(326): NCBI GI NO: 34906970 NR Description: putative selenium binding protein
  misc_feature (1)..(326): NCBI GI NO: 15485232 NR Description: selenium binding protein [Arabidopsis thaliana]
  misc_feature (1)..(233): NCBI GI NO: 7488184 NR Description: probable selenium-binding protein - Arabidopsisthaliana
MISCLGDKDGNAAGNGFLLLDSEFNVKGRWEKPGHSPLFGYDFWYQPRHNTMISTSWGAPSAFTKGFNLQHLSDGLYGRHLHVYSWPGGELRQTLDLGDSGLLPLEIRFLHDPAKDTGFVGSALTSNMIRFFKTQDESWSHEVAISVKPLKVQNWILPEMPGLITDFLISLDDRFLYFVNWLHGDIRQYNIENLKNPKLTGQVWVGGLIQKGSPVVAITDDGETWQAEVPEIQGNKLRGGPQMIQLSLDGKRLYATNSLFSTWDKQFYPEFVQKGSHIIQIDVDTEKGGLKINPNFFVDFGAEPDGPSLAHEMRYPGGDCTSDIWI

SEQ ID NO: 6032 - DNA, 1777 bp, Glycine max
  misc_feature (1)..(1777): Ceres Seq. ID no. 13594023
acaatcgctctcaatctttccagattttctcccaaaccgttcaaacccgtatcgcgtgtcaaattgttcttctgattttctcattgatcgcgattatcgcatctcaaatcgaacttgaatcagagaagacgttgaatttttgaaaagtgagaaaagagggattctggaacgtctctatcgtggtttgtcagtaccctatctcaaacgaaaatgtcatctttatatggaggggaatccaagaggtacaataatatacccagaggacaccatcatttgacaacacagaagaaacaggagattagggaagcctttgaattattcaatactgatggctcaggtactattgatgccaaggatctgaatgttgccatgagggccattggatttgaaatgacagaagagctcattaatcaaatgaaagcagatttggacaaggatggaagtggagcaattgattatgaagaatttgagtacatgatgacaaccaaaataggagagcgggacagtaaagagggaaagatatctgcatcagacatcaagtgcattgcgaaagagccaggtcaaaatttcactaacagagacattcaggagatggttgacgaagcagaccaagatagtaagttattccaatcttatccttgtcaacattctaattttacagcaaaacttttacttctaatactgtggatttttattctgaggtttactgggtgtggatgcatgggagtgatgggaccatggacttcagatcttgctgacataatgtgtgtatataaaaaaaatactatcatttctttgaaattcaaattggccgttttctgcattaaaataaataaatggacaatacagaggccaaaagattaaaaaaaaaagtattcatgaatcattatgataagaggtcactaaattgtatacaagactcactggaaaaataagtagtttgtagttttacctcagtaacactaatcagtttaccaaaaaaatgatacaaagtggtatatatgtttgaaaaattaaataggaatatttcttattcaaaagttatttttcaatgtagtttttaaaagtatattgggatgtttgcattggaatcataatgctcaggggaggtcaatgtattatacactcttgtctgttggatgacaaattctattatataaatgataaaggaacactatatttgccattattttatttttaatgatagatttagtgatcaaccttgacttgttttatttgttcgacattgcataggtttaatgtctgttaatttattattcatgttaattaccatagaattgaaaatatcacagcctgaggtcttaaaaggaaaaggaagaaaacattaccttttgcgaaaagtattttaaagcttgctaggatagaggcttaatcgtggttcaattataatttataacaggggtgcctcattttttattttgcttccccattagtgtactatttcttctcatgattatcagatgttatatctatttttaagttataaaatatgcagattgtcctgaagttagtgcagaggagtttataaggatgttgttcgatcccccctactacggccactaatcgtacagaaattaatgcagtcatattttcataaatttaaattggagatgctagttatgatcaaacaacctcgaacctcgaagttatcgtgtgtaatttttaatttcttttatcaatctatatattgttcattttcataaatttaaattggagatcctagttatgatcaaacaacctcgaagttctcgtgttt

SEQ ID NO: 6033 - protein, 217 aa, Glycine max
  peptide (1)..(217): Ceres Seq. ID no. 13594024
  misc_feature (29)..(57): Pfam Name: Pfam Description:  EF hand
  misc_feature (1)..(135): NCBI GI NO: 15229732 NR Description: caltractin (centrin) [Arabidopsis thaliana]
  misc_feature (16)..(135): NCBI GI NO: 729051 NR Description: CALTRACTIN (CENTRIN)
  misc_feature (2)..(135): NCBI GI NO: 34906754 NR Description: putative caltractin
  misc_feature (7)..(135): NCBI GI NO: 33146874 NR Description: putative caltractin
  misc_feature (1)..(135): NCBI GI NO: 6358509 NR Description: centrin [Nicotiana tabacum]
  misc_feature (1)..(135): NCBI GI NO: 6358511 NR Description: centrin [Nicotiana tabacum]
  misc_feature (7)..(135): NCBI GI NO: 2920835 NR Description: centrin [Marsilea vestita]
  misc_feature (22)..(135): NCBI GI NO: 543936 NR Description: CALTRACTIN (CENTRIN)
  misc_feature (16)..(135): NCBI GI NO: 15234588 NR Description: caltractin (centrin), putative
  misc_feature (16)..(135): NCBI GI NO: 21554823 NR Description: caltractin-like protein [Arabidopsis thaliana]
MSSLYGGESKRYNNIPRGHHHLTTQKKQEIREAFELFNTDGSGTIDAKDLNVAMRAIGFEMTEELINQMKADLDKDGSGAIDYEEFEYMMTTKIGERDSKEGKISASDIKCIAKEPGQNFTNRDIQEMVDEADQDSKLFQSYPCQHSNFTAKLLLLILWIFILRFTGCGCMGVMGPWTSDLADIMCVYKKNTIISLKFKLAVFCIKINKWTIQRPKD

SEQ ID NO: 6034 - protein, 164 aa, Glycine max
  peptide (1)..(164): Ceres Seq. ID no. 13594025
  misc_feature (1)..(82): NCBI GI NO: 15229732 NR Description: caltractin (centrin) [Arabidopsis thaliana]
  misc_feature (1)..(82): NCBI GI NO: 729051 NR Description: CALTRACTIN (CENTRIN)
  misc_feature (1)..(82): NCBI GI NO: 34906754 NR Description: putative caltractin
  misc_feature (1)..(82): NCBI GI NO: 33146874 NR Description: putative caltractin
  misc_feature (1)..(82): NCBI GI NO: 6358509 NR Description: centrin [Nicotiana tabacum]
  misc_feature (1)..(82): NCBI GI NO: 6358511 NR Description: centrin [Nicotiana tabacum]
  misc_feature (1)..(82): NCBI GI NO: 2920835 NR Description: centrin [Marsilea vestita]
  misc_feature (1)..(82): NCBI GI NO: 543936 NR Description: CALTRACTIN (CENTRIN)
  misc_feature (1)..(82): NCBI GI NO: 15234588 NR Description: caltractin (centrin), putative
  misc_feature (1)..(82): NCBI GI NO: 21554823 NR Description: caltractin-like protein [Arabidopsis thaliana]
MRAIGFEMTEELINQMKADLDKDGSGAIDYEEFEYMMTTKIGERDSKEGKISASDIKCIAKEPGQNFTNRDIQEMVDEADQDSKLFQSYPCQHSNFTAKLLLLILWIFILRFTGCGCMGVMGPWTSDLADIMCVYKKNTIISLKFKLAVFCIKINKWTIQRPKD

SEQ ID NO: 6035 - protein, 157 aa, Glycine max
  peptide (1)..(157): Ceres Seq. ID no. 13594026
  misc_feature (1)..(75): NCBI GI NO: 15229732 NR Description: caltractin (centrin) [Arabidopsis thaliana]
  misc_feature (1)..(75): NCBI GI NO: 729051 NR Description: CALTRACTIN (CENTRIN)
  misc_feature (1)..(75): NCBI GI NO: 34906754 NR Description: putative caltractin
  misc_feature (1)..(75): NCBI GI NO: 33146874 NR Description: putative caltractin
  misc_feature (1)..(75): NCBI GI NO: 6358509 NR Description: centrin [Nicotiana tabacum]
  misc_feature (1)..(75): NCBI GI NO: 6358511 NR Description: centrin [Nicotiana tabacum]
  misc_feature (1)..(75): NCBI GI NO: 2920835 NR Description: centrin [Marsilea vestita]
  misc_feature (1)..(75): NCBI GI NO: 543936 NR Description: CALTRACTIN (CENTRIN)
  misc_feature (1)..(75): NCBI GI NO: 15234588 NR Description: caltractin (centrin), putative
  misc_feature (1)..(75): NCBI GI NO: 21554823 NR Description: caltractin-like protein [Arabidopsis thaliana]
MTEELINQMKADLDKDGSGAIDYEEFEYMMTTKIGERDSKEGKISASDIKCIAKEPGQNFTNRDIQEMVDEADQDSKLFQSYPCQHSNFTAKLLLLILWIFILRFTGCGCMGVMGPWTSDLADIMCVYKKNTIISLKFKLAVFCIKINKWTIQRPKD

SEQ ID NO: 6036 - DNA, 1291 bp, Glycine max
  misc_feature (1)..(1291): Ceres Seq. ID no. 14308413
aatatgacgcgctccggcgccgccaggggtggtaagaccctgccgccgcgggcttcagcccgcgatgatgagatcaatgacacgattccgactttgggatcggagactaattttaggaatgggaagtatttgtattactcgagaggtggggattactgcaagggaatgaatcattatttgtggagtttcttgtgtggattgggggaagctatgtttttgaacaggacttttgttatggatttgagtgtttgtttggcttcaacttataaccctagtaacaaggatgaggaggggaaggattttaggtactacttcgatttcgagcatttgaaggagacggcttcgtttgtggaggaaggtgagtttttgagggattggaagaattgggataaaacgcatttgaagaagaagaagattcctgttaggaaggttgtcaatcacaaggtgactcctatgcagcttaagaaggataagagtacgattatatggaggcagtttgatgcgccggagcctgaaaattattggtatagggtttgtgaaggtgaggccgctaagaatattcagaggccttggcatgctgtgtggaaatccaagaggttgatgaatattgttactgagattagtggaaggttggactgggattttgacgccgttcatgtggttcggggagagaaagctcagaacaaggagttgtggcctcatttggattatgatacgtcgccggatgttcttgtcgagaagcttaaatggatggttcagccttggagacatttgtacattgccaccaatgagccttattataattactttgataagttgaggtcaaattacaaggtgcatctgcttgatgactataaggagctgtggggaaatacaagtgagtggtataacgagaccacacttctcaacaatggaaagcctgttgagtttgatgggtacatgagagttgcagtggatactgaggtcttttaccgtggaaagacacgcgtggaaacgttctacaatttgactaaagattgcaaggatggagttaatacatgctgatcaggttggcactactgattatgatgctttttcagaatacatggtacactcgggccttgcttttggattcagtttcagattcataccattgggttagatatgagcttgttgttgtgcttgcttgttcttttattatattgatgatttatattgattatcatgattttgtatacatactatagaatccctttctaccctctttcctttctgttgactcaagctgctaaatccattctcgtattctttc

SEQ ID NO: 6037 - protein, 347 aa, Glycine max
  peptide (1)..(347): Ceres Seq. ID no. 14308414
  misc_feature (18)..(347): NCBI GI NO: 15236611 NR Description: expressed protein [Arabidopsis thaliana]
  misc_feature (1)..(347): NCBI GI NO: 34913308 NR Description: P0519E12.32
  misc_feature (25)..(347): NCBI GI NO: 18395698 NR Description: expressed protein [Arabidopsis thaliana]
  misc_feature (23)..(347): NCBI GI NO: 37534994 NR Description: unknown protein
  misc_feature (10)..(347): NCBI GI NO: 15235454 NR Description: expressed protein [Arabidopsis thaliana]
  misc_feature (30)..(220): NCBI GI NO: 34909040 NR Description: P0034E02.33
  misc_feature (121)..(331): NCBI GI NO: 34909040 NR Description: P0034E02.33
NMTRSGAARGGKTLPPRASARDDEINDTIPTLGSETNFRNGKYLYYSRGGDYCKGMNHYLWSFLCGLGEAMFLNRTFVMDLSVCLASTYNPSNKDEEGKDFRYYFDFEHLKETASFVEEGEFLRDWKNWDKTHLKKKKIPVRKVVNHKVTPMQLKKDKSTIIWRQFDAPEPENYWYRVCEGEAAKNIQRPWHAVWKSKRLMNIVTEISGRLDWDFDAVHVVRGEKAQNKELWPHLDYDTSPDVLVEKLKWMVQPWRHLYIATNEPYYNYFDKLRSNYKVHLLDDYKELWGNTSEWYNETTLLNNGKPVEFDGYMRVAVDTEVFYRGKTRVETFYNLTKDCKDGVNTC

SEQ ID NO: 6038 - protein, 346 aa, Glycine max
  peptide (1)..(346): Ceres Seq. ID no. 14308415
  misc_feature (17)..(346): NCBI GI NO: 15236611 NR Description: expressed protein [Arabidopsis thaliana]
  misc_feature (1)..(346): NCBI GI NO: 34913308 NR Description: P0519E12.32
  misc_feature (24)..(346): NCBI GI NO: 18395698 NR Description: expressed protein [Arabidopsis thaliana]
  misc_feature (22)..(346): NCBI GI NO: 37534994 NR Description: unknown protein
  misc_feature (9)..(346): NCBI GI NO: 15235454 NR Description: expressed protein [Arabidopsis thaliana]
  misc_feature (29)..(219): NCBI GI NO: 34909040 NR Description: P0034E02.33
  misc_feature (120)..(330): NCBI GI NO: 34909040 NR Description: P0034E02.33
MTRSGAARGGKTLPPRASARDDEINDTIPTLGSETNFRNGKYLYYSRGGDYCKGMNHYLWSFLCGLGEAMFLNRTFVMDLSVCLASTYNPSNKDEEGKDFRYYFDFEHLKETASFVEEGEFLRDWKNWDKTHLKKKKIPVRKVVNHKVTPMQLKKDKSTIIWRQFDAPEPENYWYRVCEGEAAKNIQRPWHAVWKSKRLMNIVTEISGRLDWDFDAVHVVRGEKAQNKELWPHLDYDTSPDVLVEKLKWMVQPWRHLYIATNEPYYNYFDKLRSNYKVHLLDDYKELWGNTSEWYNETTLLNNGKPVEFDGYMRVAVDTEVFYRGKTRVETFYNLTKDCKDGVNTC

SEQ ID NO: 6039 - protein, 292 aa, Glycine max
  peptide (1)..(292): Ceres Seq. ID no. 14308416
  misc_feature (1)..(292): NCBI GI NO: 15236611 NR Description: expressed protein [Arabidopsis thaliana]
  misc_feature (1)..(292): NCBI GI NO: 34913308 NR Description: P0519E12.32
  misc_feature (1)..(292): NCBI GI NO: 18395698 NR Description: expressed protein [Arabidopsis thaliana]
  misc_feature (1)..(292): NCBI GI NO: 37534994 NR Description: unknown protein
  misc_feature (1)..(292): NCBI GI NO: 15235454 NR Description: expressed protein [Arabidopsis thaliana]
  misc_feature (1)..(165): NCBI GI NO: 34909040 NR Description: P0034E02.33
  misc_feature (66)..(276): NCBI GI NO: 34909040 NR Description: P0034E02.33
MNHYLWSFLCGLGEAMFLNRTFVMDLSVCLASTYNPSNKDEEGKDFRYYFDFEHLKETASFVEEGEFLRDWKNWDKTHLKKKKIPVRKVVNHKVTPMQLKKDKSTIIWRQFDAPEPENYWYRVCEGEAAKNIQRPWHAVWKSKRLMNIVTEISGRLDWDFDAVHVVRGEKAQNKELWPHLDYDTSPDVLVEKLKWMVQPWRHLYIATNEPYYNYFDKLRSNYKVHLLDDYKELWGNTSEWYNETTLLNNGKPVEFDGYMRVAVDTEVFYRGKTRVETFYNLTKDCKDGVNTC

SEQ ID NO: 6040 - DNA, 1363 bp, Glycine max
  misc_feature (1)..(1363): Ceres Seq. ID no. 15169195
tactataaagtataaacccactgcgcgcaccattctccactgtccaaggagatcaagcaccaaacccaacacacacctctctctctctctctctctctcttgtgctgttgttctatttctcattctttcgcaagtgaatgttgaactgactctgcggttcggttcggttttttttttttctgtttatggatccgggcgcgatgatgaacgagggttccttcgcgaacaatgcgagcggtaatacggcgccgtttagcttggcggagatctggcagcagttcccgccggcgattagtggcggcggtggattggggctcagaagcccgcagttcggtcacgggccaggagggcagtttggggatttcaccaccgggccgagccacggactcggacccagtaacagcagaaagcggcgcgactccgaggaggacgattccgctaagggcgtgtccaccagcaatgccgtgaatgagggtgatggaaaacgtgttaaagggaataggaacgagggtggtggtgatggtggtaataataaaggtgaaggtgaagtcagttcaggaaagcctgcggagcaaagcgctaagccagcttcggagcctccgaagcaagactacattcacgttcgagccagaaggggtcaagccactgatagtcacagtcttgcagaacgagctcgaagggaaaagattagtgaaaggatgaaaattcttcaggatttggtccctggttgtaataaggttattgggaaagcattggtccttgatgagataattaattatattcaatctcttcagcgccaagttgagtttttgtcaatgaagcttgaagcagtgaattcaagacttaactctggtattgaagcgtttcctcctaaagattttggtcagcaagcatttgatcctgctggcataccattcggttcgcaagctccaagagagtatagcagaggttcttcaccagactggttacatatgcagataggaggtagttttgaaagaacaacgtagtctacgagatcccttggtaataaatacataaaccagtggtattccattcttcagtagcacccagaaaacatcaatggtatactcagggaagcaagtacaatgggcacctcattcccattttctacactaggcatggagctgtcactgtttttcacaggactgcttcagtttctatttaagcatctccatatgttggtgtgttggaaaatgaattcatttactcaatatatgtagtatagtggacttttaggctttgtattctgctactcaacataacccttaaaatgatcattcttcttgtaaaagaatgctgcttcatcttaatacatgatgcttacagattgtgtaatactctc

SEQ ID NO: 6041 - protein, 273 aa, Glycine max
  peptide (1)..(273): Ceres Seq. ID no. 15169196
  misc_feature (153)..(203): Pfam Name: Pfam Description:  Helix-loop-helix DNA-binding domain
  misc_feature (15)..(273): NCBI GI NO: 33339703 NR Description: MYC1 [Catharanthus roseus]
  misc_feature (1)..(273): NCBI GI NO: 18406408 NR Description: bHLH protein [Arabidopsis thaliana]
  misc_feature (1)..(273): NCBI GI NO: 21592490 NR Description: unknown [Arabidopsis thaliana]
  misc_feature (22)..(231): NCBI GI NO: 25404871 NR Description: protein T30E16.21
  misc_feature (232)..(273): NCBI GI NO: 25404871 NR Description: protein T30E16.21
  misc_feature (21)..(273): NCBI GI NO: 29150361 NR Description: hypothetical protein
  misc_feature (1)..(273): NCBI GI NO: 15241896 NR Description: bHLH protein family [Arabidopsis thaliana]
  misc_feature (1)..(231): NCBI GI NO: 25453562 NR Description: helix-loop-helix protein homolog
  misc_feature (1)..(231): NCBI GI NO: 30696324 NR Description: bHLH protein [Arabidopsis thaliana]
  misc_feature (64)..(234): NCBI GI NO: 34906952 NR Description: DNA-binding protein-like protein
MDPGAMMNEGSFANNASGNTAPFSLAEIWQQFPPAISGGGGLGLRSPQFGHGPGGQFGDFTTGPSHGLGPSNSRKRRDSEEDDSAKGVSTSNAVNEGDGKRVKGNRNEGGGDGGNNKGEGEVSSGKPAEQSAKPASEPPKQDYIHVRARRGQATDSHSLAERARREKISERMKILQDLVPGCNKVIGKALVLDEIINYIQSLQRQVEFLSMKLEAVNSRLNSGIEAFPPKDFGQQAFDPAGIPFGSQAPREYSRGSSPDWLHMQIGGSFERTT

SEQ ID NO: 6042 - protein, 268 aa, Glycine max
  peptide (1)..(268): Ceres Seq. ID no. 15169197
  misc_feature (148)..(198): Pfam Name: Pfam Description:  Helix-loop-helix DNA-binding domain
  misc_feature (10)..(268): NCBI GI NO: 33339703 NR Description: MYC1 [Catharanthus roseus]
  misc_feature (1)..(268): NCBI GI NO: 18406408 NR Description: bHLH protein [Arabidopsis thaliana]
  misc_feature (1)..(268): NCBI GI NO: 21592490 NR Description: unknown [Arabidopsis thaliana]
  misc_feature (17)..(226): NCBI GI NO: 25404871 NR Description: protein T30E16.21
  misc_feature (227)..(268): NCBI GI NO: 25404871 NR Description: protein T30E16.21
  misc_feature (16)..(268): NCBI GI NO: 29150361 NR Description: hypothetical protein
  misc_feature (1)..(268): NCBI GI NO: 15241896 NR Description: bHLH protein family [Arabidopsis thaliana]
  misc_feature (1)..(226): NCBI GI NO: 25453562 NR Description: helix-loop-helix protein homolog
  misc_feature (1)..(226): NCBI GI NO: 30696324 NR Description: bHLH protein [Arabidopsis thaliana]
  misc_feature (59)..(229): NCBI GI NO: 34906952 NR Description: DNA-binding protein-like protein
MMNEGSFANNASGNTAPFSLAEIWQQFPPAISGGGGLGLRSPQFGHGPGGQFGDFTTGPSHGLGPSNSRKRRDSEEDDSAKGVSTSNAVNEGDGKRVKGNRNEGGGDGGNNKGEGEVSSGKPAEQSAKPASEPPKQDYIHVRARRGQATDSHSLAERARREKISERMKILQDLVPGCNKVIGKALVLDEIINYIQSLQRQVEFLSMKLEAVNSRLNSGIEAFPPKDFGQQAFDPAGIPFGSQAPREYSRGSSPDWLHMQIGGSFERTT

SEQ ID NO: 6043 - protein, 267 aa, Glycine max
  peptide (1)..(267): Ceres Seq. ID no. 15169198
  misc_feature (147)..(197): Pfam Name: Pfam Description:  Helix-loop-helix DNA-binding domain
  misc_feature (9)..(267): NCBI GI NO: 33339703 NR Description: MYC1 [Catharanthus roseus]
  misc_feature (1)..(267): NCBI GI NO: 18406408 NR Description: bHLH protein [Arabidopsis thaliana]
  misc_feature (1)..(267): NCBI GI NO: 21592490 NR Description: unknown [Arabidopsis thaliana]
  misc_feature (16)..(225): NCBI GI NO: 25404871 NR Description: protein T30E16.21
  misc_feature (226)..(267): NCBI GI NO: 25404871 NR Description: protein T30E16.21
  misc_feature (15)..(267): NCBI GI NO: 29150361 NR Description: hypothetical protein
  misc_feature (1)..(267): NCBI GI NO: 15241896 NR Description: bHLH protein family [Arabidopsis thaliana]
  misc_feature (1)..(225): NCBI GI NO: 25453562 NR Description: helix-loop-helix protein homolog
  misc_feature (1)..(225): NCBI GI NO: 30696324 NR Description: bHLH protein [Arabidopsis thaliana]
  misc_feature (58)..(228): NCBI GI NO: 34906952 NR Description: DNA-binding protein-like protein
MNEGSFANNASGNTAPFSLAEIWQQFPPAISGGGGLGLRSPQFGHGPGGQFGDFTTGPSHGLGPSNSRKRRDSEEDDSAKGVSTSNAVNEGDGKRVKGNRNEGGGDGGNNKGEGEVSSGKPAEQSAKPASEPPKQDYIHVRARRGQATDSHSLAERARREKISERMKILQDLVPGCNKVIGKALVLDEIINYIQSLQRQVEFLSMKLEAVNSRLNSGIEAFPPKDFGQQAFDPAGIPFGSQAPREYSRGSSPDWLHMQIGGSFERTT

SEQ ID NO: 6044 - DNA, 2013 bp, Glycine max
  misc_feature (1)..(2013): Ceres Seq. ID no. 15175670
atgtagaatgattcacctaaggaaaaattagtagcttcttgttgtgctttttattttgttttgttttgtgtagagataaatctgtttggtattgttttgtgttttatgaattatttgatgggtgaagagggagaagaagtggtgagaaagcaaggacaaaggggtgttgatggagataaatggtacttgtatagctgcttacaagactgtaaatattggtgctgtaatttaatacacgagactagcagttctttttcgatggttccttttgagtgaaaaaaaccttgtcttctcatcagctttctttggagagatcttaaagacgacattgactgctaacaacaataaagtggatcaatcattaaaggcttacttcttcttcttcttcttcttcttcttcttctaacaacaataagatcccatctttcccactcatgaagagacttaacagctcagattcttccactgccctcatgacaatttttccatcatcatcaacagaggaacatagtccgaggaacagccaccacatgtatggcagggagttccgatcgatgttggacggactcgacgaggaagggtgtgttgaagaaccggggcatcaatctgagaagaagcgtcgactaagtgtggaacaagtgaaggctttggagaagaactttgaggttgaaaacaagcttgaacctgagaggaaggtcaagcttgcccaagaacttgggttgcaacctagacaagtagccgtttggttccaaaaccgccgagccagatggaaaaccaaacaattggagagagattatggtgtcctcaaagccaattatgatgctcttaagcttaactttggcaccctcaatcaggacaacgaagccttacgaaagcagataaaggaattgaaatcgaggctgctgcaagaagagaacacagcaggaagcggtgtttcggtgaaggaagaagagataacaacgatgcctgcagactcagaagagaaaacgatggaacaaagtaagagtgacccaccttctgaaacctcgaacattaatcctagttcggagtcgtcggaggaggaccacttgaattacgaatgtttcaacaacaacagcgacgactgtgtcgtcggaggatccgccgcagcatcgctcttgcaagtggacttcatgaaagacgggttcttccgacagcgacggatcaagcgcgatcttgaacgaagacaccatgtacttgccgtcttcgatgactgttttcagttccagaaaccgtatcatcacgcgcagtacgtgaagacggaggagcacaatttcttgagcgccgatgaggcctgcaatttcttctccgatgaacaagcaccgaccctgcaatggtactgtccagaacagtggagctgagatagaagaaacatgggaaaattggaaaccgctttcagaaatttttgtttaatatgttgcacggttgtgttgaacacagctcattgaggtaaaagttgtaaaaaaaggttgccacttgccaacagaggctgcttgaaggtagaaaatgaaacactgtgcagaagatagagttacgaaagagagaacagagatcaatggctgcatggcgtggggtcggagatgaaggatgacgattaaggttaattattactctcgatcgtgggtaatatcaataattattcaatcgtaaagcaaaccatgctgtaaaaaacaaatttcaattcaagtatagaataacgatgtagtactttatcaaacagaaaacgaaaaaaaaaattataaatctgttaaacaatatccttttgcctcactgaactcagtttactagtgtttatgattgattatccttttcctgtaaaagtatttttttttcaccaacaattgctactaaactgaatttgagttggaggcaacatatgagttgttttttaatgttcatttccattgacattgtttattcattagtcgtgtcaagtaaaaatatttttgttattagtatatcattcaaataaaatttattttatcaacatatttt

SEQ ID NO: 6045 - protein, 314 aa, Glycine max
  peptide (1)..(314): Ceres Seq. ID no. 15175671
  misc_feature (60)..(114): Pfam Name: Pfam Description:  Homeobox domain
  misc_feature (41)..(314): NCBI GI NO: 6091551 NR Description: homeodomain-leucine zipper protein 56
  misc_feature (48)..(314): NCBI GI NO: 15148916 NR Description: homeodomain leucine zipper protein HDZ1
  misc_feature (45)..(243): NCBI GI NO: 22651698 NR Description: homeodomain protein Hfi22 [Nicotiana tabacum]
  misc_feature (274)..(314): NCBI GI NO: 22651698 NR Description: homeodomain protein Hfi22 [Nicotiana tabacum]
  misc_feature (1)..(314): NCBI GI NO: 18399966 NR Description: homeobox-leucine zipper protein ATHB-6
  misc_feature (1)..(314): NCBI GI NO: 25386231 NR Description: homeodomain transcription factor (ATHB-6)
  misc_feature (1)..(314): NCBI GI NO: 8133126 NR Description: hb-6-like protein
  misc_feature (1)..(154): NCBI GI NO: 4433048 NR Description: DNA-binding protein [Daucus carota]
  misc_feature (1)..(294): NCBI GI NO: 5305602 NR Description: homeobox protein ATHB6 [Arabidopsis thaliana]
  misc_feature (1)..(221): NCBI GI NO: 18034439 NR Description: homeodomain leucine zipper protein CPHB-4
MKRLNSSDSSTALMTIFPSSSTEEHSPRNSHHMYGREFRSMLDGLDEEGCVEEPGHQSEKKRRLSVEQVKALEKNFEVENKLEPERKVKLAQELGLQPRQVAVWFQNRRARWKTKQLERDYGVLKANYDALKLNFGTLNQDNEALRKQIKELKSRLLQEENTAGSGVSVKEEEITTMPADSEEKTMEQSKSDPPSETSNINPSSESSEEDHLNYECFNNNSDDCVVGGSAAASLLQVDFMKDGFFRQRRIKRDLERRHHVLAVFDDCFQFQKPYHHAQYVKTEEHNFLSADEACNFFSDEQAPTLQWYCPEQWS

SEQ ID NO: 6046 - protein, 301 aa, Glycine max
  peptide (1)..(301): Ceres Seq. ID no. 15175672
  misc_feature (47)..(101): Pfam Name: Pfam Description:  Homeobox domain
  misc_feature (28)..(301): NCBI GI NO: 6091551 NR Description: homeodomain-leucine zipper protein 56
  misc_feature (35)..(301): NCBI GI NO: 15148916 NR Description: homeodomain leucine zipper protein HDZ1
  misc_feature (32)..(230): NCBI GI NO: 22651698 NR Description: homeodomain protein Hfi22 [Nicotiana tabacum]
  misc_feature (261)..(301): NCBI GI NO: 22651698 NR Description: homeodomain protein Hfi22 [Nicotiana tabacum]
  misc_feature (1)..(301): NCBI GI NO: 18399966 NR Description: homeobox-leucine zipper protein ATHB-6
  misc_feature (1)..(301): NCBI GI NO: 25386231 NR Description: homeodomain transcription factor (ATHB-6)
  misc_feature (1)..(301): NCBI GI NO: 8133126 NR Description: hb-6-like protein
  misc_feature (1)..(141): NCBI GI NO: 4433048 NR Description: DNA-binding protein [Daucus carota]
  misc_feature (1)..(281): NCBI GI NO: 5305602 NR Description: homeobox protein ATHB6 [Arabidopsis thaliana]
  misc_feature (1)..(208): NCBI GI NO: 18034439 NR Description: homeodomain leucine zipper protein CPHB-4
MTIFPSSSTEEHSPRNSHHMYGREFRSMLDGLDEEGCVEEPGHQSEKKRRLSVEQVKALEKNFEVENKLEPERKVKLAQELGLQPRQVAVWFQNRRARWKTKQLERDYGVLKANYDALKLNFGTLNQDNEALRKQIKELKSRLLQEENTAGSGVSVKEEEITTMPADSEEKTMEQSKSDPPSETSNINPSSESSEEDHLNYECFNNNSDDCVVGGSAAASLLQVDFMKDGFFRQRRIKRDLERRHHVLAVFDDCFQFQKPYHHAQYVKTEEHNFLSADEACNFFSDEQAPTLQWYCPEQWS

SEQ ID NO: 6047 - protein, 282 aa, Glycine max
  peptide (1)..(282): Ceres Seq. ID no. 15175673
  misc_feature (28)..(82): Pfam Name: Pfam Description:  Homeobox domain
  misc_feature (9)..(282): NCBI GI NO: 6091551 NR Description: homeodomain-leucine zipper protein 56
  misc_feature (16)..(282): NCBI GI NO: 15148916 NR Description: homeodomain leucine zipper protein HDZ1
  misc_feature (13)..(211): NCBI GI NO: 22651698 NR Description: homeodomain protein Hfi22 [Nicotiana tabacum]
  misc_feature (242)..(282): NCBI GI NO: 22651698 NR Description: homeodomain protein Hfi22 [Nicotiana tabacum]
  misc_feature (1)..(282): NCBI GI NO: 18399966 NR Description: homeobox-leucine zipper protein ATHB-6
  misc_feature (1)..(282): NCBI GI NO: 25386231 NR Description: homeodomain transcription factor (ATHB-6)
  misc_feature (1)..(282): NCBI GI NO: 8133126 NR Description: hb-6-like protein
  misc_feature (1)..(122): NCBI GI NO: 4433048 NR Description: DNA-binding protein [Daucus carota]
  misc_feature (1)..(262): NCBI GI NO: 5305602 NR Description: homeobox protein ATHB6 [Arabidopsis thaliana]
  misc_feature (1)..(189): NCBI GI NO: 18034439 NR Description: homeodomain leucine zipper protein CPHB-4
MYGREFRSMLDGLDEEGCVEEPGHQSEKKRRLSVEQVKALEKNFEVENKLEPERKVKLAQELGLQPRQVAVWFQNRRARWKTKQLERDYGVLKANYDALKLNFGTLNQDNEALRKQIKELKSRLLQEENTAGSGVSVKEEEITTMPADSEEKTMEQSKSDPPSETSNINPSSESSEEDHLNYECFNNNSDDCVVGGSAAASLLQVDFMKDGFFRQRRIKRDLERRHHVLAVFDDCFQFQKPYHHAQYVKTEEHNFLSADEACNFFSDEQAPTLQWYCPEQWS

SEQ ID NO: 6048 - DNA, 761 bp, Glycine max
  misc_feature (1)..(761): Ceres Seq. ID no. 12607455
cagtgaagagcaggtcaaacttgctctgctgtctgacccctctctctccactggcccctttattttctaatttattttgattttacgctgaacaaatatgctgcagcagctgcttactgttgcaaacaaaaatttgaatcctgtagacgaaagctattctatccgatgccattaaatgtaatcaagaagaaaaacaccttgcagtcaccctggaatttgcaaaatgggaattgggcgatactgagaaggaattgaagttgctcaagtctgctgtttcctcttcagagaaagaatacgatcaaattccgaaagatacggaagctattcaaatggaattggagagtgaaaggagtttacggaagaagcttgaggaagaacttggagaattgaacagcaaaattgatgagctgacttctgaaactggagaaaccacaatacaaaaactcgaaaaagaaataaggatttgcaagaacatgatcaagtgtactgtctgtactgatcgtccaaaggaggttgtgattgtcaagtgctatcatctgttctgcaatccatgcattcagagaaatctagagcttcggcaccgcaaatgtcctgcatgtggaacagcatttggacagagtgatgtccgctttgtaaaaatatgaaacagatgttaagatagatactttgtagataggtgttgattgattgtaatgttttggatccttggttaccctgatcatagtttcaaacaagcattcttagccgaaagaaatatatgc

SEQ ID NO: 6049 - protein, 104 aa, Glycine max
  peptide (1)..(104): Ceres Seq. ID no. 12607456
  misc_feature (52)..(90): Pfam Name: RING finger Pfam Description: Zinc finger, C3HC4 type
  misc_feature (1)..(104): NCBI GI NO: 21553880 NR Description: unknown [Arabidopsis thaliana]
  misc_feature (1)..(104): NCBI GI NO: 18405292 NR Description: Expressed protein; protein id: At1g55255
  misc_feature (1)..(104): NCBI GI NO: 25405809 NR Description: unknown protein, 71207-66119
  misc_feature (1)..(104): NCBI GI NO: 37536934 NR Description: unknown protein
  misc_feature (1)..(104): NCBI GI NO: 7486945 NR Description: hypothetical protein At2g44950
  misc_feature (1)..(104): NCBI GI NO: 30689877 NR Description: zinc finger
  misc_feature (1)..(104): NCBI GI NO: 38605849 NR Description: OSJNBb0034G17.7
  misc_feature (1)..(99): NCBI GI NO: 28828361 NR Description: similar to Homo sapiens (Human)
  misc_feature (1)..(98): NCBI GI NO: 31199093 NR Description: ENSANGP00000009515 [Anopheles gambiae]
  misc_feature (1)..(98): NCBI GI NO: 31199091 NR Description: ENSANGP00000022800 [Anopheles gambiae]
MELESERSLRKKLEEELGELNSKIDELTSETGETTIQKLEKEIRICKNMIKCTVCTDRPKEVVIVKCYHLFCNPCIQRNLELRHRKCPACGTAFGQSDVRFVKI

SEQ ID NO: 6050 - protein, 56 aa, Glycine max
  peptide (1)..(56): Ceres Seq. ID no. 12607457
  misc_feature (4)..(42): Pfam Name: RING finger Pfam Description: Zinc finger, C3HC4 type
  misc_feature (1)..(56): NCBI GI NO: 21553880 NR Description: unknown [Arabidopsis thaliana]
  misc_feature (1)..(56): NCBI GI NO: 18405292 NR Description: Expressed protein; protein id: At1g55255
  misc_feature (1)..(56): NCBI GI NO: 25405809 NR Description: unknown protein, 71207-66119
  misc_feature (1)..(56): NCBI GI NO: 37536934 NR Description: unknown protein
  misc_feature (1)..(56): NCBI GI NO: 7486945 NR Description: hypothetical protein At2g44950
  misc_feature (1)..(56): NCBI GI NO: 30689877 NR Description: zinc finger
  misc_feature (1)..(56): NCBI GI NO: 38605849 NR Description: OSJNBb0034G17.7
  misc_feature (1)..(51): NCBI GI NO: 28828361 NR Description: similar to Homo sapiens (Human)
  misc_feature (1)..(50): NCBI GI NO: 31199093 NR Description: ENSANGP00000009515 [Anopheles gambiae]
  misc_feature (1)..(50): NCBI GI NO: 31199091 NR Description: ENSANGP00000022800 [Anopheles gambiae]
MIKCTVCTDRPKEVVIVKCYHLFCNPCIQRNLELRHRKCPACGTAFGQSDVRFVKI

SEQ ID NO: 6051 - DNA, 1320 bp, Glycine max
  misc_feature (1)..(1320): Ceres Seq. ID no. 14310780
atgcaaaaccactgctcagaaagccaacacaagtactagagattaataatgtgtttgcagcagacactattttgtctttatccgacatggccattgaagaaattttggatgatgtacggttggaatgtgcaagatttgggactattaaatcaattaatgtagtcaagcatagcagtggcgagaatttagcaaccaaattagaagaatgcaaagtcataaacaaagtggatgctaaagaagtttctcaagacacaaactgtattactaataatacagaatctagtttttctgacaaggctacttaccccgactttgaaggaacaaatgggatggaaatccatgataacaatgaaatggaagaagttaaagttgacgagggtagctgtgtttatgttgataaaaatgctgaagtttttgactataaatcatgtagagaacacgtggatgattcagcagtagaagatgtgggggataagggcataccttgtagtatcattcaagaatgtcctgatcaacaagatacacccaatgatgggccagaattttatgataagatggttgctaacgatattgatgtgaatattgaaaataatatggaatctaaagacacagtttgtgcatttcaggaaggcttttctgaatgggatatcagtgcagaattggttagtccccaaaagagcattgacacggaagaggatatttatggtcatgtatttaaaccaggttctgttcttgttgagtatggaagagctgaagcatgttgttcggcagcacatagtttgcacggacgattctttgatggcagaattgtgacggtgggatatgttgctctcagcctatacagatcaagatttacaaaatgagcatttcaaagcagcaactcgtggttatatgatgaaacaccaaattatatttttgcatgattgtggaagaatagattaatcaatctgattggttatgccagcctgcttcctggatagctttttaactttcagatttacacttctgatgtttagtatttcaacatttggagtgggtaaaagcttaactgagcaatgtcgatttgaggaaaatgcagtatagcacacatcaagtttgtaactgcagactatctgatgatttgttatgcaaatcgggcatatgatttttatttttttattttgtacgtttaaatgtggttacatttcgagctggtggtcttatgctatttggcaatattttgtgtacatggttatgttgcgttacaaactgattattgtatcgtagttatttttagatgttggttacagggccatacttttcataattattttttttgac

SEQ ID NO: 6052 - protein, 286 aa, Glycine max
  peptide (1)..(286): Ceres Seq. ID no. 14310781
  misc_feature (2)..(87): NCBI GI NO: 34905724 NR Description: OJ1294_F06.3
  misc_feature (241)..(279): NCBI GI NO: 34905724 NR Description: OJ1294_F06.3
  misc_feature (184)..(284): NCBI GI NO: 30685703 NR Description: splicing factor U2AF
  misc_feature (184)..(284): NCBI GI NO: 25408271 NR Description: probable splicing factor U2AF large chain
AKPLLRKPTQVLEINNVFAADTILSLSDMAIEEILDDVRLECARFGTIKSINVVKHSSGENLATKLEECKVINKVDAKEVSQDTNCITNNTESSFSDKATYPDFEGTNGMEIHDNNEMEEVKVDEGSCVYVDKNAEVFDYKSCREHVDDSAVEDVGDKGIPCSIIQECPDQQDTPNDGPEFYDKMVANDIDVNIENNMESKDTVCAFQEGFSEWDISAELVSPQKSIDTEEDIYGHVFKPGSVLVEYGRAEACCSAAHSLHGRFFDGRIVTVGYVALSLYRSRFTK

SEQ ID NO: 6053 - protein, 258 aa, Glycine max
  peptide (1)..(258): Ceres Seq. ID no. 14310782
  misc_feature (1)..(59): NCBI GI NO: 34905724 NR Description: OJ1294_F06.3
  misc_feature (213)..(251): NCBI GI NO: 34905724 NR Description: OJ1294_F06.3
  misc_feature (156)..(256): NCBI GI NO: 30685703 NR Description: splicing factor U2AF
  misc_feature (156)..(256): NCBI GI NO: 25408271 NR Description: probable splicing factor U2AF large chain
MAIEEILDDVRLECARFGTIKSINVVKHSSGENLATKLEECKVINKVDAKEVSQDTNCITNNTESSFSDKATYPDFEGTNGMEIHDNNEMEEVKVDEGSCVYVDKNAEVFDYKSCREHVDDSAVEDVGDKGIPCSIIQECPDQQDTPNDGPEFYDKMVANDIDVNIENNMESKDTVCAFQEGFSEWDISAELVSPQKSIDTEEDIYGHVFKPGSVLVEYGRAEACCSAAHSLHGRFFDGRIVTVGYVALSLYRSRFTK

SEQ ID NO: 6054 - protein, 177 aa, Glycine max
  peptide (1)..(177): Ceres Seq. ID no. 14310783
  misc_feature (132)..(170): NCBI GI NO: 34905724 NR Description: OJ1294_F06.3
  misc_feature (75)..(175): NCBI GI NO: 30685703 NR Description: splicing factor U2AF
  misc_feature (75)..(175): NCBI GI NO: 25408271 NR Description: probable splicing factor U2AF large chain
MEIHDNNEMEEVKVDEGSCVYVDKNAEVFDYKSCREHVDDSAVEDVGDKGIPCSIIQECPDQQDTPNDGPEFYDKMVANDIDVNIENNMESKDTVCAFQEGFSEWDISAELVSPQKSIDTEEDIYGHVFKPGSVLVEYGRAEACCSAAHSLHGRFFDGRIVTVGYVALSLYRSRFTK

SEQ ID NO: 6055 - DNA, 1235 bp, Glycine max
  misc_feature (1)..(1235): Ceres Seq. ID no. 14315843
aatgcctcaaagctaaaccccaaaccatcttcttcaccttttctctctgcacacgaatatggcatcaatttgcgacaaagatatccctcttcgactacacaacatcgacgctttcatcgcttcttacagaaactccctccactcgctcagagccaccgcactcgaagccgcgcgatctcaatccgaattagccgaggttaaagctaaactgcgagaggctgaggatgaattggtaaaggcacttgcagttaagactcggagagaggcgaagcgaatggccttgaaagaggcgattgtttctgtgaagggaagaattgaggatctgaagacgagtattcagaagcagagaacccaaaacgaggaatgtgccacggttgtgtcgcatcaccgtcttgttttggaagtgtctgaacagaaatcaaatgaaagcagtgaacatagagatgaagtccaggaggccatatcttggtacaataggatccttggttttcagattgaaggtggacgtggggtaaaattcagcttcaagaatattaatgtggacaacccaaatgaggagttcttttttaccatccgccacgaagatgacgtgtatacattgctaaattgtaaaccatctgtcaaagatactgacgagttgatccatgaattaaacaacacaaatgggctatttaaatttgtcagaacaatgaggaaaaagtttcaagaagtagtggcacaaggccgtttatctatgacaacaaatgaacattaagaatctgcctttatctctgcatctggtccagttttatcaatatcaaccattactgaagataatgatcatcaagatgaacccaccaaaggtaatgcacatctccagaaacaagttaatcgaagaagggtaaaatcagcaattctatctcctggatctgcatcatctgtccgtcaatctcctcgtttgaaggtcaggaaatgaagcggtgtgggggatgctcacctgctcggtaccttattttgatgagacatgctggttcatgtagggaattaattgctaactaattgacatgtaaattaagacatacccaggttccagatgtctgaacctgtatataatagaccagaagatccctacattttttgtgtatggtccatttgatatttgtgtgtattttattttgttttttccattgctgatatactggtattgttcaataaaacatcagtcattctagtgagatatcttgtcttggcattgt

SEQ ID NO: 6056 - protein, 231 aa, Glycine max
  peptide (1)..(231): Ceres Seq. ID no. 14315844
  misc_feature (1)..(231): NCBI GI NO: 18408605 NR Description: expressed protein [Arabidopsis thaliana]
  misc_feature (1)..(231): NCBI GI NO: 21593341 NR Description: unknown [Arabidopsis thaliana]
  misc_feature (1)..(182): NCBI GI NO: 7487387 NR Description: hypothetical protein T24C20
  misc_feature (43)..(231): NCBI GI NO: 14719337 NR Description: hypothetical protein [Oryza sativa]
  misc_feature (1)..(216): NCBI GI NO: 34906038 NR Description: P0518C01.32
  misc_feature (43)..(218): NCBI GI NO: 19075708 NR Description: hypothetical protein [Schizosaccharomyces pombe]
MASICDKDIPLRLHNIDAFIASYRNSLHSLRATALEAARSQSELAEVKAKLREAEDELVKALAVKTRREAKRMALKEAIVSVKGRIEDLKTSIQKQRTQNEECATVVSHHRLVLEVSEQKSNESSEHRDEVQEAISWYNRILGFQIEGGRGVKFSFKNINVDNPNEEFFFTIRHEDDVYTLLNCKPSVKDTDELIHELNNTNGLFKFVRTMRKKFQEVVAQGRLSMTTNEH

SEQ ID NO: 6057 - protein, 159 aa, Glycine max
  peptide (1)..(159): Ceres Seq. ID no. 14315845
  misc_feature (1)..(159): NCBI GI NO: 18408605 NR Description: expressed protein [Arabidopsis thaliana]
  misc_feature (1)..(159): NCBI GI NO: 21593341 NR Description: unknown [Arabidopsis thaliana]
  misc_feature (1)..(110): NCBI GI NO: 7487387 NR Description: hypothetical protein T24C20
  misc_feature (1)..(159): NCBI GI NO: 14719337 NR Description: hypothetical protein [Oryza sativa]
  misc_feature (1)..(144): NCBI GI NO: 34906038 NR Description: P0518C01.32
  misc_feature (1)..(146): NCBI GI NO: 19075708 NR Description: hypothetical protein [Schizosaccharomyces pombe]
MALKEAIVSVKGRIEDLKTSIQKQRTQNEECATVVSHHRLVLEVSEQKSNESSEHRDEVQEAISWYNRILGFQIEGGRGVKFSFKNINVDNPNEEFFFTIRHEDDVYTLLNCKPSVKDTDELIHELNNTNGLFKFVRTMRKKFQEVVAQGRLSMTTNEH

SEQ ID NO: 6058 - DNA, 1285 bp, Glycine max
  misc_feature (1)..(1285): Ceres Seq. ID no. 14308080
gtgcagaccactgtctccccttttgctctcttcattttccattcgtagacgccaagaaccctaacaggagaatgcagtggacctggataatttgtgaggatatttaacatcgtgtacattgtgctcctttaattattttcatcagttggtgttgtgatggatggtaataatggtcttaacatacgtaattggggttactatgaacccgctacgtcgtttaagagccacctggggctgcagctgatgtcatccttgccggaaaaacctttaattggagggcgcaatgctgtggttttagctggcactgatggggcatttcaccatagggacattggtggtatgccccaagctacataccctatcgaatacatgagggatacatggattagtcagagagacaaatatatgaatatgatacctacaaaccataattatggtggtattccggagacatcttcagcacatcaaattcaaatgattcaagcaccggaattgccaaaggaagaaaagccagtggaagaagcacctgtcgtcaagaaggcaaatggaactcgtaagaaaagacaggggcccaaggttcccaaatctcccaaggctaagaagccaaagagggtgcctcgtgcgccaaaggatgagaatgctcctgcagttcaacgtgcaagggttccgaagaaaactactgaaattgtaataaatgggattgatatggatatttctcgcattccaattccagtttgttcatgcaccggggcaacgcaacagtgttataaatggggatctggtggttggcagtctgcatgttgcacaacaggcatgtcggtatatcctttgcctatgagtaccaagcggcgtggtgctaggattgctggaaggaaaatgagtataggagcatttaagaaagtgttagagaaactcgccgccgagggttataacttttctaatccgattgatttgaggacttattgggcaaaacatggcaccaacaagtttgtcaccatcaggtagatctagtctgtggccatctggcctgttatgtcttttagcctgtttgtgatgtatatacatgcgtatttggccagagacagactttttagctggtttgtagtacaacaattttcaaattcattagacatcttgttttgtcttctaactctctttgttagtatcttcactttattggatgtagtacatgggaactcatctatcggttggttggttcagattgggaactacctgatgaggtcttgttttattaatatttagtaggagaatttaattggttcac

SEQ ID NO: 6059 - protein, 282 aa, Glycine max
  peptide (1)..(282): Ceres Seq. ID no. 14308081
  misc_feature (1)..(282): NCBI GI NO: 20530716 NR Description: GAGA-binding protein [Glycine max]
  misc_feature (10)..(282): NCBI GI NO: 18394147 NR Description: expressed protein [Arabidopsis thaliana]
  misc_feature (10)..(282): NCBI GI NO: 18391534 NR Description: expressed protein [Arabidopsis thaliana]
  misc_feature (10)..(282): NCBI GI NO: 21594368 NR Description: unknown [Arabidopsis thaliana]
  misc_feature (88)..(282): NCBI GI NO: 26190436 NR Description: barley B recombinant [Hordeum vulgare]
  misc_feature (5)..(282): NCBI GI NO: 25404700 NR Description: hypothetical protein T23K23.3
  misc_feature (5)..(282): NCBI GI NO: 30697632 NR Description: expressed protein [Arabidopsis thaliana]
  misc_feature (86)..(281): NCBI GI NO: 37530544 NR Description: unknown protein
  misc_feature (5)..(282): NCBI GI NO: 37530560 NR Description: unknown protein
  misc_feature (91)..(282): NCBI GI NO: 30686452 NR Description: expressed protein [Arabidopsis thaliana]
MDGNNGLNIRNWGYYEPATSFKSHLGLQLMSSLPEKPLIGGRNAVVLAGTDGAFHHRDIGGMPQATYPIEYMRDTWISQRDKYMNMIPTNHNYGGIPETSSAHQIQMIQAPELPKEEKPVEEAPVVKKANGTRKKRQGPKVPKSPKAKKPKRVPRAPKDENAPAVQRARVPKKTTEIVINGIDMDISRIPIPVCSCTGATQQCYKWGSGGWQSACCTTGMSVYPLPMSTKRRGARIAGRKMSIGAFKKVLEKLAAEGYNFSNPIDLRTYWAKHGTNKFVTIR

SEQ ID NO: 6060 - protein, 253 aa, Glycine max
  peptide (1)..(253): Ceres Seq. ID no. 14308082
  misc_feature (1)..(253): NCBI GI NO: 20530716 NR Description: GAGA-binding protein [Glycine max]
  misc_feature (1)..(253): NCBI GI NO: 18394147 NR Description: expressed protein [Arabidopsis thaliana]
  misc_feature (1)..(253): NCBI GI NO: 18391534 NR Description: expressed protein [Arabidopsis thaliana]
  misc_feature (1)..(253): NCBI GI NO: 21594368 NR Description: unknown [Arabidopsis thaliana]
  misc_feature (59)..(253): NCBI GI NO: 26190436 NR Description: barley B recombinant [Hordeum vulgare]
  misc_feature (1)..(253): NCBI GI NO: 25404700 NR Description: hypothetical protein T23K23.3
  misc_feature (1)..(253): NCBI GI NO: 30697632 NR Description: expressed protein [Arabidopsis thaliana]
  misc_feature (57)..(252): NCBI GI NO: 37530544 NR Description: unknown protein
  misc_feature (1)..(253): NCBI GI NO: 37530560 NR Description: unknown protein
  misc_feature (62)..(253): NCBI GI NO: 30686452 NR Description: expressed protein [Arabidopsis thaliana]
MSSLPEKPLIGGRNAVVLAGTDGAFHHRDIGGMPQATYPIEYMRDTWISQRDKYMNMIPTNHNYGGIPETSSAHQIQMIQAPELPKEEKPVEEAPVVKKANGTRKKRQGPKVPKSPKAKKPKRVPRAPKDENAPAVQRARVPKKTTEIVINGIDMDISRIPIPVCSCTGATQQCYKWGSGGWQSACCTTGMSVYPLPMSTKRRGARIAGRKMSIGAFKKVLEKLAAEGYNFSNPIDLRTYWAKHGTNKFVTIR

SEQ ID NO: 6061 - protein, 221 aa, Glycine max
  peptide (1)..(221): Ceres Seq. ID no. 14308083
  misc_feature (1)..(221): NCBI GI NO: 20530716 NR Description: GAGA-binding protein [Glycine max]
  misc_feature (1)..(221): NCBI GI NO: 18394147 NR Description: expressed protein [Arabidopsis thaliana]
  misc_feature (1)..(221): NCBI GI NO: 18391534 NR Description: expressed protein [Arabidopsis thaliana]
  misc_feature (1)..(221): NCBI GI NO: 21594368 NR Description: unknown [Arabidopsis thaliana]
  misc_feature (27)..(221): NCBI GI NO: 26190436 NR Description: barley B recombinant [Hordeum vulgare]
  misc_feature (1)..(221): NCBI GI NO: 25404700 NR Description: hypothetical protein T23K23.3
  misc_feature (1)..(221): NCBI GI NO: 30697632 NR Description: expressed protein [Arabidopsis thaliana]
  misc_feature (25)..(220): NCBI GI NO: 37530544 NR Description: unknown protein
  misc_feature (1)..(221): NCBI GI NO: 37530560 NR Description: unknown protein
  misc_feature (30)..(221): NCBI GI NO: 30686452 NR Description: expressed protein [Arabidopsis thaliana]
MPQATYPIEYMRDTWISQRDKYMNMIPTNHNYGGIPETSSAHQIQMIQAPELPKEEKPVEEAPVVKKANGTRKKRQGPKVPKSPKAKKPKRVPRAPKDENAPAVQRARVPKKTTEIVINGIDMDISRIPIPVCSCTGATQQCYKWGSGGWQSACCTTGMSVYPLPMSTKRRGARIAGRKMSIGAFKKVLEKLAAEGYNFSNPIDLRTYWAKHGTNKFVTIR

SEQ ID NO: 6062 - DNA, 1829 bp, Glycine max
  misc_feature (1)..(1829): Ceres Seq. ID no. 15225341
tcagctacgtaggccccccccccttatttatacggtaaacaaaacacaacacaccaaacatcattcgaccatacacattgctgttcaccattttcaattttctaagtggtttggcttggtttgacatacataaacctttcaagatctcagaggggcagaagatcaaagccaagacatcctctcgtatataaagagtgtctctgatttgatctttgtttcttctctttctctcgtttgagatttttcagtactccaccaaggttttgtcagaaaagcttgaatttttcgcctaccctttacaatgatctcttcgttgagacagcctgttgtagggatcagtggttctgatcttcttttgaggcaaagacatgcaactccaattaaggcaaggtcgtttttaccctctttgtcaagagaaaagggtcaaggatctcttgtttcagttcaaaagccactccacattggtgcttctcttggtgttggaaattttgtgtcagtgaagagtgatgctaaaaggggtgatttggtgaagtgtgaggcctatgaggcagacagatcagaggttgagggtgcaagcacaccgtcagaggctgcaaagaaggtaaaaattgggatatattttgcaacctggtgggctctgaatgtggtgttcaatatttataacaagaaggttctgaatgcctacccttacccttggcttacttcaactctctcacttgcatgtgggtctcttatgatgttgatctcttgggccactgggattgcagaagcccccaagactgatcctgagttttggaagtctttgttccctgttgctgttgcacatacaataggacatgtagcggcaacagttagtatgtcaaaagttgcggtatcgtttacacatattatcaagagtggtgaacctgcttttagtgttctggtttcaagatttcttttgggtgagagcttccctgtgcctgtctatctgtctttaattccaatcattggtggatgtgcacttgctgctgtgactgagctcaatttcaatatgatcggttttatgggagctatgatatcgaatttggcatttgtattccgtaatatcttttccaaaaagggcatgaagggaaagtctgtcagtggaatgaattactatgcttgtttatctattttgtcccttgcaattctcacacccttcgcaattgctgtggaaggaccacagatgtgggctgctggatggcaaacagctatgtctcaaattggaccccaattcatatggtgggtagctgctcaaagtgtattctatcatctatacaatcaagtgtcgtacatgtctctggatcagatctctcccttgacgtttagcattggaaacaccatgaaacgtatatctgtcattgtgtcttccattattatcttccacacaccagttcaacccatcaatgctcttggtgctgccattgctatccttggaaccttcttgtattcacaggcgaaacaatagagttggggaactaagattcctctagggacttgtttgttactgttcttcatgctcaaccacggacaaggaagttgattttgtaatgtgtcactgctggaattttgtaatactaggatgatctggctgtcagtccatctgtagatataataataagaataatgctgctgaggaaacgttatcataatacagatgattaggtttttttttttttttttgaatttctgaaatgccaatgatttgaaataaatgccttttgtttatatagtatgagaagaatttctcaagacattgtttactataaggagcttgcaataaagtgatgcctatgatcaatttgatgctc

SEQ ID NO: 6063 - protein, 394 aa, Glycine max
  peptide (1)..(394): Ceres Seq. ID no. 15225342
  misc_feature (112)..(237): Pfam Name: Pfam Description:  Integral membrane protein DUF6
  misc_feature (1)..(394): NCBI GI NO: 7488807 NR Description: glucose-6-phosphate/ phosphate-translocatorprecursor
  misc_feature (37)..(393): NCBI GI NO: 18423670 NR Description: glucose-6-phosphate/phosphate translocator
  misc_feature (12)..(394): NCBI GI NO: 18407336 NR Description: glucose-6-phosphate/phosphate-translocator
  misc_feature (37)..(393): NCBI GI NO: 21554690 NR Description: glucose-6-phosphate/phosphate translocator
  misc_feature (37)..(391): NCBI GI NO: 9758260 NR Description: glucose-6-phosphate/phosphate translocator
  misc_feature (1)..(394): NCBI GI NO: 9295277 NR Description: glucose-6P/phosphate translocator precursor
  misc_feature (12)..(394): NCBI GI NO: 14596173 NR Description: Similar to glucose-6-phosphate/phosphate-translocator
  misc_feature (12)..(394): NCBI GI NO: 7484980 NR Description: glucose-6-phosphate/ phosphate translocatorprecursor
  misc_feature (25)..(394): NCBI GI NO: 38637068 NR Description: glucose-6-phosphate/phosphate translocator
  misc_feature (25)..(394): NCBI GI NO: 14150753 NR Description: glucose-6-phosphate/phosphate translocator
MISSLRQPVVGISGSDLLLRQRHATPIKARSFLPSLSREKGQGSLVSVQKPLHIGASLGVGNFVSVKSDAKRGDLVKCEAYEADRSEVEGASTPSEAAKKVKIGIYFATWWALNVVFNIYNKKVLNAYPYPWLTSTLSLACGSLMMLISWATGIAEAPKTDPEFWKSLFPVAVAHTIGHVAATVSMSKVAVSFTHIIKSGEPAFSVLVSRFLLGESFPVPVYLSLIPIIGGCALAAVTELNFNMIGFMGAMISNLAFVFRNIFSKKGMKGKSVSGMNYYACLSILSLAILTPFAIAVEGPQMWAAGWQTAMSQIGPQFIWWVAAQSVFYHLYNQVSYMSLDQISPLTFSIGNTMKRISVIVSSIIIFHTPVQPINALGAAIAILGTFLYSQAKQ

SEQ ID NO: 6064 - protein, 250 aa, Glycine max
  peptide (1)..(250): Ceres Seq. ID no. 15225343
  misc_feature (1)..(93): Pfam Name: Pfam Description:  Integral membrane protein DUF6
  misc_feature (1)..(250): NCBI GI NO: 7488807 NR Description: glucose-6-phosphate/ phosphate-translocatorprecursor
  misc_feature (1)..(249): NCBI GI NO: 18423670 NR Description: glucose-6-phosphate/phosphate translocator
  misc_feature (1)..(250): NCBI GI NO: 18407336 NR Description: glucose-6-phosphate/phosphate-translocator
  misc_feature (1)..(249): NCBI GI NO: 21554690 NR Description: glucose-6-phosphate/phosphate translocator
  misc_feature (1)..(247): NCBI GI NO: 9758260 NR Description: glucose-6-phosphate/phosphate translocator
  misc_feature (1)..(250): NCBI GI NO: 9295277 NR Description: glucose-6P/phosphate translocator precursor
  misc_feature (1)..(250): NCBI GI NO: 14596173 NR Description: Similar to glucose-6-phosphate/phosphate-translocator
  misc_feature (1)..(250): NCBI GI NO: 7484980 NR Description: glucose-6-phosphate/ phosphate translocatorprecursor
  misc_feature (1)..(250): NCBI GI NO: 38637068 NR Description: glucose-6-phosphate/phosphate translocator
  misc_feature (1)..(250): NCBI GI NO: 14150753 NR Description: glucose-6-phosphate/phosphate translocator
MMLISWATGIAEAPKTDPEFWKSLFPVAVAHTIGHVAATVSMSKVAVSFTHIIKSGEPAFSVLVSRFLLGESFPVPVYLSLIPIIGGCALAAVTELNFNMIGFMGAMISNLAFVFRNIFSKKGMKGKSVSGMNYYACLSILSLAILTPFAIAVEGPQMWAAGWQTAMSQIGPQFIWWVAAQSVFYHLYNQVSYMSLDQISPLTFSIGNTMKRISVIVSSIIIFHTPVQPINALGAAIAILGTFLYSQAKQ

SEQ ID NO: 6065 - protein, 249 aa, Glycine max
  peptide (1)..(249): Ceres Seq. ID no. 15225344
  misc_feature (1)..(92): Pfam Name: Pfam Description:  Integral membrane protein DUF6
  misc_feature (1)..(249): NCBI GI NO: 7488807 NR Description: glucose-6-phosphate/ phosphate-translocatorprecursor
  misc_feature (1)..(248): NCBI GI NO: 18423670 NR Description: glucose-6-phosphate/phosphate translocator
  misc_feature (1)..(249): NCBI GI NO: 18407336 NR Description: glucose-6-phosphate/phosphate-translocator
  misc_feature (1)..(248): NCBI GI NO: 21554690 NR Description: glucose-6-phosphate/phosphate translocator
  misc_feature (1)..(246): NCBI GI NO: 9758260 NR Description: glucose-6-phosphate/phosphate translocator
  misc_feature (1)..(249): NCBI GI NO: 9295277 NR Description: glucose-6P/phosphate translocator precursor
  misc_feature (1)..(249): NCBI GI NO: 14596173 NR Description: Similar to glucose-6-phosphate/phosphate-translocator
  misc_feature (1)..(249): NCBI GI NO: 7484980 NR Description: glucose-6-phosphate/ phosphate translocatorprecursor
  misc_feature (1)..(249): NCBI GI NO: 38637068 NR Description: glucose-6-phosphate/phosphate translocator
  misc_feature (1)..(249): NCBI GI NO: 14150753 NR Description: glucose-6-phosphate/phosphate translocator
MLISWATGIAEAPKTDPEFWKSLFPVAVAHTIGHVAATVSMSKVAVSFTHIIKSGEPAFSVLVSRFLLGESFPVPVYLSLIPIIGGCALAAVTELNFNMIGFMGAMISNLAFVFRNIFSKKGMKGKSVSGMNYYACLSILSLAILTPFAIAVEGPQMWAAGWQTAMSQIGPQFIWWVAAQSVFYHLYNQVSYMSLDQISPLTFSIGNTMKRISVIVSSIIIFHTPVQPINALGAAIAILGTFLYSQAKQ

SEQ ID NO: 6066 - DNA, 1503 bp, Glycine max
  misc_feature (1)..(1503): Ceres Seq. ID no. 14308389
gcaggaagcacataagatccaagccatttacaaaaatggtaaccattaaagcatcttacacagtccttccaaatgaaccaactccggagggccttttatggctatctgatattgatcaagtggcacgtctacgccacacacccaccatctacattttccatgcaaaacacaaccatgatacattaattgagaggatgagaaactctcttagcaagattttggttcactactatccaatagccggtcgattgagaaggatagaaggtagtggtcgattggaattggattgcaatgcaaaaggggtggtgttgcttgaagctgaatccacaaaaacattggatgattatggagactttttacgtgagtccatcaaggacttggttccaacggttgattacacaagccctatagaggaacttccctcgctactagttcaagtaacaacattccatggtggtaaatcctttgccattggagttgccttatgccatatcttgtgtgatggggttggtgccattcagtttatcaactcttgggcaaagttagctcgaggagacacattggagccacatgagatgccatttctggatcgaacagtgctcaagttcccacaccctctgtcgccgccgcgctttgatcacctggagttcaagcctttgccacttatattgggaagatctgacaacacagtagagaaaaacaagaaggttgatgccaccttgctgaagctaacaccagaacaagtggggaagctgaagaagaaggccaatgatgactcaacaaaagaagggtcaagaccttatagcagatttgaagctattgctgcacatatatggagatgtgcctctaaggctcgtaaactagataagaatcaaccaactctagttcggttcaatgccgatattcgcaatagactaattccacctctccctaagaattattttgggaatgctttgtccttaacaacagcatcatgtcacgttggagatgtcatatcaaattctttgagttatgctgctcagaagataagggaagcaattgaagtggttacatatgagtatatatggtcacagatagatgtgattagaggtcaggagcaactggataatgcaagggctttgttctttggacaaaatgaaggaaaggatgccttgttttatgggaaccctaaccttcttattacaagttggatgagcatgccaatgcacgaagcagattttggctggggaaagcctgtgtatttaggtctaggaagtgtatctacacaagatagggcactgattattcaaagccctgatggtgacggctctattattctgtccatacactttcagatggaacatatgcagcttttcaagaaatatttttatgaagatatgtgaactatattcacatcgctactatcttgaacttcttgtatgggagcttaatttacgtgtgatctgcaatttctcatgtttaataaatttagttaaccatgtgggttaactataagcttgaatg

SEQ ID NO: 6067 - protein, 459 aa, Glycine max
  peptide (1)..(459): Ceres Seq. ID no. 14308390
  misc_feature (13)..(458): Pfam Name: Pfam Description:  Transferase family
  misc_feature (13)..(459): NCBI GI NO: 15224709 NR Description: hydroxycinnamoyl/benzoyltransferase family
  misc_feature (13)..(457): NCBI GI NO: 27475616 NR Description: hydroxycinnamoyl transferase [Nicotiana tabacum]
  misc_feature (13)..(457): NCBI GI NO: 6469032 NR Description: N-hydroxycinnamoyl/benzoyltransferase
  misc_feature (13)..(457): NCBI GI NO: 38345030 NR Description: OSJNBa0029H02.14
  misc_feature (13)..(457): NCBI GI NO: 32400293 NR Description: hydroxyanthranilate hydroxycinnamoyltransferase 2
  misc_feature (13)..(457): NCBI GI NO: 32400295 NR Description: hydroxyanthranilate hydroxycinnamoyltransferase 3
  misc_feature (13)..(457): NCBI GI NO: 32400291 NR Description: hydroxyanthranilate hydroxycinnamoyltransferase 1
  misc_feature (13)..(457): NCBI GI NO: 15239747 NR Description: anthranilate N-hydroxycinnamoyl/ benzoyltransferasefamily
  misc_feature (13)..(457): NCBI GI NO: 21536883 NR Description: anthranilate N-benzoyltransferase
  misc_feature (13)..(457): NCBI GI NO: 40644899 NR Description: hydroxycinnamoyl CoA quinate transferase
RKHIRSKPFTKMVTIKASYTVLPNEPTPEGLLWLSDIDQVARLRHTPTIYIFHAKHNHDTLIERMRNSLSKILVHYYPIAGRLRRIEGSGRLELDCNAKGVVLLEAESTKTLDDYGDFLRESIKDLVPTVDYTSPIEELPSLLVQVTTFHGGKSFAIGVALCHILCDGVGAIQFINSWAKLARGDTLEPHEMPFLDRTVLKFPHPLSPPRFDHLEFKPLPLILGRSDNTVEKNKKVDATLLKLTPEQVGKLKKKANDDSTKEGSRPYSRFEAIAAHIWRCASKARKLDKNQPTLVRFNADIRNRLIPPLPKNYFGNALSLTTASCHVGDVISNSLSYAAQKIREAIEVVTYEYIWSQIDVIRGQEQLDNARALFFGQNEGKDALFYGNPNLLITSWMSMPMHEADFGWGKPVYLGLGSVSTQDRALIIQSPDGDGSIILSIHFQMEHMQLFKKYFYEDM

SEQ ID NO: 6068 - protein, 448 aa, Glycine max
  peptide (1)..(448): Ceres Seq. ID no. 14308391
  misc_feature (2)..(447): Pfam Name: Pfam Description:  Transferase family
  misc_feature (2)..(448): NCBI GI NO: 15224709 NR Description: hydroxycinnamoyl/benzoyltransferase family
  misc_feature (2)..(446): NCBI GI NO: 27475616 NR Description: hydroxycinnamoyl transferase [Nicotiana tabacum]
  misc_feature (2)..(446): NCBI GI NO: 6469032 NR Description: N-hydroxycinnamoyl/benzoyltransferase
  misc_feature (2)..(446): NCBI GI NO: 38345030 NR Description: OSJNBa0029H02.14
  misc_feature (2)..(446): NCBI GI NO: 32400293 NR Description: hydroxyanthranilate hydroxycinnamoyltransferase 2
  misc_feature (2)..(446): NCBI GI NO: 32400295 NR Description: hydroxyanthranilate hydroxycinnamoyltransferase 3
  misc_feature (2)..(446): NCBI GI NO: 32400291 NR Description: hydroxyanthranilate hydroxycinnamoyltransferase 1
  misc_feature (2)..(446): NCBI GI NO: 15239747 NR Description: anthranilate N-hydroxycinnamoyl/ benzoyltransferasefamily
  misc_feature (2)..(446): NCBI GI NO: 21536883 NR Description: anthranilate N-benzoyltransferase
  misc_feature (2)..(446): NCBI GI NO: 40644899 NR Description: hydroxycinnamoyl CoA quinate transferase
MVTIKASYTVLPNEPTPEGLLWLSDIDQVARLRHTPTIYIFHAKHNHDTLIERMRNSLSKILVHYYPIAGRLRRIEGSGRLELDCNAKGVVLLEAESTKTLDDYGDFLRESIKDLVPTVDYTSPIEELPSLLVQVTTFHGGKSFAIGVALCHILCDGVGAIQFINSWAKLARGDTLEPHEMPFLDRTVLKFPHPLSPPRFDHLEFKPLPLILGRSDNTVEKNKKVDATLLKLTPEQVGKLKKKANDDSTKEGSRPYSRFEAIAAHIWRCASKARKLDKNQPTLVRFNADIRNRLIPPLPKNYFGNALSLTTASCHVGDVISNSLSYAAQKIREAIEVVTYEYIWSQIDVIRGQEQLDNARALFFGQNEGKDALFYGNPNLLITSWMSMPMHEADFGWGKPVYLGLGSVSTQDRALIIQSPDGDGSIILSIHFQMEHMQLFKKYFYEDM

SEQ ID NO: 6069 - protein, 395 aa, Glycine max
  peptide (1)..(395): Ceres Seq. ID no. 14308392
  misc_feature (1)..(394): Pfam Name: Pfam Description:  Transferase family
  misc_feature (1)..(395): NCBI GI NO: 15224709 NR Description: hydroxycinnamoyl/benzoyltransferase family
  misc_feature (1)..(393): NCBI GI NO: 27475616 NR Description: hydroxycinnamoyl transferase [Nicotiana tabacum]
  misc_feature (1)..(393): NCBI GI NO: 6469032 NR Description: N-hydroxycinnamoyl/benzoyltransferase
  misc_feature (1)..(393): NCBI GI NO: 38345030 NR Description: OSJNBa0029H02.14
  misc_feature (1)..(393): NCBI GI NO: 32400293 NR Description: hydroxyanthranilate hydroxycinnamoyltransferase 2
  misc_feature (1)..(393): NCBI GI NO: 32400295 NR Description: hydroxyanthranilate hydroxycinnamoyltransferase 3
  misc_feature (1)..(393): NCBI GI NO: 32400291 NR Description: hydroxyanthranilate hydroxycinnamoyltransferase 1
  misc_feature (1)..(393): NCBI GI NO: 15239747 NR Description: anthranilate N-hydroxycinnamoyl/ benzoyltransferasefamily
  misc_feature (1)..(393): NCBI GI NO: 21536883 NR Description: anthranilate N-benzoyltransferase
  misc_feature (1)..(393): NCBI GI NO: 40644899 NR Description: hydroxycinnamoyl CoA quinate transferase
MRNSLSKILVHYYPIAGRLRRIEGSGRLELDCNAKGVVLLEAESTKTLDDYGDFLRESIKDLVPTVDYTSPIEELPSLLVQVTTFHGGKSFAIGVALCHILCDGVGAIQFINSWAKLARGDTLEPHEMPFLDRTVLKFPHPLSPPRFDHLEFKPLPLILGRSDNTVEKNKKVDATLLKLTPEQVGKLKKKANDDSTKEGSRPYSRFEAIAAHIWRCASKARKLDKNQPTLVRFNADIRNRLIPPLPKNYFGNALSLTTASCHVGDVISNSLSYAAQKIREAIEVVTYEYIWSQIDVIRGQEQLDNARALFFGQNEGKDALFYGNPNLLITSWMSMPMHEADFGWGKPVYLGLGSVSTQDRALIIQSPDGDGSIILSIHFQMEHMQLFKKYFYEDM

SEQ ID NO: 6070 - DNA, 1478 bp, Glycine max
  misc_feature (1)..(1478): Ceres Seq. ID no. 13518411
cagctacgtaggccccccccccagatttgaatttatttaagagagaatcgtatgttgtggaattgggactattaagtaaggttccacatgcaagattggtcccaatcctgggccactgcttggacaatgaaaatgagaaattcatagtttacaagtacatgccaaatcgagatttagctacttccttgcacagagtcaccggttcagatggtaaattacagtccctggattggatcacgagattgaaaattgcaataggagctgctgaaggcatagcttacctacatgagtgcagccctccccttgtccacagagatatccaagctagcagtatactacttgatgataaatttgaagtgcgacttggaagtttgagtgaggttactgcccaaggagatcttcaacaaggagtcatctcaagggttttcagcaagccaccatcttccaatcaagcagattctggtaaatcatcagtgacatgtgcctatgatatctactgttttggcaagattttacttgagctcattaccggtaacattgaagtcagcaagttagatgatgcctctacaaaggagtggttagagcaaaccttgccttacatcactatatacgataaagaacgggtgactaagattattgacccatcattgatcgtggatgaggacctgttggaagaggtatgggctatggcaattgtggccaatgcatgcttgaatcccaagccttccaaacgccctcctatgaggcatgtcctgaaagcattggaaaatccattgaagattgtgagagaagaaaatactagctcagcaaggttgagatcaaactcttctaggaaatcttggagcactgcattctttggtagctggagacacagctcatcagacagtgttgttgccacaaacaaagagggttctagtgacactaaaaaatcaggaaaagtaggttctcaaagtagtggaaacgatcactcttcttccaataaaagatcgtccaatgaaattttccccgaaccattggaaatactagatgtggagacaggagtggcaagataagcacttgtgaaatggatttggttattctttagtctgtgaggttttttttttaccactttctcagataactggtggtgccatagcaattgcttgttattagcacatcaaactcactacccagcatccattatggtccgtattgaagcaatggaaaaccttaatactgctagtgatagcttttgctttccaaagctcagattaagcagtacagattgaaatgtctggtatgagaactccgaaaaaaactgaataattttactcattcaatagattgtttgaaacacacagccctcccctaggttaaaagttgtgtgacaaaatgtaaaataatgagagggttttcatttttacgagtaattgtaggtgggaaaaacgttgttactcactcgaggttttctttggtaggttatatgtatttagcattgt

SEQ ID NO: 6071 - protein, 297 aa, Glycine max
  peptide (1)..(297): Ceres Seq. ID no. 13518412
  misc_feature (1)..(285): NCBI GI NO: 15226721 NR Description: leucine-rich repeat transmembrane protein kinase
  misc_feature (1)..(288): NCBI GI NO: 34915200 NR Description: putative  receptor-like protein kinase
  misc_feature (1)..(285): NCBI GI NO: 34394416 NR Description: putative Systemin receptor SR160 precursor
  misc_feature (1)..(281): NCBI GI NO: 15235005 NR Description: leucine-rich repeat transmembrane protein kinase
  misc_feature (1)..(281): NCBI GI NO: 20466770 NR Description: receptor protein kinase-like protein
  misc_feature (1)..(279): NCBI GI NO: 15218591 NR Description: protein kinase family [Arabidopsis thaliana]
  misc_feature (1)..(280): NCBI GI NO: 29367569 NR Description: putative receptor protein kinase
  misc_feature (1)..(233): NCBI GI NO: 15221470 NR Description: protein kinase family [Arabidopsis thaliana]
  misc_feature (1)..(274): NCBI GI NO: 22329101 NR Description: protein kinase family [Arabidopsis thaliana]
  misc_feature (1)..(283): NCBI GI NO: 15240947 NR Description: protein kinase family [Arabidopsis thaliana]
MPNRDLATSLHRVTGSDGKLQSLDWITRLKIAIGAAEGIAYLHECSPPLVHRDIQASSILLDDKFEVRLGSLSEVTAQGDLQQGVISRVFSKPPSSNQADSGKSSVTCAYDIYCFGKILLELITGNIEVSKLDDASTKEWLEQTLPYITIYDKERVTKIIDPSLIVDEDLLEEVWAMAIVANACLNPKPSKRPPMRHVLKALENPLKIVREENTSSARLRSNSSRKSWSTAFFGSWRHSSSDSVVATNKEGSSDTKKSGKVGSQSSGNDHSSSNKRSSNEIFPEPLEILDVETGVAR

SEQ ID NO: 6072 - DNA, 1228 bp, Glycine max
  misc_feature (1)..(1228): Ceres Seq. ID no. 14316302
tttaagttgaacatgatggaatggccgtctttctcttttgggtatcttcccaaatcaggaaacactttctcatcttccctttcccagtttcacaccctacctcatggaaggctctgtcaacgaacgtcttcattttgggaagattggatatggatgcaatcattacaggagaagatgcaggattcgtgctccctgctgcaacgagatctactcatgccgtcactgtcataacgaggccgcgagcttgttgaagaatccctttgatcgccacgagctcgttcgccaagatgttaaacaagttatttgttcagtttgtgacactgagcaacctgttgctcaagtttgcacaaactgtggcgtcaaaatgggagaatatttctgcaacatctgcaaattcttcgatgatgatgttgagaaagaacagtttcactgtgatgattgtgggatctgcagggttggtggtcgagataattttttccactgcaagaagtgcgggtcttgttatgcagttggtctgcatgataatcatttatgtgtggagaactccatgaggcatcactgtcccatttgttacgagtacctttttgattcattgaaagatgtcattgttatgaaatgtggtcacacaatgcaccatgaatgttacctggagatgataaaaaatgacaaatattgttgtcccatatgctccaagtcagtgattgacatgtctaagacatggaagagaattgatgaagagattgaagcaaccgtcatgcctcaagattatcgaaacaggaaggtttggatactatgtaatgactgcaatgacacaacagaagtttacttccacattcttggccaaaaatgtggtcactgcagatcatataatacccgcacagttgcacctccagttcttccccaatgaccagatctcttgggttcaagaagggaacactgtcagcagaaagttaaagttagcaccctgttattactatggagggttattgaattaattgagcatcaaaagtgattggtgtattgtgtcctagatagttttcttaggttattcttcctccaacatatggagtgggattgttgtctcttggttatttattgggcaggtataaacatctttatactgtaatagagggaaaacatttttcccgtcatgaattgctggtaatagtgatgcattgatacttgatgattgattgcattgtcggccatagtggttttctataaaaag

SEQ ID NO: 6073 - protein, 267 aa, Glycine max
  peptide (1)..(267): Ceres Seq. ID no. 14316303
  misc_feature (18)..(100): Pfam Name: Pfam Description:  CHY zinc finger
  misc_feature (1)..(267): NCBI GI NO: 15238890 NR Description: expressed protein [Arabidopsis thaliana]
  misc_feature (2)..(266): NCBI GI NO: 30102616 NR Description: At3g62970 [Arabidopsis thaliana]
  misc_feature (2)..(266): NCBI GI NO: 30695702 NR Description: expressed protein [Arabidopsis thaliana]
  misc_feature (2)..(266): NCBI GI NO: 11358168 NR Description: hypothetical protein T20O10
  misc_feature (9)..(258): NCBI GI NO: 15237169 NR Description: PGPD14 protein [Arabidopsis thaliana]
  misc_feature (9)..(258): NCBI GI NO: 21593716 NR Description: PGPD14 protein [Arabidopsis thaliana]
  misc_feature (12)..(258): NCBI GI NO: 4105798 NR Description: PGPD14 [Petunia x hybrida]
  misc_feature (7)..(260): NCBI GI NO: 34910658 NR Description: putative PGPD14 protein
  misc_feature (16)..(258): NCBI GI NO: 37535002 NR Description: putative PGPD14 protein
  misc_feature (17)..(257): NCBI GI NO: 24308061 NR Description: zinc finger protein 363
MEGSVNERLHFGKIGYGCNHYRRRCRIRAPCCNEIYSCRHCHNEAASLLKNPFDRHELVRQDVKQVICSVCDTEQPVAQVCTNCGVKMGEYFCNICKFFDDDVEKEQFHCDDCGICRVGGRDNFFHCKKCGSCYAVGLHDNHLCVENSMRHHCPICYEYLFDSLKDVIVMKCGHTMHHECYLEMIKNDKYCCPICSKSVIDMSKTWKRIDEEIEATVMPQDYRNRKVWILCNDCNDTTEVYFHILGQKCGHCRSYNTRTVAPPVLPQ

SEQ ID NO: 6074 - protein, 180 aa, Glycine max
  peptide (1)..(180): Ceres Seq. ID no. 14316304
  misc_feature (66)..(108): Pfam Name: RING finger Pfam Description: Zinc finger, C3HC4 type
  misc_feature (1)..(180): NCBI GI NO: 15238890 NR Description: expressed protein [Arabidopsis thaliana]
  misc_feature (1)..(179): NCBI GI NO: 30102616 NR Description: At3g62970 [Arabidopsis thaliana]
  misc_feature (1)..(179): NCBI GI NO: 30695702 NR Description: expressed protein [Arabidopsis thaliana]
  misc_feature (1)..(179): NCBI GI NO: 11358168 NR Description: hypothetical protein T20O10
  misc_feature (1)..(171): NCBI GI NO: 15237169 NR Description: PGPD14 protein [Arabidopsis thaliana]
  misc_feature (1)..(171): NCBI GI NO: 21593716 NR Description: PGPD14 protein [Arabidopsis thaliana]
  misc_feature (1)..(171): NCBI GI NO: 4105798 NR Description: PGPD14 [Petunia x hybrida]
  misc_feature (1)..(173): NCBI GI NO: 34910658 NR Description: putative PGPD14 protein
  misc_feature (1)..(171): NCBI GI NO: 37535002 NR Description: putative PGPD14 protein
  misc_feature (1)..(170): NCBI GI NO: 24308061 NR Description: zinc finger protein 363
MGEYFCNICKFFDDDVEKEQFHCDDCGICRVGGRDNFFHCKKCGSCYAVGLHDNHLCVENSMRHHCPICYEYLFDSLKDVIVMKCGHTMHHECYLEMIKNDKYCCPICSKSVIDMSKTWKRIDEEIEATVMPQDYRNRKVWILCNDCNDTTEVYFHILGQKCGHCRSYNTRTVAPPVLPQ

SEQ ID NO: 6075 - DNA, 1504 bp, Glycine max
  misc_feature (1)..(1504): Ceres Seq. ID no. 14310764
gacaccatttcgttcgttctatatgcttcctcttcaacccttcttctttccatcatctcccaccactttcacgctgctctggaatttacaacactaactcacataaaaccaaagttaaatgatgaatttcattgtaaattttcaattgaaatctgttgtggaaatttcctttgttcattgagattttttcgaggtgcagaagatttcccagttttgaagatatatttctcttcagacgggttttgaaactctgaactttttgcaagtcgtacgtgacaaggacgatcgctacttggccatcgtcgcagacagaagctcagaaatgtgattagtagttgagttttcggcatagatttgcattttccatagctctggaactgaaatctggataattttccaggtttcctacagctttgaacaaagttttagcaggagcagacttaggagatagaaaaatcagctccttttccccttagtttcagaaggaattgattgctcgacgattgctacttttttaaggaacgggttcaagagatggagaacgagtcaattattcagagcaataacaatacgaacacaatgtctagtgttagagaaaaaaacggaggggatgggtcgttgctgttgagggcgaattccgatagcgctaggcaagcaacgacgtcggatttggtgttgcagtgggggaatcggaagcggctaaggtgcatgaaggtgcaggttaaggacgattcttccggtccggttcagaggactacggttcgggtggatcgccgggtcgttagaaccgacaaggattctttaaataagctcactttcggtgtcaataataataatcatcatcatcagagtaacgggtatccgaatctccgtcaacgtccatcttcgccgcaaccacgaattctcaggaactcagaaagttcaagtgccatgagaggaggacaaagcaacgggggcgttagtgttaggggaattgcctcaccggacaggggtgcgcatgataagagagggacccataatgacaataacaagtccgcggcctcatcggatactgcgcacgatagcaagaagggagggtcgccgtccggcagcggagatgcggctgctccgccggtgtggccacccaagttcgtgattgccttgaccaacaaggagaaggaagaagattttctcgccattaagggctcaaagctgcctcagagacccaagaagagagctaaattcattcaacgaaccctcaatctcgttagtcctggcgcatggttgtgcgatcttaccttggaacgatacgaggttagggagaagaagatatccaaaaagcagagaccaagaggtttgaaagcaatgggaaacatggactcggactctgaatagagaatgagtgaaggtgctaagtaagctttatgtttgctaaggatgtgtaggaaatgcatggcatggcatctcagctaggtgccaacgaatccaaatcgaaatacaaaatattttagctttgccgctgctt

SEQ ID NO: 6076 - protein, 279 aa, Glycine max
  peptide (1)..(279): Ceres Seq. ID no. 14310765
  misc_feature (194)..(279): NCBI GI NO: 30695924 NR Description: expressed protein [Arabidopsis thaliana]
  misc_feature (42)..(83): NCBI GI NO: 30695924 NR Description: expressed protein [Arabidopsis thaliana]
  misc_feature (123)..(279): NCBI GI NO: 30678969 NR Description: expressed protein [Arabidopsis thaliana]
  misc_feature (45)..(64): NCBI GI NO: 30678969 NR Description: expressed protein [Arabidopsis thaliana]
  misc_feature (197)..(279): NCBI GI NO: 30103017 NR Description: unknown protein
  misc_feature (34)..(87): NCBI GI NO: 30103017 NR Description: unknown protein
  misc_feature (194)..(264): NCBI GI NO: 25405821 NR Description: unknown protein, 25817-24837
  misc_feature (42)..(83): NCBI GI NO: 25405821 NR Description: unknown protein, 25817-24837
  misc_feature (123)..(235): NCBI GI NO: 6006854 NR Description: hypothetical protein [Arabidopsis thaliana]
  misc_feature (237)..(279): NCBI GI NO: 6006854 NR Description: hypothetical protein [Arabidopsis thaliana]
MENESIIQSNNNTNTMSSVREKNGGDGSLLLRANSDSARQATTSDLVLQWGNRKRLRCMKVQVKDDSSGPVQRTTVRVDRRVVRTDKDSLNKLTFGVNNNNHHHQSNGYPNLRQRPSSPQPRILRNSESSSAMRGGQSNGGVSVRGIASPDRGAHDKRGTHNDNNKSAASSDTAHDSKKGGSPSGSGDAAAPPVWPPKFVIALTNKEKEEDFLAIKGSKLPQRPKKRAKFIQRTLNLVSPGAWLCDLTLERYEVREKKISKKQRPRGLKAMGNMDSDSE

SEQ ID NO: 6077 - protein, 264 aa, Glycine max
  peptide (1)..(264): Ceres Seq. ID no. 14310766
  misc_feature (179)..(264): NCBI GI NO: 30695924 NR Description: expressed protein [Arabidopsis thaliana]
  misc_feature (27)..(68): NCBI GI NO: 30695924 NR Description: expressed protein [Arabidopsis thaliana]
  misc_feature (108)..(264): NCBI GI NO: 30678969 NR Description: expressed protein [Arabidopsis thaliana]
  misc_feature (30)..(49): NCBI GI NO: 30678969 NR Description: expressed protein [Arabidopsis thaliana]
  misc_feature (182)..(264): NCBI GI NO: 30103017 NR Description: unknown protein
  misc_feature (19)..(72): NCBI GI NO: 30103017 NR Description: unknown protein
  misc_feature (179)..(249): NCBI GI NO: 25405821 NR Description: unknown protein, 25817-24837
  misc_feature (27)..(68): NCBI GI NO: 25405821 NR Description: unknown protein, 25817-24837
  misc_feature (108)..(220): NCBI GI NO: 6006854 NR Description: hypothetical protein [Arabidopsis thaliana]
  misc_feature (222)..(264): NCBI GI NO: 6006854 NR Description: hypothetical protein [Arabidopsis thaliana]
MSSVREKNGGDGSLLLRANSDSARQATTSDLVLQWGNRKRLRCMKVQVKDDSSGPVQRTTVRVDRRVVRTDKDSLNKLTFGVNNNNHHHQSNGYPNLRQRPSSPQPRILRNSESSSAMRGGQSNGGVSVRGIASPDRGAHDKRGTHNDNNKSAASSDTAHDSKKGGSPSGSGDAAAPPVWPPKFVIALTNKEKEEDFLAIKGSKLPQRPKKRAKFIQRTLNLVSPGAWLCDLTLERYEVREKKISKKQRPRGLKAMGNMDSDSE

SEQ ID NO: 6078 - protein, 221 aa, Glycine max
  peptide (1)..(221): Ceres Seq. ID no. 14310767
  misc_feature (136)..(221): NCBI GI NO: 30695924 NR Description: expressed protein [Arabidopsis thaliana]
  misc_feature (1)..(25): NCBI GI NO: 30695924 NR Description: expressed protein [Arabidopsis thaliana]
  misc_feature (65)..(221): NCBI GI NO: 30678969 NR Description: expressed protein [Arabidopsis thaliana]
  misc_feature (139)..(221): NCBI GI NO: 30103017 NR Description: unknown protein
  misc_feature (1)..(29): NCBI GI NO: 30103017 NR Description: unknown protein
  misc_feature (136)..(206): NCBI GI NO: 25405821 NR Description: unknown protein, 25817-24837
  misc_feature (1)..(25): NCBI GI NO: 25405821 NR Description: unknown protein, 25817-24837
  misc_feature (65)..(177): NCBI GI NO: 6006854 NR Description: hypothetical protein [Arabidopsis thaliana]
  misc_feature (179)..(221): NCBI GI NO: 6006854 NR Description: hypothetical protein [Arabidopsis thaliana]
  misc_feature (39)..(221): NCBI GI NO: 7485821 NR Description: hypothetical protein F1C12
MKVQVKDDSSGPVQRTTVRVDRRVVRTDKDSLNKLTFGVNNNNHHHQSNGYPNLRQRPSSPQPRILRNSESSSAMRGGQSNGGVSVRGIASPDRGAHDKRGTHNDNNKSAASSDTAHDSKKGGSPSGSGDAAAPPVWPPKFVIALTNKEKEEDFLAIKGSKLPQRPKKRAKFIQRTLNLVSPGAWLCDLTLERYEVREKKISKKQRPRGLKAMGNMDSDSE

SEQ ID NO: 6079 - DNA, 1076 bp, Glycine max
  misc_feature (1)..(1076): Ceres Seq. ID no. 15226410
ataacgacttgctcttcaagcactttgggatctgccttttctttaacaggcgctatgaactcagggtacgtatgtttttccattttgaattaatctttatttgatttaagtgttgatctgcatttgaatattttaagtactagtggacaagatgttgctttataagtatttttcaataaaacagaacaaatatttacaagttgatcaatgaaaatataacacatgcagtatttgtcacatgtacattgtgtataagagtggaaatataggtcaggacaaacaagacttagtcggaacttgtttaaaaaaattcaaggcttaaattaggttggttgccggtttatcaatggaagtggcatgtgcttttttctcacaatcatgatgcagtctgactctgataacataataaactctaatgtcttggttgttatttctctatattttacttttttttattcgtagaaattaaaataattaaaaaaattataacaattcatacatcttcttaaatcaactaagttaaactccttgattttttctatattttgctaacttcagtattctctatctttttcttaaataatgaattaaatccttttttctacacacaagaatagatatttttattaaacatgtatttcatatagcaagttggccctatatatgaagtgaacaattcattgtttaattttattgcagattctcgaagaagagcctaataagaattatttctcgccatggtgtgtgatacccatgatgttcaatgctgttttggaactaataaggagctttaccattgcgttcaagaatggacctcactatagagaaggatggtttctttttggcttcaggttgtttggtttgctgattcctggcttacctgctcatggtccacaagattatattaattccactcttctgggatcaattgaaaaacattttaaagcagattgatgtgtccgtgtactgtacatgatcattccgtaccactccatgtgtatggtcatgcaaactaaaatttacgtgatatataatcaagtttttcaatttaaataatgaaaaaaaaaaaaaaaaaa

SEQ ID NO: 6080 - protein, 66 aa, Glycine max
  peptide (1)..(66): Ceres Seq. ID no. 15226411
  misc_feature (1)..(58): NCBI GI NO: 25404138 NR Description: hypothetical protein F25P12.93
  misc_feature (1)..(58): NCBI GI NO: 15223573 NR Description: lipase (class 3) family [Arabidopsis thaliana]
  misc_feature (1)..(56): NCBI GI NO: 15240187 NR Description: lipase (class 3) family [Arabidopsis thaliana]
  misc_feature (1)..(59): NCBI GI NO: 30693938 NR Description: conserved hypothetical protein
  misc_feature (1)..(59): NCBI GI NO: 22135828 NR Description: At1g45200 [Arabidopsis thaliana]
  misc_feature (1)..(57): NCBI GI NO: 15810243 NR Description: unknown protein [Arabidopsis thaliana]
  misc_feature (1)..(57): NCBI GI NO: 18400365 NR Description: lipase (class 3) family [Arabidopsis thaliana]
  misc_feature (1)..(57): NCBI GI NO: 9279583 NR Description: gene_id:MLN21.14~unknown protein
MMFNAVLELIRSFTIAFKNGPHYREGWFLFGFRLFGLLIPGLPAHGPQDYINSTLLGSIEKHFKAD

SEQ ID NO: 6081 - protein, 65 aa, Glycine max
  peptide (1)..(65): Ceres Seq. ID no. 15226412
  misc_feature (1)..(57): NCBI GI NO: 25404138 NR Description: hypothetical protein F25P12.93
  misc_feature (1)..(57): NCBI GI NO: 15223573 NR Description: lipase (class 3) family [Arabidopsis thaliana]
  misc_feature (1)..(55): NCBI GI NO: 15240187 NR Description: lipase (class 3) family [Arabidopsis thaliana]
  misc_feature (1)..(58): NCBI GI NO: 30693938 NR Description: conserved hypothetical protein
  misc_feature (1)..(58): NCBI GI NO: 22135828 NR Description: At1g45200 [Arabidopsis thaliana]
  misc_feature (1)..(56): NCBI GI NO: 15810243 NR Description: unknown protein [Arabidopsis thaliana]
  misc_feature (1)..(56): NCBI GI NO: 18400365 NR Description: lipase (class 3) family [Arabidopsis thaliana]
  misc_feature (1)..(56): NCBI GI NO: 9279583 NR Description: gene_id:MLN21.14~unknown protein
MFNAVLELIRSFTIAFKNGPHYREGWFLFGFRLFGLLIPGLPAHGPQDYINSTLLGSIEKHFKAD

SEQ ID NO: 6082 - protein, 34 aa, Glycine max
  peptide (1)..(34): Ceres Seq. ID no. 15226413
MCFFLTIMMQSDSDNIINSNVLVVISLYFTFFYS

SEQ ID NO: 6083 - DNA, 1607 bp, Glycine max
  misc_feature (1)..(1607): Ceres Seq. ID no. 15176002
gagcaccgtgtgcgtagaggactggtgaacactcactcgccactgctcacgaaccgtataaaccctaaaaccttgatttttcccaatccattccacgcacaatatggcttcagatgctgacatggaggactacggtttcgagtactccgatgaggaggaagtggagcaagacgttgatatcgagaatcaatattacaattcaaaaggtatggtagaaagtgatccagaaggtgcgcttgctggttttgctcaggtagtgcaaatggaacaagaaaaagcagaatggggatttaaagctctaaaacagactgtcaagctatattatcgactgggaaggtataaagagatgatggaagcctatagggagatgttgacatatattaagtcagcagtgactcgtaactatagtgaaaaatgcataaacagcattatggactatgtctcaggttcagcaagccagaactttggccttctccaggaattctaccagactactctgaggtcccttgaagatgcaaagaacgagagattgtggtttaagacaaatctgaagctttgcaagatatattttgatattggtgaatatgggcgtatgaataagatcttgaaggaacttcacaaatcttgtcaaaaagaagatggcacagatgaccacaaaaaaggaactcaacttttggaggtatatgctgtagagattcaaatgtacacagagaccaagaacaacaaaaaacttaagcaactttaccagaaagcactcactattaagtcagcaattccccatccaaggataatgggaataatccatgaatgtggcgggaaaatgcatatggcagagcgccagtgggcagaagcagctactgatttctttgaagctttcaagaattatgatgaagctgggagtcagagacgtatccaatgcttgaagtaccttgttcttgccaacatgttgatggagtctgaagtaaatccatttgatgggcaggaagctaagccatacaagaatgaccctgaaattttggtgatgactaacttaatagcggcttatcaacgtaatgaaatattggaatttgagaaaattctgaagagtaacagaagaactatcatggatgatccatttatcagaaattacattgaggatctgctaaagaatattagaacacaagtcttgctgaagctcatcaaaccatatacaaggatcaggatcccttttatatctaaggaacttaatgttcctgagcatgatgttgagcagctattggtgtcgctgattttggataatagaattcaagggcatattgatcaagtgaaccggctcttagaacgcgctgataggtcgaaaggaatgaaaaagtacactgcagttgacaaatggaacacacagcttaaatctctttatcaaactattaacaacagagtttgttaaaacgtgtatcatggaagtgttatatttcttgttttccccaacttgcagttttgccatgtgaattattgtaagctacactgaggggaggagggagatgggagtgtattaccactatagcggaattcaggtcaaaccaacttgtggttcttgttttatattatagaaaaatataattgtttgaaac

SEQ ID NO: 6084 - protein, 439 aa, Glycine max
  peptide (1)..(439): Ceres Seq. ID no. 15176003
  misc_feature (305)..(373): Pfam Name: Pfam Description:  PCI domain
  misc_feature (1)..(439): NCBI GI NO: 18401293 NR Description: COP9 complex subunit CSN2, putative
  misc_feature (1)..(439): NCBI GI NO: 15215816 NR Description: At2g26990/T20P8.4 [Arabidopsis thaliana]
  misc_feature (7)..(439): NCBI GI NO: 25407849 NR Description: probable PCI domain protein
  misc_feature (7)..(373): NCBI GI NO: 34903328 NR Description: unnamed protein product
  misc_feature (373)..(410): NCBI GI NO: 34903328 NR Description: unnamed protein product
  misc_feature (6)..(438): NCBI GI NO: 4759264 NR Description: thyroid receptor interacting protein 15
  misc_feature (6)..(438): NCBI GI NO: 6753486 NR Description: COP9
  misc_feature (6)..(438): NCBI GI NO: 18606281 NR Description: COP9
  misc_feature (6)..(438): NCBI GI NO: 5410310 NR Description: thyroid receptor interactor trip15 [Homo sapiens]
  misc_feature (6)..(438): NCBI GI NO: 13445486 NR Description: TRIP15-ISO [Homo sapiens]
MASDADMEDYGFEYSDEEEVEQDVDIENQYYNSKGMVESDPEGALAGFAQVVQMEQEKAEWGFKALKQTVKLYYRLGRYKEMMEAYREMLTYIKSAVTRNYSEKCINSIMDYVSGSASQNFGLLQEFYQTTLRSLEDAKNERLWFKTNLKLCKIYFDIGEYGRMNKILKELHKSCQKEDGTDDHKKGTQLLEVYAVEIQMYTETKNNKKLKQLYQKALTIKSAIPHPRIMGIIHECGGKMHMAERQWAEAATDFFEAFKNYDEAGSQRRIQCLKYLVLANMLMESEVNPFDGQEAKPYKNDPEILVMTNLIAAYQRNEILEFEKILKSNRRTIMDDPFIRNYIEDLLKNIRTQVLLKLIKPYTRIRIPFISKELNVPEHDVEQLLVSLILDNRIQGHIDQVNRLLERADRSKGMKKYTAVDKWNTQLKSLYQTINNRVC

SEQ ID NO: 6085 - protein, 433 aa, Glycine max
  peptide (1)..(433): Ceres Seq. ID no. 15176004
  misc_feature (299)..(367): Pfam Name: Pfam Description:  PCI domain
  misc_feature (1)..(433): NCBI GI NO: 18401293 NR Description: COP9 complex subunit CSN2, putative
  misc_feature (1)..(433): NCBI GI NO: 15215816 NR Description: At2g26990/T20P8.4 [Arabidopsis thaliana]
  misc_feature (1)..(433): NCBI GI NO: 25407849 NR Description: probable PCI domain protein
  misc_feature (1)..(367): NCBI GI NO: 34903328 NR Description: unnamed protein product
  misc_feature (367)..(404): NCBI GI NO: 34903328 NR Description: unnamed protein product
  misc_feature (1)..(432): NCBI GI NO: 4759264 NR Description: thyroid receptor interacting protein 15
  misc_feature (1)..(432): NCBI GI NO: 6753486 NR Description: COP9
  misc_feature (1)..(432): NCBI GI NO: 18606281 NR Description: COP9
  misc_feature (1)..(432): NCBI GI NO: 5410310 NR Description: thyroid receptor interactor trip15 [Homo sapiens]
  misc_feature (1)..(432): NCBI GI NO: 13445486 NR Description: TRIP15-ISO [Homo sapiens]
MEDYGFEYSDEEEVEQDVDIENQYYNSKGMVESDPEGALAGFAQVVQMEQEKAEWGFKALKQTVKLYYRLGRYKEMMEAYREMLTYIKSAVTRNYSEKCINSIMDYVSGSASQNFGLLQEFYQTTLRSLEDAKNERLWFKTNLKLCKIYFDIGEYGRMNKILKELHKSCQKEDGTDDHKKGTQLLEVYAVEIQMYTETKNNKKLKQLYQKALTIKSAIPHPRIMGIIHECGGKMHMAERQWAEAATDFFEAFKNYDEAGSQRRIQCLKYLVLANMLMESEVNPFDGQEAKPYKNDPEILVMTNLIAAYQRNEILEFEKILKSNRRTIMDDPFIRNYIEDLLKNIRTQVLLKLIKPYTRIRIPFISKELNVPEHDVEQLLVSLILDNRIQGHIDQVNRLLERADRSKGMKKYTAVDKWNTQLKSLYQTINNRVC

SEQ ID NO: 6086 - protein, 404 aa, Glycine max
  peptide (1)..(404): Ceres Seq. ID no. 15176005
  misc_feature (270)..(338): Pfam Name: Pfam Description:  PCI domain
  misc_feature (1)..(404): NCBI GI NO: 18401293 NR Description: COP9 complex subunit CSN2, putative
  misc_feature (1)..(404): NCBI GI NO: 15215816 NR Description: At2g26990/T20P8.4 [Arabidopsis thaliana]
  misc_feature (1)..(404): NCBI GI NO: 25407849 NR Description: probable PCI domain protein
  misc_feature (1)..(338): NCBI GI NO: 34903328 NR Description: unnamed protein product
  misc_feature (338)..(375): NCBI GI NO: 34903328 NR Description: unnamed protein product
  misc_feature (1)..(403): NCBI GI NO: 4759264 NR Description: thyroid receptor interacting protein 15
  misc_feature (1)..(403): NCBI GI NO: 6753486 NR Description: COP9
  misc_feature (1)..(403): NCBI GI NO: 18606281 NR Description: COP9
  misc_feature (1)..(403): NCBI GI NO: 5410310 NR Description: thyroid receptor interactor trip15 [Homo sapiens]
  misc_feature (1)..(403): NCBI GI NO: 13445486 NR Description: TRIP15-ISO [Homo sapiens]
MVESDPEGALAGFAQVVQMEQEKAEWGFKALKQTVKLYYRLGRYKEMMEAYREMLTYIKSAVTRNYSEKCINSIMDYVSGSASQNFGLLQEFYQTTLRSLEDAKNERLWFKTNLKLCKIYFDIGEYGRMNKILKELHKSCQKEDGTDDHKKGTQLLEVYAVEIQMYTETKNNKKLKQLYQKALTIKSAIPHPRIMGIIHECGGKMHMAERQWAEAATDFFEAFKNYDEAGSQRRIQCLKYLVLANMLMESEVNPFDGQEAKPYKNDPEILVMTNLIAAYQRNEILEFEKILKSNRRTIMDDPFIRNYIEDLLKNIRTQVLLKLIKPYTRIRIPFISKELNVPEHDVEQLLVSLILDNRIQGHIDQVNRLLERADRSKGMKKYTAVDKWNTQLKSLYQTINNRVC

SEQ ID NO: 6087 - DNA, 1509 bp, Glycine max
  misc_feature (1)..(1509): Ceres Seq. ID no. 14308863
gctataattgggagtagcagtacgggatctttatcagttcaacaaactgttaatacaacatctgggtctgtagcaccaagtacaacagctggtcttaatatggctgaggcattggcacagactccatcccgagctcgctctgctccccaggtgctagtcaaaacccaaaggcttgaggaactggctatcaagcagtcaagacagttgattccagtaacaccctcaatgcctaaagcttcggttcataattctgagaaatcaaagcccaaaacagctatcagaaatgctgatatgaatgtagttaccaagactgtgccacagcaaccgtctgcattgcacattgcaagccaatctgttcgcagtgttaatgccaaagttgatactccaaagacatctgggaagtttactgatctcaaatcagtagtgtgggaaaatggtgcttcccctacctctaaggatgtatcaaatccaacaaattattctaacagcaaaccaggaaatcaacatgctgttgcttcaggagctgcctctgcaccattgaggaacccaaataacctaaaatcccctacggagcggaagccatcttctatggatttgaaattaggttccaatttggagaagaaacattccatctctcaagtgcagagccggaatgatttcttcaatctcattaagaagaaaacattgatgaactgctctgcagttcttccagattctggcccgatggtttcatctcctgcgatggagaaatctggtgaagtaaatagggaaatagttaacccttctgcaagtccccagtctcttggaaatggtactgaactgaccagcaatggtacccatgctcatgaagtgattcacagaatttctgataatgaggagaaagaatcaaatcccagtgttacaatatatcccgaggaggaagaagctgctttccttcgttctcttggctgggaggagaactcagatgaggatgaaggccttacagaggaggaaatcaatgctttctatcaagagtgcaagaaattggacccaactgcattcaagctaagccagggaatgcagccaaagctgtccaagttgtttgaatcttatgcatctaacttgcgtgaatcttctgctgagttgagctcttctgatcccggatctgaagcttgatgtattgtttctttaatcatagttagatccaagcttcaaattttgatggcagatgactagttccattccttttgttctgaaggccaatgatttgagagtgaaagaagaggggtgggtttgattggaaccctgcattttgcaaatattgcaataagttacaggtgcctcaatcctgcctggtttacagggaatttttttttccttttttgttttttggttatagggttggtagggtaggggctattttaaggtgctgggccattgcatcttttggggtattttgatccgtttcttttctttcatgagggtttgattctacttgataaagtttatgctgtttttggtcaattttac

SEQ ID NO: 6088 - protein, 384 aa, Glycine max
  peptide (1)..(384): Ceres Seq. ID no. 14308864
  misc_feature (2)..(344): NCBI GI NO: 15221236 NR Description: expressed protein [Arabidopsis thaliana]
  misc_feature (2)..(289): NCBI GI NO: 15236516 NR Description: hypothetical protein [Arabidopsis thaliana]
  misc_feature (161)..(345): NCBI GI NO: 15236516 NR Description: hypothetical protein [Arabidopsis thaliana]
  misc_feature (26)..(239): NCBI GI NO: 38344828 NR Description: OSJNBa0064H22.9
AIIGSSSTGSLSVQQTVNTTSGSVAPSTTAGLNMAEALAQTPSRARSAPQVLVKTQRLEELAIKQSRQLIPVTPSMPKASVHNSEKSKPKTAIRNADMNVVTKTVPQQPSALHIASQSVRSVNAKVDTPKTSGKFTDLKSVVWENGASPTSKDVSNPTNYSNSKPGNQHAVASGAASAPLRNPNNLKSPTERKPSSMDLKLGSNLEKKHSISQVQSRNDFFNLIKKKTLMNCSAVLPDSGPMVSSPAMEKSGEVNREIVNPSASPQSLGNGTELTSNGTHAHEVIHRISDNEEKESNPSVTIYPEEEEAAFLRSLGWEENSDEDEGLTEEEINAFYQECKKLDPTAFKLSQGMQPKLSKLFESYASNLRESSAELSSSDPGSEA

SEQ ID NO: 6089 - protein, 351 aa, Glycine max
  peptide (1)..(351): Ceres Seq. ID no. 14308865
  misc_feature (1)..(311): NCBI GI NO: 15221236 NR Description: expressed protein [Arabidopsis thaliana]
  misc_feature (1)..(256): NCBI GI NO: 15236516 NR Description: hypothetical protein [Arabidopsis thaliana]
  misc_feature (128)..(312): NCBI GI NO: 15236516 NR Description: hypothetical protein [Arabidopsis thaliana]
  misc_feature (1)..(206): NCBI GI NO: 38344828 NR Description: OSJNBa0064H22.9
MAEALAQTPSRARSAPQVLVKTQRLEELAIKQSRQLIPVTPSMPKASVHNSEKSKPKTAIRNADMNVVTKTVPQQPSALHIASQSVRSVNAKVDTPKTSGKFTDLKSVVWENGASPTSKDVSNPTNYSNSKPGNQHAVASGAASAPLRNPNNLKSPTERKPSSMDLKLGSNLEKKHSISQVQSRNDFFNLIKKKTLMNCSAVLPDSGPMVSSPAMEKSGEVNREIVNPSASPQSLGNGTELTSNGTHAHEVIHRISDNEEKESNPSVTIYPEEEEAAFLRSLGWEENSDEDEGLTEEEINAFYQECKKLDPTAFKLSQGMQPKLSKLFESYASNLRESSAELSSSDPGSEA

SEQ ID NO: 6090 - protein, 309 aa, Glycine max
  peptide (1)..(309): Ceres Seq. ID no. 14308866
  misc_feature (1)..(269): NCBI GI NO: 15221236 NR Description: expressed protein [Arabidopsis thaliana]
  misc_feature (1)..(214): NCBI GI NO: 15236516 NR Description: hypothetical protein [Arabidopsis thaliana]
  misc_feature (86)..(270): NCBI GI NO: 15236516 NR Description: hypothetical protein [Arabidopsis thaliana]
  misc_feature (1)..(164): NCBI GI NO: 38344828 NR Description: OSJNBa0064H22.9
MPKASVHNSEKSKPKTAIRNADMNVVTKTVPQQPSALHIASQSVRSVNAKVDTPKTSGKFTDLKSVVWENGASPTSKDVSNPTNYSNSKPGNQHAVASGAASAPLRNPNNLKSPTERKPSSMDLKLGSNLEKKHSISQVQSRNDFFNLIKKKTLMNCSAVLPDSGPMVSSPAMEKSGEVNREIVNPSASPQSLGNGTELTSNGTHAHEVIHRISDNEEKESNPSVTIYPEEEEAAFLRSLGWEENSDEDEGLTEEEINAFYQECKKLDPTAFKLSQGMQPKLSKLFESYASNLRESSAELSSSDPGSEA

SEQ ID NO: 6091 - DNA, 2160 bp, Glycine max
  misc_feature (1)..(2160): Ceres Seq. ID no. 15176922
ggcatttccataaattccactctcaagattcatatctgattctgaagctcgaaattgagaatggcgtcttctctctctactacctcttttctctgcacacactctctgaaatccccaacgctgaaacctctcacaaagcctcattgcttcgctcgttttcgtgctcgagttcgagttccacccaaagcttcttcgcaaaacaacaatgccgataatgattctgttgaaactccgtccctccaaccctcttcccctaaaccaccatataattcctcttcttcgctgcttcgtcatttcagtaatggctggtttaaatttgatgaacttgggatggagatagtgctcattgctctgcctgctgctttggctttggcggctgatcctattgcctcattgattgacacagcgttcgttggccatataggggcagttgaattggctgcagttggggtttcagcttctgtgtttaatctagtgtcaaaagcattcaatgttcctttacttaatgttactacatcctttgttgcggaggagcaggcactgattaggaaggaggaagagtccattctgagtgatgaaaatggaaaggaccaaagcaagaagctccttccttcagtatcaacttctttagcacttgctgcaactcttggaattgctgaaactgtggtgcttacgcttggctctggcattcttatgaatatcatgggtatacctgctgattctccgatgcgtggacctgctgagcagtttcttacattgagggcctttggtgctccagcaattgtgctcgcattagctgcacaaggcacctttcgtggatttttggatacaaagacacctctatatgctgttggtgtgggaaactttcttaatgccatattggatccaatattgatatttctttttggtcttggcattggtggtgctgcagttgctaccgttatctctgaatatttaatagctttcattctgctatggaaattgagtgacaaagtgctgctaatcccttccgaatttgatgggagaaaattttttagctatctgaaatccggtggtcttgtttctgctaggactttggctgtgtttataactgtgacactgtcaacatccgtggcagctcagcagggccctatacctatggcaggccatcaaatttgcatgcaagtctggttgtcggtttctttgctcaatgatgctttggcgcttgctggtcaggcacttcttgcccgtaattactccctgggaaactatgagcaagcacgccttgttatatatagagtgatacagattggtttaggagcaggaatcattttgtcaataatcttattctttgggtttggagcgttttctagtttatttagcacagattctgaagttctggatgttgcttggtcaggtatatggtttgttgctggatctcaaccagtgaatgctttggcatttgttattgatgggatttattatggggtatcagactttggatatgctgcttactcgatggttctagttggactagtttcttcaactttccttctggtggcggctccagtagggcttcctggagtctggactggattgtttattttcatggctttgcgtgttctagctggagtttggaggttgagcagtaaaagtgggccttgggatacaatctggtatagagatggagcagaagattgaccaacatgcattcagtactcagaagttccaacattcactcctcaggttaaaaaaccattttcagaatgatcagaaaatgattctctcaagagctctcttatatgagggcactaaattcctgcaaagagaatccagtatcactgcaggactatagtaaattattgaaatgtagcagccaattactgctaaccgattgccaaaatcttgctgattcaagtattgattgaatggccaatagaacagggagggagaaaattattgaatgaccagcctacagcttagagggtagtctttttgaccctctgttttttgttggaaatttgtatttattaggaaattgcacaattttgtatattttcattgctaaaggtagctgcaatgcatgtaagaataagtactctgacttgtccattgcagctattcaagttagttaggtgtgtactgtgtagtaattacaattttttaatagttttttacgtt

SEQ ID NO: 6092 - protein, 539 aa, Glycine max
  peptide (1)..(539): Ceres Seq. ID no. 15176923
  misc_feature (99)..(277): Pfam Name: Pfam Description:  MatE
  misc_feature (29)..(532): NCBI GI NO: 30687474 NR Description: MATE efflux protein family [Arabidopsis thaliana]
  misc_feature (29)..(528): NCBI GI NO: 7487160 NR Description: hypothetical protein At2g38330
  misc_feature (155)..(523): NCBI GI NO: 37532300 NR Description: putative membrane protein
  misc_feature (84)..(174): NCBI GI NO: 37532300 NR Description: putative membrane protein
  misc_feature (164)..(520): NCBI GI NO: 25405456 NR Description: hypothetical protein F11M15.20
  misc_feature (85)..(184): NCBI GI NO: 25405456 NR Description: hypothetical protein F11M15.20
  misc_feature (180)..(480): NCBI GI NO: 19386721 NR Description: P0678F11.10
  misc_feature (85)..(177): NCBI GI NO: 19386721 NR Description: P0678F11.10
  misc_feature (155)..(447): NCBI GI NO: 20270057 NR Description: Putative membrane protein
  misc_feature (84)..(174): NCBI GI NO: 20270057 NR Description: Putative membrane protein
MASSLSTTSFLCTHSLKSPTLKPLTKPHCFARFRARVRVPPKASSQNNNADNDSVETPSLQPSSPKPPYNSSSSLLRHFSNGWFKFDELGMEIVLIALPAALALAADPIASLIDTAFVGHIGAVELAAVGVSASVFNLVSKAFNVPLLNVTTSFVAEEQALIRKEEESILSDENGKDQSKKLLPSVSTSLALAATLGIAETVVLTLGSGILMNIMGIPADSPMRGPAEQFLTLRAFGAPAIVLALAAQGTFRGFLDTKTPLYAVGVGNFLNAILDPILIFLFGLGIGGAAVATVISEYLIAFILLWKLSDKVLLIPSEFDGRKFFSYLKSGGLVSARTLAVFITVTLSTSVAAQQGPIPMAGHQICMQVWLSVSLLNDALALAGQALLARNYSLGNYEQARLVIYRVIQIGLGAGIILSIILFFGFGAFSSLFSTDSEVLDVAWSGIWFVAGSQPVNALAFVIDGIYYGVSDFGYAAYSMVLVGLVSSTFLLVAAPVGLPGVWTGLFIFMALRVLAGVWRLSSKSGPWDTIWYRDGAED

SEQ ID NO: 6093 - protein, 449 aa, Glycine max
  peptide (1)..(449): Ceres Seq. ID no. 15176924
  misc_feature (9)..(187): Pfam Name: Pfam Description:  MatE
  misc_feature (1)..(442): NCBI GI NO: 30687474 NR Description: MATE efflux protein family [Arabidopsis thaliana]
  misc_feature (1)..(438): NCBI GI NO: 7487160 NR Description: hypothetical protein At2g38330
  misc_feature (65)..(433): NCBI GI NO: 37532300 NR Description: putative membrane protein
  misc_feature (1)..(84): NCBI GI NO: 37532300 NR Description: putative membrane protein
  misc_feature (74)..(430): NCBI GI NO: 25405456 NR Description: hypothetical protein F11M15.20
  misc_feature (1)..(94): NCBI GI NO: 25405456 NR Description: hypothetical protein F11M15.20
  misc_feature (90)..(390): NCBI GI NO: 19386721 NR Description: P0678F11.10
  misc_feature (1)..(87): NCBI GI NO: 19386721 NR Description: P0678F11.10
  misc_feature (65)..(357): NCBI GI NO: 20270057 NR Description: Putative membrane protein
  misc_feature (1)..(84): NCBI GI NO: 20270057 NR Description: Putative membrane protein
MEIVLIALPAALALAADPIASLIDTAFVGHIGAVELAAVGVSASVFNLVSKAFNVPLLNVTTSFVAEEQALIRKEEESILSDENGKDQSKKLLPSVSTSLALAATLGIAETVVLTLGSGILMNIMGIPADSPMRGPAEQFLTLRAFGAPAIVLALAAQGTFRGFLDTKTPLYAVGVGNFLNAILDPILIFLFGLGIGGAAVATVISEYLIAFILLWKLSDKVLLIPSEFDGRKFFSYLKSGGLVSARTLAVFITVTLSTSVAAQQGPIPMAGHQICMQVWLSVSLLNDALALAGQALLARNYSLGNYEQARLVIYRVIQIGLGAGIILSIILFFGFGAFSSLFSTDSEVLDVAWSGIWFVAGSQPVNALAFVIDGIYYGVSDFGYAAYSMVLVGLVSSTFLLVAAPVGLPGVWTGLFIFMALRVLAGVWRLSSKSGPWDTIWYRDGAED

SEQ ID NO: 6094 - protein, 328 aa, Glycine max
  peptide (1)..(328): Ceres Seq. ID no. 15176925
  misc_feature (1)..(66): Pfam Name: Pfam Description:  MatE
  misc_feature (1)..(321): NCBI GI NO: 30687474 NR Description: MATE efflux protein family [Arabidopsis thaliana]
  misc_feature (1)..(317): NCBI GI NO: 7487160 NR Description: hypothetical protein At2g38330
  misc_feature (1)..(312): NCBI GI NO: 37532300 NR Description: putative membrane protein
  misc_feature (1)..(309): NCBI GI NO: 25405456 NR Description: hypothetical protein F11M15.20
  misc_feature (1)..(269): NCBI GI NO: 19386721 NR Description: P0678F11.10
  misc_feature (1)..(236): NCBI GI NO: 20270057 NR Description: Putative membrane protein
  misc_feature (1)..(317): NCBI GI NO: 15231918 NR Description: MATE efflux protein family [Arabidopsis thaliana]
  misc_feature (1)..(167): NCBI GI NO: 18403476 NR Description: expressed protein [Arabidopsis thaliana]
  misc_feature (1)..(75): NCBI GI NO: 15233839 NR Description: hypothetical protein [Arabidopsis thaliana]
  misc_feature (54)..(194): NCBI GI NO: 15233839 NR Description: hypothetical protein [Arabidopsis thaliana]
MNIMGIPADSPMRGPAEQFLTLRAFGAPAIVLALAAQGTFRGFLDTKTPLYAVGVGNFLNAILDPILIFLFGLGIGGAAVATVISEYLIAFILLWKLSDKVLLIPSEFDGRKFFSYLKSGGLVSARTLAVFITVTLSTSVAAQQGPIPMAGHQICMQVWLSVSLLNDALALAGQALLARNYSLGNYEQARLVIYRVIQIGLGAGIILSIILFFGFGAFSSLFSTDSEVLDVAWSGIWFVAGSQPVNALAFVIDGIYYGVSDFGYAAYSMVLVGLVSSTFLLVAAPVGLPGVWTGLFIFMALRVLAGVWRLSSKSGPWDTIWYRDGAED

SEQ ID NO: 6095 - DNA, 1747 bp, Glycine max
  misc_feature (1)..(1747): Ceres Seq. ID no. 15171005
aataaggctttcacatgtcagatgtgtgaactcagtgtcaatgaggttgatactgtacttctctgtgatgcttgtgaaaagggatttcacttgaagtgcctgcagccatcagtcttgagaggaattcataatagagttgattggcattgtatgaggtgcttgagtttaagtggtggaaagcctttgcctccaaaatatggtcgtgtcatgagatcctcaaacacaccgccaaaattgccctctaatacaggtggcgttcaaccatgttctgagaagaaagtagagaatatcgatccaaaggtcatcccacagacgttagcaacaaatgggagctctgttccaactgtttccggtggccatcacaatgttgagttgccatccgaatcaaagataccagataccaaagatatgcaagggactggcatttcatccaccattgaagctattgataagaagcctgatccaaagaactctatgaaatctcttagtgcagcttatagtccttccccttgcttgctaggtgaaaattctgctcaacaaataaattctaaggttttgactggtagagagacttcggaatctgagtctcttcctaaattatctgagctagctaagtgtgaaaatttgcaatcatcacaagattttcaagttgaacatacaatgtcacaagacaatgctgaagtatcatcagataaacatgttgacagtaatatgatgaataaccaacagaaggaatctcatggagaagaaaatttagtttatgatataaagcgtgatgaccaagatgctgcacttgaaaattctgttggaacttctggaactaatactgatggtagacagcactctgcattatcttcagatagttcacatgctgtagaatggattggtgatgtagtacaacttgtagatgagaaaaagtattaccaatcttgctgtgttgatggagtaacatataggctgcagggtcatgctcttttccccaccggccatgggaaactaactccttctaaactccagtctatgtgggaagattgcaaaactgggttaaagtgggttaaggtgacaaactgctactttcctgatgatttgcctgggaatattggtcatccgtgtatatctgaagtcaacgaggtttatgaatctaatagtgatagaactgaaatggctagctctattcgagggccatgtgaagtcctcccatctgataaatttaaacaagagaatgacaggcgatgtcagttacgaaatgaggaaagttctagagtgcagcccattttcctatgcaggtggttttatgatgaattcaagaagttatttcaacctgtaatcagttgattatgtcttgaacttatatgttttgtggttcctacatggtgccatttttgtggtatttggtggggcttcgaacaggatatttcttggatgggtaattaagcatgcattaagattcaattgagacccattataaggcacattgcagaagcattgcctcctcgtacagagtgttttatcatttcagcatgaattgcttttggtgtaaaatatgtaactgaatctgtggactgcttagtttagctttcgctttggtagttctttttctgatagatattcattctgtataattcttttttgggcattaggctctttaggcccaataattacattattatctttgaattagatcagtgtagttcccttagtttgctgaattgtaagatacttcatttgtacaaaagccatttcttct

SEQ ID NO: 6096 - protein, 444 aa, Glycine max
  peptide (1)..(444): Ceres Seq. ID no. 15171006
  misc_feature (5)..(56): Pfam Name: Pfam Description:  PHD-finger
  misc_feature (1)..(231): NCBI GI NO: 9454550 NR Description: Hypothetical protein [Arabidopsis thaliana]
  misc_feature (1)..(231): NCBI GI NO: 15223606 NR Description: expressed protein [Arabidopsis thaliana]
  misc_feature (1)..(104): NCBI GI NO: 30685722 NR Description: expressed protein [Arabidopsis thaliana]
  misc_feature (1)..(104): NCBI GI NO: 30685716 NR Description: expressed protein [Arabidopsis thaliana]
  misc_feature (1)..(104): NCBI GI NO: 9294545 NR Description: contains similarity to bactericidal permeability-increasing protein~gene_id:MQC12
NKAFTCQMCELSVNEVDTVLLCDACEKGFHLKCLQPSVLRGIHNRVDWHCMRCLSLSGGKPLPPKYGRVMRSSNTPPKLPSNTGGVQPCSEKKVENIDPKVIPQTLATNGSSVPTVSGGHHNVELPSESKIPDTKDMQGTGISSTIEAIDKKPDPKNSMKSLSAAYSPSPCLLGENSAQQINSKVLTGRETSESESLPKLSELAKCENLQSSQDFQVEHTMSQDNAEVSSDKHVDSNMMNNQQKESHGEENLVYDIKRDDQDAALENSVGTSGTNTDGRQHSALSSDSSHAVEWIGDVVQLVDEKKYYQSCCVDGVTYRLQGHALFPTGHGKLTPSKLQSMWEDCKTGLKWVKVTNCYFPDDLPGNIGHPCISEVNEVYESNSDRTEMASSIRGPCEVLPSDKFKQENDRRCQLRNEESSRVQPIFLCRWFYDEFKKLFQPVIS

SEQ ID NO: 6097 - protein, 437 aa, Glycine max
  peptide (1)..(437): Ceres Seq. ID no. 15171007
  misc_feature (1)..(49): Pfam Name: Pfam Description:  PHD-finger
  misc_feature (1)..(224): NCBI GI NO: 9454550 NR Description: Hypothetical protein [Arabidopsis thaliana]
  misc_feature (1)..(224): NCBI GI NO: 15223606 NR Description: expressed protein [Arabidopsis thaliana]
  misc_feature (1)..(97): NCBI GI NO: 30685722 NR Description: expressed protein [Arabidopsis thaliana]
  misc_feature (1)..(97): NCBI GI NO: 30685716 NR Description: expressed protein [Arabidopsis thaliana]
  misc_feature (1)..(97): NCBI GI NO: 9294545 NR Description: contains similarity to bactericidal permeability-increasing protein~gene_id:MQC12
MCELSVNEVDTVLLCDACEKGFHLKCLQPSVLRGIHNRVDWHCMRCLSLSGGKPLPPKYGRVMRSSNTPPKLPSNTGGVQPCSEKKVENIDPKVIPQTLATNGSSVPTVSGGHHNVELPSESKIPDTKDMQGTGISSTIEAIDKKPDPKNSMKSLSAAYSPSPCLLGENSAQQINSKVLTGRETSESESLPKLSELAKCENLQSSQDFQVEHTMSQDNAEVSSDKHVDSNMMNNQQKESHGEENLVYDIKRDDQDAALENSVGTSGTNTDGRQHSALSSDSSHAVEWIGDVVQLVDEKKYYQSCCVDGVTYRLQGHALFPTGHGKLTPSKLQSMWEDCKTGLKWVKVTNCYFPDDLPGNIGHPCISEVNEVYESNSDRTEMASSIRGPCEVLPSDKFKQENDRRCQLRNEESSRVQPIFLCRWFYDEFKKLFQPVIS

SEQ ID NO: 6098 - protein, 394 aa, Glycine max
  peptide (1)..(394): Ceres Seq. ID no. 15171008
  misc_feature (1)..(181): NCBI GI NO: 9454550 NR Description: Hypothetical protein [Arabidopsis thaliana]
  misc_feature (1)..(181): NCBI GI NO: 15223606 NR Description: expressed protein [Arabidopsis thaliana]
  misc_feature (1)..(54): NCBI GI NO: 30685722 NR Description: expressed protein [Arabidopsis thaliana]
  misc_feature (1)..(54): NCBI GI NO: 30685716 NR Description: expressed protein [Arabidopsis thaliana]
  misc_feature (1)..(54): NCBI GI NO: 9294545 NR Description: contains similarity to bactericidal permeability-increasing protein~gene_id:MQC12
MRCLSLSGGKPLPPKYGRVMRSSNTPPKLPSNTGGVQPCSEKKVENIDPKVIPQTLATNGSSVPTVSGGHHNVELPSESKIPDTKDMQGTGISSTIEAIDKKPDPKNSMKSLSAAYSPSPCLLGENSAQQINSKVLTGRETSESESLPKLSELAKCENLQSSQDFQVEHTMSQDNAEVSSDKHVDSNMMNNQQKESHGEENLVYDIKRDDQDAALENSVGTSGTNTDGRQHSALSSDSSHAVEWIGDVVQLVDEKKYYQSCCVDGVTYRLQGHALFPTGHGKLTPSKLQSMWEDCKTGLKWVKVTNCYFPDDLPGNIGHPCISEVNEVYESNSDRTEMASSIRGPCEVLPSDKFKQENDRRCQLRNEESSRVQPIFLCRWFYDEFKKLFQPVIS

SEQ ID NO: 6099 - DNA, 1592 bp, Glycine max
  misc_feature (1)..(1592): Ceres Seq. ID no. 14312423
ttttttacaaaacttggatcttttctttcttaaaaccaaaggcacgctgaagcctcacaatagtgcaagtgatcccaaccaggttggcaccccacacgctatcattcatctgcagcacaccaagagatatagatctagttccttatgtcattgccatatcaagttctcattttgaacaatgacatatggatgttttctaaaattctacaacttactcttagtggagactatttatggttggagaaaattccatgtcattgtttgatttgagaacttgttaacaaggatataaatagcttgatataggttttgtcctatttttctttgatcaactatgccttctttctttgcaatctcaatttacaattggtgtgattcttaataatactaattaattcccatgaattaattgtcagagcatggttgcaatgatggtgaagcatctttaggttcaccccttgctggacgattgtttgtgctagttggtgcgggaggtgcagggaaagcactggcatttggtgctaaaagcagaggagctcgtctagtcatctttgacattgattttggtataaaacaaaggcacatatgttgtctactataaaatttaattttcctttgattctctctcgtgatagagttgaagttttaccaacatcaacatacctgtcacaccttccaattactttccccaaaaagtgccacaaagggtaggtggggtgggtggaattacagaaacacccttacctcaatctgcataactttgatcaatcaagtttaatactacctttttttttgttacgtcaagtttaataccttgatgtagcatattatagtttttcacgaatttcactgttatacaaaaactgctctatatctagagattatgttgcattgacatgttttcttattctcttgtgttcaaaaagatagagcaaaatctcttgcttgtgctgtatttggtgaagctcagcctttcaaagagttggtcaactttcagccagagaaaggggcaattcttgcgaatgcaacacctgtaggaatgcatcccaatacagacagaattcctgtggcagaggctactttggaagactaccggttagtctttgatgctgtgtatactccaagaagaaccagattgttgaacgaagcggatgctgcaggagcaataactgtggctggggtagaaatgttcctaaggcaggccattggtcagttcaatcttttcactggcctagaagcacctgaagaatttatgcgggaaattgttttatccaaattttgaaggcgccgctttcataaattgatcctacaacttgaaggaggctgcatgcctgcacctatcaagaaattcttgtatcacattgcataacatttttctttaaaaaaaatcccttatttttagttgggacgacaactataatgcaacataataaattgaaataataggcaaaatagcaaaagttgttgtgggcgcagctgaaagacatggttcaacttaatttgtggttttaggaataaaaatgttgtgattctctgaagaagaaaaaaatgttgtcatagcttcataggtaatattaacttgggccttacac

SEQ ID NO: 6100 - protein, 80 aa, Glycine max
  peptide (1)..(80): Ceres Seq. ID no. 14312424
  misc_feature (1)..(65): Pfam Name: Pfam Description:  Shikimate / quinate 5-dehydrogenase
  misc_feature (1)..(75): NCBI GI NO: 34914824 NR Description: putative 3-dehydroquinate dehydratase
  misc_feature (1)..(76): NCBI GI NO: 7436862 NR Description: 3-dehydroquinate dehydratase (EC 4
  misc_feature (1)..(80): NCBI GI NO: 15230703 NR Description: dehydroquinate dehydratase/shikimate dehydrogenase
  misc_feature (1)..(66): NCBI GI NO: 34914828 NR Description: putative 3-dehydroquinate dehydratase / shikimate5-dehydrogenase
  misc_feature (1)..(74): NCBI GI NO: 629688 NR Description: 3-dehydroquinate dehydratase (EC 4
  misc_feature (1)..(77): NCBI GI NO: 20093378 NR Description: shikimate 5-dehydrogenase
  misc_feature (1)..(77): NCBI GI NO: 20093557 NR Description: Shikimate 5-dehydrogenase
  misc_feature (1)..(77): NCBI GI NO: 11499908 NR Description: shikimate 5-dehydrogenase (aroE)
  misc_feature (1)..(74): NCBI GI NO: 32474293 NR Description: 3-dehydroquinate dehydratase / shikimate 5-dehydrogenase precursor
  misc_feature (1)..(77): NCBI GI NO: 23051387 NR Description: hypothetical protein [Methanosarcina barkeri]
MHPNTDRIPVAEATLEDYRLVFDAVYTPRRTRLLNEADAAGAITVAGVEMFLRQAIGQFNLFTGLEAPEEFMREIVLSKF

SEQ ID NO: 6101 - protein, 57 aa, Glycine max
  peptide (1)..(57): Ceres Seq. ID no. 14312425
FLQNLDLFFLKTKGTLKPHNSASDPNQVGTPHAIIHLQHTKRYRSSSLCHCHIKFSF

SEQ ID NO: 6102 - protein, 46 aa, Glycine max
  peptide (1)..(46): Ceres Seq. ID no. 14312426
MFSYSLVFKKIEQNLLLVLYLVKLSLSKSWSTFSQRKGQFLRMQHL

SEQ ID NO: 6103 - DNA, 1704 bp, Glycine max
  misc_feature (1)..(1704): Ceres Seq. ID no. 15169180
aactccctactaccagtattacccttctctctctctccctctttctctgttgggtcactcacattattaaaaataaccaccctcacacttcccaacgcttccttaaccatgagccacgccggcctctggcttccgccgcagttcctcgccggagaccctgacacaaccctttcgaactccgatttcagcttcccttccgagttcccctacgagttcggattgtcttctccggagagcagcgacgacggcgaagaggacttcttcgccggcctcagtcgccgactcggtcagacctcgcttcacgaaactcgcaagcaactctcatccactgtttcggagattccaaggaaaactcagggtttggtcggttcccctcagtccacgctcgccggaataggaagctggtccggtcggagcgccgtttccggcgacggaagccccaacgggtactcgcgtgtcccttcgccctcgacgacgccgtttgacgaaaacaacgacccctgggaagtgatttacgcagccgcagttcaaatcgcaaggatgaagatgaacaacaacaacaaccgagttccagcacagtatgattttcacaataatagaaggttactcactcatcattgccctaaccggagtttcaatcaggtcgtgagagcgaagcaacagtgtggttcggattggggaaggccaaccaagcctaataactatttggttcagcagcaacaggttaaggttcagagtagagcgcgtgagtttgggcacgagagtgtgaatgcgaaatgcactcgtccatctgcgtggcccccttcgcaagttcagcagcaaaacaaccgggtacagtttggcggatccgggtctagggttggtggatcttctgtgaaaagggggtgtggtggaactggggtgttcttgcctcgccattatgaaaccccttctgagccacgtcgccagaaaactggttgtgcgcctgttttgttaccagcaaaggtggttcatgctttgaacttgaatattgatgacttgaatgggactacccaaccgcgtttctcgaatgcttttgctacggattatgaagcgattttagcgaggagaaacgcgcttctcatgcaggagcagcagcagcagcagcagaggttaataagtgttcggcgagaagaggcagccaactatgaaattcgccttcctcaagagtggacttactgacaaaagaaggcacaaatttctcctaaggaatttgaagaaatttggaatagtctattttggttgttttgacagaagatgaaattgaagaatgtgtttgggctagtgtttaggttcaaataaaacatctagtttttctagggagaaaaaaaggttgcattgcagcttttgggacctggttttagtggaaggaaatagtgagaggatagtagttttaggcaaggcttctttttcctttttttaccctttttatagtaatattataagttgttgtaataagataggataagcgggtcgttttcatttgccttatggttatggtgatgacactgatggggctaaagcgcaaggtatggtatggttcaacgttggccaagtttcaagtccaagtgttgaaaattggtcgattacccatgtgtgcctttactgaaaatccctgctcattattatggtatatagtttgtaataagttatacttacaatgtaataaaattagctcttctatcg

SEQ ID NO: 6104 - protein, 399 aa, Glycine max
  peptide (1)..(399): Ceres Seq. ID no. 15169181
  misc_feature (264)..(374): NCBI GI NO: 20160564 NR Description: P0414E03.8
NSLLPVLPFSLSPSFSVGSLTLLKITTLTLPNASLTMSHAGLWLPPQFLAGDPDTTLSNSDFSFPSEFPYEFGLSSPESSDDGEEDFFAGLSRRLGQTSLHETRKQLSSTVSEIPRKTQGLVGSPQSTLAGIGSWSGRSAVSGDGSPNGYSRVPSPSTTPFDENNDPWEVIYAAAVQIARMKMNNNNNRVPAQYDFHNNRRLLTHHCPNRSFNQVVRAKQQCGSDWGRPTKPNNYLVQQQQVKVQSRAREFGHESVNAKCTRPSAWPPSQVQQQNNRVQFGGSGSRVGGSSVKRGCGGTGVFLPRHYETPSEPRRQKTGCAPVLLPAKVVHALNLNIDDLNGTTQPRFSNAFATDYEAILARRNALLMQEQQQQQQRLISVRREEAANYEIRLPQEWTY

SEQ ID NO: 6105 - protein, 363 aa, Glycine max
  peptide (1)..(363): Ceres Seq. ID no. 15169182
  misc_feature (228)..(338): NCBI GI NO: 20160564 NR Description: P0414E03.8
MSHAGLWLPPQFLAGDPDTTLSNSDFSFPSEFPYEFGLSSPESSDDGEEDFFAGLSRRLGQTSLHETRKQLSSTVSEIPRKTQGLVGSPQSTLAGIGSWSGRSAVSGDGSPNGYSRVPSPSTTPFDENNDPWEVIYAAAVQIARMKMNNNNNRVPAQYDFHNNRRLLTHHCPNRSFNQVVRAKQQCGSDWGRPTKPNNYLVQQQQVKVQSRAREFGHESVNAKCTRPSAWPPSQVQQQNNRVQFGGSGSRVGGSSVKRGCGGTGVFLPRHYETPSEPRRQKTGCAPVLLPAKVVHALNLNIDDLNGTTQPRFSNAFATDYEAILARRNALLMQEQQQQQQRLISVRREEAANYEIRLPQEWTY

SEQ ID NO: 6106 - protein, 219 aa, Glycine max
  peptide (1)..(219): Ceres Seq. ID no. 15169183
  misc_feature (84)..(194): NCBI GI NO: 20160564 NR Description: P0414E03.8
MKMNNNNNRVPAQYDFHNNRRLLTHHCPNRSFNQVVRAKQQCGSDWGRPTKPNNYLVQQQQVKVQSRAREFGHESVNAKCTRPSAWPPSQVQQQNNRVQFGGSGSRVGGSSVKRGCGGTGVFLPRHYETPSEPRRQKTGCAPVLLPAKVVHALNLNIDDLNGTTQPRFSNAFATDYEAILARRNALLMQEQQQQQQRLISVRREEAANYEIRLPQEWTY

SEQ ID NO: 6107 - DNA, 1422 bp, Glycine max
  misc_feature (1)..(1422): Ceres Seq. ID no. 15170968
acttctcagttctcactctcactccgtagaaagaaccctagaatcagaattctccgtctatgttgcagaagcagctacctccccccattgaggcctcttccgatgaagagcaacgaccttcctccaagcaacacacagaagaaggagtttcctcttcagaagaagcttcttcccaagaagaagacgacgacgaccaacctcccacccttcctctcgcttccgcaaacccccacccgaaaccgtcgtcctccgactccgacaccgacttcgagcccaccaaagtaaaacccaagcccacggaccaggcccagaagccccagccctcacccgcgccgcccaaatggggatccaagcgccctgcccagaacaacgcccctgccactgacccgaaacgcgcgaagaagaaattgaccaattcttcttccgccgctgccgcccacgagacggaggagaagtccggtggcggccaagcgaagttgtctcagagactcttcagcaaggaagacgaactcgccattcttaagggcatggctgagttcatttcgaagacgggccaagacccttacaagtacgccgatgccttccaaaatttcgttaagaattcgctccgcgtggaggcttcgagcaaccagatcaaggagaagatccgacggctgaagaagaagtttgaaactaaagcacagagagcgaagaaatgggaggaccctgagttctccaaatttcacgaccggactgtgtttgaattatcaaagaaggtttggggagaaggagccaatgggctggtggagaagccaaaacctaataatggaaaaagaaaaactgccaagactccaaagaaggatgctactagcaggaatgtagtagcaaaatctgaaactacaacactactggagtcgatggagttggaggagtgtgggaatgtaaatttgctttaccgcgaagtatctggtttcaaagaactgaatgaggatgagatgaagaggggattggcgttaattggagaatctaagaggaaagagttggagggcaagtggaggaaattgcgacttgctgagatggaactggttgcgaatcgctcactacttattggggagcagattaagttgatatttgaagcacttcagtaatccaacaactagggtttattgtgttaggtatcactttttgccttttcggtactgcctgccatatgtattgtggatcattgtaattttgtgtctatggtattgatatagtcttttttattaagtaggcagtgttgtttagttgttggccttgtgaaaatgtgccgcatagtcgtccatttcaggttctctttttcaattaagatgtgccatcattaactccagaaaatgccgaaattaaacacttaccattttgtgtagatatatgatggacacatcatggttatgtgtacgtttc

SEQ ID NO: 6108 - protein, 355 aa, Glycine max
  peptide (1)..(355): Ceres Seq. ID no. 15170969
  misc_feature (142)..(235): Pfam Name: Pfam Description:  Protein of unknown function, DUF573
  misc_feature (8)..(355): NCBI GI NO: 15234971 NR Description: expressed protein [Arabidopsis thaliana]
  misc_feature (8)..(353): NCBI GI NO: 18407307 NR Description: expressed protein [Arabidopsis thaliana]
  misc_feature (8)..(353): NCBI GI NO: 21593409 NR Description: unknown [Arabidopsis thaliana]
  misc_feature (17)..(353): NCBI GI NO: 15220413 NR Description: storekeeper protein -related
  misc_feature (8)..(270): NCBI GI NO: 14268476 NR Description: storekeeper protein [Solanum tuberosum]
  misc_feature (306)..(355): NCBI GI NO: 14268476 NR Description: storekeeper protein [Solanum tuberosum]
  misc_feature (17)..(334): NCBI GI NO: 25350269 NR Description: protein T23J18.17
  misc_feature (142)..(355): NCBI GI NO: 24899707 NR Description: putative protein [Arabidopsis thaliana]
  misc_feature (142)..(355): NCBI GI NO: 14423518 NR Description: putative protein [Arabidopsis thaliana]
  misc_feature (11)..(353): NCBI GI NO: 15236795 NR Description: expressed protein [Arabidopsis thaliana]
MLQKQLPPPIEASSDEEQRPSSKQHTEEGVSSSEEASSQEEDDDDQPPTLPLASANPHPKPSSSDSDTDFEPTKVKPKPTDQAQKPQPSPAPPKWGSKRPAQNNAPATDPKRAKKKLTNSSSAAAAHETEEKSGGGQAKLSQRLFSKEDELAILKGMAEFISKTGQDPYKYADAFQNFVKNSLRVEASSNQIKEKIRRLKKKFETKAQRAKKWEDPEFSKFHDRTVFELSKKVWGEGANGLVEKPKPNNGKRKTAKTPKKDATSRNVVAKSETTTLLESMELEECGNVNLLYREVSGFKELNEDEMKRGLALIGESKRKELEGKWRKLRLAEMELVANRSLLIGEQIKLIFEALQ

SEQ ID NO: 6109 - protein, 199 aa, Glycine max
  peptide (1)..(199): Ceres Seq. ID no. 15170970
  misc_feature (1)..(79): Pfam Name: Pfam Description:  Protein of unknown function, DUF573
  misc_feature (1)..(199): NCBI GI NO: 15234971 NR Description: expressed protein [Arabidopsis thaliana]
  misc_feature (1)..(197): NCBI GI NO: 18407307 NR Description: expressed protein [Arabidopsis thaliana]
  misc_feature (1)..(197): NCBI GI NO: 21593409 NR Description: unknown [Arabidopsis thaliana]
  misc_feature (1)..(197): NCBI GI NO: 15220413 NR Description: storekeeper protein -related
  misc_feature (1)..(114): NCBI GI NO: 14268476 NR Description: storekeeper protein [Solanum tuberosum]
  misc_feature (150)..(199): NCBI GI NO: 14268476 NR Description: storekeeper protein [Solanum tuberosum]
  misc_feature (1)..(178): NCBI GI NO: 25350269 NR Description: protein T23J18.17
  misc_feature (1)..(199): NCBI GI NO: 24899707 NR Description: putative protein [Arabidopsis thaliana]
  misc_feature (1)..(199): NCBI GI NO: 14423518 NR Description: putative protein [Arabidopsis thaliana]
  misc_feature (1)..(197): NCBI GI NO: 15236795 NR Description: expressed protein [Arabidopsis thaliana]
MAEFISKTGQDPYKYADAFQNFVKNSLRVEASSNQIKEKIRRLKKKFETKAQRAKKWEDPEFSKFHDRTVFELSKKVWGEGANGLVEKPKPNNGKRKTAKTPKKDATSRNVVAKSETTTLLESMELEECGNVNLLYREVSGFKELNEDEMKRGLALIGESKRKELEGKWRKLRLAEMELVANRSLLIGEQIKLIFEALQ

SEQ ID NO: 6110 - DNA, 1382 bp, Glycine max
  misc_feature (1)..(1382): Ceres Seq. ID no. 14312416
aaaaaacccctaaagtctcattcttcttccccgcagcgccgcacagactcatcaaactcgttgtgactgcagctgcacagattttcctcttctctgtgcctttgcgagaacgcgcgtttggtttcaattcaatggcgggaggtaaagcgaagaaggaaaaggggaagccccatcagcagcagaagcacatgccctaccaaggcggaatatcgttccacaaatcaaagggtcagcacattctcaagaaccccttgctcgtcgattccattgtggagaaggccggcgtcaagagcaccgacgtcatcctcgagatcggtcccgggaccggtaacttgacgaagaagcttctcgaagccggcaagaaggtcatcgccgtcgagatcgatccccggatggttctcgagctccagagacggttccagggtacccctcactccaatcgcctcacggttatccaaggtgatgtgttgaagactgaacttccttattttgacatttgtgttgcaaacattccctaccaaatatcttctcctctcacattcaagttactcaagcacgaacctgcttttagggctgcaatcataatgttccagagagaatttgccatgagactggttgctcagcccggtgataaactatattgtcgtctcacggtcaacactcaactacatgctcgagtcttccacctcctcaaagttggaagaaacaacttcaggccccctcccaaggtggattcctctgtggtgcgaattgagcccaggaaaccccgtattgaagttaagcaaaaggagtgggatgggtttttgcggatttgttttaacaggaagaacaaaacacttggttcgatatttaggcagaagagtgtgatctccttgcttgaaaaaaactataggactgtgcgggcactggaacttgggcaagaagattcactaaaggaagtggatgctaaaatggacttctctagttttggtgatgatcgaggtatggagatggatgatgatggagcagatgatgatgaaatggaagttgaggatggggaagcagatgaggtgcaatctgaattcaaggacaaggttttgggtgttctgaaagagggagattttgaagagaagaggtcatccaagctcacattgcaggaattcctatacctgctttctctgtttaacaaaactggcatacacttctattgattttagattatcaattttctcgatagtttcttccctatttaaatctacactattctttcaataggcttatcattattcagaagttttccaagagagagtgatatcaaaaactgttaactatttatgcattgtattttgttaagctccatcgtggatgtatactactctatataatctttaggaggtttgatc

SEQ ID NO: 6111 - protein, 395 aa, Glycine max
  peptide (1)..(395): Ceres Seq. ID no. 14312417
  misc_feature (44)..(394): NCBI GI NO: 15226591 NR Description: dimethyladenosine transferase -related
  misc_feature (47)..(333): NCBI GI NO: 7657198 NR Description: putative dimethyladenosine transferase
  misc_feature (356)..(394): NCBI GI NO: 7657198 NR Description: putative dimethyladenosine transferase
  misc_feature (47)..(333): NCBI GI NO: 27151490 NR Description: Probable dimethyladenosine transferase
  misc_feature (356)..(394): NCBI GI NO: 27151490 NR Description: Probable dimethyladenosine transferase
  misc_feature (45)..(333): NCBI GI NO: 21313560 NR Description: RIKEN cDNA 1500031M22 [Mus musculus]
  misc_feature (356)..(394): NCBI GI NO: 21313560 NR Description: RIKEN cDNA 1500031M22 [Mus musculus]
  misc_feature (68)..(333): NCBI GI NO: 31209593 NR Description: ENSANGP00000016944 [Anopheles gambiae]
  misc_feature (355)..(394): NCBI GI NO: 31209593 NR Description: ENSANGP00000016944 [Anopheles gambiae]
  misc_feature (71)..(298): NCBI GI NO: 19112914 NR Description: dimethylase [Schizosaccharomyces pombe]
KTPKVSFFFPAAPHRLIKLVVTAAAQIFLFSVPLRERAFGFNSMAGGKAKKEKGKPHQQQKHMPYQGGISFHKSKGQHILKNPLLVDSIVEKAGVKSTDVILEIGPGTGNLTKKLLEAGKKVIAVEIDPRMVLELQRRFQGTPHSNRLTVIQGDVLKTELPYFDICVANIPYQISSPLTFKLLKHEPAFRAAIIMFQREFAMRLVAQPGDKLYCRLTVNTQLHARVFHLLKVGRNNFRPPPKVDSSVVRIEPRKPRIEVKQKEWDGFLRICFNRKNKTLGSIFRQKSVISLLEKNYRTVRALELGQEDSLKEVDAKMDFSSFGDDRGMEMDDDGADDDEMEVEDGEADEVQSEFKDKVLGVLKEGDFEEKRSSKLTLQEFLYLLSLFNKTGIHFY

SEQ ID NO: 6112 - protein, 352 aa, Glycine max
  peptide (1)..(352): Ceres Seq. ID no. 14312418
  misc_feature (1)..(351): NCBI GI NO: 15226591 NR Description: dimethyladenosine transferase -related
  misc_feature (4)..(290): NCBI GI NO: 7657198 NR Description: putative dimethyladenosine transferase
  misc_feature (313)..(351): NCBI GI NO: 7657198 NR Description: putative dimethyladenosine transferase
  misc_feature (4)..(290): NCBI GI NO: 27151490 NR Description: Probable dimethyladenosine transferase
  misc_feature (313)..(351): NCBI GI NO: 27151490 NR Description: Probable dimethyladenosine transferase
  misc_feature (2)..(290): NCBI GI NO: 21313560 NR Description: RIKEN cDNA 1500031M22 [Mus musculus]
  misc_feature (313)..(351): NCBI GI NO: 21313560 NR Description: RIKEN cDNA 1500031M22 [Mus musculus]
  misc_feature (25)..(290): NCBI GI NO: 31209593 NR Description: ENSANGP00000016944 [Anopheles gambiae]
  misc_feature (312)..(351): NCBI GI NO: 31209593 NR Description: ENSANGP00000016944 [Anopheles gambiae]
  misc_feature (28)..(255): NCBI GI NO: 19112914 NR Description: dimethylase [Schizosaccharomyces pombe]
MAGGKAKKEKGKPHQQQKHMPYQGGISFHKSKGQHILKNPLLVDSIVEKAGVKSTDVILEIGPGTGNLTKKLLEAGKKVIAVEIDPRMVLELQRRFQGTPHSNRLTVIQGDVLKTELPYFDICVANIPYQISSPLTFKLLKHEPAFRAAIIMFQREFAMRLVAQPGDKLYCRLTVNTQLHARVFHLLKVGRNNFRPPPKVDSSVVRIEPRKPRIEVKQKEWDGFLRICFNRKNKTLGSIFRQKSVISLLEKNYRTVRALELGQEDSLKEVDAKMDFSSFGDDRGMEMDDDGADDDEMEVEDGEADEVQSEFKDKVLGVLKEGDFEEKRSSKLTLQEFLYLLSLFNKTGIHFY

SEQ ID NO: 6113 - protein, 333 aa, Glycine max
  peptide (1)..(333): Ceres Seq. ID no. 14312419
  misc_feature (1)..(332): NCBI GI NO: 15226591 NR Description: dimethyladenosine transferase -related
  misc_feature (1)..(271): NCBI GI NO: 7657198 NR Description: putative dimethyladenosine transferase
  misc_feature (294)..(332): NCBI GI NO: 7657198 NR Description: putative dimethyladenosine transferase
  misc_feature (1)..(271): NCBI GI NO: 27151490 NR Description: Probable dimethyladenosine transferase
  misc_feature (294)..(332): NCBI GI NO: 27151490 NR Description: Probable dimethyladenosine transferase
  misc_feature (1)..(271): NCBI GI NO: 21313560 NR Description: RIKEN cDNA 1500031M22 [Mus musculus]
  misc_feature (294)..(332): NCBI GI NO: 21313560 NR Description: RIKEN cDNA 1500031M22 [Mus musculus]
  misc_feature (6)..(271): NCBI GI NO: 31209593 NR Description: ENSANGP00000016944 [Anopheles gambiae]
  misc_feature (293)..(332): NCBI GI NO: 31209593 NR Description: ENSANGP00000016944 [Anopheles gambiae]
  misc_feature (9)..(236): NCBI GI NO: 19112914 NR Description: dimethylase [Schizosaccharomyces pombe]
MPYQGGISFHKSKGQHILKNPLLVDSIVEKAGVKSTDVILEIGPGTGNLTKKLLEAGKKVIAVEIDPRMVLELQRRFQGTPHSNRLTVIQGDVLKTELPYFDICVANIPYQISSPLTFKLLKHEPAFRAAIIMFQREFAMRLVAQPGDKLYCRLTVNTQLHARVFHLLKVGRNNFRPPPKVDSSVVRIEPRKPRIEVKQKEWDGFLRICFNRKNKTLGSIFRQKSVISLLEKNYRTVRALELGQEDSLKEVDAKMDFSSFGDDRGMEMDDDGADDDEMEVEDGEADEVQSEFKDKVLGVLKEGDFEEKRSSKLTLQEFLYLLSLFNKTGIHFY

SEQ ID NO: 6114 - DNA, 1687 bp, Glycine max
  misc_feature (1)..(1687): Ceres Seq. ID no. 14312347
gaagctatcacagctccagctcctggttccactttcgctcttcacaaaatgaaccgagtgataaagaagaccgtttcaaatatctgtgctctcaaggttccaagaaagtctttttgtagtactgagggtgtgaaagttgctggttgctctattccagaggtttccaatgaccatgagaagaagcaggctattagcaaagttattccacaatatgatattgctattgttggaggaggcatggttggcatggctttatcttttttcttggcaagtaatccaatgacaaagcagttgagtgttgcaattattgatagcaatccagctcttggaagtagcttgcacatcaagaaggaagatccccctgatccaagagtcagtacagtaactcctgcttctatttcttttctccaagatgctggtgcatggaaatatgttgagcaaaatagacgtgcttattttaatacaatgcaggtctgggattatactggtttggggtatgctagatatcatgcaagagatgtaaataaagactttctagggtgcgtggcagagaataaagtgctccataatgccttattgtcatgtgtaaaggattctgatttcaagacaacaatctatcctttgaggttaagttcaatgactttgaatacaagctctatgtctatggcggaggagaatccaacatccaaagaaccaccatctgctcaaggtcatggtgcagaactgcagcttagtgatggcagtagcatatatgcaaagttggtggttggcgctgatggaggaaaatcacatgttagggagttagcaggaatcaaaacaactggatggaattactcccagaatgcaataatctgcacggtggagcatacttatgaaaatgaatgtgcatggcaacgttttctaccaacaggtccaattgctcttttacccatgggtgataagtttagcaatattgtttggaccatgagcccaacagagtcaaataaccgcaagtcaattaccgaggaagaatttttaaaggatgtgaattatgctttagattatggacatggacctcatcctacatcaagcttatcaggaactcgagacgtgttctcttggtttaaaacggatgcaacactatcaactaatgaattctttgaaattcctccaaaagtaacaaggttggcatctgaaaggatggtgtttcctttgtctttaaggcatgccaattcctatgcattgaaacgtgtggttcttattggggatgcagcccacacagtccatcctcttgctggtcaaggagttaatttgggttttggagatgcattttctctttcaagaattattgcagaggggattgctttgggcactgatattggagaggtaaatatgttaaagaagtatgaagcagagagaaaaacagcaaatattatgatgatggcaatccttgatggcgtccaaaaagcctattctattgattttggaccttttaatattctgcgagctgcagccttccatggggcaaactatatatcaccactcaaaagaagtatcatttcctatgcttcaggggaacataaattacccattttcttctgaatacagaaatgtcatttaggttaagaagtggacctacaaaatgcagggtgagaatatcaactccctaacttatttaatatattcactttactttggagattaaaag

SEQ ID NO: 6115 - protein, 526 aa, Glycine max
  peptide (1)..(526): Ceres Seq. ID no. 14312348
  misc_feature (251)..(478): Pfam Name: Pfam Description:  Monooxygenase
  misc_feature (18)..(525): NCBI GI NO: 30687388 NR Description: monooxygenase family [Arabidopsis thaliana]
  misc_feature (36)..(525): NCBI GI NO: 28376703 NR Description: putative oxygenase
  misc_feature (62)..(525): NCBI GI NO: 11994239 NR Description: gb|AAD27719
  misc_feature (71)..(517): NCBI GI NO: 32967305 NR Description: CGI-10 protein isoform a; CGI-10 protein
  misc_feature (71)..(517): NCBI GI NO: 18848355 NR Description: Coq6 protein [Mus musculus]
  misc_feature (71)..(517): NCBI GI NO: 27369832 NR Description: coenzyme Q6 homolog [Mus musculus]
  misc_feature (71)..(517): NCBI GI NO: 26006706 NR Description: Ubiquinone biosynthesis monooxgenase COQ6
  misc_feature (71)..(517): NCBI GI NO: 30047245 NR Description: Coq6 protein [Mus musculus]
  misc_feature (71)..(517): NCBI GI NO: 15680256 NR Description: Unknown (protein for MGC:23201) [Homo sapiens]
  misc_feature (140)..(517): NCBI GI NO: 34867391 NR Description: similar to Coq6 protein [Rattus norvegicus]
EAITAPAPGSTFALHKMNRVIKKTVSNICALKVPRKSFCSTEGVKVAGCSIPEVSNDHEKKQAISKVIPQYDIAIVGGGMVGMALSFFLASNPMTKQLSVAIIDSNPALGSSLHIKKEDPPDPRVSTVTPASISFLQDAGAWKYVEQNRRAYFNTMQVWDYTGLGYARYHARDVNKDFLGCVAENKVLHNALLSCVKDSDFKTTIYPLRLSSMTLNTSSMSMAEENPTSKEPPSAQGHGAELQLSDGSSIYAKLVVGADGGKSHVRELAGIKTTGWNYSQNAIICTVEHTYENECAWQRFLPTGPIALLPMGDKFSNIVWTMSPTESNNRKSITEEEFLKDVNYALDYGHGPHPTSSLSGTRDVFSWFKTDATLSTNEFFEIPPKVTRLASERMVFPLSLRHANSYALKRVVLIGDAAHTVHPLAGQGVNLGFGDAFSLSRIIAEGIALGTDIGEVNMLKKYEAERKTANIMMMAILDGVQKAYSIDFGPFNILRAAAFHGANYISPLKRSIISYASGEHKLPIFF

SEQ ID NO: 6116 - protein, 510 aa, Glycine max
  peptide (1)..(510): Ceres Seq. ID no. 14312349
  misc_feature (235)..(462): Pfam Name: Pfam Description:  Monooxygenase
  misc_feature (2)..(509): NCBI GI NO: 30687388 NR Description: monooxygenase family [Arabidopsis thaliana]
  misc_feature (20)..(509): NCBI GI NO: 28376703 NR Description: putative oxygenase
  misc_feature (46)..(509): NCBI GI NO: 11994239 NR Description: gb|AAD27719
  misc_feature (55)..(501): NCBI GI NO: 32967305 NR Description: CGI-10 protein isoform a; CGI-10 protein
  misc_feature (55)..(501): NCBI GI NO: 18848355 NR Description: Coq6 protein [Mus musculus]
  misc_feature (55)..(501): NCBI GI NO: 26006706 NR Description: Ubiquinone biosynthesis monooxgenase COQ6
  misc_feature (55)..(501): NCBI GI NO: 30047245 NR Description: Coq6 protein [Mus musculus]
  misc_feature (55)..(501): NCBI GI NO: 27369832 NR Description: coenzyme Q6 homolog [Mus musculus]
  misc_feature (55)..(501): NCBI GI NO: 15680256 NR Description: Unknown (protein for MGC:23201) [Homo sapiens]
  misc_feature (124)..(501): NCBI GI NO: 34867391 NR Description: similar to Coq6 protein [Rattus norvegicus]
MNRVIKKTVSNICALKVPRKSFCSTEGVKVAGCSIPEVSNDHEKKQAISKVIPQYDIAIVGGGMVGMALSFFLASNPMTKQLSVAIIDSNPALGSSLHIKKEDPPDPRVSTVTPASISFLQDAGAWKYVEQNRRAYFNTMQVWDYTGLGYARYHARDVNKDFLGCVAENKVLHNALLSCVKDSDFKTTIYPLRLSSMTLNTSSMSMAEENPTSKEPPSAQGHGAELQLSDGSSIYAKLVVGADGGKSHVRELAGIKTTGWNYSQNAIICTVEHTYENECAWQRFLPTGPIALLPMGDKFSNIVWTMSPTESNNRKSITEEEFLKDVNYALDYGHGPHPTSSLSGTRDVFSWFKTDATLSTNEFFEIPPKVTRLASERMVFPLSLRHANSYALKRVVLIGDAAHTVHPLAGQGVNLGFGDAFSLSRIIAEGIALGTDIGEVNMLKKYEAERKTANIMMMAILDGVQKAYSIDFGPFNILRAAAFHGANYISPLKRSIISYASGEHKLPIFF

SEQ ID NO: 6117 - protein, 447 aa, Glycine max
  peptide (1)..(447): Ceres Seq. ID no. 14312350
  misc_feature (172)..(399): Pfam Name: Pfam Description:  Monooxygenase
  misc_feature (1)..(446): NCBI GI NO: 30687388 NR Description: monooxygenase family [Arabidopsis thaliana]
  misc_feature (1)..(446): NCBI GI NO: 28376703 NR Description: putative oxygenase
  misc_feature (1)..(446): NCBI GI NO: 11994239 NR Description: gb|AAD27719
  misc_feature (1)..(438): NCBI GI NO: 32967305 NR Description: CGI-10 protein isoform a; CGI-10 protein
  misc_feature (1)..(438): NCBI GI NO: 18848355 NR Description: Coq6 protein [Mus musculus]
  misc_feature (1)..(438): NCBI GI NO: 26006706 NR Description: Ubiquinone biosynthesis monooxgenase COQ6
  misc_feature (1)..(438): NCBI GI NO: 27369832 NR Description: coenzyme Q6 homolog [Mus musculus]
  misc_feature (1)..(438): NCBI GI NO: 30047245 NR Description: Coq6 protein [Mus musculus]
  misc_feature (1)..(438): NCBI GI NO: 15680256 NR Description: Unknown (protein for MGC:23201) [Homo sapiens]
  misc_feature (61)..(438): NCBI GI NO: 34867391 NR Description: similar to Coq6 protein [Rattus norvegicus]
MVGMALSFFLASNPMTKQLSVAIIDSNPALGSSLHIKKEDPPDPRVSTVTPASISFLQDAGAWKYVEQNRRAYFNTMQVWDYTGLGYARYHARDVNKDFLGCVAENKVLHNALLSCVKDSDFKTTIYPLRLSSMTLNTSSMSMAEENPTSKEPPSAQGHGAELQLSDGSSIYAKLVVGADGGKSHVRELAGIKTTGWNYSQNAIICTVEHTYENECAWQRFLPTGPIALLPMGDKFSNIVWTMSPTESNNRKSITEEEFLKDVNYALDYGHGPHPTSSLSGTRDVFSWFKTDATLSTNEFFEIPPKVTRLASERMVFPLSLRHANSYALKRVVLIGDAAHTVHPLAGQGVNLGFGDAFSLSRIIAEGIALGTDIGEVNMLKKYEAERKTANIMMMAILDGVQKAYSIDFGPFNILRAAAFHGANYISPLKRSIISYASGEHKLPIFF

SEQ ID NO: 6118 - DNA, 1159 bp, Glycine max
  misc_feature (1)..(1159): Ceres Seq. ID no. 14312351
aatagatgctcattcatgatcatacctatggctgctgtttcttgcgtgtttcttttctttctttcttgtctatttctaaaatccatatctcaagccagcgcccagataatgttaaccgaatcctgtgataataacagcaacggcacctataacaccaatctcaacacccttttatctactctctcttccaacactgaaattaactatggtttctacaacttctcatatggtcaaaatgaagacaaagttaacgccattgggctctgcagaggagaccttaagccagatgagtgtcgtagttgtctcaacgatgccagaagcaatctcacagtcaattgtccaaaccaggaggaagagaaagagggaattttgcaccttgacaaatgcatgttgcgctactcaaatcgctcaatatttagcgtcatggagacttctcctacgctttatatgtggaattccaccaatgcaaccgacgtggatcagttcaatcaggtgctccagaacctgatgaggactctaactgagagagctgcatcgggtgactctcgtcgtaagtatgcagagggaagttcgtctgctccaaattttcaaaccatacatggtcttgtgcagtgtactcctgatttgtctcagcaagactgcaaacaatgcttggatcgtgtggctatctcacaaatcccaagttgttgcaatggcaagatcatgggtggtaaagttcttacaccaagttgtaatactagattcgaaacttaccggcatcttccgtcttcaaaaggaaatagcgacgcgtcacgaactgtactcctcgtcgccatggcagtgctagtcgttagcgttgatttggtgctcggttttatctgaaatgaaaactcgccaacttcactgcagctattatctatatggaaataattcttggacactcttttattaaagtattaccaataccaactaccaatcttttttttacaacttacactgaaattgcctttttctttcagtatatacatcttgagatatataggaagagaagggagataagattgatgatgtaacatcacagattaaaaaaaaaagttagatagataaaatgaaaggcattattagtaggatgtttgtaaattatagatgtctgtcaccattctatatatatccaccgttt

SEQ ID NO: 6119 - protein, 286 aa, Glycine max
  peptide (1)..(286): Ceres Seq. ID no. 14312352
  misc_feature (199)..(250): Pfam Name: Pfam Description:  Domain of unknown function DUF26
  misc_feature (10)..(250): NCBI GI NO: 4530126 NR Description: receptor-like protein kinase homolog RK20-1
  misc_feature (10)..(252): NCBI GI NO: 18076585 NR Description: putative receptor-like serine-threonine proteinkinase
  misc_feature (40)..(252): NCBI GI NO: 18076583 NR Description: putative receptor-like serine-threonine proteinkinase
  misc_feature (10)..(252): NCBI GI NO: 18076589 NR Description: putative receptor-like serine-threonine proteinkinase
  misc_feature (16)..(252): NCBI GI NO: 15234824 NR Description: receptor-related protein kinase - like protein
  misc_feature (18)..(252): NCBI GI NO: 22328852 NR Description: serine threonine kinase - like protein
  misc_feature (10)..(282): NCBI GI NO: 15236447 NR Description: receptor-like protein kinase, putative
  misc_feature (14)..(251): NCBI GI NO: 7488195 NR Description: probable serine/threonine-specific protein kinase
  misc_feature (14)..(251): NCBI GI NO: 13506745 NR Description: receptor-like protein kinase 4
  misc_feature (14)..(251): NCBI GI NO: 24417476 NR Description: unknown [Arabidopsis thaliana]
NRCSFMIIPMAAVSCVFLFFLSCLFLKSISQASAQIMLTESCDNNSNGTYNTNLNTLLSTLSSNTEINYGFYNFSYGQNEDKVNAIGLCRGDLKPDECRSCLNDARSNLTVNCPNQEEEKEGILHLDKCMLRYSNRSIFSVMETSPTLYMWNSTNATDVDQFNQVLQNLMRTLTERAASGDSRRKYAEGSSSAPNFQTIHGLVQCTPDLSQQDCKQCLDRVAISQIPSCCNGKIMGGKVLTPSCNTRFETYRHLPSSKGNSDASRTVLLVAMAVLVVSVDLVLGFI

SEQ ID NO: 6120 - protein, 281 aa, Glycine max
  peptide (1)..(281): Ceres Seq. ID no. 14312353
  misc_feature (194)..(245): Pfam Name: Pfam Description:  Domain of unknown function DUF26
  misc_feature (5)..(245): NCBI GI NO: 4530126 NR Description: receptor-like protein kinase homolog RK20-1
  misc_feature (5)..(247): NCBI GI NO: 18076585 NR Description: putative receptor-like serine-threonine proteinkinase
  misc_feature (35)..(247): NCBI GI NO: 18076583 NR Description: putative receptor-like serine-threonine proteinkinase
  misc_feature (5)..(247): NCBI GI NO: 18076589 NR Description: putative receptor-like serine-threonine proteinkinase
  misc_feature (11)..(247): NCBI GI NO: 15234824 NR Description: receptor-related protein kinase - like protein
  misc_feature (13)..(247): NCBI GI NO: 22328852 NR Description: serine threonine kinase - like protein
  misc_feature (5)..(277): NCBI GI NO: 15236447 NR Description: receptor-like protein kinase, putative
  misc_feature (9)..(246): NCBI GI NO: 7488195 NR Description: probable serine/threonine-specific protein kinase
  misc_feature (9)..(246): NCBI GI NO: 13506745 NR Description: receptor-like protein kinase 4
  misc_feature (9)..(246): NCBI GI NO: 24417476 NR Description: unknown [Arabidopsis thaliana]
MIIPMAAVSCVFLFFLSCLFLKSISQASAQIMLTESCDNNSNGTYNTNLNTLLSTLSSNTEINYGFYNFSYGQNEDKVNAIGLCRGDLKPDECRSCLNDARSNLTVNCPNQEEEKEGILHLDKCMLRYSNRSIFSVMETSPTLYMWNSTNATDVDQFNQVLQNLMRTLTERAASGDSRRKYAEGSSSAPNFQTIHGLVQCTPDLSQQDCKQCLDRVAISQIPSCCNGKIMGGKVLTPSCNTRFETYRHLPSSKGNSDASRTVLLVAMAVLVVSVDLVLGFI

SEQ ID NO: 6121 - protein, 277 aa, Glycine max
  peptide (1)..(277): Ceres Seq. ID no. 14312354
  misc_feature (190)..(241): Pfam Name: Pfam Description:  Domain of unknown function DUF26
  misc_feature (1)..(241): NCBI GI NO: 4530126 NR Description: receptor-like protein kinase homolog RK20-1
  misc_feature (1)..(243): NCBI GI NO: 18076585 NR Description: putative receptor-like serine-threonine proteinkinase
  misc_feature (31)..(243): NCBI GI NO: 18076583 NR Description: putative receptor-like serine-threonine proteinkinase
  misc_feature (1)..(243): NCBI GI NO: 18076589 NR Description: putative receptor-like serine-threonine proteinkinase
  misc_feature (7)..(243): NCBI GI NO: 15234824 NR Description: receptor-related protein kinase - like protein
  misc_feature (9)..(243): NCBI GI NO: 22328852 NR Description: serine threonine kinase - like protein
  misc_feature (1)..(273): NCBI GI NO: 15236447 NR Description: receptor-like protein kinase, putative
  misc_feature (5)..(242): NCBI GI NO: 7488195 NR Description: probable serine/threonine-specific protein kinase
  misc_feature (5)..(242): NCBI GI NO: 13506745 NR Description: receptor-like protein kinase 4
  misc_feature (5)..(242): NCBI GI NO: 24417476 NR Description: unknown [Arabidopsis thaliana]
MAAVSCVFLFFLSCLFLKSISQASAQIMLTESCDNNSNGTYNTNLNTLLSTLSSNTEINYGFYNFSYGQNEDKVNAIGLCRGDLKPDECRSCLNDARSNLTVNCPNQEEEKEGILHLDKCMLRYSNRSIFSVMETSPTLYMWNSTNATDVDQFNQVLQNLMRTLTERAASGDSRRKYAEGSSSAPNFQTIHGLVQCTPDLSQQDCKQCLDRVAISQIPSCCNGKIMGGKVLTPSCNTRFETYRHLPSSKGNSDASRTVLLVAMAVLVVSVDLVLGFI

SEQ ID NO: 6122 - DNA, 1448 bp, Glycine max
  misc_feature (1)..(1448): Ceres Seq. ID no. 15176246
gagaaaaaaaaggttaccccttttccatattttacctttcaaactctctctctctgtatgtatatataaagtctctttctcatgtttccttacttgggtgtagctttatttggtcatcaatttaattgcctgaccaaagtaaccatctcgttcccttttctgctttgttgaaatgccatgacagttcagatttgtaggaagcttattggaagaaaaatagctttgatatttggaaatgtctgaagtgagaaacaaagtggatttcatccagttgcttggacctgacatgtcaatcaagattctcacccatttggatgacccttgtgatcttattcgggtttcttctgtttccagttcttggcaccgatttgttattgaacatggcctctgcaagcaactttgcttgaaaatgtttcctgaaatatctggtgttgctcatataattgagcttgacaacattattgaaccactaagcaacactcttggcagttatgtaagttgggagtctcataagagaaatcatagagtctatgcatttttggcttctggtcttactcctatgaggaaaaattgcatctcaaaagccattagtgcatccagcactgataactaccctgaagaaagcattctacatacgttggagcctggggatagaactgaatatagagcatcatactggtcaagcaaaggggaaagcgatccttctgttcctgagactttagtttatgagctagcttcaaaattatgtcttgttacggagatttatgtccatccattccaagcatattttcagcatggcttccctatatattctgctaaggctgtccgattcagaatgggccattcgaaacacccaatggaattagagagtcctgtggacaacatggctgctaatcacgtcttgggcaataatcaattcatatggacatatacatcacctgaatttccaatgcttcaagaaaaccgcttgcaaaaattcaagctacctgaacctgttctgtgcattggaggtgtactgctagttgagctgttgggtagagttcaaaagcaagaaatggatgaattattctatatatgatggtgcagcatctctcatgttcaagttatgggacgactgctttttccggaatttgatgtcaaaattcatcattggtcaggaaagtgtaccttgaaatactgccctcaaacagattgttatatgtcttctccaacatcatcaccgagaagcaactcgagtaatccgtcacgcctgcggaccataacctcaagcataatgcagaggggtgtgagacgttgggagcaatttctcttgggtgcattgcttggtactggtcctgttgtagttgataatgaagatcaatgaaaaaaaaaaatgtaagtaataaagtacttccattctcaaatggaagatattggtcccaatatctgtatagcatggaatatgttga

SEQ ID NO: 6123 - protein, 280 aa, Glycine max
  peptide (1)..(280): Ceres Seq. ID no. 15176247
  misc_feature (14)..(57): Pfam Name: Pfam Description:  F-box domain
  misc_feature (8)..(280): NCBI GI NO: 18411435 NR Description: F-box protein family [Arabidopsis thaliana]
  misc_feature (1)..(280): NCBI GI NO: 31193913 NR Description: unknown protein
  misc_feature (139)..(280): NCBI GI NO: 28393062 NR Description: putative F-box protein [Arabidopsis thaliana]
  misc_feature (31)..(205): NCBI GI NO: 7452420 NR Description: hypothetical protein A_TM018A10
  misc_feature (233)..(280): NCBI GI NO: 18308222 NR Description: unknown protein [Oryza sativa]
MSEVRNKVDFIQLLGPDMSIKILTHLDDPCDLIRVSSVSSSWHRFVIEHGLCKQLCLKMFPEISGVAHIIELDNIIEPLSNTLGSYVSWESHKRNHRVYAFLASGLTPMRKNCISKAISASSTDNYPEESILHTLEPGDRTEYRASYWSSKGESDPSVPETLVYELASKLCLVTEIYVHPFQAYFQHGFPIYSAKAVRFRMGHSKHPMELESPVDNMAANHVLGNNQFIWTYTSPEFPMLQENRLQKFKLPEPVLCIGGVLLVELLGRVQKQEMDELFYI

SEQ ID NO: 6124 - protein, 263 aa, Glycine max
  peptide (1)..(263): Ceres Seq. ID no. 15176248
  misc_feature (1)..(40): Pfam Name: Pfam Description:  F-box domain
  misc_feature (1)..(263): NCBI GI NO: 18411435 NR Description: F-box protein family [Arabidopsis thaliana]
  misc_feature (1)..(263): NCBI GI NO: 31193913 NR Description: unknown protein
  misc_feature (122)..(263): NCBI GI NO: 28393062 NR Description: putative F-box protein [Arabidopsis thaliana]
  misc_feature (14)..(188): NCBI GI NO: 7452420 NR Description: hypothetical protein A_TM018A10
  misc_feature (216)..(263): NCBI GI NO: 18308222 NR Description: unknown protein [Oryza sativa]
MSIKILTHLDDPCDLIRVSSVSSSWHRFVIEHGLCKQLCLKMFPEISGVAHIIELDNIIEPLSNTLGSYVSWESHKRNHRVYAFLASGLTPMRKNCISKAISASSTDNYPEESILHTLEPGDRTEYRASYWSSKGESDPSVPETLVYELASKLCLVTEIYVHPFQAYFQHGFPIYSAKAVRFRMGHSKHPMELESPVDNMAANHVLGNNQFIWTYTSPEFPMLQENRLQKFKLPEPVLCIGGVLLVELLGRVQKQEMDELFYI

SEQ ID NO: 6125 - protein, 222 aa, Glycine max
  peptide (1)..(222): Ceres Seq. ID no. 15176249
  misc_feature (1)..(222): NCBI GI NO: 18411435 NR Description: F-box protein family [Arabidopsis thaliana]
  misc_feature (1)..(222): NCBI GI NO: 31193913 NR Description: unknown protein
  misc_feature (81)..(222): NCBI GI NO: 28393062 NR Description: putative F-box protein [Arabidopsis thaliana]
  misc_feature (1)..(147): NCBI GI NO: 7452420 NR Description: hypothetical protein A_TM018A10
  misc_feature (175)..(222): NCBI GI NO: 18308222 NR Description: unknown protein [Oryza sativa]
MFPEISGVAHIIELDNIIEPLSNTLGSYVSWESHKRNHRVYAFLASGLTPMRKNCISKAISASSTDNYPEESILHTLEPGDRTEYRASYWSSKGESDPSVPETLVYELASKLCLVTEIYVHPFQAYFQHGFPIYSAKAVRFRMGHSKHPMELESPVDNMAANHVLGNNQFIWTYTSPEFPMLQENRLQKFKLPEPVLCIGGVLLVELLGRVQKQEMDELFYI

SEQ ID NO: 6126 - DNA, 1213 bp, Glycine max
  misc_feature (1)..(1213): Ceres Seq. ID no. 14308095
caaggtgaattctctctctctctctctctctcaaatcatcctctgcttttctctttcttttctttgaattttcatggctgtagctactgcagtggccaaaggacaatattggacttataattgtgagagtagtcatggaggggatggctcccaattcatgtgcaaggccagttgtagagaagaaagcaaggccacaagagcaactgaattgtccaaggtgcaattcaaccaatacaaagttctgctactacaacaactacagcctcacacagccaagatacttctgcaagacttgtagaaggtattggacagaaggagggtctctgagaaacgttccagttggaggtggttcaagaaagaacaagaaggtctctgtgacagcttcatcatcaccaaaggttccagacctaaacccaccaaaccactcagctatctcatcacacaaccctaaaataatgcatggtggccaagatctcaatcttgctttcccagccatggaaaagtaccatcatcatggcatgtcaccttataacgttgagatgcaaaacagtaacaccaccactactcatcatcatcaccaaacctctccttcttgttctgctcctccagctaattctctttcagctcttgagctacttaggtccagcatggcatctaggggtttgaacccttatgctcctaattcttccttgatgccaaactcaacaaacaacaacaacaatgccctttacccatcagggtttcccatgcaagaagttaaacctagtcttaacttttcttcagttgatgggatcggaaataatagatcatatgatcaagagaggggtggtggcagagttttgttcccttttggagacgtcaaacagctttctgctgctgcaggtgctgctgatcaagtggaacaacaacaacaaggaaattcaactggttattggactggaatgattggtgaaggaacatggtaagaaagaaaaaaaaaagggaggacaaaggaaaattaagagaacatgcattaataacattatatttatatatcttttttttttattttggtcttccctttttttttctctttccacaatatggatatcatttggcagctgaagttgttcaggaactaacaataggacacacatggttaattatttctttgttttgtacacacctcctttgttttatttgagagaacgtaagaggattttacttctaaaag

SEQ ID NO: 6127 - protein, 276 aa, Glycine max
  peptide (1)..(276): Ceres Seq. ID no. 14308096
  misc_feature (19)..(80): Pfam Name: Pfam Description:  Dof domain, zinc finger
  misc_feature (1)..(225): NCBI GI NO: 24211633 NR Description: DOF zinc finger protein DAG2
  misc_feature (1)..(225): NCBI GI NO: 25352313 NR Description: probable DOF zinc finger protein
  misc_feature (1)..(225): NCBI GI NO: 30690446 NR Description: Dof zinc finger protein [Arabidopsis thaliana]
  misc_feature (16)..(223): NCBI GI NO: 15228621 NR Description: Dof zinc finger transcription factor (DAG1) (BBFa)
  misc_feature (16)..(223): NCBI GI NO: 30695501 NR Description: Dof zinc finger transcription factor (DAG1) (BBFa)
  misc_feature (1)..(195): NCBI GI NO: 7489124 NR Description: finger protein BBF1.1 - common tobacco (fragment)
  misc_feature (1)..(195): NCBI GI NO: 7489130 NR Description: finger protein Dof - common tobacco (fragment)
  misc_feature (15)..(182): NCBI GI NO: 4996642 NR Description: Dof zinc finger protein [Oryza sativa]
  misc_feature (15)..(171): NCBI GI NO: 4996640 NR Description: Dof zinc finger protein [Oryza sativa]
  misc_feature (15)..(171): NCBI GI NO: 38344272 NR Description: OSJNBa0005N02.10
MEGMAPNSCARPVVEKKARPQEQLNCPRCNSTNTKFCYYNNYSLTQPRYFCKTCRRYWTEGGSLRNVPVGGGSRKNKKVSVTASSSPKVPDLNPPNHSAISSHNPKIMHGGQDLNLAFPAMEKYHHHGMSPYNVEMQNSNTTTTHHHHQTSPSCSAPPANSLSALELLRSSMASRGLNPYAPNSSLMPNSTNNNNNALYPSGFPMQEVKPSLNFSSVDGIGNNRSYDQERGGGRVLFPFGDVKQLSAAAGAADQVEQQQQGNSTGYWTGMIGEGTW

SEQ ID NO: 6128 - protein, 273 aa, Glycine max
  peptide (1)..(273): Ceres Seq. ID no. 14308097
  misc_feature (16)..(77): Pfam Name: Pfam Description:  Dof domain, zinc finger
  misc_feature (1)..(222): NCBI GI NO: 24211633 NR Description: DOF zinc finger protein DAG2
  misc_feature (1)..(222): NCBI GI NO: 25352313 NR Description: probable DOF zinc finger protein
  misc_feature (1)..(222): NCBI GI NO: 30690446 NR Description: Dof zinc finger protein [Arabidopsis thaliana]
  misc_feature (13)..(220): NCBI GI NO: 15228621 NR Description: Dof zinc finger transcription factor (DAG1) (BBFa)
  misc_feature (13)..(220): NCBI GI NO: 30695501 NR Description: Dof zinc finger transcription factor (DAG1) (BBFa)
  misc_feature (1)..(192): NCBI GI NO: 7489124 NR Description: finger protein BBF1.1 - common tobacco (fragment)
  misc_feature (1)..(192): NCBI GI NO: 7489130 NR Description: finger protein Dof - common tobacco (fragment)
  misc_feature (12)..(179): NCBI GI NO: 4996642 NR Description: Dof zinc finger protein [Oryza sativa]
  misc_feature (12)..(168): NCBI GI NO: 4996640 NR Description: Dof zinc finger protein [Oryza sativa]
  misc_feature (12)..(168): NCBI GI NO: 38344272 NR Description: OSJNBa0005N02.10
MAPNSCARPVVEKKARPQEQLNCPRCNSTNTKFCYYNNYSLTQPRYFCKTCRRYWTEGGSLRNVPVGGGSRKNKKVSVTASSSPKVPDLNPPNHSAISSHNPKIMHGGQDLNLAFPAMEKYHHHGMSPYNVEMQNSNTTTTHHHHQTSPSCSAPPANSLSALELLRSSMASRGLNPYAPNSSLMPNSTNNNNNALYPSGFPMQEVKPSLNFSSVDGIGNNRSYDQERGGGRVLFPFGDVKQLSAAAGAADQVEQQQQGNSTGYWTGMIGEGTW

SEQ ID NO: 6129 - protein, 169 aa, Glycine max
  peptide (1)..(169): Ceres Seq. ID no. 14308098
  misc_feature (1)..(118): NCBI GI NO: 24211633 NR Description: DOF zinc finger protein DAG2
  misc_feature (1)..(118): NCBI GI NO: 25352313 NR Description: probable DOF zinc finger protein
  misc_feature (1)..(118): NCBI GI NO: 30690446 NR Description: Dof zinc finger protein [Arabidopsis thaliana]
  misc_feature (1)..(116): NCBI GI NO: 15228621 NR Description: Dof zinc finger transcription factor (DAG1) (BBFa)
  misc_feature (1)..(116): NCBI GI NO: 30695501 NR Description: Dof zinc finger transcription factor (DAG1) (BBFa)
  misc_feature (1)..(88): NCBI GI NO: 7489124 NR Description: finger protein BBF1.1 - common tobacco (fragment)
  misc_feature (1)..(88): NCBI GI NO: 7489130 NR Description: finger protein Dof - common tobacco (fragment)
  misc_feature (1)..(75): NCBI GI NO: 4996642 NR Description: Dof zinc finger protein [Oryza sativa]
  misc_feature (1)..(64): NCBI GI NO: 4996640 NR Description: Dof zinc finger protein [Oryza sativa]
  misc_feature (1)..(64): NCBI GI NO: 38344272 NR Description: OSJNBa0005N02.10
MHGGQDLNLAFPAMEKYHHHGMSPYNVEMQNSNTTTTHHHHQTSPSCSAPPANSLSALELLRSSMASRGLNPYAPNSSLMPNSTNNNNNALYPSGFPMQEVKPSLNFSSVDGIGNNRSYDQERGGGRVLFPFGDVKQLSAAAGAADQVEQQQQGNSTGYWTGMIGEGTW

SEQ ID NO: 6130 - DNA, 1206 bp, Glycine max
  misc_feature (1)..(1206): Ceres Seq. ID no. 15170911
atcactctgttaaaagcttatcaacttttctctttctctctggcgaatatgctttcttggaaagttctcctcgtctccgccgccgtcttgttcgcggcgttaggcctcagagtctctcttccagtcgccgccaccaacctccctcttctttggagtttcttcctcttgtgtttcaagcctccttacctcttcgttgttctcaacgccatcatcatctccatcgtcgcttcttcacggtttcatcactcatcaaaccctcaatctccggagccaactcctccacgtgttgaatccatgcccgctcccaccgttccagaaccaccgcttttccaagtaaaagccgttctcgaagtggagaagaaagtaatcgaagaagatgttgtggcactaaagagaaaagactcgacggagattccatcgccggaggagaagccactggtgtctgctaggttcactcaccggaaattccttaaatccagttcagaaggtgggagagcgttgagagtggtggctaaggcaaaacgggacgagacgttggagagcacgtggaaggccataacggagggtcgatcaatgccattgagcaggcacatgaagaagtccgacatgtggcacaaccgcaacgtgaccccacaaccccaagagacattcaacgatgcactgagtgtgtcgtccgggaggctgcggaaagaaccctcgctgagtcaagacgagttgaatcgtcgcgtcgaagccttcatacaaaagttcaaccaagagatgaggctgcaaagacaacaatccttagaacagtacatgcagatgattaaccgcggtgccgcttaatctcaacctcaacataatcaatattttcattttacagaacaaaaaaacatatatagtgtaagtatttctgcaggtgtagacagtaggggtatttattttattgccatatattagtttatggttgggttaggctcatcatcattatttctttaatttgtttgttttgtgcctttatatgctccacataccaaaaatgtggttcatgttcaatatcaattagctagctagctagaaaacaaacacaccaaaaaaacacttcggggaacttaggattaatgttgttcctctttgtaatttttcggggtcattttttttagtcaaacctctttctctgtaattaataccatgaatgtaagcctgtaacgtttagtttgctattct

SEQ ID NO: 6131 - protein, 274 aa, Glycine max
  peptide (1)..(274): Ceres Seq. ID no. 15170912
  misc_feature (21)..(90): Pfam Name: Pfam Description:  Cotton fibre expressed protein
  misc_feature (111)..(272): NCBI GI NO: 30696552 NR Description: cotton fiber expressed protein -related
  misc_feature (17)..(90): NCBI GI NO: 30696552 NR Description: cotton fiber expressed protein -related
  misc_feature (111)..(272): NCBI GI NO: 25373438 NR Description: hypothetical protein F11P17.2
  misc_feature (18)..(90): NCBI GI NO: 25373438 NR Description: hypothetical protein F11P17.2
  misc_feature (132)..(272): NCBI GI NO: 15239605 NR Description: cotton fiber expressed protein 1-related protein
  misc_feature (48)..(105): NCBI GI NO: 15239605 NR Description: cotton fiber expressed protein 1-related protein
  misc_feature (164)..(273): NCBI GI NO: 7484716 NR Description: fiber protein 1 [imported] - upland cotton
  misc_feature (17)..(104): NCBI GI NO: 7484716 NR Description: fiber protein 1 [imported] - upland cotton
  misc_feature (132)..(264): NCBI GI NO: 7484716 NR Description: fiber protein 1 [imported] - upland cotton
  misc_feature (137)..(207): NCBI GI NO: 34898720 NR Description: putative fiber protein
ITLLKAYQLFSFSLANMLSWKVLLVSAAVLFAALGLRVSLPVAATNLPLLWSFFLLCFKPPYLFVVLNAIIISIVASSRFHHSSNPQSPEPTPPRVESMPAPTVPEPPLFQVKAVLEVEKKVIEEDVVALKRKDSTEIPSPEEKPLVSARFTHRKFLKSSSEGGRALRVVAKAKRDETLESTWKAITEGRSMPLSRHMKKSDMWHNRNVTPQPQETFNDALSVSSGRLRKEPSLSQDELNRRVEAFIQKFNQEMRLQRQQSLEQYMQMINRGAA

SEQ ID NO: 6132 - protein, 258 aa, Glycine max
  peptide (1)..(258): Ceres Seq. ID no. 15170913
  misc_feature (5)..(74): Pfam Name: Pfam Description:  Cotton fibre expressed protein
  misc_feature (95)..(256): NCBI GI NO: 30696552 NR Description: cotton fiber expressed protein -related
  misc_feature (1)..(74): NCBI GI NO: 30696552 NR Description: cotton fiber expressed protein -related
  misc_feature (95)..(256): NCBI GI NO: 25373438 NR Description: hypothetical protein F11P17.2
  misc_feature (2)..(74): NCBI GI NO: 25373438 NR Description: hypothetical protein F11P17.2
  misc_feature (116)..(256): NCBI GI NO: 15239605 NR Description: cotton fiber expressed protein 1-related protein
  misc_feature (32)..(89): NCBI GI NO: 15239605 NR Description: cotton fiber expressed protein 1-related protein
  misc_feature (148)..(257): NCBI GI NO: 7484716 NR Description: fiber protein 1 [imported] - upland cotton
  misc_feature (1)..(88): NCBI GI NO: 7484716 NR Description: fiber protein 1 [imported] - upland cotton
  misc_feature (116)..(248): NCBI GI NO: 7484716 NR Description: fiber protein 1 [imported] - upland cotton
  misc_feature (121)..(191): NCBI GI NO: 34898720 NR Description: putative fiber protein
MLSWKVLLVSAAVLFAALGLRVSLPVAATNLPLLWSFFLLCFKPPYLFVVLNAIIISIVASSRFHHSSNPQSPEPTPPRVESMPAPTVPEPPLFQVKAVLEVEKKVIEEDVVALKRKDSTEIPSPEEKPLVSARFTHRKFLKSSSEGGRALRVVAKAKRDETLESTWKAITEGRSMPLSRHMKKSDMWHNRNVTPQPQETFNDALSVSSGRLRKEPSLSQDELNRRVEAFIQKFNQEMRLQRQQSLEQYMQMINRGAA

SEQ ID NO: 6133 - protein, 176 aa, Glycine max
  peptide (1)..(176): Ceres Seq. ID no. 15170914
  misc_feature (13)..(169): Pfam Name: Pfam Description:  Cotton fibre expressed protein
  misc_feature (13)..(174): NCBI GI NO: 30696552 NR Description: cotton fiber expressed protein -related
  misc_feature (13)..(174): NCBI GI NO: 25373438 NR Description: hypothetical protein F11P17.2
  misc_feature (34)..(174): NCBI GI NO: 15239605 NR Description: cotton fiber expressed protein 1-related protein
  misc_feature (66)..(175): NCBI GI NO: 7484716 NR Description: fiber protein 1 [imported] - upland cotton
  misc_feature (34)..(166): NCBI GI NO: 7484716 NR Description: fiber protein 1 [imported] - upland cotton
  misc_feature (39)..(109): NCBI GI NO: 34898720 NR Description: putative fiber protein
  misc_feature (117)..(175): NCBI GI NO: 34898720 NR Description: putative fiber protein
  misc_feature (34)..(95): NCBI GI NO: 7484718 NR Description: fiber protein 3 [imported] - upland cotton
  misc_feature (1)..(136): NCBI GI NO: 34898720 NR Description: putative fiber protein
  misc_feature (19)..(159): NCBI GI NO: 15220310 NR Description: expressed protein [Arabidopsis thaliana]
MPAPTVPEPPLFQVKAVLEVEKKVIEEDVVALKRKDSTEIPSPEEKPLVSARFTHRKFLKSSSEGGRALRVVAKAKRDETLESTWKAITEGRSMPLSRHMKKSDMWHNRNVTPQPQETFNDALSVSSGRLRKEPSLSQDELNRRVEAFIQKFNQEMRLQRQQSLEQYMQMINRGAA

SEQ ID NO: 6134 - DNA, 1301 bp, Glycine max
  misc_feature (1)..(1301): Ceres Seq. ID no. 14316263
aggatcacagtaggagataaggagagcattcaccattttcttgtggtttggtttcctagagacactaagtactcccatggaacaaaacaacaaaagccttgtttcttctaaattcttatgtttatgtttgttgatcaccttgatcagcattattgttgctccacaagcggaagcagcacgagcatttttcgtgtttggcgattcgcttgtagacaacgggaacaacaatttcttggccaccacggcgcgtgccgattcatatccttatggcattgattctgcatctcatagagcctctggtcgtttctccaatggcctcaacatgcctgaccttatcagtgagaaaattggctcagaacccacattaccatatttgagtccacagctcaatggtgaaaggctgcttgttggtgcaaactttgcttctgctgggataggaattctcaacgacactggaattcagtttataaacataatccgaattacagaacaattggcatacttcaaacagtatcagcagagggtgagtgcactaattggagaagagcagactcgaaatttagtgaacaaagcattggtgctcataaccttaggtggcaatgattttgtcaacaactattatttggttcctttctctgccagatcccgcgaatatgctcttccagactacgttgtcttcctcatttcggagtatcgtaaaattcttgcgaatctgtatgaattgggggcacgaagggttctagtgacaggcacgggaccactgggttgcgtgccagcagaattggctatgcacagccaaaacggagaatgtgcgactgagctgcaacgagccgttaacctgttcaatcctcaactcgtccaactactgcacgaacttaacactcaaattggctccgatgtcttcatttccgcaaacgccttcaccatgcatttggatttcgttagtaacccacaagcctatgggtttgtcacgtcaaaagtagcatgctgtggtcaaggagcatacaatggaatcggactctgcactccagcttcaaacttgtgcccaaacagggatttatatgcattttgggaccccttccatccatcagagagagcaaatagattgatcgtggataaattcatgactggatccaccgaatacatgcaccctatgaaccttagtacaattattgctttagattctacaacctaatgcaccattactgtatgagttgtcttcttttcttgtctatgcacacctagttcctacaagatattgtatttttcttgaatgtttaaaactatgacgttaattactc

SEQ ID NO: 6135 - protein, 372 aa, Glycine max
  peptide (1)..(372): Ceres Seq. ID no. 14316264
  misc_feature (37)..(348): Pfam Name: Pfam Description:  GDSL-like Lipase/Acylhydrolase
  misc_feature (7)..(372): NCBI GI NO: 15242808 NR Description: GDSL-motif lipase/hydrolase protein
  misc_feature (16)..(371): NCBI GI NO: 15229265 NR Description: GDSL-motif lipase/hydrolase protein
  misc_feature (18)..(369): NCBI GI NO: 32489520 NR Description: OSJNBa0043L24.11
  misc_feature (16)..(372): NCBI GI NO: 28071322 NR Description: P0705A05.30
  misc_feature (11)..(370): NCBI GI NO: 15235421 NR Description: GDSL-motif lipase/hydrolase protein
  misc_feature (16)..(370): NCBI GI NO: 22758315 NR Description: putative early nodulin gene (Enod) related protein
  misc_feature (16)..(370): NCBI GI NO: 37535146 NR Description: putative early nodulin gene (Enod) related protein
  misc_feature (22)..(368): NCBI GI NO: 15238814 NR Description: GDSL-motif lipase/hydrolase protein
  misc_feature (27)..(196): NCBI GI NO: 37789825 NR Description: putative GDSL-motif lipase [Vitis vinifera]
  misc_feature (36)..(365): NCBI GI NO: 15227849 NR Description: GDSL-motif lipase/hydrolase protein
MEQNNKSLVSSKFLCLCLLITLISIIVAPQAEAARAFFVFGDSLVDNGNNNFLATTARADSYPYGIDSASHRASGRFSNGLNMPDLISEKIGSEPTLPYLSPQLNGERLLVGANFASAGIGILNDTGIQFINIIRITEQLAYFKQYQQRVSALIGEEQTRNLVNKALVLITLGGNDFVNNYYLVPFSARSREYALPDYVVFLISEYRKILANLYELGARRVLVTGTGPLGCVPAELAMHSQNGECATELQRAVNLFNPQLVQLLHELNTQIGSDVFISANAFTMHLDFVSNPQAYGFVTSKVACCGQGAYNGIGLCTPASNLCPNRDLYAFWDPFHPSERANRLIVDKFMTGSTEYMHPMNLSTIIALDSTT

SEQ ID NO: 6136 - protein, 290 aa, Glycine max
  peptide (1)..(290): Ceres Seq. ID no. 14316265
  misc_feature (1)..(266): Pfam Name: Pfam Description:  GDSL-like Lipase/Acylhydrolase
  misc_feature (1)..(290): NCBI GI NO: 15242808 NR Description: GDSL-motif lipase/hydrolase protein
  misc_feature (1)..(289): NCBI GI NO: 15229265 NR Description: GDSL-motif lipase/hydrolase protein
  misc_feature (1)..(287): NCBI GI NO: 32489520 NR Description: OSJNBa0043L24.11
  misc_feature (1)..(290): NCBI GI NO: 28071322 NR Description: P0705A05.30
  misc_feature (1)..(288): NCBI GI NO: 15235421 NR Description: GDSL-motif lipase/hydrolase protein
  misc_feature (1)..(288): NCBI GI NO: 22758315 NR Description: putative early nodulin gene (Enod) related protein
  misc_feature (1)..(288): NCBI GI NO: 37535146 NR Description: putative early nodulin gene (Enod) related protein
  misc_feature (1)..(286): NCBI GI NO: 15238814 NR Description: GDSL-motif lipase/hydrolase protein
  misc_feature (1)..(114): NCBI GI NO: 37789825 NR Description: putative GDSL-motif lipase [Vitis vinifera]
  misc_feature (1)..(283): NCBI GI NO: 15227849 NR Description: GDSL-motif lipase/hydrolase protein
MPDLISEKIGSEPTLPYLSPQLNGERLLVGANFASAGIGILNDTGIQFINIIRITEQLAYFKQYQQRVSALIGEEQTRNLVNKALVLITLGGNDFVNNYYLVPFSARSREYALPDYVVFLISEYRKILANLYELGARRVLVTGTGPLGCVPAELAMHSQNGECATELQRAVNLFNPQLVQLLHELNTQIGSDVFISANAFTMHLDFVSNPQAYGFVTSKVACCGQGAYNGIGLCTPASNLCPNRDLYAFWDPFHPSERANRLIVDKFMTGSTEYMHPMNLSTIIALDSTT

SEQ ID NO: 6137 - DNA, 1624 bp, Glycine max
  misc_feature (1)..(1624): Ceres Seq. ID no. 15169199
gaagaaaaaataattaaaaatagaaaagatggtggaaagataatgtggatctgattcaaaccacacgattccacgaccttattttggagccgcggtggcggtagcggtggccggcgattgtagcggcgtaggagcaagaaatggttttatgttgtgaggaagattgttaagctgtgggaatatgtcattgagaagcatagtccgtgaactcaaggagatgagagatggaataggaagcacatcaaagcggggtgcagaaagcaagcatcggctcagtcggacaaagtcacatgtagctccagatgttcttgcaactccatttgaacctattcaacagggacaatgggcaaatctaccatcagaattgcttttggacataatccagagggtcgaagagagtgagacatcttggcctgcccgtgctgttgttgtcttttgtgcttcagtatgtaaatcatggaggtccattacaagagagattgtcaagactcctgaacaatgtggaaggatcacatttcccatttcattgaagcagccgggtccgcgtgattctccaatacagtgctttatcaggaggaacaaagaaacttctacatatctattgtactttggtctggttccatcagagaatgacagtaataagttgttattagctgccaaaaggataagaagggcaacaggctccggttttgtcatatccttggctgctgatgatttttctcgagccagcaacaaatatgttggtaaactaaggtctaactttttgggtaccaagttcaccgtatatgacagtcaagctccacatgattctgcaattcaatcaaattgtcaatctagtaggagatttcattctaagcaggtgtcaccaagagttccagcatgtagctatcttgtcagcactgtttcctacgagctgaatgtcctttgcactagagggccaagaagaatgcattgtgtcatgaactctatacctgtctcagctattcaggaaggaggcaacgccccaactccaacatctttccctcaaatatttgatgaacctttttctccatcaccagcactgaaagaaaaagctcaagtcacagatttaaactctgcaagcttatcagagccaccagtattgagccaaggctcaaccgagcaattagcactgaaaaacaaggctcccagatggcatgagcagctacagtgctggtgtctaaacttcaagggtcgcgtttcagtggcttctgttaagaactttcaacttgtagctgctgttgatccatctcataatatttctgccgaggagcaagaaaaggtaatcttgcagtttggaaagattggaaaagacatatttaccatggattactgttatccactctctactttccaagccttcgccatctgcttgagcagctttgacactaaacctgcctgtgaatgagaggtgttgcattactacattgtaatcgtcatctgctgagttgttgattgccaatcctggtggcatacagctgaaatcatagctgtgctgccgttggaatcccccccttataaattggttgttgattctggaatttattctgtcttttgttttgtggtcctgtaaaattaaattaaatgaagtttagtgaattctatg

SEQ ID NO: 6138 - protein, 414 aa, Glycine max
  peptide (1)..(414): Ceres Seq. ID no. 15169200
  misc_feature (119)..(414): Pfam Name: Pfam Description:  Tub family
  misc_feature (1)..(414): NCBI GI NO: 7635492 NR Description: tubby-like protein [Cicer arietinum]
  misc_feature (1)..(414): NCBI GI NO: 30680328 NR Description: F-box containing tubby family protein
  misc_feature (1)..(414): NCBI GI NO: 30793997 NR Description: putative F-box containing tubby family protein
  misc_feature (1)..(414): NCBI GI NO: 34899264 NR Description: contains ESTsAU068695
  misc_feature (1)..(414): NCBI GI NO: 25409071 NR Description: probable Tub family protein
  misc_feature (1)..(414): NCBI GI NO: 30690823 NR Description: F-box containing tubby family protein
  misc_feature (1)..(321): NCBI GI NO: 15223772 NR Description: F-box containing tubby family protein
  misc_feature (298)..(414): NCBI GI NO: 15223772 NR Description: F-box containing tubby family protein
  misc_feature (1)..(302): NCBI GI NO: 32480039 NR Description: OSJNBa0039K24.2
  misc_feature (281)..(372): NCBI GI NO: 32480039 NR Description: OSJNBa0039K24.2
MSLRSIVRELKEMRDGIGSTSKRGAESKHRLSRTKSHVAPDVLATPFEPIQQGQWANLPSELLLDIIQRVEESETSWPARAVVVFCASVCKSWRSITREIVKTPEQCGRITFPISLKQPGPRDSPIQCFIRRNKETSTYLLYFGLVPSENDSNKLLLAAKRIRRATGSGFVISLAADDFSRASNKYVGKLRSNFLGTKFTVYDSQAPHDSAIQSNCQSSRRFHSKQVSPRVPACSYLVSTVSYELNVLCTRGPRRMHCVMNSIPVSAIQEGGNAPTPTSFPQIFDEPFSPSPALKEKAQVTDLNSASLSEPPVLSQGSTEQLALKNKAPRWHEQLQCWCLNFKGRVSVASVKNFQLVAAVDPSHNISAEEQEKVILQFGKIGKDIFTMDYCYPLSTFQAFAICLSSFDTKPACE

SEQ ID NO: 6139 - protein, 402 aa, Glycine max
  peptide (1)..(402): Ceres Seq. ID no. 15169201
  misc_feature (107)..(402): Pfam Name: Pfam Description:  Tub family
  misc_feature (1)..(402): NCBI GI NO: 7635492 NR Description: tubby-like protein [Cicer arietinum]
  misc_feature (1)..(402): NCBI GI NO: 30680328 NR Description: F-box containing tubby family protein
  misc_feature (1)..(402): NCBI GI NO: 30793997 NR Description: putative F-box containing tubby family protein
  misc_feature (1)..(402): NCBI GI NO: 34899264 NR Description: contains ESTsAU068695
  misc_feature (1)..(402): NCBI GI NO: 25409071 NR Description: probable Tub family protein
  misc_feature (1)..(402): NCBI GI NO: 30690823 NR Description: F-box containing tubby family protein
  misc_feature (1)..(309): NCBI GI NO: 15223772 NR Description: F-box containing tubby family protein
  misc_feature (286)..(402): NCBI GI NO: 15223772 NR Description: F-box containing tubby family protein
  misc_feature (1)..(290): NCBI GI NO: 32480039 NR Description: OSJNBa0039K24.2
  misc_feature (269)..(360): NCBI GI NO: 32480039 NR Description: OSJNBa0039K24.2
MRDGIGSTSKRGAESKHRLSRTKSHVAPDVLATPFEPIQQGQWANLPSELLLDIIQRVEESETSWPARAVVVFCASVCKSWRSITREIVKTPEQCGRITFPISLKQPGPRDSPIQCFIRRNKETSTYLLYFGLVPSENDSNKLLLAAKRIRRATGSGFVISLAADDFSRASNKYVGKLRSNFLGTKFTVYDSQAPHDSAIQSNCQSSRRFHSKQVSPRVPACSYLVSTVSYELNVLCTRGPRRMHCVMNSIPVSAIQEGGNAPTPTSFPQIFDEPFSPSPALKEKAQVTDLNSASLSEPPVLSQGSTEQLALKNKAPRWHEQLQCWCLNFKGRVSVASVKNFQLVAAVDPSHNISAEEQEKVILQFGKIGKDIFTMDYCYPLSTFQAFAICLSSFDTKPACE

SEQ ID NO: 6140 - DNA, 1315 bp, Glycine max
  misc_feature (1)..(1315): Ceres Seq. ID no. 14308867
aacgaaacccgtcgtcaaagtgggtttccggcagagatcatatatcttctagggtgtccacctttgaaattcaatctccaattgagcatcacaaaccctagaaaatcgttccagatgaatacaaaatcgctccaaatcctggtgcactcaccggacctcggaatttcccttcaatccacaaccaaccacgaaaccctttccgatctcaaaaactctcttttccctcaatcacaccaatccttctacttcaccttcaatggcaaacccctccccgacaaaacccctctttcccaattcccccctctctccaccctctctctccgctcccgcctccttggcggcggcggagacggcggcgccaccggagccgagtcccgcgactgctacctcaacatgtacgccgacaagaagcccgacaaggtggaccccaatgaacagcgtctctccaagtggcacaattgcgccctctccaacgaacccttgagagagccctgcgtgatcgataaattggggaatatcttcaacaaggaagcgctggtggaagcgttgttggggaagaagcttcccaaggaatttgggcacatcaagggtttgaaggatatgattaatgttcagctttctgcgattcctggagcggatgatggggcaaagtttcagtgccctgttgcggggcttgaattcaacgggaagtataggtttttcgcgctgaggaattgtgggcatgttttgagtgcgaaggctctgagggaggttaagtcttcgtcgtgtttggtttgtcacaaggagtatgctgacgtggataaggttgtgctcaatgggagtgatgaggaggttgcggttttgagggagaggatggaggaggagaaagctaagattagggagaagaagagtaagaaggttaagaataatggtaatgatgacggtgtgagtttggaagggactaggttgagtggtactaagcatggtgttgatggtaagggtgtagagaaagcttcggctaaggtggaacgaaatgggaaggttggtaatggtaatgttggtgtgaatggtggtgctgctgctgctgccaagcgtttcaaggctgttgatctggccccggcgaatgctacaaaggatgtgtatgcttccatcttcacttcgtcgaggaagtctgagtttaaagaaacttatagctgtaggtctcttcctcttggaagaaactgattcaggtgtctggtatacagttgtctctactgttttattgttatccaatgtactgaattctagtttgtgcctttgtggttatataagtgattgacttttcctgtgaaaaaag

SEQ ID NO: 6141 - protein, 400 aa, Glycine max
  peptide (1)..(400): Ceres Seq. ID no. 14308868
  misc_feature (114)..(338): Pfam Name: Pfam Description:  Protein of unknown function, DUF602
  misc_feature (45)..(400): NCBI GI NO: 15242923 NR Description: expressed protein [Arabidopsis thaliana]
  misc_feature (105)..(400): NCBI GI NO: 9759527 NR Description: gene_id:F2C19
  misc_feature (115)..(303): NCBI GI NO: 31197425 NR Description: ENSANGP00000002198 [Anopheles gambiae]
  misc_feature (115)..(388): NCBI GI NO: 19921112 NR Description: CG6443-PA [Drosophila melanogaster]
  misc_feature (115)..(387): NCBI GI NO: 39582965 NR Description: Hypothetical protein CBG20397
  misc_feature (115)..(387): NCBI GI NO: 17505406 NR Description: putative N-myristoylated nuclear protein
  misc_feature (177)..(385): NCBI GI NO: 34860845 NR Description: similar to 2410001C21Rik protein
  misc_feature (177)..(385): NCBI GI NO: 30794468 NR Description: RIKEN cDNA 2410001C21 [Mus musculus]
  misc_feature (194)..(380): NCBI GI NO: 32484231 NR Description: Unknown (protein for MGC:64388) [Xenopus laevis]
  misc_feature (177)..(385): NCBI GI NO: 6563236 NR Description: protein x 0001 [Homo sapiens]
NETRRQSGFPAEIIYLLGCPPLKFNLQLSITNPRKSFQMNTKSLQILVHSPDLGISLQSTTNHETLSDLKNSLFPQSHQSFYFTFNGKPLPDKTPLSQFPPLSTLSLRSRLLGGGGDGGATGAESRDCYLNMYADKKPDKVDPNEQRLSKWHNCALSNEPLREPCVIDKLGNIFNKEALVEALLGKKLPKEFGHIKGLKDMINVQLSAIPGADDGAKFQCPVAGLEFNGKYRFFALRNCGHVLSAKALREVKSSSCLVCHKEYADVDKVVLNGSDEEVAVLRERMEEEKAKIREKKSKKVKNNGNDDGVSLEGTRLSGTKHGVDGKGVEKASAKVERNGKVGNGNVGVNGGAAAAAKRFKAVDLAPANATKDVYASIFTSSRKSEFKETYSCRSLPLGRN

SEQ ID NO: 6142 - protein, 362 aa, Glycine max
  peptide (1)..(362): Ceres Seq. ID no. 14308869
  misc_feature (76)..(300): Pfam Name: Pfam Description:  Protein of unknown function, DUF602
  misc_feature (7)..(362): NCBI GI NO: 15242923 NR Description: expressed protein [Arabidopsis thaliana]
  misc_feature (67)..(362): NCBI GI NO: 9759527 NR Description: gene_id:F2C19
  misc_feature (77)..(265): NCBI GI NO: 31197425 NR Description: ENSANGP00000002198 [Anopheles gambiae]
  misc_feature (77)..(350): NCBI GI NO: 19921112 NR Description: CG6443-PA [Drosophila melanogaster]
  misc_feature (77)..(349): NCBI GI NO: 39582965 NR Description: Hypothetical protein CBG20397
  misc_feature (77)..(349): NCBI GI NO: 17505406 NR Description: putative N-myristoylated nuclear protein
  misc_feature (139)..(347): NCBI GI NO: 34860845 NR Description: similar to 2410001C21Rik protein
  misc_feature (139)..(347): NCBI GI NO: 30794468 NR Description: RIKEN cDNA 2410001C21 [Mus musculus]
  misc_feature (156)..(342): NCBI GI NO: 32484231 NR Description: Unknown (protein for MGC:64388) [Xenopus laevis]
  misc_feature (139)..(347): NCBI GI NO: 6563236 NR Description: protein x 0001 [Homo sapiens]
MNTKSLQILVHSPDLGISLQSTTNHETLSDLKNSLFPQSHQSFYFTFNGKPLPDKTPLSQFPPLSTLSLRSRLLGGGGDGGATGAESRDCYLNMYADKKPDKVDPNEQRLSKWHNCALSNEPLREPCVIDKLGNIFNKEALVEALLGKKLPKEFGHIKGLKDMINVQLSAIPGADDGAKFQCPVAGLEFNGKYRFFALRNCGHVLSAKALREVKSSSCLVCHKEYADVDKVVLNGSDEEVAVLRERMEEEKAKIREKKSKKVKNNGNDDGVSLEGTRLSGTKHGVDGKGVEKASAKVERNGKVGNGNVGVNGGAAAAAKRFKAVDLAPANATKDVYASIFTSSRKSEFKETYSCRSLPLGRN

SEQ ID NO: 6143 - protein, 269 aa, Glycine max
  peptide (1)..(269): Ceres Seq. ID no. 14308870
  misc_feature (1)..(207): Pfam Name: Pfam Description:  Protein of unknown function, DUF602
  misc_feature (1)..(269): NCBI GI NO: 15242923 NR Description: expressed protein [Arabidopsis thaliana]
  misc_feature (1)..(269): NCBI GI NO: 9759527 NR Description: gene_id:F2C19
  misc_feature (1)..(172): NCBI GI NO: 31197425 NR Description: ENSANGP00000002198 [Anopheles gambiae]
  misc_feature (1)..(257): NCBI GI NO: 19921112 NR Description: CG6443-PA [Drosophila melanogaster]
  misc_feature (1)..(256): NCBI GI NO: 39582965 NR Description: Hypothetical protein CBG20397
  misc_feature (1)..(256): NCBI GI NO: 17505406 NR Description: putative N-myristoylated nuclear protein
  misc_feature (46)..(254): NCBI GI NO: 34860845 NR Description: similar to 2410001C21Rik protein
  misc_feature (46)..(254): NCBI GI NO: 30794468 NR Description: RIKEN cDNA 2410001C21 [Mus musculus]
  misc_feature (63)..(249): NCBI GI NO: 32484231 NR Description: Unknown (protein for MGC:64388) [Xenopus laevis]
  misc_feature (46)..(254): NCBI GI NO: 6563236 NR Description: protein x 0001 [Homo sapiens]
MYADKKPDKVDPNEQRLSKWHNCALSNEPLREPCVIDKLGNIFNKEALVEALLGKKLPKEFGHIKGLKDMINVQLSAIPGADDGAKFQCPVAGLEFNGKYRFFALRNCGHVLSAKALREVKSSSCLVCHKEYADVDKVVLNGSDEEVAVLRERMEEEKAKIREKKSKKVKNNGNDDGVSLEGTRLSGTKHGVDGKGVEKASAKVERNGKVGNGNVGVNGGAAAAAKRFKAVDLAPANATKDVYASIFTSSRKSEFKETYSCRSLPLGRN

SEQ ID NO: 6144 - DNA, 1142 bp, Glycine max
  misc_feature (1)..(1142): Ceres Seq. ID no. 15170370
attattttctcttcatcaatatgtgttgttagacaagtacagcatggctgccttgaaattattgggaaaattgcctgcttatgcaaacttaagcttctaagaattggtcaggaacattcatgttgaaaaggacaaaacactgggtagacttttggtagttgcaaaattcacatcatattttagctagcaagttgatttggaatttttattaattgacatacttgtggactttattttagtcaaagttgaaatttgacttgtttaaaaaatttatttctcttcattcctgtagataaatgccttatgcatggcattttatgctcgatctgaagaagctcgtcaaagtcatgctacacaaaattttgctttgagagcacttgcattggaagatgcactatctaaaggacttccaattgagacagaaatagcatctttgcagtcttatcttggaagcacagataaagattcagttttggatttggtgctagcatcccttcctgaagaaacacgaagcaacggcacagacacacaactgcagttaaagcagaagtttgatgccttaaaaggtagtgtaagacacttcagcttcttcccaccgggagggggaggtatgttggcacattctttggcacatgtagcatcctggttgaaggttagggaagacaatcaatctggtgatgggatcgaatctgtgatcaataaagttgaagtttatttggcagaaggaaaacttgctgaagcagcagcttgtctagaagaaagtgtgagaggcacacaagctgcagaaattgttgcaggttgggtgaggcaagcaagaaacagggctatttctgagcaagcagtgctgcttcttcaatcctatgccaattcccttagctttacatgattcttaaattttgaatatttacaaaaccatgtgaattcaatacatggcagagattatctttggcggattattccaacgggaattattgacctatgaggaaaaaaaataacgtttttgtttcataggagcagaaattagttgattctgtgaattctatgcaactccagtggcattggagttttgaccgaagtgatatcaggctctgtataattttgccttttgttttacctgaataacagaaatgttgcattgcaac

SEQ ID NO: 6145 - protein, 192 aa, Glycine max
  peptide (1)..(192): Ceres Seq. ID no. 15170371
  misc_feature (1)..(192): NCBI GI NO: 18420505 NR Description: expressed protein [Arabidopsis thaliana]
  misc_feature (1)..(192): NCBI GI NO: 32492176 NR Description: OSJNBb0034I13.6
  misc_feature (34)..(192): NCBI GI NO: 7487220 NR Description: hypothetical protein T19P19
  misc_feature (1)..(81): NCBI GI NO: 7487220 NR Description: hypothetical protein T19P19
MAFYARSEEARQSHATQNFALRALALEDALSKGLPIETEIASLQSYLGSTDKDSVLDLVLASLPEETRSNGTDTQLQLKQKFDALKGSVRHFSFFPPGGGGMLAHSLAHVASWLKVREDNQSGDGIESVINKVEVYLAEGKLAEAAACLEESVRGTQAAEIVAGWVRQARNRAISEQAVLLLQSYANSLSFT

SEQ ID NO: 6146 - DNA, 1507 bp, Glycine max
  misc_feature (1)..(1507): Ceres Seq. ID no. 12607536
  misc_feature (1426)..(1426): n is a, c, t, g, unknown, or other
  misc_feature (1460)..(1460): n is a, c, t, g, unknown, or other
aggatgatctgggagctttgaggtagctatcttattgaaagagtaacttaacctctatgtgaatgtgtgtgtataagatcaatcccttgccatattagtttccctttgtattttgtctcacttaaagaaaataaaatattagatgggaagcgttttatctctttctctgttatgaattctattagcctgaaatgaattttctttttaagattatatggccgagtggctgagttgatttcaattgatataaacctctatttcccatatgatattttccaagcatgttttctactaaaagtattgtgatcactgacagaaaatgtttttaaaagttcatcgtttattgtattcaagagattttcccctagtatatgattggccgtttatatgtgattgctggacactggtgtttatgtagtaggtatactgtgaacattggagttaactttggatttgtgagcatcgggtagctcatttttattcaagtttgatataattttaatttgtttgttcatattttaatgtctacaagtgcaacccttaatctattagccattgatatgtcttgtctatattgttaaatttcttacacatctttttccacagccaataggtttggggaaaattgcaaagtttattaatgctgggaagatagattcttctgaactgattacaatgaaaacactaaaggttttatgactgttacctcacttcttctggaaatgcttttgcttcatgtgcttcctctcattcttctggtcattattattaccataggatgcaggggtactagggaagcaaatgaaagatggagtaagattgatggggcgtggttctgagcagatcaagtggccaattcatctagaggtatcaagggttactgttagggctaaggaagcagttgaagcagctggtgggtctgtgagaagggtgtattacaataagttgggcttgaaggcactggtgaagcctgagtggtttgaaaagaaaggaagattgctgcctaaagcagctagacctcctccaaagcaaaaggataaagttgatagcattggtcggttgcctgccccaacaaagccatttccatttttagttgaagcaagcaaggatcttccagttcagcatcttagttgaataactaacatttttggcaccagtttttaggattttgtaattctgtgtggtgcaaacgtctgactcacaagtttttcatgcagttcttgcaaatgctcaggtagttaattcaagaatgagataaatgaatttccttggggacaaatgaaagggagaatcttgtttattatttaatttcttttaaggatttgatcttcgtcactcagttgaaaagagagccttagtttcttgtgtatgtgtgcttggagtaggatcatagccccttcatgaagggaaaattgcaagaacagtntgcaatgtttaacttttctccggatatggatggnacttgtcaaatgacttggctgaattttaataaatggacgattgtttc

SEQ ID NO: 6147 - protein, 110 aa, Glycine max
  peptide (1)..(110): Ceres Seq. ID no. 12607537
  misc_feature (1)..(107): NCBI GI NO: 15237756 NR Description: putative protein; protein id: At5g64670
  misc_feature (1)..(99): NCBI GI NO: 34015188 NR Description: putative ribosomal protein L15
  misc_feature (1)..(79): NCBI GI NO: 6324045 NR Description: Mitochondrial ribosomal protein MRPL10
  misc_feature (1)..(84): NCBI GI NO: 32410177 NR Description: hypothetical protein [Neurospora crassa]
MKDGVRLMGRGSEQIKWPIHLEVSRVTVRAKEAVEAAGGSVRRVYYNKLGLKALVKPEWFEKKGRLLPKAARPPPKQKDKVDSIGRLPAPTKPFPFLVEASKDLPVQHLS

SEQ ID NO: 6148 - protein, 103 aa, Glycine max
  peptide (1)..(103): Ceres Seq. ID no. 12607538
  misc_feature (1)..(100): NCBI GI NO: 15237756 NR Description: putative protein; protein id: At5g64670
  misc_feature (1)..(92): NCBI GI NO: 34015188 NR Description: putative ribosomal protein L15
  misc_feature (1)..(72): NCBI GI NO: 6324045 NR Description: Mitochondrial ribosomal protein MRPL10
  misc_feature (1)..(77): NCBI GI NO: 32410177 NR Description: hypothetical protein [Neurospora crassa]
MGRGSEQIKWPIHLEVSRVTVRAKEAVEAAGGSVRRVYYNKLGLKALVKPEWFEKKGRLLPKAARPPPKQKDKVDSIGRLPAPTKPFPFLVEASKDLPVQHLS

SEQ ID NO: 6149 - DNA, 911 bp, Glycine max
  misc_feature (1)..(911): Ceres Seq. ID no. 12582051
cagctacgtaggcccccccccccaagaacaaaagcagttggcatcatttgatattccttatagagtaattgaatgtttcttgaggctttggtcatataaggtagtctaagagttataaggtggtgattaagggccggaagattgttgttttcactgctgtgaattttagttcccgcatacactattttcgggctcaggtctgttctatggctgcaagaaaaatgctaagtttagtgtttttaaaggaaaaacataccacttttagggttttatcatacttttgaaaactgttatggtgttaaatcctgtattgtttagctttatttcttatatatagagcattacccatataattttggattgtgggctaacctcctcagggaaaagctcctagtatggttgctagcaccccaaaagttccaaaatccccttggatgccttttcctttgcttcttgatgctatcagaaatcaggttcctcccaagggtatggatgtaatcaaaatatattatgaacaattcaggtcaaagcatatatcgcgggatgattttgtgaagatgctgaggttaatagttggagatggtctgttgagaactacaataacaaatcttcagttcaagataccttccggtggtgaattgaaaggctcaatcaagaaggaagtctgaggctgtatttctgtgaggtggagatctttctccttggagtcaattaatgtcaactttttgctggataaatcaaaatgaagttgtgatattgttatctcttaggcaaactatctttttcatttccttttgccatctttatttggacttgagacatacatgcaactagaactatattagagtttagtttgaactgttcgtgatcaggtgacctgtcaatcaatcctcttgtttatgttggatttc

SEQ ID NO: 6150 - protein, 90 aa, Glycine max
  peptide (1)..(90): Ceres Seq. ID no. 12582052
  misc_feature (1)..(87): NCBI GI NO: 14150488 NR Description: ATP8 [Arabidopsis thaliana]
  misc_feature (1)..(87): NCBI GI NO: 18398335 NR Description: expressed protein; protein id: At1g32230
  misc_feature (1)..(87): NCBI GI NO: 30692664 NR Description: expressed protein [Arabidopsis thaliana]
  misc_feature (1)..(87): NCBI GI NO: 25403152 NR Description: unknown protein [imported] - Arabidopsis thaliana
  misc_feature (1)..(87): NCBI GI NO: 11044957 NR Description: ceo protein [Arabidopsis thaliana]
  misc_feature (1)..(77): NCBI GI NO: 29126336 NR Description: putative CEO protein
  misc_feature (1)..(77): NCBI GI NO: 37537150 NR Description: putative CEO protein
  misc_feature (1)..(73): NCBI GI NO: 15810143 NR Description: unknown protein [Arabidopsis thaliana]
  misc_feature (1)..(73): NCBI GI NO: 18403862 NR Description: expressed protein; protein id: At2g35510
MVASTPKVPKSPWMPFPLLLDAIRNQVPPKGMDVIKIYYEQFRSKHISRDDFVKMLRLIVGDGLLRTTITNLQFKIPSGGELKGSIKKEV

SEQ ID NO: 6151 - protein, 77 aa, Glycine max
  peptide (1)..(77): Ceres Seq. ID no. 12582053
  misc_feature (1)..(74): NCBI GI NO: 14150488 NR Description: ATP8 [Arabidopsis thaliana]
  misc_feature (1)..(74): NCBI GI NO: 18398335 NR Description: expressed protein; protein id: At1g32230
  misc_feature (1)..(74): NCBI GI NO: 25403152 NR Description: unknown protein [imported] - Arabidopsis thaliana
  misc_feature (1)..(74): NCBI GI NO: 30692664 NR Description: expressed protein [Arabidopsis thaliana]
  misc_feature (1)..(74): NCBI GI NO: 11044957 NR Description: ceo protein [Arabidopsis thaliana]
  misc_feature (1)..(64): NCBI GI NO: 29126336 NR Description: putative CEO protein
  misc_feature (1)..(64): NCBI GI NO: 37537150 NR Description: putative CEO protein
  misc_feature (1)..(60): NCBI GI NO: 15810143 NR Description: unknown protein [Arabidopsis thaliana]
  misc_feature (1)..(60): NCBI GI NO: 18403862 NR Description: expressed protein; protein id: At2g35510
MPFPLLLDAIRNQVPPKGMDVIKIYYEQFRSKHISRDDFVKMLRLIVGDGLLRTTITNLQFKIPSGGELKGSIKKEV

SEQ ID NO: 6152 - protein, 59 aa, Glycine max
  peptide (1)..(59): Ceres Seq. ID no. 12582054
  misc_feature (1)..(56): NCBI GI NO: 14150488 NR Description: ATP8 [Arabidopsis thaliana]
  misc_feature (1)..(56): NCBI GI NO: 18398335 NR Description: expressed protein; protein id: At1g32230
  misc_feature (1)..(56): NCBI GI NO: 25403152 NR Description: unknown protein [imported] - Arabidopsis thaliana
  misc_feature (1)..(56): NCBI GI NO: 30692664 NR Description: expressed protein [Arabidopsis thaliana]
  misc_feature (1)..(56): NCBI GI NO: 11044957 NR Description: ceo protein [Arabidopsis thaliana]
  misc_feature (1)..(46): NCBI GI NO: 29126336 NR Description: putative CEO protein
  misc_feature (1)..(46): NCBI GI NO: 37537150 NR Description: putative CEO protein
  misc_feature (1)..(42): NCBI GI NO: 15810143 NR Description: unknown protein [Arabidopsis thaliana]
  misc_feature (1)..(42): NCBI GI NO: 18403862 NR Description: expressed protein; protein id: At2g35510
MDVIKIYYEQFRSKHISRDDFVKMLRLIVGDGLLRTTITNLQFKIPSGGELKGSIKKEV

SEQ ID NO: 6153 - DNA, 1457 bp, Glycine max
  misc_feature (1)..(1457): Ceres Seq. ID no. 15170555
aaaagatataagcctaagctaagtggagacgctgttgccatttctgctcattgagtgaaagttccattgggcgtggtttaatggaagggatgaagcagcttgcgtacaacactgcggtgaagctcattctggctgcactcgaacacaacttgctccctgactttgtcaccaggagatatggtcgcttcatggcggctaacatccttcgctctggctacaaatcatcctccgaacttcaactctccgatctccttcactttgcgcattctctacaacagatgcccatagcaatcgacactgatgagacaaattctcaactttatgagttgcctaccgctttcttcaagttggtgctcggaaacaaactcaatttcagctgttgctatttcccttctgcctctatgacactggatgatgctgaagaagcaatgttgaaactgtgctgcgagagatcaaatttgaaagatggtcatacagtacttgatttgggatgcggttggggatcactggttttgtacattgccaagaagtacactaactgcagggttacaggaatcagctattcgacaactcaaaagacttatattgaggagaagtgccgggatcttcagctgcaaaatttgaatattatagttgctgatattggcacatttgaaatggaggcttcttacgacagaatattttccatagaaatgtttgagcatatgaagaactataaagatcttctcaagaagatatccaaatggatgaaagaggatagccttttatttgttcatatcatgtgccacaaagcatttgcctaccactttgaggacaaaaatgaagatgactggattacaagatacttctttgctggagcaactatgccttctgcaaatctacttctttatttccaagatgatgttacagtcatcaaccattggctagtaaatgggaaacactccgcacagaccagtgaagaatggctcaaaagaatggaccagaaaatgacttacatcaagccaattatggaatcaacgtatggcaaggattcagctaccaagtggactgcctattggagagcattcttcatagttggagcagaaacttttgcatataataacggtgaagaatggatgattgcacacttccttttcaaaaagaaataaaataagaccaaacctaatcttttaatttggctatttaagaatggcgttaaaagaagctgctaaacgaggttgcacccttcaatgatgttgcataattttatcagttaacttgttttaattggttgcttgtctgtattttttcctgtctcaatcctttgtcttcggcccctaatgttatggtgtagccattccagtcttgttttatcttaaatttagggaaagtccaattcaaccctcagaacttgggtcgaagggtcatgcatgtgctccctggttcataaactttaaaatatgcacttagacccctct

SEQ ID NO: 6154 - protein, 355 aa, Glycine max
  peptide (1)..(355): Ceres Seq. ID no. 15170556
  misc_feature (184)..(354): Pfam Name: Pfam Description:  Cyclopropane-fatty-acyl-phospholipid synthase
  misc_feature (1)..(355): NCBI GI NO: 26451688 NR Description: unknown protein [Arabidopsis thaliana]
  misc_feature (1)..(355): NCBI GI NO: 18418151 NR Description: expressed protein [Arabidopsis thaliana]
  misc_feature (1)..(355): NCBI GI NO: 21593795 NR Description: coclaurine N-methyltransferase
  misc_feature (1)..(355): NCBI GI NO: 30689611 NR Description: expressed protein [Arabidopsis thaliana]
  misc_feature (67)..(355): NCBI GI NO: 7486450 NR Description: hypothetical protein F4I10
  misc_feature (12)..(355): NCBI GI NO: 16754879 NR Description: coclaurine N-methyltransferase [Coptis japonica]
  misc_feature (16)..(355): NCBI GI NO: 33413898 NR Description: S-adenosyl-L-methionine: coclaurine N-methyltransferase
  misc_feature (16)..(354): NCBI GI NO: 39997416 NR Description: cyclopropane-fatty-acyl-phospholipid synthase
  misc_feature (21)..(355): NCBI GI NO: 21242125 NR Description: conserved hypothetical protein
  misc_feature (21)..(355): NCBI GI NO: 21230783 NR Description: conserved hypothetical protein
MEGMKQLAYNTAVKLILAALEHNLLPDFVTRRYGRFMAANILRSGYKSSSELQLSDLLHFAHSLQQMPIAIDTDETNSQLYELPTAFFKLVLGNKLNFSCCYFPSASMTLDDAEEAMLKLCCERSNLKDGHTVLDLGCGWGSLVLYIAKKYTNCRVTGISYSTTQKTYIEEKCRDLQLQNLNIIVADIGTFEMEASYDRIFSIEMFEHMKNYKDLLKKISKWMKEDSLLFVHIMCHKAFAYHFEDKNEDDWITRYFFAGATMPSANLLLYFQDDVTVINHWLVNGKHSAQTSEEWLKRMDQKMTYIKPIMESTYGKDSATKWTAYWRAFFIVGAETFAYNNGEEWMIAHFLFKKK

SEQ ID NO: 6155 - protein, 352 aa, Glycine max
  peptide (1)..(352): Ceres Seq. ID no. 15170557
  misc_feature (181)..(351): Pfam Name: Pfam Description:  Cyclopropane-fatty-acyl-phospholipid synthase
  misc_feature (1)..(352): NCBI GI NO: 26451688 NR Description: unknown protein [Arabidopsis thaliana]
  misc_feature (1)..(352): NCBI GI NO: 18418151 NR Description: expressed protein [Arabidopsis thaliana]
  misc_feature (1)..(352): NCBI GI NO: 21593795 NR Description: coclaurine N-methyltransferase
  misc_feature (1)..(352): NCBI GI NO: 30689611 NR Description: expressed protein [Arabidopsis thaliana]
  misc_feature (64)..(352): NCBI GI NO: 7486450 NR Description: hypothetical protein F4I10
  misc_feature (9)..(352): NCBI GI NO: 16754879 NR Description: coclaurine N-methyltransferase [Coptis japonica]
  misc_feature (13)..(352): NCBI GI NO: 33413898 NR Description: S-adenosyl-L-methionine: coclaurine N-methyltransferase
  misc_feature (13)..(351): NCBI GI NO: 39997416 NR Description: cyclopropane-fatty-acyl-phospholipid synthase
  misc_feature (18)..(352): NCBI GI NO: 21242125 NR Description: conserved hypothetical protein
  misc_feature (18)..(352): NCBI GI NO: 21230783 NR Description: conserved hypothetical protein
MKQLAYNTAVKLILAALEHNLLPDFVTRRYGRFMAANILRSGYKSSSELQLSDLLHFAHSLQQMPIAIDTDETNSQLYELPTAFFKLVLGNKLNFSCCYFPSASMTLDDAEEAMLKLCCERSNLKDGHTVLDLGCGWGSLVLYIAKKYTNCRVTGISYSTTQKTYIEEKCRDLQLQNLNIIVADIGTFEMEASYDRIFSIEMFEHMKNYKDLLKKISKWMKEDSLLFVHIMCHKAFAYHFEDKNEDDWITRYFFAGATMPSANLLLYFQDDVTVINHWLVNGKHSAQTSEEWLKRMDQKMTYIKPIMESTYGKDSATKWTAYWRAFFIVGAETFAYNNGEEWMIAHFLFKKK

SEQ ID NO: 6156 - protein, 319 aa, Glycine max
  peptide (1)..(319): Ceres Seq. ID no. 15170558
  misc_feature (148)..(318): Pfam Name: Pfam Description:  Cyclopropane-fatty-acyl-phospholipid synthase
  misc_feature (1)..(319): NCBI GI NO: 26451688 NR Description: unknown protein [Arabidopsis thaliana]
  misc_feature (1)..(319): NCBI GI NO: 18418151 NR Description: expressed protein [Arabidopsis thaliana]
  misc_feature (1)..(319): NCBI GI NO: 21593795 NR Description: coclaurine N-methyltransferase
  misc_feature (1)..(319): NCBI GI NO: 30689611 NR Description: expressed protein [Arabidopsis thaliana]
  misc_feature (31)..(319): NCBI GI NO: 7486450 NR Description: hypothetical protein F4I10
  misc_feature (1)..(319): NCBI GI NO: 16754879 NR Description: coclaurine N-methyltransferase [Coptis japonica]
  misc_feature (1)..(319): NCBI GI NO: 33413898 NR Description: S-adenosyl-L-methionine: coclaurine N-methyltransferase
  misc_feature (1)..(318): NCBI GI NO: 39997416 NR Description: cyclopropane-fatty-acyl-phospholipid synthase
  misc_feature (1)..(319): NCBI GI NO: 21242125 NR Description: conserved hypothetical protein
  misc_feature (1)..(319): NCBI GI NO: 21230783 NR Description: conserved hypothetical protein
MAANILRSGYKSSSELQLSDLLHFAHSLQQMPIAIDTDETNSQLYELPTAFFKLVLGNKLNFSCCYFPSASMTLDDAEEAMLKLCCERSNLKDGHTVLDLGCGWGSLVLYIAKKYTNCRVTGISYSTTQKTYIEEKCRDLQLQNLNIIVADIGTFEMEASYDRIFSIEMFEHMKNYKDLLKKISKWMKEDSLLFVHIMCHKAFAYHFEDKNEDDWITRYFFAGATMPSANLLLYFQDDVTVINHWLVNGKHSAQTSEEWLKRMDQKMTYIKPIMESTYGKDSATKWTAYWRAFFIVGAETFAYNNGEEWMIAHFLFKKK

SEQ ID NO: 6157 - DNA, 1667 bp, Glycine max
  misc_feature (1)..(1667): Ceres Seq. ID no. 15178767
gagtgtcttgttctcgtttatggaggatcaaagcggagaagctgaaggagaagaacaacaaatacaaccttcactctttcattatttaataacaattattattctcaatgggcaagactcctttctcctttcgtcgctccgcctctcgccgccgccccaagaagaccgccgccccgccccctcctccctctccgccgcaacatccctacgcggccggattcgccgcctcacccgacgacaacaaccgtctcatcgccgccgccgccggcagcagcgccttgacgaaggcgaagaagaagaccggcaacgtccgcttgtggatgaggtttgaccggtccggccggtcagaactggtggagttggagaagaacgccatcgtccgccacgcagcgattcccgctagagacttgcgaattttgggccccgtcttctcccactcctccaacatcctcgctagagagaaagcaatggtggttaatttggagtttataaaggcaattgtgactgctgaagaagtgttattgcttgatcctcttcggcaggaggttcttccctttgttgagcaactcaggcaacagcttcctggcaaaagtcaacctaaacttctcggcggcacggaagagcaggaaggcgaaatgcatgtctctaatggaagacaatggttgcctacaccggaggcagccgatggtttgcagtctgagcttccgtttgagtttcaagttctggagattgctttggaggctgtgtgcacttatctggactcgaatgtggcggaccttgagcgaggtgcttaccctgtgttggatgaattggctaggaatgttagcaccaagaatcttgagcatgtgcggagtttaaagagtaatcttacgcggttgctggcacgagtgcagaaggtgcgagatgaaattgaacatctgttagatgacaatgaagatatggcacaactatatttgacaaggaagtggttgcagaatcaacaatttgaggaggctcatttgggtgccacaacctcaaataactttcctaatacctcacgttctgttcgtcaacttggttctatcagaagtgaaagtcttgtgaccagccattatgaggatgataacaatgtggaggacttggagatgttgcttgatgcatatttcatgcagttggatggaactcgtaacaaaatattatcagttagggagtatattgacgacactgaagactatgtcaacatccaacttgataaccaccgaaatgaacttattcagctgcagttgacgttgactattgcatcatttgctattgctattgaaactttgattgctggtgcatttggtatgaacattccttgtaacttatataacattgatggagtattttggcccttcgtttggaccacgtctgcggcttgcgtattacttttcttgcttattttagcatatgcaagatggaagaagttgctgggatcataaggcaaggctgttgtgtgacaattggcaatttgaatctccgcagcgagtgacctgaagaacagacacaaatgtgtcaccggagaagtggcttaggaagcaactatcttaatttctgacaaaaattgtaatagttgatgtataggatgttccaacattgcttttagcatcatatattttatagccgatactattcacagcatctttttt

SEQ ID NO: 6158 - protein, 450 aa, Glycine max
  peptide (1)..(450): Ceres Seq. ID no. 15178768
  misc_feature (1)..(450): NCBI GI NO: 18411070 NR Description: expressed protein [Arabidopsis thaliana]
  misc_feature (9)..(450): NCBI GI NO: 11282358 NR Description: hypothetical protein F17J16
  misc_feature (121)..(449): NCBI GI NO: 37536576 NR Description: putative CorA-like Mg2+ transporter protein
  misc_feature (60)..(448): NCBI GI NO: 25360918 NR Description: MRS2-6 [Arabidopsis thaliana]
  misc_feature (60)..(448): NCBI GI NO: 30688025 NR Description: expressed protein [Arabidopsis thaliana]
  misc_feature (7)..(448): NCBI GI NO: 7487682 NR Description: hypothetical protein T5F17
  misc_feature (53)..(450): NCBI GI NO: 30698045 NR Description: expressed protein [Arabidopsis thaliana]
  misc_feature (53)..(424): NCBI GI NO: 30698047 NR Description: expressed protein [Arabidopsis thaliana]
  misc_feature (196)..(450): NCBI GI NO: 40539050 NR Description: putative  CorA-like Mg2+ transporter protein
  misc_feature (51)..(174): NCBI GI NO: 40539050 NR Description: putative  CorA-like Mg2+ transporter protein
MGKTPFSFRRSASRRRPKKTAAPPPPPSPPQHPYAAGFAASPDDNNRLIAAAAGSSALTKAKKKTGNVRLWMRFDRSGRSELVELEKNAIVRHAAIPARDLRILGPVFSHSSNILAREKAMVVNLEFIKAIVTAEEVLLLDPLRQEVLPFVEQLRQQLPGKSQPKLLGGTEEQEGEMHVSNGRQWLPTPEAADGLQSELPFEFQVLEIALEAVCTYLDSNVADLERGAYPVLDELARNVSTKNLEHVRSLKSNLTRLLARVQKVRDEIEHLLDDNEDMAQLYLTRKWLQNQQFEEAHLGATTSNNFPNTSRSVRQLGSIRSESLVTSHYEDDNNVEDLEMLLDAYFMQLDGTRNKILSVREYIDDTEDYVNIQLDNHRNELIQLQLTLTIASFAIAIETLIAGAFGMNIPCNLYNIDGVFWPFVWTTSAACVLLFLLILAYARWKKLLGS

SEQ ID NO: 6159 - protein, 379 aa, Glycine max
  peptide (1)..(379): Ceres Seq. ID no. 15178769
  misc_feature (1)..(379): NCBI GI NO: 18411070 NR Description: expressed protein [Arabidopsis thaliana]
  misc_feature (1)..(379): NCBI GI NO: 11282358 NR Description: hypothetical protein F17J16
  misc_feature (50)..(378): NCBI GI NO: 37536576 NR Description: putative CorA-like Mg2+ transporter protein
  misc_feature (1)..(377): NCBI GI NO: 25360918 NR Description: MRS2-6 [Arabidopsis thaliana]
  misc_feature (1)..(377): NCBI GI NO: 30688025 NR Description: expressed protein [Arabidopsis thaliana]
  misc_feature (1)..(377): NCBI GI NO: 7487682 NR Description: hypothetical protein T5F17
  misc_feature (1)..(379): NCBI GI NO: 30698045 NR Description: expressed protein [Arabidopsis thaliana]
  misc_feature (1)..(353): NCBI GI NO: 30698047 NR Description: expressed protein [Arabidopsis thaliana]
  misc_feature (125)..(379): NCBI GI NO: 40539050 NR Description: putative  CorA-like Mg2+ transporter protein
  misc_feature (1)..(103): NCBI GI NO: 40539050 NR Description: putative  CorA-like Mg2+ transporter protein
MRFDRSGRSELVELEKNAIVRHAAIPARDLRILGPVFSHSSNILAREKAMVVNLEFIKAIVTAEEVLLLDPLRQEVLPFVEQLRQQLPGKSQPKLLGGTEEQEGEMHVSNGRQWLPTPEAADGLQSELPFEFQVLEIALEAVCTYLDSNVADLERGAYPVLDELARNVSTKNLEHVRSLKSNLTRLLARVQKVRDEIEHLLDDNEDMAQLYLTRKWLQNQQFEEAHLGATTSNNFPNTSRSVRQLGSIRSESLVTSHYEDDNNVEDLEMLLDAYFMQLDGTRNKILSVREYIDDTEDYVNIQLDNHRNELIQLQLTLTIASFAIAIETLIAGAFGMNIPCNLYNIDGVFWPFVWTTSAACVLLFLLILAYARWKKLLGS

SEQ ID NO: 6160 - protein, 330 aa, Glycine max
  peptide (1)..(330): Ceres Seq. ID no. 15178770
  misc_feature (1)..(330): NCBI GI NO: 18411070 NR Description: expressed protein [Arabidopsis thaliana]
  misc_feature (1)..(330): NCBI GI NO: 11282358 NR Description: hypothetical protein F17J16
  misc_feature (1)..(329): NCBI GI NO: 37536576 NR Description: putative CorA-like Mg2+ transporter protein
  misc_feature (1)..(328): NCBI GI NO: 25360918 NR Description: MRS2-6 [Arabidopsis thaliana]
  misc_feature (1)..(328): NCBI GI NO: 30688025 NR Description: expressed protein [Arabidopsis thaliana]
  misc_feature (1)..(328): NCBI GI NO: 7487682 NR Description: hypothetical protein T5F17
  misc_feature (1)..(330): NCBI GI NO: 30698045 NR Description: expressed protein [Arabidopsis thaliana]
  misc_feature (1)..(304): NCBI GI NO: 30698047 NR Description: expressed protein [Arabidopsis thaliana]
  misc_feature (76)..(330): NCBI GI NO: 40539050 NR Description: putative  CorA-like Mg2+ transporter protein
  misc_feature (1)..(54): NCBI GI NO: 40539050 NR Description: putative  CorA-like Mg2+ transporter protein
MVVNLEFIKAIVTAEEVLLLDPLRQEVLPFVEQLRQQLPGKSQPKLLGGTEEQEGEMHVSNGRQWLPTPEAADGLQSELPFEFQVLEIALEAVCTYLDSNVADLERGAYPVLDELARNVSTKNLEHVRSLKSNLTRLLARVQKVRDEIEHLLDDNEDMAQLYLTRKWLQNQQFEEAHLGATTSNNFPNTSRSVRQLGSIRSESLVTSHYEDDNNVEDLEMLLDAYFMQLDGTRNKILSVREYIDDTEDYVNIQLDNHRNELIQLQLTLTIASFAIAIETLIAGAFGMNIPCNLYNIDGVFWPFVWTTSAACVLLFLLILAYARWKKLLGS

SEQ ID NO: 6161 - DNA, 991 bp, Glycine max
  misc_feature (1)..(991): Ceres Seq. ID no. 12581874
cagctacgtaggccccccccccgaagagagtagcattcctatttcctagctagtgtatactccacaacagtacacagctgacagcacccatttagtaaacgtgagtagtgactaccaaagtttatctttccatactccactccgttcactttttagactttcttcgccgtttgtggaagatgaggttgtgtctgtgtttaacgttgttgctggttctggctagtgtggcaatgggagaagaagatgcagatcataataagcactccctaaaagccaagtcacacgcgcagatccagtgcacaatgtgttcctcttgtaacaacccttgcaaccaagttccatctccaccaccaccatctccttcctccaacaactgtcctccaccaccctctcctccttcctccggcggcggaggcgaaggagctccgtactattactccccgcctccaccctctcagtatacctactcctcaccacctcctcccgcatccaccggcggaggaatgtactactacactcctcccagcaacagaaactacccaagaccgccgccgcctaacccgattgtgccgtattttccgttctactactacagccctctgccgcccgggtccactgcagctcctccgccctccacggcctcctcgattctctgtgcacttgctttctcatcttttctattgttgttgctttgatagtaaatgtaagaaaagaaaaaaaatgaaggaaaatggtaggaataacggcgcatatttgcagatctagagattctgagggaaatgagagggaggtagaactgtacaagtgcacgtgaatttcccaatctgccctgcacacgtgaactgaagtaccagtattatgttttctctctgaatttcttgtgccaatgtagattcatctgcaatttgttaataatttttatttttatgtactattaatactagtaagtcgtatttcgttagtataaaaataaaataaattacaaagattt

SEQ ID NO: 6162 - protein, 171 aa, Glycine max
  peptide (1)..(171): Ceres Seq. ID no. 12581875
  misc_feature (54)..(152): Pfam Name: rhodopsin family Pfam Description: 7 transmembrane receptor
  misc_feature (38)..(170): NCBI GI NO: 18423010 NR Description: expressed protein; protein id: At5g49280
  misc_feature (34)..(145): NCBI GI NO: 15234820 NR Description: extensin like protein; protein id: At4g16140.1
  misc_feature (38)..(161): NCBI GI NO: 18397707 NR Description: expressed protein; protein id: At3g06750
  misc_feature (3)..(170): NCBI GI NO: 34894480 NR Description: OJ1116_C07.3
  misc_feature (41)..(162): NCBI GI NO: 34894212 NR Description: P0439B06.27
  misc_feature (55)..(151): NCBI GI NO: 3204132 NR Description: extensin [Cicer arietinum]
  misc_feature (54)..(149): NCBI GI NO: 7488674 NR Description: extensin homolog HRGP2 - soybean (fragment)
  misc_feature (55)..(151): NCBI GI NO: 7488998 NR Description: extensin class I (clone uG-18) - tomato (fragment)
  misc_feature (55)..(151): NCBI GI NO: 7488998 NR Description: extensin class I (clone uG-18) - tomato (fragment)
  misc_feature (55)..(149): NCBI GI NO: 81870 NR Description: hydroxyproline-rich glycoprotein (clone Hyp3
MRLCLCLTLLLVLASVAMGEEDADHNKHSLKAKSHAQIQCTMCSSCNNPCNQVPSPPPPSPSSNNCPPPPSPPSSGGGGEGAPYYYSPPPPSQYTYSSPPPPASTGGGMYYYTPPSNRNYPRPPPPNPIVPYFPFYYYSPLPPGSTAAPPPSTASSILCALAFSSFLLLLL

SEQ ID NO: 6163 - protein, 154 aa, Glycine max
  peptide (1)..(154): Ceres Seq. ID no. 12581876
  misc_feature (37)..(135): Pfam Name: rhodopsin family Pfam Description: 7 transmembrane receptor
  misc_feature (21)..(153): NCBI GI NO: 18423010 NR Description: expressed protein; protein id: At5g49280
  misc_feature (17)..(128): NCBI GI NO: 15234820 NR Description: extensin like protein; protein id: At4g16140.1
  misc_feature (21)..(144): NCBI GI NO: 18397707 NR Description: expressed protein; protein id: At3g06750
  misc_feature (1)..(153): NCBI GI NO: 34894480 NR Description: OJ1116_C07.3
  misc_feature (24)..(145): NCBI GI NO: 34894212 NR Description: P0439B06.27
  misc_feature (38)..(134): NCBI GI NO: 3204132 NR Description: extensin [Cicer arietinum]
  misc_feature (37)..(132): NCBI GI NO: 7488674 NR Description: extensin homolog HRGP2 - soybean (fragment)
  misc_feature (38)..(134): NCBI GI NO: 7488998 NR Description: extensin class I (clone uG-18) - tomato (fragment)
  misc_feature (38)..(134): NCBI GI NO: 7488998 NR Description: extensin class I (clone uG-18) - tomato (fragment)
  misc_feature (38)..(132): NCBI GI NO: 81870 NR Description: hydroxyproline-rich glycoprotein (clone Hyp3
MGEEDADHNKHSLKAKSHAQIQCTMCSSCNNPCNQVPSPPPPSPSSNNCPPPPSPPSSGGGGEGAPYYYSPPPPSQYTYSSPPPPASTGGGMYYYTPPSNRNYPRPPPPNPIVPYFPFYYYSPLPPGSTAAPPPSTASSILCALAFSSFLLLLL

SEQ ID NO: 6164 - protein, 130 aa, Glycine max
  peptide (1)..(130): Ceres Seq. ID no. 12581877
  misc_feature (13)..(111): Pfam Name: rhodopsin family Pfam Description: 7 transmembrane receptor
  misc_feature (1)..(129): NCBI GI NO: 18423010 NR Description: expressed protein; protein id: At5g49280
  misc_feature (1)..(104): NCBI GI NO: 15234820 NR Description: extensin like protein; protein id: At4g16140.1
  misc_feature (1)..(120): NCBI GI NO: 18397707 NR Description: expressed protein; protein id: At3g06750
  misc_feature (1)..(129): NCBI GI NO: 34894480 NR Description: OJ1116_C07.3
  misc_feature (1)..(121): NCBI GI NO: 34894212 NR Description: P0439B06.27
  misc_feature (14)..(110): NCBI GI NO: 3204132 NR Description: extensin [Cicer arietinum]
  misc_feature (13)..(108): NCBI GI NO: 7488674 NR Description: extensin homolog HRGP2 - soybean (fragment)
  misc_feature (14)..(110): NCBI GI NO: 7488998 NR Description: extensin class I (clone uG-18) - tomato (fragment)
  misc_feature (14)..(110): NCBI GI NO: 7488998 NR Description: extensin class I (clone uG-18) - tomato (fragment)
  misc_feature (14)..(108): NCBI GI NO: 81870 NR Description: hydroxyproline-rich glycoprotein (clone Hyp3
MCSSCNNPCNQVPSPPPPSPSSNNCPPPPSPPSSGGGGEGAPYYYSPPPPSQYTYSSPPPPASTGGGMYYYTPPSNRNYPRPPPPNPIVPYFPFYYYSPLPPGSTAAPPPSTASSILCALAFSSFLLLLL

SEQ ID NO: 6165 - DNA, 653 bp, Glycine max
  misc_feature (1)..(653): Ceres Seq. ID no. 15226569
gagaccaaacaaaacactgcacctggttaaggatagagtatagcatggcacagtctagttgcaaaactttggtgcagtggttggtagcagcattgctcattgccttgttgggtggtgcacaagctgttgcaatatgtaacatagactcaagtcaattaaacttgtgtcgtgctgcagttactggtcaaaaccctccaccaccggatgagaaatgttgtgcagttgttcgccaagccaatttgcgttgcctctgcagttacaagtctaccctaccttcatttggaataaaccccaaaaatgctttggccttgcctggtaaatgtggtctgcaatggcctcctaattgttgagtgtagtgaagcagtcaatgaaggtcacggactcatggtcattacaagcaccttagtcttcaatattgctttcaggtgtttcattaacactgaagataaattttaagacagcatttgatatctctcgaataacggtgcagtttattttaatcagtatgtaatgtccaaaagtttgctagcagatgtgtacgtgtattagtgtttgatgttgcagaggtatttgaagatatatcattactcttttccctctatatgtctagacctgtaatatgtataataaaatgtctggtttttggactctcc

SEQ ID NO: 6166 - protein, 115 aa, Glycine max; identical to SEQ ID NO: 5456
  peptide (1)..(115): Ceres Seq. ID no. 15226570
  misc_feature (45)..(115): Pfam Name: Pfam Description:  Protease inhibitor/seed storage/LTP family
  misc_feature (15)..(115): NCBI GI NO: 2598597 NR Description: MtN5 [Medicago truncatula]
  misc_feature (15)..(115): NCBI GI NO: 18423748 NR Description: protease inhibitor/seed storage/lipid transfer
  misc_feature (15)..(115): NCBI GI NO: 9758173 NR Description: gene_id:MTE17.12~unknown protein
  misc_feature (15)..(115): NCBI GI NO: 30696597 NR Description: protease inhibitor/seed storage/lipid transfer
  misc_feature (27)..(115): NCBI GI NO: 9758178 NR Description: gene_id:MTE17.17~unknown protein
  misc_feature (27)..(115): NCBI GI NO: 30696602 NR Description: protease inhibitor/seed storage/lipid transfer
  misc_feature (23)..(115): NCBI GI NO: 18422920 NR Description: protease inhibitor/seed storage/lipid transfer
  misc_feature (18)..(115): NCBI GI NO: 21553364 NR Description: unknown [Arabidopsis thaliana]
  misc_feature (15)..(115): NCBI GI NO: 34915244 NR Description: P0045F02.11
  misc_feature (18)..(115): NCBI GI NO: 15238989 NR Description: protease inhibitor/seed storage/lipid transfer

SEQ ID NO: 6167 - protein, 101 aa, Glycine max; identical to SEQ ID NO: 5457
  peptide (1)..(101): Ceres Seq. ID no. 15226571
  misc_feature (31)..(101): Pfam Name: Pfam Description:  Protease inhibitor/seed storage/LTP family
  misc_feature (1)..(101): NCBI GI NO: 2598597 NR Description: MtN5 [Medicago truncatula]
  misc_feature (1)..(101): NCBI GI NO: 18423748 NR Description: protease inhibitor/seed storage/lipid transfer
  misc_feature (1)..(101): NCBI GI NO: 9758173 NR Description: gene_id:MTE17.12~unknown protein
  misc_feature (1)..(101): NCBI GI NO: 30696597 NR Description: protease inhibitor/seed storage/lipid transfer
  misc_feature (13)..(101): NCBI GI NO: 9758178 NR Description: gene_id:MTE17.17~unknown protein
  misc_feature (13)..(101): NCBI GI NO: 30696602 NR Description: protease inhibitor/seed storage/lipid transfer
  misc_feature (9)..(101): NCBI GI NO: 18422920 NR Description: protease inhibitor/seed storage/lipid transfer
  misc_feature (4)..(101): NCBI GI NO: 21553364 NR Description: unknown [Arabidopsis thaliana]
  misc_feature (1)..(101): NCBI GI NO: 34915244 NR Description: P0045F02.11
  misc_feature (4)..(101): NCBI GI NO: 15238989 NR Description: protease inhibitor/seed storage/lipid transfer

SEQ ID NO: 6168 - DNA, 1402 bp, Glycine max
  misc_feature (1)..(1402): Ceres Seq. ID no. 15170986
agactcgcctcttgccctcaccggcgcggccaccaaacggtgcaacgccaccagcgtttattcacagatcacacggcggcgacgacctcccttaccagcgctttgtctcgaaaacgcgcatctttgactcacttcctcacaggcacggatcgcgctgcgccctccctcaccgacgtcaacgtgaccggcttctggtggcacatagcgcactgcactcgcacaaagccaacacttcctttgaactcacgcgttcctggtggagacccaaaagttcgaaactgaacattttcacaagctttcggagggcgttgatgagttcggtagctattttgctttcagagttctcaggtgcaaattagggttcttaaccatgagtattgattatttcaagcaggacattgatgaacttatcggtgaattcacccaggtgagtgacaggatgagtcaacaactttggctgagataaaaagagtatggctttctaggaagttctcctacatttatgaagctcgtccttctgccaacctggccttctttatgcaatcactgtatgctcattgtataggttacatggttggtaccgcaactttatctcacagattaggtggcctttactgcctctactgtctttatgagactcaaccatttaatccttcttttaaggtctatctatcccttggagaattaaagaaacttagaatccttgttgctgatgcaaaagcaaatgatattaaagtagcacttgctttagtaaaaagaatgcttgaaagaaacacattcctttttggctctgttgacttgatggaaggttgtgtcacagagacagtaaatgaactccaacaattacagaatgcccgtattcaagttgcatatgaaaagttatttgatagcacttcaattgacaactacatccagatggaccttggcttggaagttgaccttgatttgctgaagaaaaagtcatctggatatgccacggccaagaatgtggctattcaagaggcgagcaatattttagacgttgaaaacataaagcacttacaaaaagataaggaactgataggagatgttgtggagaaggttgctaacgactggcacgttcagaaacaaacattttataaacaaacaggattaggggacgatgcatatgagaaggaactggagcaattacttctagagcagcatccacatgatggaaactcttaaccaagattgaagatggacatctgggtcgtcgtggttacttttgcatggggaattcataattaatatccctgtttagatagtaggaggaaatgtgttccttttccagttattgctgctttaaacaagacaatgaaacaaaaaaaaaatgataaaatgtattatgcttcattttattcaacatttctatttttcttct

SEQ ID NO: 6169 - protein, 222 aa, Glycine max
  peptide (1)..(222): Ceres Seq. ID no. 15170987
  misc_feature (1)..(219): NCBI GI NO: 18409805 NR Description: expressed protein [Arabidopsis thaliana]
  misc_feature (1)..(202): NCBI GI NO: 37535650 NR Description: unknown protein
  misc_feature (49)..(219): NCBI GI NO: 11285706 NR Description: hypothetical protein T4D2_190
  misc_feature (1)..(13): NCBI GI NO: 11285706 NR Description: hypothetical protein T4D2_190
MQSLYAHCIGYMVGTATLSHRLGGLYCLYCLYETQPFNPSFKVYLSLGELKKLRILVADAKANDIKVALALVKRMLERNTFLFGSVDLMEGCVTETVNELQQLQNARIQVAYEKLFDSTSIDNYIQMDLGLEVDLDLLKKKSSGYATAKNVAIQEASNILDVENIKHLQKDKELIGDVVEKVANDWHVQKQTFYKQTGLGDDAYEKELEQLLLEQHPHDGNS

SEQ ID NO: 6170 - protein, 211 aa, Glycine max
  peptide (1)..(211): Ceres Seq. ID no. 15170988
  misc_feature (1)..(208): NCBI GI NO: 18409805 NR Description: expressed protein [Arabidopsis thaliana]
  misc_feature (1)..(191): NCBI GI NO: 37535650 NR Description: unknown protein
  misc_feature (38)..(208): NCBI GI NO: 11285706 NR Description: hypothetical protein T4D2_190
MVGTATLSHRLGGLYCLYCLYETQPFNPSFKVYLSLGELKKLRILVADAKANDIKVALALVKRMLERNTFLFGSVDLMEGCVTETVNELQQLQNARIQVAYEKLFDSTSIDNYIQMDLGLEVDLDLLKKKSSGYATAKNVAIQEASNILDVENIKHLQKDKELIGDVVEKVANDWHVQKQTFYKQTGLGDDAYEKELEQLLLEQHPHDGNS

SEQ ID NO: 6171 - protein, 148 aa, Glycine max
  peptide (1)..(148): Ceres Seq. ID no. 15170989
  misc_feature (1)..(145): NCBI GI NO: 18409805 NR Description: expressed protein [Arabidopsis thaliana]
  misc_feature (1)..(128): NCBI GI NO: 37535650 NR Description: unknown protein
  misc_feature (1)..(145): NCBI GI NO: 11285706 NR Description: hypothetical protein T4D2_190
MLERNTFLFGSVDLMEGCVTETVNELQQLQNARIQVAYEKLFDSTSIDNYIQMDLGLEVDLDLLKKKSSGYATAKNVAIQEASNILDVENIKHLQKDKELIGDVVEKVANDWHVQKQTFYKQTGLGDDAYEKELEQLLLEQHPHDGNS

SEQ ID NO: 6172 - DNA, 1459 bp, Glycine max
  misc_feature (1)..(1459): Ceres Seq. ID no. 15171040
aaatctgtgttgacaatgaaaatttttagcttagaaaatgatttagaagtgaggcattcaattggccttaccgatattgactttcaattgaaaactcatgttaacaatttacattaatgaatagatcaatagaaatggtttgttaagtattgttttatatattctattaagtgcctatatcttccctaagtacacttcacttaaaatgtctctcctcaaacattacaaattcagttgcatgcctaattttctttgaataaatctgtgctgatgtcacatactaatttctgtattttgcacatgcttcttatttgtcttagtttccttaagggttgcatgttcttaaaatatttagttaaatttcttctttgcaactgtcttcttatttttatacatggaacagaaagagataaaaacatagtgagtatatttatgaactgcaattttactgcagaacttaggcctggagtctgttggtgtgaaaatagctaaagatggagctatagaggttgatgaatactctcaaacatcagttccttcaatttgggcagttggagatgttacaaacaggataaatctcaccccagttgctttgatggagggaggggcattagtaaaaacactgtttcaggataacccaacaaaacctgattatagagctgttccttctgctgtattttctcaaccaccaattggacaagttggtcttactgaggaacaggctgtacaacaatatggagatattgacatcttcactgcaaattttaggccactgaaagctactctctctgggcttccagaccgtgtttttatgaaattagtagtctgtgcaaaaacaaacgaagttctaggtttgcatatgtgtggagacgatgctcctgaaattgtgcaggtttttagagttgctacagctgctctgtattgctttgataatgatacatgagttttcaattcatttgttatacatctgcttgatacccaggggtttgcagttgctcttaaagctcgcttgaccaaggctgactttgatgccactgtaggcattcacccaagtgccgctgaggaatttgttaccatgaggacacctactaggaagattcgaaagagtgaatcgtctgagggaaagtcgggttctgaagcaaaaactgcagcaggggtttaaacagcattacactgcttcaattgttatacttgaagaaaccagctggtgcctcaagttacctggcgggttgtcactgaatttagcgtggttgtcaaattgttgggaagacattcagaacaatcttccgcaactgagttttcagagcaatacatggaatatctcattgaggtcgtgtgtcatacttctcaagtcttgcagtgtaattatcagagttggggagcctggtaagggcgagtggaatttttggtgccattgtttgccatttgtaatttaacttgccagtcctttcatgtacag

SEQ ID NO: 6173 - protein, 115 aa, Glycine max
  peptide (1)..(115): Ceres Seq. ID no. 15171041
  misc_feature (23)..(107): Pfam Name: Pfam Description:  Pyridine nucleotide-disulphide oxidoreductase
  misc_feature (1)..(107): NCBI GI NO: 6714837 NR Description: glutathione reductase [Glycine max]
  misc_feature (1)..(107): NCBI GI NO: 1346192 NR Description: Glutathione reductase, chloroplast precursor
  misc_feature (1)..(107): NCBI GI NO: 15232559 NR Description: gluthatione reductase, chloroplast
  misc_feature (1)..(107): NCBI GI NO: 15451194 NR Description: Gluthatione reductase, chloroplast precursor
  misc_feature (1)..(107): NCBI GI NO: 2425107 NR Description: glutathione reductase (NADPH) [Vitis vinifera]
  misc_feature (1)..(107): NCBI GI NO: 100043 NR Description: glutathione-disulfide reductase (EC 1
  misc_feature (1)..(107): NCBI GI NO: 121676 NR Description: Glutathione reductase
  misc_feature (1)..(107): NCBI GI NO: 13448672 NR Description: glutathione reductase [Brassica juncea]
  misc_feature (1)..(107): NCBI GI NO: 4704611 NR Description: glutathione reductase [Brassica juncea]
  misc_feature (1)..(107): NCBI GI NO: 434310 NR Description: glutathione reductase [Nicotiana tabacum]
MEGGALVKTLFQDNPTKPDYRAVPSAVFSQPPIGQVGLTEEQAVQQYGDIDIFTANFRPLKATLSGLPDRVFMKLVVCAKTNEVLGLHMCGDDAPEIVQVFRVATAALYCFDNDT

SEQ ID NO: 6174 - protein, 73 aa, Glycine max
  peptide (1)..(73): Ceres Seq. ID no. 15171042
MSHTNFCILHMLLICLSFLKGCMFLKYLVKFLLCNCLLIFIHGTERDKNIVSIFMNCNFTAELRPGVCWCENS

SEQ ID NO: 6175 - protein, 63 aa, Glycine max
  peptide (1)..(63): Ceres Seq. ID no. 15171043
MLLICLSFLKGCMFLKYLVKFLLCNCLLIFIHGTERDKNIVSIFMNCNFTAELRPGVCWCENS

SEQ ID NO: 6176 - DNA, 1176 bp, Glycine max
  misc_feature (1)..(1176): Ceres Seq. ID no. 12607540
ccccccccccccaaaattttcacatctgattgaccttgatttcatgggtgatctaatgaaccatctagagagtacttgcttctggaagtagcaactcaggcaacacttctgacaagtgttctaaatgtttgaccgtatcggaacgtctccagtgttgcattgttgcttttaaagtgatgaggaacaatcttgatgccttgaatgttgatttacaggacttctttctccatctttacaatcttgtacttgaatacaggccaggaagagatcaaggagaggtgttagcagaagctttgaagataatgttgtgtgatgataagcaacacgacatgcagaagactgctgcatttataaaacgattagcaacgctttcactgtgtgttggatcagcagattccatggctgccttggtcacagtaaagcatcttcttcagaagaatgttaagtgcagaaatttattggaaaatgacattggagggggctctgtttcgggcacaattcataaatatctaccatattccacagatcccaatttaagtggtgcccttgcctcagtactttgggaactcaatcttttgtctagtcattatcatccagctatatcaacactggcctcgggcatttcaagcatgagtaatgcacataaccagatccttttatccaagtcctctcctcaacaagcttataaggaaatgtctctttgtctggaattatgtttcacacaatatattgacggtataaaattaaataacaagaagagacgtgcaaatggccctgctatttcaccttccattggttctacaacagttacgagttcatttgatgacaatgaattgcaaaggcaacttagttcccattttatggttcttcatgacataaaggagaatgaaaggttgagaaaggagttggataggactgctctatcactacagctatatgaacaatataagaaacacaagaaacgatcaaaaccaagtagatgatcagccattgctttgtgatgtgtatggccccataggtttcagttatgcagttacagttcatttccagtggagataattctcaaatgcgttcctcaaacgagttcacctcatttgagtgcatgaaatatggaggagagatattttttcaattgaagtaatgcaatgcaaaatgaacttgaggctatccttcttt

SEQ ID NO: 6177 - protein, 268 aa, Glycine max
  peptide (1)..(268): Ceres Seq. ID no. 12607541
  misc_feature (105)..(147): Pfam Name: Pfam Description:  CBF/Mak21 family
  misc_feature (1)..(265): NCBI GI NO: 7487900 NR Description: hypothetical protein YUP8H12R
  misc_feature (1)..(265): NCBI GI NO: 15219298 NR Description: unknown protein; protein id: At1g79140.1
  misc_feature (1)..(186): NCBI GI NO: 10439934 NR Description: unnamed protein product [Homo sapiens]
  misc_feature (1)..(186): NCBI GI NO: 10434534 NR Description: unnamed protein product [Homo sapiens]
  misc_feature (1)..(196): NCBI GI NO: 7208452 NR Description: unknown [Mus musculus]
  misc_feature (1)..(201): NCBI GI NO: 34877840 NR Description: similar to AD24 [Rattus norvegicus]
  misc_feature (1)..(186): NCBI GI NO: 20806097 NR Description: AD24 protein [Homo sapiens]
  misc_feature (1)..(195): NCBI GI NO: 14039964 NR Description: hypothetical protein 1-2 [Cricetulus griseus]
  misc_feature (1)..(196): NCBI GI NO: 23956108 NR Description: cDNA sequence AF233884; cDNA sequence, AF233884
  misc_feature (1)..(150): NCBI GI NO: 21358345 NR Description: CG1234-PA [Drosophila melanogaster]
MRNNLDALNVDLQDFFLHLYNLVLEYRPGRDQGEVLAEALKIMLCDDKQHDMQKTAAFIKRLATLSLCVGSADSMAALVTVKHLLQKNVKCRNLLENDIGGGSVSGTIHKYLPYSTDPNLSGALASVLWELNLLSSHYHPAISTLASGISSMSNAHNQILLSKSSPQQAYKEMSLCLELCFTQYIDGIKLNNKKRRANGPAISPSIGSTTVTSSFDDNELQRQLSSHFMVLHDIKENERLRKELDRTALSLQLYEQYKKHKKRSKPSR

SEQ ID NO: 6178 - protein, 226 aa, Glycine max
  peptide (1)..(226): Ceres Seq. ID no. 12607542
  misc_feature (63)..(105): Pfam Name: Pfam Description:  CBF/Mak21 family
  misc_feature (1)..(223): NCBI GI NO: 7487900 NR Description: hypothetical protein YUP8H12R
  misc_feature (1)..(223): NCBI GI NO: 15219298 NR Description: unknown protein; protein id: At1g79140.1
  misc_feature (1)..(144): NCBI GI NO: 10439934 NR Description: unnamed protein product [Homo sapiens]
  misc_feature (1)..(144): NCBI GI NO: 10434534 NR Description: unnamed protein product [Homo sapiens]
  misc_feature (1)..(154): NCBI GI NO: 7208452 NR Description: unknown [Mus musculus]
  misc_feature (1)..(159): NCBI GI NO: 34877840 NR Description: similar to AD24 [Rattus norvegicus]
  misc_feature (1)..(144): NCBI GI NO: 20806097 NR Description: AD24 protein [Homo sapiens]
  misc_feature (1)..(153): NCBI GI NO: 14039964 NR Description: hypothetical protein 1-2 [Cricetulus griseus]
  misc_feature (1)..(154): NCBI GI NO: 23956108 NR Description: cDNA sequence AF233884; cDNA sequence, AF233884
  misc_feature (1)..(108): NCBI GI NO: 21358345 NR Description: CG1234-PA [Drosophila melanogaster]
MLCDDKQHDMQKTAAFIKRLATLSLCVGSADSMAALVTVKHLLQKNVKCRNLLENDIGGGSVSGTIHKYLPYSTDPNLSGALASVLWELNLLSSHYHPAISTLASGISSMSNAHNQILLSKSSPQQAYKEMSLCLELCFTQYIDGIKLNNKKRRANGPAISPSIGSTTVTSSFDDNELQRQLSSHFMVLHDIKENERLRKELDRTALSLQLYEQYKKHKKRSKPSR

SEQ ID NO: 6179 - protein, 217 aa, Glycine max
  peptide (1)..(217): Ceres Seq. ID no. 12607543
  misc_feature (54)..(96): Pfam Name: Pfam Description:  CBF/Mak21 family
  misc_feature (1)..(214): NCBI GI NO: 7487900 NR Description: hypothetical protein YUP8H12R
  misc_feature (1)..(214): NCBI GI NO: 15219298 NR Description: unknown protein; protein id: At1g79140.1
  misc_feature (1)..(135): NCBI GI NO: 10439934 NR Description: unnamed protein product [Homo sapiens]
  misc_feature (1)..(135): NCBI GI NO: 10434534 NR Description: unnamed protein product [Homo sapiens]
  misc_feature (1)..(145): NCBI GI NO: 7208452 NR Description: unknown [Mus musculus]
  misc_feature (1)..(150): NCBI GI NO: 34877840 NR Description: similar to AD24 [Rattus norvegicus]
  misc_feature (1)..(135): NCBI GI NO: 20806097 NR Description: AD24 protein [Homo sapiens]
  misc_feature (1)..(144): NCBI GI NO: 14039964 NR Description: hypothetical protein 1-2 [Cricetulus griseus]
  misc_feature (1)..(145): NCBI GI NO: 23956108 NR Description: cDNA sequence AF233884; cDNA sequence, AF233884
  misc_feature (1)..(99): NCBI GI NO: 21358345 NR Description: CG1234-PA [Drosophila melanogaster]
MQKTAAFIKRLATLSLCVGSADSMAALVTVKHLLQKNVKCRNLLENDIGGGSVSGTIHKYLPYSTDPNLSGALASVLWELNLLSSHYHPAISTLASGISSMSNAHNQILLSKSSPQQAYKEMSLCLELCFTQYIDGIKLNNKKRRANGPAISPSIGSTTVTSSFDDNELQRQLSSHFMVLHDIKENERLRKELDRTALSLQLYEQYKKHKKRSKPSR

SEQ ID NO: 6180 - DNA, 1112 bp, Glycine max
  misc_feature (1)..(1112): Ceres Seq. ID no. 15172911
gatcgtgtgtttttctccatcttaaactgactgaaattgagttctccggtcgagcgttcttccacaaaccctaatgtcgtttcttgaagaatttcaagccaatttggattcactgccagttattcttcagaagaagtatgcgttgttgcgtgacctagataagagcttacatgatattcaaaggcaaaatgaacagcgttgtgaacaagaaattgaagatattaggcgaggagttaggtctggaaacatcacgcctgatacttcagtaattagattctctgatgaagcgcttgatgagcaaaatcatagtatcagggttgctgatgaaaaagtagccttggctgtccaggcatatgatttggtagatacacacatacaacatcttgatcagtatctgaaaaggtttggtgaggagattcggcgtgaaagagaaaatgctgcaataactggagtgcctgcttcaggttctgagggtaatacaaaatctggaaggggtaatgaaagtggtactggtagaggagggcgaaaaaaaacacgccaaacgactgtcacacccgcagcaacagaagcacaagccactgcaaacccaactggcatggatttagagttaccagttgatccaaatgaacccacatactgcttttgtaatcaagttagctatggagcgatggttgcatgtgataaccccaattgtaaaatagagtggtttcattttggttgtgttggcctgaaagaacaaccaaaaggaaaatggtactgttcgaattgtgcagcaaccaaaaatcggcgtagaggcaaatgaggctggcagaagaataagaataatgttaaaaatgattgaatgtgtatataaattttaatatctctagaagggagttatttatattgggcctagaagctttgttttcgtagctgttattaatcgggaaattatgaaagtacaaatttccaatgacttatagtggctgtgtttgtacattccgttggttttgtacacatttgaaagctatggttcttttttattgtagatctgggttgaaaaggcccggaattattgtgtgtatgtgactatgtgtgtaccatacaatgaagtttctgcactaattatagtt

SEQ ID NO: 6181 - protein, 242 aa, Glycine max
  peptide (1)..(242): Ceres Seq. ID no. 15172912
  misc_feature (188)..(233): Pfam Name: Pfam Description:  PHD-finger
  misc_feature (1)..(242): NCBI GI NO: 18404002 NR Description: PHD-finger protein -related [Arabidopsis thaliana]
  misc_feature (1)..(242): NCBI GI NO: 29367421 NR Description: putative PHD-finger protein
  misc_feature (76)..(242): NCBI GI NO: 28393138 NR Description: putative PHD-finger protein [Arabidopsis thaliana]
  misc_feature (3)..(240): NCBI GI NO: 18644730 NR Description: p28 ING5 [Homo sapiens]
  misc_feature (3)..(240): NCBI GI NO: 37590948 NR Description: Unknown (protein for MGC:76007)
  misc_feature (1)..(127): NCBI GI NO: 37682153 NR Description: inhibitor of growth family, member 3 [Danio rerio]
  misc_feature (129)..(239): NCBI GI NO: 37682153 NR Description: inhibitor of growth family, member 3 [Danio rerio]
  misc_feature (1)..(127): NCBI GI NO: 28278108 NR Description: Similar to inhibitor of growth family, member 3
  misc_feature (132)..(239): NCBI GI NO: 28278108 NR Description: Similar to inhibitor of growth family, member 3
  misc_feature (3)..(239): NCBI GI NO: 34858458 NR Description: similar to ING1-like protein
MSFLEEFQANLDSLPVILQKKYALLRDLDKSLHDIQRQNEQRCEQEIEDIRRGVRSGNITPDTSVIRFSDEALDEQNHSIRVADEKVALAVQAYDLVDTHIQHLDQYLKRFGEEIRRERENAAITGVPASGSEGNTKSGRGNESGTGRGGRKKTRQTTVTPAATEAQATANPTGMDLELPVDPNEPTYCFCNQVSYGAMVACDNPNCKIEWFHFGCVGLKEQPKGKWYCSNCAATKNRRRGK

SEQ ID NO: 6182 - DNA, 1342 bp, Glycine max
  misc_feature (1)..(1342): Ceres Seq. ID no. 14310880
gacccgccaaaccattacaaaactaaacacccagctaccacattgtctagtatggctcttaatctcttaatttcaatcccattctttttactctttgtagtgaatccatttcactttgttgagccaagaaccttagaagtctccgagcatccattcaccagaactctccgaaaactcaaggacatcaacaagggacaaagggtgagaggcgtgggcgagctcaaaagctacctaaaaaaatttggctacctaacaacaaatgacaattcttcaaacaacaaccacttcgacaaaaacgttgagtttgctctcaaagaataccaagtgttccatcacttacgtcccacgggtcgtgtggatgccgaaaccatcaaaagaatgggcctcccacgttgtggtgtgcctgatattatcacccctcaaaaccataagcttaaggggttggtgattcttgcaaactatagcttcttctcgggttcaccaaaatgggaagagtctaaaagggcactaacctacacattcgtatcaagtgctaacgtgttgaggatgtatgatgtgaggctagcaacaaggaatgccttccaaagttgggcaagagcctctaacttcacatttatggaaatgccaagtgagtataataacctagctaacatagtcctagggtttcatcgtggggaccatggtgatgggtacccatttgatgggccgggccaggttttggcccacacttttgcaccacaagatggtaggttgcattttgatgctgatgaaccatggagcattgaatcaacaagctggaatgtaggaccaggatggaatgtgggttgggattggaggaggtgggtgcgtcctagatggcaaagccgaaggaccattgatttgcaaaccgtggctttgcatgaaataggtcaccttttagggctagggcatagtaacgttcccggctccattatgtatccctcttatgaaggggtaaagagggatctaactcaggatgatgtggatggcatacgggctctatatagattgcccaactagaacttgagaaatgttgttccacttgagttttgtgaaatagttgtcaagtgtaacaactaagccttggtgggttgttaacttaaattggttaagtagtgtgtttcgtaacaagttgatttgcattgatcgaggtttcttgaatcaataagtaggtgcttttatgttgattttattgttatcttatagtgactgtagatttctaatgtcttactagctatatgcttgaatgtttttatcttaaaagcaaatttactataaaacttagtgtaaaatttccaattcaacacagaagttactttttatt

SEQ ID NO: 6183 - protein, 345 aa, Glycine max
  peptide (1)..(345): Ceres Seq. ID no. 14310881
  misc_feature (156)..(261): Pfam Name: Pfam Description:  Matrixin
  misc_feature (22)..(265): NCBI GI NO: 7159629 NR Description: matrix metalloproteinase [Cucumis sativus]
  misc_feature (293)..(343): NCBI GI NO: 7159629 NR Description: matrix metalloproteinase [Cucumis sativus]
  misc_feature (30)..(259): NCBI GI NO: 2827777 NR Description: Metalloendoproteinase 1 precursor (SMEP1)
  misc_feature (293)..(341): NCBI GI NO: 2827777 NR Description: Metalloendoproteinase 1 precursor (SMEP1)
  misc_feature (50)..(262): NCBI GI NO: 15235820 NR Description: proteinase like protein [Arabidopsis thaliana]
  misc_feature (50)..(262): NCBI GI NO: 28393482 NR Description: putative proteinase [Arabidopsis thaliana]
  misc_feature (288)..(345): NCBI GI NO: 15235820 NR Description: proteinase like protein [Arabidopsis thaliana]
  misc_feature (288)..(345): NCBI GI NO: 28393482 NR Description: putative proteinase [Arabidopsis thaliana]
  misc_feature (22)..(341): NCBI GI NO: 15218963 NR Description: metallo proteinase -related [Arabidopsis thaliana]
  misc_feature (50)..(262): NCBI GI NO: 21553383 NR Description: proteinase like protein [Arabidopsis thaliana]
DPPNHYKTKHPATTLSSMALNLLISIPFFLLFVVNPFHFVEPRTLEVSEHPFTRTLRKLKDINKGQRVRGVGELKSYLKKFGYLTTNDNSSNNNHFDKNVEFALKEYQVFHHLRPTGRVDAETIKRMGLPRCGVPDIITPQNHKLKGLVILANYSFFSGSPKWEESKRALTYTFVSSANVLRMYDVRLATRNAFQSWARASNFTFMEMPSEYNNLANIVLGFHRGDHGDGYPFDGPGQVLAHTFAPQDGRLHFDADEPWSIESTSWNVGPGWNVGWDWRRWVRPRWQSRRTIDLQTVALHEIGHLLGLGHSNVPGSIMYPSYEGVKRDLTQDDVDGIRALYRLPN

SEQ ID NO: 6184 - protein, 328 aa, Glycine max
  peptide (1)..(328): Ceres Seq. ID no. 14310882
  misc_feature (139)..(244): Pfam Name: Pfam Description:  Matrixin
  misc_feature (5)..(248): NCBI GI NO: 7159629 NR Description: matrix metalloproteinase [Cucumis sativus]
  misc_feature (276)..(326): NCBI GI NO: 7159629 NR Description: matrix metalloproteinase [Cucumis sativus]
  misc_feature (13)..(242): NCBI GI NO: 2827777 NR Description: Metalloendoproteinase 1 precursor (SMEP1)
  misc_feature (276)..(324): NCBI GI NO: 2827777 NR Description: Metalloendoproteinase 1 precursor (SMEP1)
  misc_feature (33)..(245): NCBI GI NO: 15235820 NR Description: proteinase like protein [Arabidopsis thaliana]
  misc_feature (33)..(245): NCBI GI NO: 28393482 NR Description: putative proteinase [Arabidopsis thaliana]
  misc_feature (271)..(328): NCBI GI NO: 15235820 NR Description: proteinase like protein [Arabidopsis thaliana]
  misc_feature (271)..(328): NCBI GI NO: 28393482 NR Description: putative proteinase [Arabidopsis thaliana]
  misc_feature (5)..(324): NCBI GI NO: 15218963 NR Description: metallo proteinase -related [Arabidopsis thaliana]
  misc_feature (33)..(245): NCBI GI NO: 21553383 NR Description: proteinase like protein [Arabidopsis thaliana]
MALNLLISIPFFLLFVVNPFHFVEPRTLEVSEHPFTRTLRKLKDINKGQRVRGVGELKSYLKKFGYLTTNDNSSNNNHFDKNVEFALKEYQVFHHLRPTGRVDAETIKRMGLPRCGVPDIITPQNHKLKGLVILANYSFFSGSPKWEESKRALTYTFVSSANVLRMYDVRLATRNAFQSWARASNFTFMEMPSEYNNLANIVLGFHRGDHGDGYPFDGPGQVLAHTFAPQDGRLHFDADEPWSIESTSWNVGPGWNVGWDWRRWVRPRWQSRRTIDLQTVALHEIGHLLGLGHSNVPGSIMYPSYEGVKRDLTQDDVDGIRALYRLPN

SEQ ID NO: 6185 - protein, 219 aa, Glycine max
  peptide (1)..(219): Ceres Seq. ID no. 14310883
  misc_feature (30)..(135): Pfam Name: Pfam Description:  Matrixin
  misc_feature (1)..(139): NCBI GI NO: 7159629 NR Description: matrix metalloproteinase [Cucumis sativus]
  misc_feature (167)..(217): NCBI GI NO: 7159629 NR Description: matrix metalloproteinase [Cucumis sativus]
  misc_feature (1)..(133): NCBI GI NO: 2827777 NR Description: Metalloendoproteinase 1 precursor (SMEP1)
  misc_feature (167)..(215): NCBI GI NO: 2827777 NR Description: Metalloendoproteinase 1 precursor (SMEP1)
  misc_feature (1)..(136): NCBI GI NO: 15235820 NR Description: proteinase like protein [Arabidopsis thaliana]
  misc_feature (1)..(136): NCBI GI NO: 28393482 NR Description: putative proteinase [Arabidopsis thaliana]
  misc_feature (162)..(219): NCBI GI NO: 15235820 NR Description: proteinase like protein [Arabidopsis thaliana]
  misc_feature (162)..(219): NCBI GI NO: 28393482 NR Description: putative proteinase [Arabidopsis thaliana]
  misc_feature (1)..(215): NCBI GI NO: 15218963 NR Description: metallo proteinase -related [Arabidopsis thaliana]
  misc_feature (1)..(136): NCBI GI NO: 21553383 NR Description: proteinase like protein [Arabidopsis thaliana]
MGLPRCGVPDIITPQNHKLKGLVILANYSFFSGSPKWEESKRALTYTFVSSANVLRMYDVRLATRNAFQSWARASNFTFMEMPSEYNNLANIVLGFHRGDHGDGYPFDGPGQVLAHTFAPQDGRLHFDADEPWSIESTSWNVGPGWNVGWDWRRWVRPRWQSRRTIDLQTVALHEIGHLLGLGHSNVPGSIMYPSYEGVKRDLTQDDVDGIRALYRLPN

SEQ ID NO: 6186 - DNA, 1238 bp, Glycine max
  misc_feature (1)..(1238): Ceres Seq. ID no. 14316502
tatatgctctgtccaatgtgttctgtggtgtctttcacttttccctttccacagagcaggggtccacttggaattttaatatgtatgaaggatgaaccaataccatggtcatattttaccaacttaggttatattgttgatacatactgttgaggaactgcctgtgcagaattacaattagaagaattgtttatggacatatttgcaattagggagcaaattagcctaattttggaaatttggattaccaagttaatttatgtttaacatattaactactctttgaatttgaacattgattaccgattcttttttcttggcaaattactccctaaattagaaaaaagtttgccagaacttcagtaatgccaactaagcttttatgttataatcttggcttcaactgacttcttttatggaaggaatatcaggttcatatcttttagaaagccctggcgctgataactcatctccaaagttgccaacttcagatacaaatgagggttatgaaatcaaggaggcattgagagcacagatggaagtgcaaagtaaattacatttgcaagtggaggcagagaagcacttgcagattcgccaggatgcagaaaggagatacatggccatgctcgaaagagcttgcaagatgctggctgatcaatttattggtgccacagtcatagacacagacagccaaaagtttcaaggaattggaagcaaagcacctagaggtaccttggttgatcctcttggtttttactccatgccatccactgaggtggctggagtgaatgtcccagaagaagaaataccgctgagtctcccaccccaaagggctgattgttcaaccgaaagttgtttaacctcacatgagagttctggaggattggctttagaaggatctcctggcgagggaaaaaggaggatgcttggcatggactcgatggcagcacctttgatatggagtgaagctaagatgagaactcaagccatcaatgtagcccaaggtaatcttcctcaaggaataactaggtatggcatgtagggatggaaggtctacttgatggtttatcccggcatgatatataaacctttgggctttcattcattcctttttttataggtacttgaactcttcatgtcttgtaagttagtgagacataggtggaatcaattttacccctttgtaaattcaatctactctgtgactttaaaaattgcaaaaaactagctttgactat

SEQ ID NO: 6187 - protein, 208 aa, Glycine max
  peptide (1)..(208): Ceres Seq. ID no. 14316503
  misc_feature (7)..(91): NCBI GI NO: 29647444 NR Description: P0410E11.32
  misc_feature (1)..(150): NCBI GI NO: 7485694 NR Description: hypothetical protein F18A5
  misc_feature (11)..(150): NCBI GI NO: 18414049 NR Description: expressed protein [Arabidopsis thaliana]
  misc_feature (11)..(175): NCBI GI NO: 18404044 NR Description: transfactor -related [Arabidopsis thaliana]
  misc_feature (11)..(175): NCBI GI NO: 11994231 NR Description: contains similarity to transfactor~gene_id:MUJ8.2
  misc_feature (11)..(154): NCBI GI NO: 6223653 NR Description: transfactor-like [Arabidopsis thaliana]
MEGISGSYLLESPGADNSSPKLPTSDTNEGYEIKEALRAQMEVQSKLHLQVEAEKHLQIRQDAERRYMAMLERACKMLADQFIGATVIDTDSQKFQGIGSKAPRGTLVDPLGFYSMPSTEVAGVNVPEEEIPLSLPPQRADCSTESCLTSHESSGGLALEGSPGEGKRRMLGMDSMAAPLIWSEAKMRTQAINVAQGNLPQGITRYGM

SEQ ID NO: 6188 - protein, 168 aa, Glycine max
  peptide (1)..(168): Ceres Seq. ID no. 14316504
  misc_feature (1)..(51): NCBI GI NO: 29647444 NR Description: P0410E11.32
  misc_feature (1)..(110): NCBI GI NO: 7485694 NR Description: hypothetical protein F18A5
  misc_feature (1)..(110): NCBI GI NO: 18414049 NR Description: expressed protein [Arabidopsis thaliana]
  misc_feature (1)..(135): NCBI GI NO: 18404044 NR Description: transfactor -related [Arabidopsis thaliana]
  misc_feature (1)..(135): NCBI GI NO: 11994231 NR Description: contains similarity to transfactor~gene_id:MUJ8.2
  misc_feature (1)..(114): NCBI GI NO: 6223653 NR Description: transfactor-like [Arabidopsis thaliana]
MEVQSKLHLQVEAEKHLQIRQDAERRYMAMLERACKMLADQFIGATVIDTDSQKFQGIGSKAPRGTLVDPLGFYSMPSTEVAGVNVPEEEIPLSLPPQRADCSTESCLTSHESSGGLALEGSPGEGKRRMLGMDSMAAPLIWSEAKMRTQAINVAQGNLPQGITRYGM

SEQ ID NO: 6189 - protein, 141 aa, Glycine max
  peptide (1)..(141): Ceres Seq. ID no. 14316505
  misc_feature (1)..(24): NCBI GI NO: 29647444 NR Description: P0410E11.32
  misc_feature (1)..(83): NCBI GI NO: 7485694 NR Description: hypothetical protein F18A5
  misc_feature (1)..(83): NCBI GI NO: 18414049 NR Description: expressed protein [Arabidopsis thaliana]
  misc_feature (1)..(108): NCBI GI NO: 18404044 NR Description: transfactor -related [Arabidopsis thaliana]
  misc_feature (1)..(108): NCBI GI NO: 11994231 NR Description: contains similarity to transfactor~gene_id:MUJ8.2
  misc_feature (1)..(87): NCBI GI NO: 6223653 NR Description: transfactor-like [Arabidopsis thaliana]
MAMLERACKMLADQFIGATVIDTDSQKFQGIGSKAPRGTLVDPLGFYSMPSTEVAGVNVPEEEIPLSLPPQRADCSTESCLTSHESSGGLALEGSPGEGKRRMLGMDSMAAPLIWSEAKMRTQAINVAQGNLPQGITRYGM

SEQ ID NO: 6190 - DNA, 1266 bp, Glycine max
  misc_feature (1)..(1266): Ceres Seq. ID no. 14308430
gaagtcagactaaactcaataataggaaacacgcaacaagtgggggtggcgagcggaatatgatatatatgatatattgatatatcataacaataatcccaaaatattaagggtactgttttcgattcgatcaactcactcacgcgcacgcctttcattccattccattccgatgcgatgacgacgacgaattccctcttcttctcccttgactggcacaatgaattctatcctacctatcatgatttctaccttctcccccttttcgctctcttcttcccttcccttcgcttctttctcgaccgattcatattcgagaaagtggcgagacggttgattttcggaaaggggcatgcggcgctggactaccattcagacgagagaagaaaaaagattaggaaatttaaggaatcagcttggaaatgtgtttattatctttcagctgagattcttgctttgtctgtaacatacgatgaaccatggtttacaaatactagaaacttttgggtgggcccagggacccaggtctggccagatcaaaagatcaagttgaaattgaaggcagtctatatgtacgctgctggattttactcatactccatttttgctttgatattttgggaaacgaggcgctccgactttggagtgtccatgagtcatcatgttgctactgtaattctcattgttctgtcttacattttcaggtttgcacgtgttggatcagtggttttagcacttcatgatgctagcgatgtgtttctggagatagggaaaatgtccaaatacagtggtgctgaaactatggctagctttgcttttattctatttgttttatcttggatcatattgcgtctcatttactacccattctggattctttggagtacaagctatgaagttctgctcaccttggataaggaaaagcaccaagtggatggtccaatatattattatgtgttcaatagtcttctttactgcttgcttgttatgcatatttattggtgggtgctgatatttcggatgcttgttaaacaaatccaagcaagaggaaaagttagtgaagatgttcgatctgattcagaagatgaagatgaacatgaagattgagtagggaagcaaaagcacaatgtattctttaggcaaaggtgaatctaaaatgatgacaaattgttttacactctaacatgatgaatattgtcgtatgttatgtggatttattttatgttaaattgtccatattttattttatttttttataaaaaaaag

SEQ ID NO: 6191 - protein, 309 aa, Glycine max
  peptide (1)..(309): Ceres Seq. ID no. 14308431
  misc_feature (94)..(306): Pfam Name: LAG1 Pfam Description: Longevity-assurance protein
  misc_feature (11)..(309): NCBI GI NO: 16974114 NR Description: putative resistance protein
  misc_feature (10)..(309): NCBI GI NO: 25518747 NR Description: hypothetical protein F13B4
  misc_feature (10)..(309): NCBI GI NO: 18404559 NR Description: LAG1 homolog 1 [Arabidopsis thaliana]
  misc_feature (1)..(309): NCBI GI NO: 7688742 NR Description: ASC1 [Lycopersicon esculentum]
  misc_feature (10)..(239): NCBI GI NO: 30683361 NR Description: longevity assurance protein -related
  misc_feature (21)..(306): NCBI GI NO: 15230323 NR Description: longevity factor-related protein
  misc_feature (21)..(306): NCBI GI NO: 7658241 NR Description: LAG1 homolog 2 [Arabidopsis thaliana]
  misc_feature (19)..(305): NCBI GI NO: 34901974 NR Description: unknown protein
  misc_feature (10)..(124): NCBI GI NO: 8920562 NR Description: Contains similarity to LAG1 homolog 1 fromArabidopsis thaliana gb|AF198179
  misc_feature (66)..(309): NCBI GI NO: 24119257 NR Description: trh3 protein [Danio rerio]
MTTTNSLFFSLDWHNEFYPTYHDFYLLPLFALFFPSLRFFLDRFIFEKVARRLIFGKGHAALDYHSDERRKKIRKFKESAWKCVYYLSAEILALSVTYDEPWFTNTRNFWVGPGTQVWPDQKIKLKLKAVYMYAAGFYSYSIFALIFWETRRSDFGVSMSHHVATVILIVLSYIFRFARVGSVVLALHDASDVFLEIGKMSKYSGAETMASFAFILFVLSWIILRLIYYPFWILWSTSYEVLLTLDKEKHQVDGPIYYYVFNSLLYCLLVMHIYWWVLIFRMLVKQIQARGKVSEDVRSDSEDEDEHED

SEQ ID NO: 6192 - protein, 178 aa, Glycine max
  peptide (1)..(178): Ceres Seq. ID no. 14308432
  misc_feature (1)..(175): Pfam Name: LAG1 Pfam Description: Longevity-assurance protein
  misc_feature (1)..(178): NCBI GI NO: 16974114 NR Description: putative resistance protein
  misc_feature (1)..(178): NCBI GI NO: 25518747 NR Description: hypothetical protein F13B4
  misc_feature (1)..(178): NCBI GI NO: 18404559 NR Description: LAG1 homolog 1 [Arabidopsis thaliana]
  misc_feature (1)..(178): NCBI GI NO: 7688742 NR Description: ASC1 [Lycopersicon esculentum]
  misc_feature (1)..(108): NCBI GI NO: 30683361 NR Description: longevity assurance protein -related
  misc_feature (1)..(175): NCBI GI NO: 15230323 NR Description: longevity factor-related protein
  misc_feature (1)..(175): NCBI GI NO: 7658241 NR Description: LAG1 homolog 2 [Arabidopsis thaliana]
  misc_feature (1)..(174): NCBI GI NO: 34901974 NR Description: unknown protein
  misc_feature (1)..(178): NCBI GI NO: 24119257 NR Description: trh3 protein [Danio rerio]
  misc_feature (1)..(178): NCBI GI NO: 27769146 NR Description: Similar to RIKEN cDNA 0610013I17 gene
MYAAGFYSYSIFALIFWETRRSDFGVSMSHHVATVILIVLSYIFRFARVGSVVLALHDASDVFLEIGKMSKYSGAETMASFAFILFVLSWIILRLIYYPFWILWSTSYEVLLTLDKEKHQVDGPIYYYVFNSLLYCLLVMHIYWWVLIFRMLVKQIQARGKVSEDVRSDSEDEDEHED

SEQ ID NO: 6193 - DNA, 2098 bp, Glycine max
  misc_feature (1)..(2098): Ceres Seq. ID no. 14309715
tctctctctctctttctctctttctctctgtctagaatgcctctattctcctctgtcggtcacacacagcgatagatagataatagagaagagaagcattcataggcgccaattgtgagtgagagagaagtttctgttttttctacttttccatttttttgggagagatagagagagagagatctgattcttcaccataactgtcattgctttgcttctctcactcagcacaagttgacaagaagggcattgccatttcaatcccatacaaaaagcacacaccccaattcaccaccattttcctaaagcttcactcttttctctgctaagagaagaaagcaagaaagaaaaagccaaaatggttgaatctcagcccaagttcttcatcccggactcaatcaacggcgtgaatttcgacgtagcggcgcagattaagatggtgtgggaagtgatgaaggcgccactgatcgtgcctctgctgaacctggcagtgtacattagcctcgccatggcgctcatgctcttcatggagagggtctacatgggcattgtcatcatcctcgtcaagctcttctggaagaagccacaccagcgctacaagttcgagccactccaagacgacgaggaactcggcaactctaattaccccgtcgtgcttgtccagattccaatgttcaatgagaaagaggtgtacaaggtgtcgattggagcagcttgtaatctttcatggcctgcggatcgtctcgtcatccaagtgcttgatgattctactgaccctaccgtcaagcaaatggtggagatggaatgccagagatgggcaagtaagggcataaacatagtgtaccaaatcagagaaacaagaggagggtacaaagcgggtgctctaaaagaaggcctaaaacgtaactatgtgaaacactgtgagtacgtggcaattttcgatgcagatttcaggccagagccagattttctcagacgttccattcctttcttggtgggcaaccccgacattgctcttgttcaagctcgttggagatttgtgaattctgacgagtgcttattgacaagaatgcaagagatgtccctggattaccatttcacagtagagcaagaagttggatcagccactcatgctttcttcggtttcaacggaactgctggtatttggagaatagctgctatcaacgaagctggtgggtggaaagacagaacaacagtggaagatatggaccttgctgttcgtgctagtcttaggggatggaaatttttgtaccttggtgacctccaggccaaaagtgagcttcccagtactttgagagccttcagattccagcagcacagatggtcatgtggtcctgctaatttgttccgcaaaatggtgatggagattgtgaggaacaagaaagttaggttttggaagaaagtgtatgttatatacagctttttctttgttcgcaaaatcatcgcccacatggtcaccttcttcttctactgtgttgtgattccccttacaatcttggtcccagaggttcatgttccaatctggggagctgtttatattccttctgtcatcaccattctcaattcagttggaacaccaaggtccattcaccttctgttctattggatcctctttgagaatgtgatgtctttgcaccgtaccaaggcaacatttataggtctcttagagtatgggagggctaatgaatgggttgtgactgaaaaacttggtgactctgtcaataataataagaataaatcaggagatgctgccaagaagaataatgccatcaaggccacccccaaaaagactcgatccaaatttgttgaaagacttaatttactggagttgggatttgctgccttcctcttcgtatgtggatgctatgattatgttcatgggaaacacaactacttcatctacctcttccttcagaccttaacattctcaattgtaggatttggctacgttggcaccatcgtgtaaacctcgttgagccaaatttctcaagttacttaagtttcatcaatgttgtgtccatatttttctagtttctcctaaaaaaaaatacatcaaaagaggctgatttcttcaagc

SEQ ID NO: 6194 - protein, 542 aa, Glycine max
  peptide (1)..(542): Ceres Seq. ID no. 14309716
  misc_feature (135)..(278): Pfam Name: Pfam Description:  Glycosyl transferase
  misc_feature (6)..(542): NCBI GI NO: 15242959 NR Description: glycosyltransferase family 2
  misc_feature (4)..(542): NCBI GI NO: 34148025 NR Description: glycosyltransferase 10 [Ipomoea trifida]
  misc_feature (4)..(542): NCBI GI NO: 34148021 NR Description: glycosyltransferase 1 [Ipomoea trifida]
  misc_feature (27)..(542): NCBI GI NO: 34148023 NR Description: glycosyltransferase 5 [Ipomoea trifida]
  misc_feature (10)..(542): NCBI GI NO: 15237519 NR Description: glycosyltransferase family 2
  misc_feature (17)..(542): NCBI GI NO: 34419204 NR Description: TPA: cellulose synthase-like A1
  misc_feature (12)..(542): NCBI GI NO: 30688411 NR Description: glycosyltransferase family 2
  misc_feature (1)..(542): NCBI GI NO: 18403914 NR Description: glycosyltransferase family 2
  misc_feature (21)..(542): NCBI GI NO: 16519221 NR Description: cellulose synthase-like protein OsCslA6
  misc_feature (18)..(542): NCBI GI NO: 30694359 NR Description: glycosyltransferase family 2
MVESQPKFFIPDSINGVNFDVAAQIKMVWEVMKAPLIVPLLNLAVYISLAMALMLFMERVYMGIVIILVKLFWKKPHQRYKFEPLQDDEELGNSNYPVVLVQIPMFNEKEVYKVSIGAACNLSWPADRLVIQVLDDSTDPTVKQMVEMECQRWASKGINIVYQIRETRGGYKAGALKEGLKRNYVKHCEYVAIFDADFRPEPDFLRRSIPFLVGNPDIALVQARWRFVNSDECLLTRMQEMSLDYHFTVEQEVGSATHAFFGFNGTAGIWRIAAINEAGGWKDRTTVEDMDLAVRASLRGWKFLYLGDLQAKSELPSTLRAFRFQQHRWSCGPANLFRKMVMEIVRNKKVRFWKKVYVIYSFFFVRKIIAHMVTFFFYCVVIPLTILVPEVHVPIWGAVYIPSVITILNSVGTPRSIHLLFYWILFENVMSLHRTKATFIGLLEYGRANEWVVTEKLGDSVNNNKNKSGDAAKKNNAIKATPKKTRSKFVERLNLLELGFAAFLFVCGCYDYVHGKHNYFIYLFLQTLTFSIVGFGYVGTIV

SEQ ID NO: 6195 - protein, 516 aa, Glycine max
  peptide (1)..(516): Ceres Seq. ID no. 14309717
  misc_feature (109)..(252): Pfam Name: Pfam Description:  Glycosyl transferase
  misc_feature (1)..(516): NCBI GI NO: 15242959 NR Description: glycosyltransferase family 2
  misc_feature (1)..(516): NCBI GI NO: 34148025 NR Description: glycosyltransferase 10 [Ipomoea trifida]
  misc_feature (1)..(516): NCBI GI NO: 34148021 NR Description: glycosyltransferase 1 [Ipomoea trifida]
  misc_feature (1)..(516): NCBI GI NO: 34148023 NR Description: glycosyltransferase 5 [Ipomoea trifida]
  misc_feature (1)..(516): NCBI GI NO: 15237519 NR Description: glycosyltransferase family 2
  misc_feature (1)..(516): NCBI GI NO: 34419204 NR Description: TPA: cellulose synthase-like A1
  misc_feature (1)..(516): NCBI GI NO: 30688411 NR Description: glycosyltransferase family 2
  misc_feature (1)..(516): NCBI GI NO: 18403914 NR Description: glycosyltransferase family 2
  misc_feature (1)..(516): NCBI GI NO: 16519221 NR Description: cellulose synthase-like protein OsCslA6
  misc_feature (1)..(516): NCBI GI NO: 30694359 NR Description: glycosyltransferase family 2
MVWEVMKAPLIVPLLNLAVYISLAMALMLFMERVYMGIVIILVKLFWKKPHQRYKFEPLQDDEELGNSNYPVVLVQIPMFNEKEVYKVSIGAACNLSWPADRLVIQVLDDSTDPTVKQMVEMECQRWASKGINIVYQIRETRGGYKAGALKEGLKRNYVKHCEYVAIFDADFRPEPDFLRRSIPFLVGNPDIALVQARWRFVNSDECLLTRMQEMSLDYHFTVEQEVGSATHAFFGFNGTAGIWRIAAINEAGGWKDRTTVEDMDLAVRASLRGWKFLYLGDLQAKSELPSTLRAFRFQQHRWSCGPANLFRKMVMEIVRNKKVRFWKKVYVIYSFFFVRKIIAHMVTFFFYCVVIPLTILVPEVHVPIWGAVYIPSVITILNSVGTPRSIHLLFYWILFENVMSLHRTKATFIGLLEYGRANEWVVTEKLGDSVNNNKNKSGDAAKKNNAIKATPKKTRSKFVERLNLLELGFAAFLFVCGCYDYVHGKHNYFIYLFLQTLTFSIVGFGYVGTIV

SEQ ID NO: 6196 - protein, 511 aa, Glycine max
  peptide (1)..(511): Ceres Seq. ID no. 14309718
  misc_feature (104)..(247): Pfam Name: Pfam Description:  Glycosyl transferase
  misc_feature (1)..(511): NCBI GI NO: 15242959 NR Description: glycosyltransferase family 2
  misc_feature (1)..(511): NCBI GI NO: 34148025 NR Description: glycosyltransferase 10 [Ipomoea trifida]
  misc_feature (1)..(511): NCBI GI NO: 34148021 NR Description: glycosyltransferase 1 [Ipomoea trifida]
  misc_feature (1)..(511): NCBI GI NO: 34148023 NR Description: glycosyltransferase 5 [Ipomoea trifida]
  misc_feature (1)..(511): NCBI GI NO: 15237519 NR Description: glycosyltransferase family 2
  misc_feature (1)..(511): NCBI GI NO: 34419204 NR Description: TPA: cellulose synthase-like A1
  misc_feature (1)..(511): NCBI GI NO: 30688411 NR Description: glycosyltransferase family 2
  misc_feature (1)..(511): NCBI GI NO: 18403914 NR Description: glycosyltransferase family 2
  misc_feature (1)..(511): NCBI GI NO: 16519221 NR Description: cellulose synthase-like protein OsCslA6
  misc_feature (1)..(511): NCBI GI NO: 30694359 NR Description: glycosyltransferase family 2
MKAPLIVPLLNLAVYISLAMALMLFMERVYMGIVIILVKLFWKKPHQRYKFEPLQDDEELGNSNYPVVLVQIPMFNEKEVYKVSIGAACNLSWPADRLVIQVLDDSTDPTVKQMVEMECQRWASKGINIVYQIRETRGGYKAGALKEGLKRNYVKHCEYVAIFDADFRPEPDFLRRSIPFLVGNPDIALVQARWRFVNSDECLLTRMQEMSLDYHFTVEQEVGSATHAFFGFNGTAGIWRIAAINEAGGWKDRTTVEDMDLAVRASLRGWKFLYLGDLQAKSELPSTLRAFRFQQHRWSCGPANLFRKMVMEIVRNKKVRFWKKVYVIYSFFFVRKIIAHMVTFFFYCVVIPLTILVPEVHVPIWGAVYIPSVITILNSVGTPRSIHLLFYWILFENVMSLHRTKATFIGLLEYGRANEWVVTEKLGDSVNNNKNKSGDAAKKNNAIKATPKKTRSKFVERLNLLELGFAAFLFVCGCYDYVHGKHNYFIYLFLQTLTFSIVGFGYVGTIV

SEQ ID NO: 6197 - DNA, 1635 bp, Glycine max
  misc_feature (1)..(1635): Ceres Seq. ID no. 14308417
gaaactccaacaaaaagacccaaagagtgtgtttttgcgcattcattcatttggtgatgtgcaacaagaacagtccttcttcttcggacattcaagcaacctctattatgaagaggacgcggaagccgaatagaaggtatcatcataataccacttcttcctcttcctcttcttcttcttcttcttcttcttcttcttcctccacgacgtcgtttaagccgcaccggcgcgggaacagaaccaagacgcggaagcccaagtttgtcagcctgcggcttcagttatccgatcctaagaaaaagatgaaaacaacccagcccaagcccaagcccaagcccaagcccaagcctaaggcccaacaacaagaacagcagcagcaacagccgcagctgaatctcttccctctccatccggaccaccatgacatgcacgaggagcagaacgtggcgcttctctttagctccgatggtggggccacactcaacggcctactggaggaggagacgactacgacggaggaagggtcgatgtcggtgctgacgtgtccggcggaggacaccgggaaccggctggtacggaaggcgatgcggcggagggagagcgaggaggggagtgaagagcggtgggtgtgctactcggaggtggtggaggagaagaaggaggccatggaggaggtcacgagttattgcgtcacgggggaaacgaagacgaagacgaagacgaaaacgccgtcgtttggattgttgtcgttgaagctggatcaccaggggatattgaatgcatggtctgataaaggctctctctacgtcgcggcggaggaggaggaggaggggggcccacagactgtccctgacatattcaatggtttcctttttcataatgttgcatgggacgggttggggagtggtggtgttgttgggaatgcatggaatgttcctgaaaattgtggggctaacaagactaatgtgaaggaagaaatgggttggaagttggggcagagagaggcaagtttgcagagatacaaggagaagaggcaaagcaggctcttctataagaaaatccgttatgaagttcgcaagctgaatgctgagaaacggcccaggatgaagggacgatttgtgaagagggaatgacaagtgtagaaggatagacacggttgataataagaatgttgtcatattacagcgttggaatagaagttttcgtgcctttggttttgggtagtgctgggaagctttttcttgatggatacgatataattaattatgcaatgtaaaatcccagtggtacaaatatgaacaccccgggaaaatctatattcagctgctgtgcgacacaacatgtaaggggcagtttctagacctttgattgaatgagtttgacaaagttttcacatgtgttttgatctcaatccaaggctttagaaacagtcaaaagcatgttgtacaagtacaactaccaaaaaaatgtataggttgttctaaagacttgtacaaattctctcacaaaatttaaatatttggaacatcaaacgaactggaaattgaaacattagtcagatcgtcaacactaggggagtgatctctaggaggaagtgttgtgtgactacaacctcccactgatatatcttggcat

SEQ ID NO: 6198 - protein, 376 aa, Glycine max
  peptide (1)..(376): Ceres Seq. ID no. 14308418
  misc_feature (339)..(376): Pfam Name: Pfam Description:  CCT motif
  misc_feature (19)..(313): NCBI GI NO: 18417359 NR Description: expressed protein [Arabidopsis thaliana]
  misc_feature (279)..(376): NCBI GI NO: 18417359 NR Description: expressed protein [Arabidopsis thaliana]
  misc_feature (79)..(313): NCBI GI NO: 11357545 NR Description: hypothetical protein F18O22
  misc_feature (79)..(313): NCBI GI NO: 21554072 NR Description: unknown [Arabidopsis thaliana]
  misc_feature (279)..(376): NCBI GI NO: 21554072 NR Description: unknown [Arabidopsis thaliana]
  misc_feature (279)..(371): NCBI GI NO: 11357545 NR Description: hypothetical protein F18O22
  misc_feature (332)..(376): NCBI GI NO: 18390719 NR Description: expressed protein [Arabidopsis thaliana]
  misc_feature (200)..(375): NCBI GI NO: 17433068 NR Description: Hypothetical zinc finger protein constans-like 4
  misc_feature (200)..(375): NCBI GI NO: 30694486 NR Description: CONSTANS B-box zinc finger family protein
  misc_feature (308)..(375): NCBI GI NO: 20260550 NR Description: unknown protein [Arabidopsis thaliana]
NSNKKTQRVCFCAFIHLVMCNKNSPSSSDIQATSIMKRTRKPNRRYHHNTTSSSSSSSSSSSSSSSSTTSFKPHRRGNRTKTRKPKFVSLRLQLSDPKKKMKTTQPKPKPKPKPKPKAQQQEQQQQQPQLNLFPLHPDHHDMHEEQNVALLFSSDGGATLNGLLEEETTTTEEGSMSVLTCPAEDTGNRLVRKAMRRRESEEGSEERWVCYSEVVEEKKEAMEEVTSYCVTGETKTKTKTKTPSFGLLSLKLDHQGILNAWSDKGSLYVAAEEEEEGGPQTVPDIFNGFLFHNVAWDGLGSGGVVGNAWNVPENCGANKTNVKEEMGWKLGQREASLQRYKEKRQSRLFYKKIRYEVRKLNAEKRPRMKGRFVKRE

SEQ ID NO: 6199 - protein, 358 aa, Glycine max
  peptide (1)..(358): Ceres Seq. ID no. 14308419
  misc_feature (321)..(358): Pfam Name: Pfam Description:  CCT motif
  misc_feature (1)..(295): NCBI GI NO: 18417359 NR Description: expressed protein [Arabidopsis thaliana]
  misc_feature (261)..(358): NCBI GI NO: 18417359 NR Description: expressed protein [Arabidopsis thaliana]
  misc_feature (61)..(295): NCBI GI NO: 11357545 NR Description: hypothetical protein F18O22
  misc_feature (61)..(295): NCBI GI NO: 21554072 NR Description: unknown [Arabidopsis thaliana]
  misc_feature (261)..(358): NCBI GI NO: 21554072 NR Description: unknown [Arabidopsis thaliana]
  misc_feature (261)..(353): NCBI GI NO: 11357545 NR Description: hypothetical protein F18O22
  misc_feature (314)..(358): NCBI GI NO: 18390719 NR Description: expressed protein [Arabidopsis thaliana]
  misc_feature (182)..(357): NCBI GI NO: 17433068 NR Description: Hypothetical zinc finger protein constans-like 4
  misc_feature (182)..(357): NCBI GI NO: 30694486 NR Description: CONSTANS B-box zinc finger family protein
  misc_feature (290)..(357): NCBI GI NO: 20260550 NR Description: unknown protein [Arabidopsis thaliana]
MCNKNSPSSSDIQATSIMKRTRKPNRRYHHNTTSSSSSSSSSSSSSSSSTTSFKPHRRGNRTKTRKPKFVSLRLQLSDPKKKMKTTQPKPKPKPKPKPKAQQQEQQQQQPQLNLFPLHPDHHDMHEEQNVALLFSSDGGATLNGLLEEETTTTEEGSMSVLTCPAEDTGNRLVRKAMRRRESEEGSEERWVCYSEVVEEKKEAMEEVTSYCVTGETKTKTKTKTPSFGLLSLKLDHQGILNAWSDKGSLYVAAEEEEEGGPQTVPDIFNGFLFHNVAWDGLGSGGVVGNAWNVPENCGANKTNVKEEMGWKLGQREASLQRYKEKRQSRLFYKKIRYEVRKLNAEKRPRMKGRFVKRE

SEQ ID NO: 6200 - protein, 341 aa, Glycine max
  peptide (1)..(341): Ceres Seq. ID no. 14308420
  misc_feature (304)..(341): Pfam Name: Pfam Description:  CCT motif
  misc_feature (1)..(278): NCBI GI NO: 18417359 NR Description: expressed protein [Arabidopsis thaliana]
  misc_feature (244)..(341): NCBI GI NO: 18417359 NR Description: expressed protein [Arabidopsis thaliana]
  misc_feature (44)..(278): NCBI GI NO: 11357545 NR Description: hypothetical protein F18O22
  misc_feature (44)..(278): NCBI GI NO: 21554072 NR Description: unknown [Arabidopsis thaliana]
  misc_feature (244)..(341): NCBI GI NO: 21554072 NR Description: unknown [Arabidopsis thaliana]
  misc_feature (244)..(336): NCBI GI NO: 11357545 NR Description: hypothetical protein F18O22
  misc_feature (297)..(341): NCBI GI NO: 18390719 NR Description: expressed protein [Arabidopsis thaliana]
  misc_feature (165)..(340): NCBI GI NO: 17433068 NR Description: Hypothetical zinc finger protein constans-like 4
  misc_feature (165)..(340): NCBI GI NO: 30694486 NR Description: CONSTANS B-box zinc finger family protein
  misc_feature (273)..(340): NCBI GI NO: 20260550 NR Description: unknown protein [Arabidopsis thaliana]
MKRTRKPNRRYHHNTTSSSSSSSSSSSSSSSSTTSFKPHRRGNRTKTRKPKFVSLRLQLSDPKKKMKTTQPKPKPKPKPKPKAQQQEQQQQQPQLNLFPLHPDHHDMHEEQNVALLFSSDGGATLNGLLEEETTTTEEGSMSVLTCPAEDTGNRLVRKAMRRRESEEGSEERWVCYSEVVEEKKEAMEEVTSYCVTGETKTKTKTKTPSFGLLSLKLDHQGILNAWSDKGSLYVAAEEEEEGGPQTVPDIFNGFLFHNVAWDGLGSGGVVGNAWNVPENCGANKTNVKEEMGWKLGQREASLQRYKEKRQSRLFYKKIRYEVRKLNAEKRPRMKGRFVKRE

SEQ ID NO: 6201 - DNA, 1853 bp, Glycine max
  misc_feature (1)..(1853): Ceres Seq. ID no. 15172472
gatttcaaagagagagagagagatttcacagaccaaattgcagaggacgacaaagttcacaacttcaaggaaaatcgaaatggcccaagtgagcagagtgcacaatcttgctcaaagcactcaaattttcggtcattcttccaatcccaacaaacccaaatcggcgaattcggtttcattgaggccacgcctttggggtccctcaaaatctcgcatcttggtgaacaaaactggaagccttatgggaaattttaatgcggggaagggaaattccggcatgtttaaggtttctgcctccgtcgccgccgccgcagagaagccttcgacggcgccggagatcgtgttggaacctatcaaagacatctcgggtaccatcacattgccagggtctaagtctctgtccaatcgaattttgcttcttgctgctctctctgagggaacaactgttatagacaacttgctgtacagcgaggatattcattacatgcttggtgcattaaggacccttggactgcgtgtggaagacgaccaaacaaccaaacaagcaattgtggaaggctgtgggggattgtttcccactattaaagaatctaaagatgaaatcaatttattccttggaaatgctggtactgcgatgcgtcctttgacagcagctgtagttgctgcaggtggaaatgcaagctacgtacttgatggagtgccccgaatgagagagaggccaattggggatttggttgctggtcttaagcagctcggtgcagatgttgattgctttcttggcacaaactgtccacctgttcgtgtaaatgggaagggaggacttcctggcggaaaggtgaaactgtctggatcagttagcagtcaatacctaactgctttgcttatggcggctcctttagctcttggcgatgtggaaattgagattgttgataaactgatttctgttccatatgttgaaatgactctgaagttgatggagcgttttggagtttctgtggaacacagtggtaattgggataagttcttggtccatggaggtcaaaagtacaagtctcctggcaatgcttttgttgaaggtgatgcttcaagtgccagttacttcctagctggtgcagcagttactggtgggactatcactgttaatggctgtggcacaagcagtttacagggagatgtaaaatttgctgaagttcttgaaaagatgggagctaaggttacatggtcagagaacagtgtcaccgttactggaccgccacaagattcttctggtcaaaaagtcttgcaaggcattgatgtcaatatgaacaagatgccagatgttgccatgactcttgccgttgtcgcactatttgctaatggtcaaactaccatcagagatgtggcaagttggagagttaaagagactgagaggatgatagcaatctgcacagaactcagaaagctaggagcaacagttgaagaaggtcctgattactgtgtgattactccacctgagaaattgaatgtcacagctatagacacatatgatgaccacagaatggccatggcattctctcttgctgcttgtggggatgttccagtaaccatcaaggatcctggttgcaccaggaagacatttcccgactactttgaagtccttgagaggttcacaaagcactaagcattttgtacattgagtaggaagagagagagagataaatactcacaaaacagtgagtatatgcatgacttgcttttgtttcttaacattcccttgtaagaacttgagataatttgtattgttggaaagagctattgattctgttgtatcaaagtaatttaatttccagtacagacttggctctaaaaaaaag

SEQ ID NO: 6202 - protein, 552 aa, Glycine max
  peptide (1)..(552): Ceres Seq. ID no. 15172473
  misc_feature (49)..(552): NCBI GI NO: 16751569 NR Description: 5-enolpyruvylshikimate-3-phosphate synthase B
  misc_feature (49)..(552): NCBI GI NO: 16751567 NR Description: 5-enolpyruvylshikimate-3-phosphate synthase
  misc_feature (30)..(552): NCBI GI NO: 114176 NR Description: 3-phosphoshikimate 1-carboxyvinyltransferase
  misc_feature (27)..(552): NCBI GI NO: 66619 NR Description: 3-phosphoshikimate 1-carboxyvinyltransferase (EC2
  misc_feature (27)..(552): NCBI GI NO: 114174 NR Description: 3-phosphoshikimate 1-carboxyvinyltransferase
  misc_feature (27)..(552): NCBI GI NO: 114165 NR Description: 3-phosphoshikimate 1-carboxyvinyltransferase 1
  misc_feature (27)..(552): NCBI GI NO: 15225450 NR Description: 3-phosphoshikimate 1-carboxyvinyltransferase
  misc_feature (27)..(552): NCBI GI NO: 66618 NR Description: 3-phosphoshikimate 1-carboxyvinyltransferase (EC2
  misc_feature (27)..(552): NCBI GI NO: 1351978 NR Description: 3-phosphoshikimate 1-carboxyvinyltransferase
  misc_feature (27)..(552): NCBI GI NO: 18251236 NR Description: 5-enolpyruvylshikimate-3-phosphate synthase
ISKREREISQTKLQRTTKFTTSRKIEMAQVSRVHNLAQSTQIFGHSSNPNKPKSANSVSLRPRLWGPSKSRILVNKTGSLMGNFNAGKGNSGMFKVSASVAAAAEKPSTAPEIVLEPIKDISGTITLPGSKSLSNRILLLAALSEGTTVIDNLLYSEDIHYMLGALRTLGLRVEDDQTTKQAIVEGCGGLFPTIKESKDEINLFLGNAGTAMRPLTAAVVAAGGNASYVLDGVPRMRERPIGDLVAGLKQLGADVDCFLGTNCPPVRVNGKGGLPGGKVKLSGSVSSQYLTALLMAAPLALGDVEIEIVDKLISVPYVEMTLKLMERFGVSVEHSGNWDKFLVHGGQKYKSPGNAFVEGDASSASYFLAGAAVTGGTITVNGCGTSSLQGDVKFAEVLEKMGAKVTWSENSVTVTGPPQDSSGQKVLQGIDVNMNKMPDVAMTLAVVALFANGQTTIRDVASWRVKETERMIAICTELRKLGATVEEGPDYCVITPPEKLNVTAIDTYDDHRMAMAFSLAACGDVPVTIKDPGCTRKTFPDYFEVLERFTKH

SEQ ID NO: 6203 - protein, 526 aa, Glycine max
  peptide (1)..(526): Ceres Seq. ID no. 15172474
  misc_feature (23)..(526): NCBI GI NO: 16751569 NR Description: 5-enolpyruvylshikimate-3-phosphate synthase B
  misc_feature (23)..(526): NCBI GI NO: 16751567 NR Description: 5-enolpyruvylshikimate-3-phosphate synthase
  misc_feature (4)..(526): NCBI GI NO: 114176 NR Description: 3-phosphoshikimate 1-carboxyvinyltransferase
  misc_feature (1)..(526): NCBI GI NO: 66619 NR Description: 3-phosphoshikimate 1-carboxyvinyltransferase (EC2
  misc_feature (1)..(526): NCBI GI NO: 114174 NR Description: 3-phosphoshikimate 1-carboxyvinyltransferase
  misc_feature (1)..(526): NCBI GI NO: 114165 NR Description: 3-phosphoshikimate 1-carboxyvinyltransferase 1
  misc_feature (1)..(526): NCBI GI NO: 15225450 NR Description: 3-phosphoshikimate 1-carboxyvinyltransferase
  misc_feature (1)..(526): NCBI GI NO: 66618 NR Description: 3-phosphoshikimate 1-carboxyvinyltransferase (EC2
  misc_feature (1)..(526): NCBI GI NO: 1351978 NR Description: 3-phosphoshikimate 1-carboxyvinyltransferase
  misc_feature (1)..(526): NCBI GI NO: 18251236 NR Description: 5-enolpyruvylshikimate-3-phosphate synthase
MAQVSRVHNLAQSTQIFGHSSNPNKPKSANSVSLRPRLWGPSKSRILVNKTGSLMGNFNAGKGNSGMFKVSASVAAAAEKPSTAPEIVLEPIKDISGTITLPGSKSLSNRILLLAALSEGTTVIDNLLYSEDIHYMLGALRTLGLRVEDDQTTKQAIVEGCGGLFPTIKESKDEINLFLGNAGTAMRPLTAAVVAAGGNASYVLDGVPRMRERPIGDLVAGLKQLGADVDCFLGTNCPPVRVNGKGGLPGGKVKLSGSVSSQYLTALLMAAPLALGDVEIEIVDKLISVPYVEMTLKLMERFGVSVEHSGNWDKFLVHGGQKYKSPGNAFVEGDASSASYFLAGAAVTGGTITVNGCGTSSLQGDVKFAEVLEKMGAKVTWSENSVTVTGPPQDSSGQKVLQGIDVNMNKMPDVAMTLAVVALFANGQTTIRDVASWRVKETERMIAICTELRKLGATVEEGPDYCVITPPEKLNVTAIDTYDDHRMAMAFSLAACGDVPVTIKDPGCTRKTFPDYFEVLERFTKH

SEQ ID NO: 6204 - protein, 472 aa, Glycine max
  peptide (1)..(472): Ceres Seq. ID no. 15172475
  misc_feature (1)..(472): NCBI GI NO: 16751569 NR Description: 5-enolpyruvylshikimate-3-phosphate synthase B
  misc_feature (1)..(472): NCBI GI NO: 16751567 NR Description: 5-enolpyruvylshikimate-3-phosphate synthase
  misc_feature (1)..(472): NCBI GI NO: 114176 NR Description: 3-phosphoshikimate 1-carboxyvinyltransferase
  misc_feature (1)..(472): NCBI GI NO: 66619 NR Description: 3-phosphoshikimate 1-carboxyvinyltransferase (EC2
  misc_feature (1)..(472): NCBI GI NO: 114174 NR Description: 3-phosphoshikimate 1-carboxyvinyltransferase
  misc_feature (1)..(472): NCBI GI NO: 114165 NR Description: 3-phosphoshikimate 1-carboxyvinyltransferase 1
  misc_feature (1)..(472): NCBI GI NO: 15225450 NR Description: 3-phosphoshikimate 1-carboxyvinyltransferase
  misc_feature (1)..(472): NCBI GI NO: 66618 NR Description: 3-phosphoshikimate 1-carboxyvinyltransferase (EC2
  misc_feature (1)..(472): NCBI GI NO: 1351978 NR Description: 3-phosphoshikimate 1-carboxyvinyltransferase
  misc_feature (1)..(472): NCBI GI NO: 18251236 NR Description: 5-enolpyruvylshikimate-3-phosphate synthase
MGNFNAGKGNSGMFKVSASVAAAAEKPSTAPEIVLEPIKDISGTITLPGSKSLSNRILLLAALSEGTTVIDNLLYSEDIHYMLGALRTLGLRVEDDQTTKQAIVEGCGGLFPTIKESKDEINLFLGNAGTAMRPLTAAVVAAGGNASYVLDGVPRMRERPIGDLVAGLKQLGADVDCFLGTNCPPVRVNGKGGLPGGKVKLSGSVSSQYLTALLMAAPLALGDVEIEIVDKLISVPYVEMTLKLMERFGVSVEHSGNWDKFLVHGGQKYKSPGNAFVEGDASSASYFLAGAAVTGGTITVNGCGTSSLQGDVKFAEVLEKMGAKVTWSENSVTVTGPPQDSSGQKVLQGIDVNMNKMPDVAMTLAVVALFANGQTTIRDVASWRVKETERMIAICTELRKLGATVEEGPDYCVITPPEKLNVTAIDTYDDHRMAMAFSLAACGDVPVTIKDPGCTRKTFPDYFEVLERFTKH

SEQ ID NO: 6205 - DNA, 1407 bp, Glycine max
  misc_feature (1)..(1407): Ceres Seq. ID no. 15226401
atgcaagtcgatcagttcgcccttaagaaataggcaacatcggttcgaatccgataccgataaagggctttttcctttttttttcggtatgccgctccgccagcaaggagcgaaagaaccaagtggtttgtggtaatgttagaatttgcacctatttgtatctatttagtgatcagtctgctagtttctttgatcttactcggtcttccttttctctttgcttccaatagttcgacctatccagaaaaattgtcggcctacgaatgtggtttcgatcctttcggtgatgccagaagtcgtttcgatatacgattttatcttgtttccattttatttattatttttgatctggaagtaacctttttctttccttgggcagtatctctcaacaagattgatctgtttggattttggtctatgatggcctttttattgattttgacgattggatttctctatgaatggaaaaggggtgctttggattgggagtaatcactagtgatagggcaaaaatagggaggaaggataaaggaaagagcgatgcctacattaaatcaattgattcgtcatggtagagaagaaaaacggcgcacggaccgtactcgagctttggatcaatgtccccagaagcaaggagtatgcctgcgtgttccaacgagaacaccgaaaaaaccaaattcagctctacgtaagatagccaaagtacgattgagcaatcgacatgatatatttgcttacattccgggcgaaggtcataatttgcaggaacattctatggtgttaataagaggaggtagagtgaaagatttgccaggtgtgaaattccattgtattcgaggagtcaaggatttgttgggaattccggatcgaagaagaggcagatccaaatatggtgcagaaaaacccaaatcgatatgaatggaggatgcccctggaacttcttttttttctcggtcaggagaggtacgaagtcactcgccctatatataatagaatagtgaaagcaggagaggtttagcggatcagtgaaaaaaatcttattctagtaagtcatttgtccgttgctggtcatcaatctccggtatcgattcccggttttcccgggcctactcccttaaagcttgttacggtattctcactccgatcgccccaatgaagggcaatctctatcccttctaactttattctgggatttcttattggcattggattttacaagtgagctaatcaccaaatgagcattaacccttataaagtaagctagtacaaggtagacttaagcaatctcattgccctgaaagaaagctcagtaggtggatcttctttccaggtcgcaggtggagagccggttgaaaggccttctgccaattgagaatgatccattaatataaaaaaaaaaaaaaaaaa

SEQ ID NO: 6206 - protein, 125 aa, Glycine max
  peptide (1)..(125): Ceres Seq. ID no. 15226402
  misc_feature (1)..(125): NCBI GI NO: 2148022 NR Description: ribosomal protein S12
  misc_feature (1)..(124): NCBI GI NO: 2500449 NR Description: MITOCHONDRIAL RIBOSOMAL PROTEIN S12
  misc_feature (1)..(124): NCBI GI NO: 38605685 NR Description: Mitochondrial ribosomal protein S12
  misc_feature (1)..(125): NCBI GI NO: 13959705 NR Description: Mitochondrial ribosomal protein S12
  misc_feature (1)..(124): NCBI GI NO: 2500448 NR Description: MITOCHONDRIAL RIBOSOMAL PROTEIN S12
  misc_feature (1)..(125): NCBI GI NO: 37591094 NR Description: ribosomal protein S12 [Brassica napus]
  misc_feature (1)..(123): NCBI GI NO: 4106841 NR Description: ribosomal protein S12 [Solanum tuberosum]
  misc_feature (1)..(125): NCBI GI NO: 1351025 NR Description: Mitochondrial ribosomal protein S12
  misc_feature (1)..(125): NCBI GI NO: 2500451 NR Description: MITOCHONDRIAL RIBOSOMAL PROTEIN S12
  misc_feature (3)..(124): NCBI GI NO: 266984 NR Description: 40S RIBOSOMAL PROTEIN S12, MITOCHONDRIAL PRECURSOR
MPTLNQLIRHGREEKRRTDRTRALDQCPQKQGVCLRVPTRTPKKPNSALRKIAKVRLSNRHDIFAYIPGEGHNLQEHSMVLIRGGRVKDLPGVKFHCIRGVKDLLGIPDRRRGRSKYGAEKPKSI

SEQ ID NO: 6207 - protein, 118 aa, Glycine max
  peptide (1)..(118): Ceres Seq. ID no. 15226403
  misc_feature (37)..(117): Pfam Name: Pfam Description:  NADH-ubiquinone/plastoquinone oxidoreductase
  misc_feature (1)..(118): NCBI GI NO: 38605649 NR Description: NADH-ubiquinone oxidoreductase chain 3
  misc_feature (1)..(118): NCBI GI NO: 20198300 NR Description: hypothetical protein [Arabidopsis thaliana]
  misc_feature (4)..(117): NCBI GI NO: 33943533 NR Description: putative NADH dehydrogenase subunit 3 precursor
MLEFAPICIYLVISLLVSLILLGLPFLFASNSSTYPEKLSAYECGFDPFGDARSRFDIRFYLVSILFIIFDLEVTFFFPWAVSLNKIDLFGFWSMMAFLLILTIGFLYEWKRGALDWE

SEQ ID NO: 6208 - DNA, 1181 bp, Glycine max
  misc_feature (1)..(1181): Ceres Seq. ID no. 15227214
gttatgttcttacaagttctatatatatatatatatatacatacatacgcatacttacttgagtcacttgtttaaatatttttctgtttcaaaaaattggaacctttcactgttgaattttgatgactacacccttggaacatgattacataggcttatcagaggctccatccatggagaaaagctgtgataagatatcctcttcagtttcctccaatctttcttctgaggatgagaacactacttcatctctgaacttcaaggagacagagctgaggcttggcctgccaggttgtgattctcctgagaacaacaacaaatcaggggtctctctttttggcaaggatttgcagaagaagaataatggctattcttctgcttcttcaactccttccaacaagaacctcaagaggggcttccctgatgccattagctcttcttcttcctcttctgggaaatggattttctcggcgagtgatgcagcaactgaagctgatttggaaagtggttctaatatctctggaggatgcaacaaagaggttggaatggttcctcactatgagaaaccagctcaagttgctgcaacaaatgaacatgctcctgctcctgctccaaaagcacaagttgtgggatggccaccaattcgatcttttcgaaagaacacgatgatggcttataatttggcaaaatgtgacaacgaagctgaggagaaatcaggagtaggttgtctttacgttaaggtcagcatggatggtgctccatatctcagaaaggttgatctgaaaacctacagcaactatattgaactttcttcagctcttgagaaaatgttcagctgctttaccattggtcaatgcaattctcgtgcacttcctgggaaagatggattaagtgagagtgcattcagggatcttgttgatggctctgaatatgttcttacatatgaagataaggaaggagactggatgcttgtgggtgatgtcccttggaaaatgttcactgagtcatgtaagaaactaaggataatgaaaggctctgaggcaatcgggctagctccaaggggtatggaaaaatttaggagccaatactagtacagaagattctgctccaccactgggtcattcactgaagcatataaagaaggtttagaggagaatttgagcttaataaaaaaataaaat

SEQ ID NO: 6209 - protein, 322 aa, Glycine max
  peptide (1)..(322): Ceres Seq. ID no. 15227215
  misc_feature (44)..(313): Pfam Name: Pfam Description:  AUX/IAA family
  misc_feature (6)..(321): NCBI GI NO: 25989504 NR Description: Aux/IAA protein [Solanum tuberosum]
  misc_feature (6)..(321): NCBI GI NO: 20257219 NR Description: auxin-regulated protein [Zinnia elegans]
  misc_feature (26)..(321): NCBI GI NO: 15235556 NR Description: AUX/IAA family [Arabidopsis thaliana]
  misc_feature (148)..(321): NCBI GI NO: 20269051 NR Description: aux/IAA protein
  misc_feature (6)..(109): NCBI GI NO: 20269051 NR Description: aux/IAA protein
  misc_feature (6)..(321): NCBI GI NO: 16610193 NR Description: IAA9 protein [Nicotiana tabacum]
  misc_feature (6)..(321): NCBI GI NO: 7442237 NR Description: GH1 protein - soybean (fragment)
  misc_feature (6)..(321): NCBI GI NO: 29465672 NR Description: Aux/IAA protein [Vitis vinifera]
  misc_feature (6)..(321): NCBI GI NO: 6136832 NR Description: Aux/IAA protein [Cucumis sativus]
  misc_feature (6)..(317): NCBI GI NO: 30698145 NR Description: auxin-responsive protein IAA9
MTTPLEHDYIGLSEAPSMEKSCDKISSSVSSNLSSEDENTTSSLNFKETELRLGLPGCDSPENNNKSGVSLFGKDLQKKNNGYSSASSTPSNKNLKRGFPDAISSSSSSSGKWIFSASDAATEADLESGSNISGGCNKEVGMVPHYEKPAQVAATNEHAPAPAPKAQVVGWPPIRSFRKNTMMAYNLAKCDNEAEEKSGVGCLYVKVSMDGAPYLRKVDLKTYSNYIELSSALEKMFSCFTIGQCNSRALPGKDGLSESAFRDLVDGSEYVLTYEDKEGDWMLVGDVPWKMFTESCKKLRIMKGSEAIGLAPRGMEKFRSQY

SEQ ID NO: 6210 - protein, 305 aa, Glycine max
  peptide (1)..(305): Ceres Seq. ID no. 15227216
  misc_feature (27)..(296): Pfam Name: Pfam Description:  AUX/IAA family
  misc_feature (1)..(304): NCBI GI NO: 25989504 NR Description: Aux/IAA protein [Solanum tuberosum]
  misc_feature (1)..(304): NCBI GI NO: 20257219 NR Description: auxin-regulated protein [Zinnia elegans]
  misc_feature (9)..(304): NCBI GI NO: 15235556 NR Description: AUX/IAA family [Arabidopsis thaliana]
  misc_feature (131)..(304): NCBI GI NO: 20269051 NR Description: aux/IAA protein
  misc_feature (1)..(92): NCBI GI NO: 20269051 NR Description: aux/IAA protein
  misc_feature (1)..(304): NCBI GI NO: 16610193 NR Description: IAA9 protein [Nicotiana tabacum]
  misc_feature (1)..(304): NCBI GI NO: 7442237 NR Description: GH1 protein - soybean (fragment)
  misc_feature (1)..(304): NCBI GI NO: 29465672 NR Description: Aux/IAA protein [Vitis vinifera]
  misc_feature (1)..(304): NCBI GI NO: 6136832 NR Description: Aux/IAA protein [Cucumis sativus]
  misc_feature (1)..(300): NCBI GI NO: 30698145 NR Description: auxin-responsive protein IAA9
MEKSCDKISSSVSSNLSSEDENTTSSLNFKETELRLGLPGCDSPENNNKSGVSLFGKDLQKKNNGYSSASSTPSNKNLKRGFPDAISSSSSSSGKWIFSASDAATEADLESGSNISGGCNKEVGMVPHYEKPAQVAATNEHAPAPAPKAQVVGWPPIRSFRKNTMMAYNLAKCDNEAEEKSGVGCLYVKVSMDGAPYLRKVDLKTYSNYIELSSALEKMFSCFTIGQCNSRALPGKDGLSESAFRDLVDGSEYVLTYEDKEGDWMLVGDVPWKMFTESCKKLRIMKGSEAIGLAPRGMEKFRSQY

SEQ ID NO: 6211 - protein, 181 aa, Glycine max
  peptide (1)..(181): Ceres Seq. ID no. 15227217
  misc_feature (1)..(172): Pfam Name: Pfam Description:  AUX/IAA family
  misc_feature (1)..(180): NCBI GI NO: 25989504 NR Description: Aux/IAA protein [Solanum tuberosum]
  misc_feature (1)..(180): NCBI GI NO: 20257219 NR Description: auxin-regulated protein [Zinnia elegans]
  misc_feature (1)..(180): NCBI GI NO: 15235556 NR Description: AUX/IAA family [Arabidopsis thaliana]
  misc_feature (7)..(180): NCBI GI NO: 20269051 NR Description: aux/IAA protein
  misc_feature (1)..(180): NCBI GI NO: 16610193 NR Description: IAA9 protein [Nicotiana tabacum]
  misc_feature (1)..(180): NCBI GI NO: 7442237 NR Description: GH1 protein - soybean (fragment)
  misc_feature (1)..(180): NCBI GI NO: 29465672 NR Description: Aux/IAA protein [Vitis vinifera]
  misc_feature (1)..(180): NCBI GI NO: 6136832 NR Description: Aux/IAA protein [Cucumis sativus]
  misc_feature (1)..(176): NCBI GI NO: 30698145 NR Description: auxin-responsive protein IAA9
  misc_feature (1)..(176): NCBI GI NO: 21592701 NR Description: auxin-induced protein IAA9 [Arabidopsis thaliana]
MVPHYEKPAQVAATNEHAPAPAPKAQVVGWPPIRSFRKNTMMAYNLAKCDNEAEEKSGVGCLYVKVSMDGAPYLRKVDLKTYSNYIELSSALEKMFSCFTIGQCNSRALPGKDGLSESAFRDLVDGSEYVLTYEDKEGDWMLVGDVPWKMFTESCKKLRIMKGSEAIGLAPRGMEKFRSQY

SEQ ID NO: 6212 - DNA, 1813 bp, Glycine max
  misc_feature (1)..(1813): Ceres Seq. ID no. 14308747
ggctcgttcgtttacctcaaacctcaaagaaaaaaaaaaacattgagttatcacttgttttcttttttgggaagacaaaaacattgagttcagcttctcacttccatggctgaggccagactctacgctcccccctctcaattggatattaagcaaattattttagaagcacagcatcgatggctacgtccggctgaaatttgtgcaattctcggtaattataagaagtttcgaattgctccagaacctgcacatatgccaccaagtggttcacttttcttatttgatcggaaggtgctgagacacttcagaaaggatggccataactggaggaagaaaaaagatggaaaaacagtgagagaagctcatgagagactaaaggctggaagtgtggatgtgttgcattgctactatgcccatggagaagaaaatgaaaattttcaaagacgcacgtattggttgcttgaagaggaactctctcacattgttctcgtccattatcgacaagtgaagggaaccaaggcgaattttacaagtgctaaagaaaatgaagaatctcttccttatgctcaacaaactgataaaattatgccccaaacagagatggacacttctttatcatctactcttcatccacatagttaccaggttccttcaaaaactgtcgatacaagcatgaacagtgcccaaacatcagaatatgaagaagctgaatctggtatttcttttgtgcgcattaataatttaaaatgttctgttttcaatttttcatatctagagggcattctgagtagcctttttgttgactttgttcttcgtatcactttcttgtgtgtatttaaattttttaactgtgtaatttttacagcattcaataaccatgcaagttctgagttttattctttcctcgagttacaacgccctgttgagaagatttcacctcaacctgctgatttttattctcctcggccactcataagtaaatttcttcattttaaattgtttttgagtttaactttgatgcattgtcagtttgtcactgtaaatttacattaccactctgtcatacattgtcgtatcattaaatgagtatgacttttttgaactaattttaagaatcaaacctttttaaatgttgtgacagtgcatgattgcatgatagtgtaaaaaactttacactaatattgcatcaaaaatcaaataccttgttatatatcttccatacatactggccttaatcaggaaagtctgtacctaacatgaatcatattattgaaactgggacagatgatcaagagaagttacctattattcctggggtgaattatatctcactcactcaagacaataaaaacaaagacattcttaatgctggattgacatatgaatccccaaaaccccttggcttttcctcatgggaaggtatcttagaaaataatgctggaagtcaacatgtgcattttcagcctttatttcctggaacacagcctgataacatgggaatcaatagcaatttttctcaaggagaagagataatggtgccatatttgaccaccagcattgctaagcagcatgagaatggaagtatcattaaagctgaaggaaattggcaggtttatgatgttgattctttacgcatgtccagttggcctatagatagtgcttattcaggctcaacatgtgaggtaagttgtagcaactgtgagcaggaagttaatgatgttgattttcagaaatccttggaacagtgtcttctacattcacacaaacaaaacaaggttctcatgcaaaatgatcttcaagaaaaactttt

SEQ ID NO: 6213 - protein, 327 aa, Glycine max
  peptide (1)..(327): Ceres Seq. ID no. 14308748
  misc_feature (1)..(204): NCBI GI NO: 30681670 NR Description: ethylene-induced calmodulin-binding protein
  misc_feature (1)..(203): NCBI GI NO: 37991923 NR Description: putative calmodulin-binding transcription factor
  misc_feature (1)..(206): NCBI GI NO: 37533660 NR Description: putative calmodulin binding protein similar to ER66
  misc_feature (1)..(214): NCBI GI NO: 33146619 NR Description: putative anther ethylene-upregulated protein ER1
  misc_feature (7)..(151): NCBI GI NO: 30697970 NR Description: calmodulin-binding protein [Arabidopsis thaliana]
  misc_feature (9)..(175): NCBI GI NO: 15242417 NR Description: calmodulin-binding protein [Arabidopsis thaliana]
  misc_feature (7)..(205): NCBI GI NO: 20127124 NR Description: calmodulin-binding transcription activator
  misc_feature (55)..(204): NCBI GI NO: 25412096 NR Description: hypothetical protein At2g22300
  misc_feature (18)..(165): NCBI GI NO: 1084392 NR Description: CG-1 protein - parsley (fragment)
  misc_feature (14)..(145): NCBI GI NO: 38344575 NR Description: OSJNBa0053B21.7
MAEARLYAPPSQLDIKQIILEAQHRWLRPAEICAILGNYKKFRIAPEPAHMPPSGSLFLFDRKVLRHFRKDGHNWRKKKDGKTVREAHERLKAGSVDVLHCYYAHGEENENFQRRTYWLLEEELSHIVLVHYRQVKGTKANFTSAKENEESLPYAQQTDKIMPQTEMDTSLSSTLHPHSYQVPSKTVDTSMNSAQTSEYEEAESGISFVRINNLKCSVFNFSYLEGILSSLFVDFVLRITFLCVFKFFNCVIFTAFNNHASSEFYSFLELQRPVEKISPQPADFYSPRPLISKFLHFKLFLSLTLMHCQFVTVNLHYHSVIHCRIIK

SEQ ID NO: 6214 - protein, 277 aa, Glycine max
  peptide (1)..(277): Ceres Seq. ID no. 14308749
  misc_feature (1)..(154): NCBI GI NO: 30681670 NR Description: ethylene-induced calmodulin-binding protein
  misc_feature (1)..(153): NCBI GI NO: 37991923 NR Description: putative calmodulin-binding transcription factor
  misc_feature (1)..(156): NCBI GI NO: 37533660 NR Description: putative calmodulin binding protein similar to ER66
  misc_feature (1)..(164): NCBI GI NO: 33146619 NR Description: putative anther ethylene-upregulated protein ER1
  misc_feature (1)..(101): NCBI GI NO: 30697970 NR Description: calmodulin-binding protein [Arabidopsis thaliana]
  misc_feature (1)..(125): NCBI GI NO: 15242417 NR Description: calmodulin-binding protein [Arabidopsis thaliana]
  misc_feature (1)..(155): NCBI GI NO: 20127124 NR Description: calmodulin-binding transcription activator
  misc_feature (5)..(154): NCBI GI NO: 25412096 NR Description: hypothetical protein At2g22300
  misc_feature (1)..(115): NCBI GI NO: 1084392 NR Description: CG-1 protein - parsley (fragment)
  misc_feature (1)..(95): NCBI GI NO: 38344575 NR Description: OSJNBa0053B21.7
MPPSGSLFLFDRKVLRHFRKDGHNWRKKKDGKTVREAHERLKAGSVDVLHCYYAHGEENENFQRRTYWLLEEELSHIVLVHYRQVKGTKANFTSAKENEESLPYAQQTDKIMPQTEMDTSLSSTLHPHSYQVPSKTVDTSMNSAQTSEYEEAESGISFVRINNLKCSVFNFSYLEGILSSLFVDFVLRITFLCVFKFFNCVIFTAFNNHASSEFYSFLELQRPVEKISPQPADFYSPRPLISKFLHFKLFLSLTLMHCQFVTVNLHYHSVIHCRIIK

SEQ ID NO: 6215 - protein, 184 aa, Glycine max
  peptide (1)..(184): Ceres Seq. ID no. 14308750
MNHIIETGTDDQEKLPIIPGVNYISLTQDNKNKDILNAGLTYESPKPLGFSSWEGILENNAGSQHVHFQPLFPGTQPDNMGINSNFSQGEEIMVPYLTTSIAKQHENGSIIKAEGNWQVYDVDSLRMSSWPIDSAYSGSTCEVSCSNCEQEVNDVDFQKSLEQCLLHSHKQNKVLMQNDLQEKL

SEQ ID NO: 6216 - DNA, 1240 bp, Glycine max
  misc_feature (1)..(1240): Ceres Seq. ID no. 14308709
tttcaattttgttttgcacactactatcaattattgggaggtaagggctagaaaacaagttgtatcaattccaattgtggacaccattatacatacatcaaattttgcatgtcacgtgtattcacagtttgaccttagtattcaattattgggaggggaggaaaggaaaacaaagttatttcaattccaattgttgacactactatacatataatttcacatttcatatttgtttatgaatttaatggtgatatgctaacaatataaaatagttttacactttcatccaatcatagatcaccatctacatgacttctacgatagttttgtaaaaatcaacaaacttattacaaattatagattataaatggatgacaatgtaaattagttttacacttttacattgtcaatacatatctttttctctcttcatttattgacattaattttcaattaaatttgcagtttttacctggggcatgtttgatatccaatgatggcacaaagaagatgtgtggtgatgatcatagggcatggtacactagggggtgtcctagcaaatatggttgggctgctctaataggccttgctctttacatcatattcttctcacctggcatgggaactgttccatgggttgtgaactcagagatctatcccttgaggtacagaggggtttgtggaggaatagcatccacaactgtttggatttccaacctcattgtttctgagtccttcttgtccctcacaaaagctctagggacagcatggacattcatgatgtttggaattgtggccattgtggcaatcttctttgtcattatttttgtgcctgagaccaaaggggttcctatggaggaagtggagaagatgctagaacaaagatctgtgcagttcaagttttgggagaagagagattctggctctgagaagcattgactcaaagaacaaaaaaaaaagcaaaattgtttgagtcatttttattagttttatagcttaaaatagtgaaattaagtggcttgtgaagttatggttatttgatgacaatgattgttctctctgggtaagatttggtgatagttagcattttagctctaatgtgtatgtagttgtctagatgattagttggattgatgaaaatccttatgaaattccttagaggattggaatatgagaattggtaataagctcttatttgtgatataatgaagaaaaaaagtgtatcaagaatttgatcttt

SEQ ID NO: 6217 - protein, 142 aa, Glycine max
  peptide (1)..(142): Ceres Seq. ID no. 14308710
  misc_feature (1)..(122): Pfam Name: and other Pfam Description: Sugar
  misc_feature (1)..(141): NCBI GI NO: 15220697 NR Description: sugar transporter family [Arabidopsis thaliana]
  misc_feature (1)..(135): NCBI GI NO: 33146705 NR Description: putative proton myo-inositol transporter
  misc_feature (1)..(141): NCBI GI NO: 32488451 NR Description: OSJNBa0004N05.8
  misc_feature (1)..(142): NCBI GI NO: 9652184 NR Description: putative Na+/myo-inositol symporter
  misc_feature (1)..(123): NCBI GI NO: 9652186 NR Description: putative Na+/myo-inositol symporter
  misc_feature (1)..(123): NCBI GI NO: 15235767 NR Description: sugar transporter family [Arabidopsis thaliana]
  misc_feature (1)..(123): NCBI GI NO: 15227479 NR Description: sugar transporter family [Arabidopsis thaliana]
  misc_feature (18)..(142): NCBI GI NO: 25308955 NR Description: probable membrane transporter
  misc_feature (18)..(142): NCBI GI NO: 30689342 NR Description: sugar transporter family [Arabidopsis thaliana]
  misc_feature (14)..(126): NCBI GI NO: 38347452 NR Description: OSJNBa0076N16.21
MCGDDHRAWYTRGCPSKYGWAALIGLALYIIFFSPGMGTVPWVVNSEIYPLRYRGVCGGIASTTVWISNLIVSESFLSLTKALGTAWTFMMFGIVAIVAIFFVIIFVPETKGVPMEEVEKMLEQRSVQFKFWEKRDSGSEKH

SEQ ID NO: 6218 - protein, 106 aa, Glycine max
  peptide (1)..(106): Ceres Seq. ID no. 14308711
  misc_feature (1)..(86): Pfam Name: and other Pfam Description: Sugar
  misc_feature (1)..(105): NCBI GI NO: 15220697 NR Description: sugar transporter family [Arabidopsis thaliana]
  misc_feature (1)..(99): NCBI GI NO: 33146705 NR Description: putative proton myo-inositol transporter
  misc_feature (1)..(105): NCBI GI NO: 32488451 NR Description: OSJNBa0004N05.8
  misc_feature (1)..(106): NCBI GI NO: 9652184 NR Description: putative Na+/myo-inositol symporter
  misc_feature (1)..(87): NCBI GI NO: 9652186 NR Description: putative Na+/myo-inositol symporter
  misc_feature (1)..(87): NCBI GI NO: 15235767 NR Description: sugar transporter family [Arabidopsis thaliana]
  misc_feature (1)..(87): NCBI GI NO: 15227479 NR Description: sugar transporter family [Arabidopsis thaliana]
  misc_feature (1)..(106): NCBI GI NO: 25308955 NR Description: probable membrane transporter
  misc_feature (1)..(106): NCBI GI NO: 30689342 NR Description: sugar transporter family [Arabidopsis thaliana]
  misc_feature (1)..(90): NCBI GI NO: 38347452 NR Description: OSJNBa0076N16.21
MGTVPWVVNSEIYPLRYRGVCGGIASTTVWISNLIVSESFLSLTKALGTAWTFMMFGIVAIVAIFFVIIFVPETKGVPMEEVEKMLEQRSVQFKFWEKRDSGSEKH

SEQ ID NO: 6219 - DNA, 1160 bp, Glycine max
  misc_feature (1)..(1160): Ceres Seq. ID no. 14310592
aaacgtgtttcatgaaatatctaacttttaaagagctcaatgtgtacaaactcattgtgagcggatgcaacgttaaataagagcatgaatagactcatgtctacacatctaactagagtagaagccaagacgcactgttctacaaattaaagaaaagactcctttatggataatatttatatcaaacaagcgttggtattgaaggaagttaagcatgtattccaaaagcttattggcgaggatcccatggagagtatgtatatggttgacactatccaaaggcttggcattgaacaccacttcgaagaggaaattgaagctgctcttcagaagcaacatttgatatttagcagtcatctcagtgattttgcgaataaccataaactttgtgaagttgcacttccattccgtttacttagacaaagaggccattatgttcttgcagatgtatttgacaacctgaagagtaacaaaaaagagtttagagaaaaacacggtgaagatgtgaagggtcttatttctctgtatgaggcaacccagctaggtattgaaggagaagacagtcttgatgatgcaggttacctctgccaccaacttcttcatgcatggctgacaagacatgaagagcataatgaagctatgtatgttgctaagactcttcagcatccgcttcattatgacttatcaagattcagggacgacacaagtatacttctaaatgatttcaagaccaagagagaatgggaatgcttagaggaacttgctgaaatcaattccagcatagttaggttcgtgaaccagaatgaaataactcaagtttacaaatggtggaaagaccttgggctgaacaatgaggtgaagttcgctagatatcaacctcttaaatggtacatgtggccaatggcatgcttcacagatccacgcttctcagagcaaaggattgagctcaccaaacctatctctctggtctacattattgatgacattttcgatgtttatgggacattagaccagcttactttatttacagatgctattaaaaggtattcaaatatatatatttctagtgtgtgcggcagacaatcaatagaattagcgatgccaacctagttagaatctttactcctattgtgatgcttaatcatgcaccttttacttac

SEQ ID NO: 6220 - protein, 314 aa, Glycine max
  peptide (1)..(314): Ceres Seq. ID no. 14310593
  misc_feature (7)..(175): Pfam Name: Pfam Description:  Terpene synthase, N-terminal domain
  misc_feature (12)..(294): NCBI GI NO: 30349142 NR Description: myrcene synthase Oc15 [Antirrhinum majus]
  misc_feature (12)..(294): NCBI GI NO: 30349144 NR Description: myrcene synthase 1e20 [Antirrhinum majus]
  misc_feature (12)..(294): NCBI GI NO: 30349140 NR Description: (E)-b-ocimene synthase [Antirrhinum majus]
  misc_feature (10)..(296): NCBI GI NO: 29468398 NR Description: linalool synthase [Arabidopsis thaliana]
  misc_feature (33)..(296): NCBI GI NO: 15220567 NR Description: terpene synthase/cyclase family
  misc_feature (33)..(296): NCBI GI NO: 25404336 NR Description: hypothetical protein T13M11.3
  misc_feature (7)..(294): NCBI GI NO: 14331015 NR Description: putative chloroplast terpene synthase
  misc_feature (33)..(295): NCBI GI NO: 18766934 NR Description: beta-caryophyllene synthase QHS1 [Artemisia annua]
  misc_feature (1)..(302): NCBI GI NO: 7448227 NR Description: germacrene C synthase - tomato
  misc_feature (1)..(302): NCBI GI NO: 7448228 NR Description: germacrene C synthase, epidermal - tomato
MDNIYIKQALVLKEVKHVFQKLIGEDPMESMYMVDTIQRLGIEHHFEEEIEAALQKQHLIFSSHLSDFANNHKLCEVALPFRLLRQRGHYVLADVFDNLKSNKKEFREKHGEDVKGLISLYEATQLGIEGEDSLDDAGYLCHQLLHAWLTRHEEHNEAMYVAKTLQHPLHYDLSRFRDDTSILLNDFKTKREWECLEELAEINSSIVRFVNQNEITQVYKWWKDLGLNNEVKFARYQPLKWYMWPMACFTDPRFSEQRIELTKPISLVYIIDDIFDVYGTLDQLTLFTDAIKRYSNIYISSVCGRQSIELAMPT

SEQ ID NO: 6221 - protein, 287 aa, Glycine max
  peptide (1)..(287): Ceres Seq. ID no. 14310594
  misc_feature (1)..(148): Pfam Name: Pfam Description:  Terpene synthase, N-terminal domain
  misc_feature (1)..(267): NCBI GI NO: 30349142 NR Description: myrcene synthase Oc15 [Antirrhinum majus]
  misc_feature (1)..(267): NCBI GI NO: 30349144 NR Description: myrcene synthase 1e20 [Antirrhinum majus]
  misc_feature (1)..(267): NCBI GI NO: 30349140 NR Description: (E)-b-ocimene synthase [Antirrhinum majus]
  misc_feature (1)..(269): NCBI GI NO: 29468398 NR Description: linalool synthase [Arabidopsis thaliana]
  misc_feature (6)..(269): NCBI GI NO: 15220567 NR Description: terpene synthase/cyclase family
  misc_feature (6)..(269): NCBI GI NO: 25404336 NR Description: hypothetical protein T13M11.3
  misc_feature (1)..(267): NCBI GI NO: 14331015 NR Description: putative chloroplast terpene synthase
  misc_feature (6)..(268): NCBI GI NO: 18766934 NR Description: beta-caryophyllene synthase QHS1 [Artemisia annua]
  misc_feature (1)..(275): NCBI GI NO: 7448227 NR Description: germacrene C synthase - tomato
  misc_feature (1)..(275): NCBI GI NO: 11934933 NR Description: sesquiterpene synthase 2 [Lycopersicon esculentum]
MESMYMVDTIQRLGIEHHFEEEIEAALQKQHLIFSSHLSDFANNHKLCEVALPFRLLRQRGHYVLADVFDNLKSNKKEFREKHGEDVKGLISLYEATQLGIEGEDSLDDAGYLCHQLLHAWLTRHEEHNEAMYVAKTLQHPLHYDLSRFRDDTSILLNDFKTKREWECLEELAEINSSIVRFVNQNEITQVYKWWKDLGLNNEVKFARYQPLKWYMWPMACFTDPRFSEQRIELTKPISLVYIIDDIFDVYGTLDQLTLFTDAIKRYSNIYISSVCGRQSIELAMPT

SEQ ID NO: 6222 - protein, 284 aa, Glycine max
  peptide (1)..(284): Ceres Seq. ID no. 14310595
  misc_feature (1)..(145): Pfam Name: Pfam Description:  Terpene synthase, N-terminal domain
  misc_feature (1)..(264): NCBI GI NO: 30349142 NR Description: myrcene synthase Oc15 [Antirrhinum majus]
  misc_feature (1)..(264): NCBI GI NO: 30349144 NR Description: myrcene synthase 1e20 [Antirrhinum majus]
  misc_feature (1)..(264): NCBI GI NO: 30349140 NR Description: (E)-b-ocimene synthase [Antirrhinum majus]
  misc_feature (1)..(266): NCBI GI NO: 29468398 NR Description: linalool synthase [Arabidopsis thaliana]
  misc_feature (3)..(266): NCBI GI NO: 15220567 NR Description: terpene synthase/cyclase family
  misc_feature (3)..(266): NCBI GI NO: 25404336 NR Description: hypothetical protein T13M11.3
  misc_feature (1)..(264): NCBI GI NO: 14331015 NR Description: putative chloroplast terpene synthase
  misc_feature (3)..(265): NCBI GI NO: 18766934 NR Description: beta-caryophyllene synthase QHS1 [Artemisia annua]
  misc_feature (1)..(272): NCBI GI NO: 7448227 NR Description: germacrene C synthase - tomato
  misc_feature (1)..(272): NCBI GI NO: 7448228 NR Description: germacrene C synthase, epidermal - tomato
MYMVDTIQRLGIEHHFEEEIEAALQKQHLIFSSHLSDFANNHKLCEVALPFRLLRQRGHYVLADVFDNLKSNKKEFREKHGEDVKGLISLYEATQLGIEGEDSLDDAGYLCHQLLHAWLTRHEEHNEAMYVAKTLQHPLHYDLSRFRDDTSILLNDFKTKREWECLEELAEINSSIVRFVNQNEITQVYKWWKDLGLNNEVKFARYQPLKWYMWPMACFTDPRFSEQRIELTKPISLVYIIDDIFDVYGTLDQLTLFTDAIKRYSNIYISSVCGRQSIELAMPT

SEQ ID NO: 6223 - DNA, 1275 bp, Glycine max
  misc_feature (1)..(1275): Ceres Seq. ID no. 15170220
gattccatgcacattaatttattaattatatatgtaactctctccatcgatcagaattcattcagagaagtgagagttaaagatggaagggatagagcaccaaacactgaacgtgaatggcataaacatgcacatagccgagaagggtgaaggcccattgatcctcttcatccatggcttccccgacctatggtactcctggcgccaccagatcacagctcttgcctccctaggttaccgctgcgtggcgccggaccttcgtgggtacggcgacactgacgtgccggccaaccccacagcctacaccagcctccacgtcgtcggcgacctcgttgggcttctcgacgcgatcgtcggcgacgaggagaaggtgtttgtggtgggtcatgactggggtgcaatgactgcatggtctctttccctctatcgccccgaacgaatcagggctcttgttaacttgagcgttgttttcactccccgaaaccccaagagaaaaccccttgacactttaagagcagtgtacggaaatgactactatatctgcagatttcaggagcctggggaaatagaagctgagtttgcacagatcggcactgcaagagttctgaaggaattcctgacataccgcaaccctggtccactttatctaccaaagggtaaagcgtttgcacatccaactgattctcccatagcgttgccctcatggctatctgaagaagaatgtgactactatgccagtaaatatgacaagactggcttcacagggggattgaactactacagaaatttggatctaaattgggagctgacagcatcgtggactggtgctcaagtgaaagttccagttaagtttatagtgggtgatctagacctgacctataatgcaccaggagccaaggaatacattcacaaaggtgggttcaagagagatgtgccgcttctggaggatgtggttgttcttgaaggggctggtcactttctccatcaagaaaggcctgatgaaatcagcaaccacatttacgatttctttaagaaattctgatatgcctatgctcatgttggatgtgtctccctttgttcttggtttcattgaacggccttgttcttgctggctgagtggctgggtctgtattctcatagtggatgtgcatgcgtccatcgaaaactcttgctgagtgtgttttctcagtgtctgctcgtgtttttatataaataaatgtaaaaagtgtgtaaaaatcgttttacaaatttatcgtaaaaataacattactaaag

SEQ ID NO: 6224 - protein, 319 aa, Glycine max
  peptide (1)..(319): Ceres Seq. ID no. 15170221
  misc_feature (52)..(314): Pfam Name: Pfam Description:  alpha/beta hydrolase fold
  misc_feature (1)..(319): NCBI GI NO: 7489254 NR Description: probable epoxide hydrolase (EC 3
  misc_feature (1)..(319): NCBI GI NO: 7489255 NR Description: probable epoxide hydrolase (EC 3
  misc_feature (1)..(319): NCBI GI NO: 407942 NR Description: epoxide hydrolase
  misc_feature (1)..(319): NCBI GI NO: 18411917 NR Description: epoxide hydrolase, putative [Arabidopsis thaliana]
  misc_feature (1)..(319): NCBI GI NO: 30683476 NR Description: epoxide hydrolase, putative [Arabidopsis thaliana]
  misc_feature (1)..(319): NCBI GI NO: 7489256 NR Description: probable epoxide hydrolase (EC 3
  misc_feature (1)..(306): NCBI GI NO: 25407540 NR Description: probable epoxide hydrolase
  misc_feature (1)..(319): NCBI GI NO: 7488671 NR Description: epoxide hydrolase homolog - soybean
  misc_feature (1)..(319): NCBI GI NO: 27960680 NR Description: soluble epoxide hydrolase [Euphorbia lagascae]
  misc_feature (17)..(319): NCBI GI NO: 7489257 NR Description: probable epoxide hydrolase (EC 3
MEGIEHQTLNVNGINMHIAEKGEGPLILFIHGFPDLWYSWRHQITALASLGYRCVAPDLRGYGDTDVPANPTAYTSLHVVGDLVGLLDAIVGDEEKVFVVGHDWGAMTAWSLSLYRPERIRALVNLSVVFTPRNPKRKPLDTLRAVYGNDYYICRFQEPGEIEAEFAQIGTARVLKEFLTYRNPGPLYLPKGKAFAHPTDSPIALPSWLSEEECDYYASKYDKTGFTGGLNYYRNLDLNWELTASWTGAQVKVPVKFIVGDLDLTYNAPGAKEYIHKGGFKRDVPLLEDVVVLEGAGHFLHQERPDEISNHIYDFFKKF

SEQ ID NO: 6225 - protein, 304 aa, Glycine max
  peptide (1)..(304): Ceres Seq. ID no. 15170222
  misc_feature (37)..(299): Pfam Name: Pfam Description:  alpha/beta hydrolase fold
  misc_feature (1)..(304): NCBI GI NO: 7489254 NR Description: probable epoxide hydrolase (EC 3
  misc_feature (1)..(304): NCBI GI NO: 7489255 NR Description: probable epoxide hydrolase (EC 3
  misc_feature (1)..(304): NCBI GI NO: 407942 NR Description: epoxide hydrolase
  misc_feature (1)..(304): NCBI GI NO: 18411917 NR Description: epoxide hydrolase, putative [Arabidopsis thaliana]
  misc_feature (1)..(304): NCBI GI NO: 30683476 NR Description: epoxide hydrolase, putative [Arabidopsis thaliana]
  misc_feature (1)..(304): NCBI GI NO: 7489256 NR Description: probable epoxide hydrolase (EC 3
  misc_feature (1)..(291): NCBI GI NO: 25407540 NR Description: probable epoxide hydrolase
  misc_feature (1)..(304): NCBI GI NO: 7488671 NR Description: epoxide hydrolase homolog - soybean
  misc_feature (1)..(304): NCBI GI NO: 27960680 NR Description: soluble epoxide hydrolase [Euphorbia lagascae]
  misc_feature (2)..(304): NCBI GI NO: 7489257 NR Description: probable epoxide hydrolase (EC 3
MHIAEKGEGPLILFIHGFPDLWYSWRHQITALASLGYRCVAPDLRGYGDTDVPANPTAYTSLHVVGDLVGLLDAIVGDEEKVFVVGHDWGAMTAWSLSLYRPERIRALVNLSVVFTPRNPKRKPLDTLRAVYGNDYYICRFQEPGEIEAEFAQIGTARVLKEFLTYRNPGPLYLPKGKAFAHPTDSPIALPSWLSEEECDYYASKYDKTGFTGGLNYYRNLDLNWELTASWTGAQVKVPVKFIVGDLDLTYNAPGAKEYIHKGGFKRDVPLLEDVVVLEGAGHFLHQERPDEISNHIYDFFKKF

SEQ ID NO: 6226 - protein, 213 aa, Glycine max
  peptide (1)..(213): Ceres Seq. ID no. 15170223
  misc_feature (1)..(208): Pfam Name: Pfam Description:  alpha/beta hydrolase fold
  misc_feature (1)..(213): NCBI GI NO: 7489254 NR Description: probable epoxide hydrolase (EC 3
  misc_feature (1)..(213): NCBI GI NO: 7489255 NR Description: probable epoxide hydrolase (EC 3
  misc_feature (1)..(213): NCBI GI NO: 407942 NR Description: epoxide hydrolase
  misc_feature (1)..(213): NCBI GI NO: 18411917 NR Description: epoxide hydrolase, putative [Arabidopsis thaliana]
  misc_feature (1)..(213): NCBI GI NO: 30683476 NR Description: epoxide hydrolase, putative [Arabidopsis thaliana]
  misc_feature (1)..(213): NCBI GI NO: 7489256 NR Description: probable epoxide hydrolase (EC 3
  misc_feature (1)..(200): NCBI GI NO: 25407540 NR Description: probable epoxide hydrolase
  misc_feature (1)..(213): NCBI GI NO: 7488671 NR Description: epoxide hydrolase homolog - soybean
  misc_feature (1)..(213): NCBI GI NO: 27960680 NR Description: soluble epoxide hydrolase [Euphorbia lagascae]
  misc_feature (1)..(213): NCBI GI NO: 7489257 NR Description: probable epoxide hydrolase (EC 3
MTAWSLSLYRPERIRALVNLSVVFTPRNPKRKPLDTLRAVYGNDYYICRFQEPGEIEAEFAQIGTARVLKEFLTYRNPGPLYLPKGKAFAHPTDSPIALPSWLSEEECDYYASKYDKTGFTGGLNYYRNLDLNWELTASWTGAQVKVPVKFIVGDLDLTYNAPGAKEYIHKGGFKRDVPLLEDVVVLEGAGHFLHQERPDEISNHIYDFFKKF

SEQ ID NO: 6227 - DNA, 1550 bp, Glycine max
  misc_feature (1)..(1550): Ceres Seq. ID no. 15170509
tgatagaagacatggataaagaaattgttcgaagagaatcagcgacagagcctgcggaacagagcaggttatggtcccgtgaggatataaagaaagttttacaagaaaataagaggctcgtgaatttgacaagtttaattttggacgagtgtgatagtttaacagagatatcagatgtatcttgtctctcaaatttggaaattttgtcatttagagagcgtcggaatttatttagaattcaccattcagttggtttattggaaaagcttaaaatcttggatgctgaaggttgcccagagcttaagagttttccaccgttgaagttgacctctcttgaaagccttgatctttcgtattgttccaatctcgagagttttcctgaaatattaggaaagatggaaaatataacacgacttcacttgattggattttccataagaaaactcccaccttcatttcgaaatcttactcggcttaaagtgttatatgtgggaaccgaaactactccgttaatggactttgatgttgccaccctcatttcgaacatctgcatgatgtcagaactgtttgaaattgcagcaaacagtttgcaatggaggctatggcctgacgatgcttgtttgcaatggaggctatggcctgacgattttttgaaattgacctctcttctgaattcaagcattgaatttctttgtcacggcgacctgtcagatgagcttcttcggctatttctgtcatgttttgtaaatgtgataaatttagagctaaaagggagtaaattaacagttattcccgaatgcatcaaagaatgccgctttttatctacccctaaattgaatggttgcgatcgtcttcaagaaattagagggattcctccaaacttgaaaagattctctgcaatagcatgcccagacttgacttcctcaagcataagcatgttgctgaatcaggaactgcacgaggctggagacacctactttagtttgccaatagtaaagattccagagtggtttgagtgccagagtcgggaaccgtcaatttttttctggttccgtaacgaattcccagccataactgtttgcattgttgagtcacattttaaggaatattccaatgatctggttctcagcgtgatcattaataagaaacataaacataaacaaagagaaatattcgattcagtgatcctgatcctgatccttttagaaagagaaaaatttgtagttcagaggttggggttggggaaaaagcaaagattagtaggcagtgaagttgttgagacacaatttgtagagcagcaacaacatatgggtttttttctcacacgtgtagaactgggcactatcacttgtaatgtctcgctgctccggcaatcaataattggatgaaagagagaattcaagttcagcagtacgtggcatggtatcaacgctgacaaaagacaacactgtaagtagccctactgattcttgttgtctagtcaagtttggttttagatattctattttgttttggattcaataaaaatagatcgagcatttcaatctctt

SEQ ID NO: 6228 - protein, 461 aa, Glycine max
  peptide (1)..(461): Ceres Seq. ID no. 15170510
  misc_feature (37)..(396): NCBI GI NO: 18033111 NR Description: functional candidate resistance protein KR1
  misc_feature (1)..(56): NCBI GI NO: 18033111 NR Description: functional candidate resistance protein KR1
  misc_feature (415)..(443): NCBI GI NO: 18033111 NR Description: functional candidate resistance protein KR1
  misc_feature (36)..(318): NCBI GI NO: 27764536 NR Description: R 3 protein [Glycine max]
  misc_feature (1)..(48): NCBI GI NO: 27764536 NR Description: R 3 protein [Glycine max]
  misc_feature (41)..(318): NCBI GI NO: 27764544 NR Description: R 10 protein [Glycine max]
  misc_feature (1)..(48): NCBI GI NO: 27764544 NR Description: R 10 protein [Glycine max]
  misc_feature (41)..(318): NCBI GI NO: 27764546 NR Description: R 1 protein [Glycine max]
  misc_feature (1)..(48): NCBI GI NO: 27764546 NR Description: R 1 protein [Glycine max]
  misc_feature (36)..(318): NCBI GI NO: 27764539 NR Description: R 4 protein [Glycine max]
IEDMDKEIVRRESATEPAEQSRLWSREDIKKVLQENKRLVNLTSLILDECDSLTEISDVSCLSNLEILSFRERRNLFRIHHSVGLLEKLKILDAEGCPELKSFPPLKLTSLESLDLSYCSNLESFPEILGKMENITRLHLIGFSIRKLPPSFRNLTRLKVLYVGTETTPLMDFDVATLISNICMMSELFEIAANSLQWRLWPDDACLQWRLWPDDFLKLTSLLNSSIEFLCHGDLSDELLRLFLSCFVNVINLELKGSKLTVIPECIKECRFLSTPKLNGCDRLQEIRGIPPNLKRFSAIACPDLTSSSISMLLNQELHEAGDTYFSLPIVKIPEWFECQSREPSIFFWFRNEFPAITVCIVESHFKEYSNDLVLSVIINKKHKHKQREIFDSVILILILLEREKFVVQRLGLGKKQRLVGSEVVETQFVEQQQHMGFFLTRVELGTITCNVSLLRQSIIG

SEQ ID NO: 6229 - protein, 458 aa, Glycine max
  peptide (1)..(458): Ceres Seq. ID no. 15170511
  misc_feature (34)..(393): NCBI GI NO: 18033111 NR Description: functional candidate resistance protein KR1
  misc_feature (1)..(53): NCBI GI NO: 18033111 NR Description: functional candidate resistance protein KR1
  misc_feature (412)..(440): NCBI GI NO: 18033111 NR Description: functional candidate resistance protein KR1
  misc_feature (33)..(315): NCBI GI NO: 27764536 NR Description: R 3 protein [Glycine max]
  misc_feature (1)..(45): NCBI GI NO: 27764536 NR Description: R 3 protein [Glycine max]
  misc_feature (38)..(315): NCBI GI NO: 27764544 NR Description: R 10 protein [Glycine max]
  misc_feature (1)..(45): NCBI GI NO: 27764544 NR Description: R 10 protein [Glycine max]
  misc_feature (38)..(315): NCBI GI NO: 27764546 NR Description: R 1 protein [Glycine max]
  misc_feature (1)..(45): NCBI GI NO: 27764546 NR Description: R 1 protein [Glycine max]
  misc_feature (33)..(315): NCBI GI NO: 27764539 NR Description: R 4 protein [Glycine max]
MDKEIVRRESATEPAEQSRLWSREDIKKVLQENKRLVNLTSLILDECDSLTEISDVSCLSNLEILSFRERRNLFRIHHSVGLLEKLKILDAEGCPELKSFPPLKLTSLESLDLSYCSNLESFPEILGKMENITRLHLIGFSIRKLPPSFRNLTRLKVLYVGTETTPLMDFDVATLISNICMMSELFEIAANSLQWRLWPDDACLQWRLWPDDFLKLTSLLNSSIEFLCHGDLSDELLRLFLSCFVNVINLELKGSKLTVIPECIKECRFLSTPKLNGCDRLQEIRGIPPNLKRFSAIACPDLTSSSISMLLNQELHEAGDTYFSLPIVKIPEWFECQSREPSIFFWFRNEFPAITVCIVESHFKEYSNDLVLSVIINKKHKHKQREIFDSVILILILLEREKFVVQRLGLGKKQRLVGSEVVETQFVEQQQHMGFFLTRVELGTITCNVSLLRQSIIG

SEQ ID NO: 6230 - protein, 330 aa, Glycine max
  peptide (1)..(330): Ceres Seq. ID no. 15170512
  misc_feature (1)..(265): NCBI GI NO: 18033111 NR Description: functional candidate resistance protein KR1
  misc_feature (284)..(312): NCBI GI NO: 18033111 NR Description: functional candidate resistance protein KR1
  misc_feature (1)..(187): NCBI GI NO: 27764536 NR Description: R 3 protein [Glycine max]
  misc_feature (1)..(187): NCBI GI NO: 27764544 NR Description: R 10 protein [Glycine max]
  misc_feature (1)..(187): NCBI GI NO: 27764546 NR Description: R 1 protein [Glycine max]
  misc_feature (1)..(187): NCBI GI NO: 27764539 NR Description: R 4 protein [Glycine max]
  misc_feature (1)..(187): NCBI GI NO: 27764545 NR Description: R 5 protein [Glycine max]
  misc_feature (1)..(187): NCBI GI NO: 27764547 NR Description: R 8 protein [Glycine max]
  misc_feature (1)..(183): NCBI GI NO: 12056928 NR Description: putative resistance protein [Glycine max]
  misc_feature (1)..(177): NCBI GI NO: 9965103 NR Description: resistance protein LM6 [Glycine max]
MENITRLHLIGFSIRKLPPSFRNLTRLKVLYVGTETTPLMDFDVATLISNICMMSELFEIAANSLQWRLWPDDACLQWRLWPDDFLKLTSLLNSSIEFLCHGDLSDELLRLFLSCFVNVINLELKGSKLTVIPECIKECRFLSTPKLNGCDRLQEIRGIPPNLKRFSAIACPDLTSSSISMLLNQELHEAGDTYFSLPIVKIPEWFECQSREPSIFFWFRNEFPAITVCIVESHFKEYSNDLVLSVIINKKHKHKQREIFDSVILILILLEREKFVVQRLGLGKKQRLVGSEVVETQFVEQQQHMGFFLTRVELGTITCNVSLLRQSIIG

SEQ ID NO: 6231 - DNA, 1381 bp, Glycine max
  misc_feature (1)..(1381): Ceres Seq. ID no. 15171016
aaatgtcttaaggttcagggtttacaaaacgaaaaggcatatttttgtttttctttcatcttatacacggcaaaatttattcagaagtttcatttataaacctctatatgttctgcccctgcttgttgctggatttacttggttgtgttaaattctttgtttttagtattttgatatttagacacatgtaattgctggttctatagcctctggcaaaacccagtcgaagtgtattgcctttgtttttatcccccctcctttggtggaccgttgcctaaattgtgagcctagctttggatgtccaaggtgttttctatttcattgatcattaaatgtttatgtatttgttttatgcagtaatttgtttacaaattccaactggtttgccttccaagatgacagaattggtgatgcacctgggggcacatcatcctctgagatgatggatgagataaaattgaatgcagttgcaaatagtggtagcaacagtagtgatgatgaggtagtggttggagaggatgaagaattggctgacagcaaaaatactgtgaatggtacatctagcttaagtgcagacttctttagtggattgactgccagtgattccatgaatgggggcactttaaactttgaaagtgagaagacaagtccttcaaatgatatgggattcttcaggtttgaggcaccagacaacgaggacttgtttggagataggcctttacctgattgggttggatggggtgaaccatcagaaatgcaagatgctggctcaagtatgaacccctttctggataatgacgagtctggtaggcctcaagtaggcagccctaatcttagttctccttcaaatggggaatccgtaccttcaaatgggttgccaactactagcgattctatcaatgggaacagtgactcaagtccaacatctgtagcggtaccctcgctatttgaagaggatgtggaatttgtaggtgtagaattagaaggtacagagaaggcaatggaccaggctctcaaagaagggatagttggggaagcaggaccattgaaaagaaacgtagtctcaaaagttccagataaggaaaattctgaagaaggcagtcctggtgtgaaggagttcaacgatgcaaattactggagggttgacaacgaggttgctgttctagagtgatggacaaattggtaaatcttgcttccattgtttgtctgtatgaaaatttggatcaacgccaaggttatgcaacaaattagtgtacagtatttttgtttccattatgttctgtttctgttgtttcatcattgttagatattaaggttgtttattaatttgaagttttgcctctacctgcaagagacttaaagggaattcccacatttattg

SEQ ID NO: 6232 - protein, 243 aa, Glycine max
  peptide (1)..(243): Ceres Seq. ID no. 15171017
  misc_feature (102)..(243): NCBI GI NO: 22531158 NR Description: unknown protein [Arabidopsis thaliana]
  misc_feature (1)..(75): NCBI GI NO: 22531158 NR Description: unknown protein [Arabidopsis thaliana]
  misc_feature (102)..(243): NCBI GI NO: 15226390 NR Description: expressed protein [Arabidopsis thaliana]
  misc_feature (1)..(75): NCBI GI NO: 15226390 NR Description: expressed protein [Arabidopsis thaliana]
  misc_feature (129)..(243): NCBI GI NO: 15230633 NR Description: expressed protein [Arabidopsis thaliana]
  misc_feature (1)..(46): NCBI GI NO: 15230633 NR Description: expressed protein [Arabidopsis thaliana]
  misc_feature (1)..(145): NCBI GI NO: 30680443 NR Description: expressed protein [Arabidopsis thaliana]
  misc_feature (168)..(243): NCBI GI NO: 30680443 NR Description: expressed protein [Arabidopsis thaliana]
  misc_feature (1)..(42): NCBI GI NO: 30680443 NR Description: expressed protein [Arabidopsis thaliana]
  misc_feature (1)..(145): NCBI GI NO: 25370580 NR Description: protein T6D22.8 [imported] - Arabidopsis thaliana
MMDEIKLNAVANSGSNSSDDEVVVGEDEELADSKNTVNGTSSLSADFFSGLTASDSMNGGTLNFESEKTSPSNDMGFFRFEAPDNEDLFGDRPLPDWVGWGEPSEMQDAGSSMNPFLDNDESGRPQVGSPNLSSPSNGESVPSNGLPTTSDSINGNSDSSPTSVAVPSLFEEDVEFVGVELEGTEKAMDQALKEGIVGEAGPLKRNVVSKVPDKENSEEGSPGVKEFNDANYWRVDNEVAVLE

SEQ ID NO: 6233 - protein, 242 aa, Glycine max
  peptide (1)..(242): Ceres Seq. ID no. 15171018
  misc_feature (101)..(242): NCBI GI NO: 22531158 NR Description: unknown protein [Arabidopsis thaliana]
  misc_feature (1)..(74): NCBI GI NO: 22531158 NR Description: unknown protein [Arabidopsis thaliana]
  misc_feature (101)..(242): NCBI GI NO: 15226390 NR Description: expressed protein [Arabidopsis thaliana]
  misc_feature (1)..(74): NCBI GI NO: 15226390 NR Description: expressed protein [Arabidopsis thaliana]
  misc_feature (128)..(242): NCBI GI NO: 15230633 NR Description: expressed protein [Arabidopsis thaliana]
  misc_feature (1)..(45): NCBI GI NO: 15230633 NR Description: expressed protein [Arabidopsis thaliana]
  misc_feature (1)..(144): NCBI GI NO: 30680443 NR Description: expressed protein [Arabidopsis thaliana]
  misc_feature (167)..(242): NCBI GI NO: 30680443 NR Description: expressed protein [Arabidopsis thaliana]
  misc_feature (1)..(41): NCBI GI NO: 30680443 NR Description: expressed protein [Arabidopsis thaliana]
  misc_feature (1)..(144): NCBI GI NO: 25370580 NR Description: protein T6D22.8 [imported] - Arabidopsis thaliana
MDEIKLNAVANSGSNSSDDEVVVGEDEELADSKNTVNGTSSLSADFFSGLTASDSMNGGTLNFESEKTSPSNDMGFFRFEAPDNEDLFGDRPLPDWVGWGEPSEMQDAGSSMNPFLDNDESGRPQVGSPNLSSPSNGESVPSNGLPTTSDSINGNSDSSPTSVAVPSLFEEDVEFVGVELEGTEKAMDQALKEGIVGEAGPLKRNVVSKVPDKENSEEGSPGVKEFNDANYWRVDNEVAVLE

SEQ ID NO: 6234 - protein, 187 aa, Glycine max
  peptide (1)..(187): Ceres Seq. ID no. 15171019
  misc_feature (46)..(187): NCBI GI NO: 22531158 NR Description: unknown protein [Arabidopsis thaliana]
  misc_feature (1)..(19): NCBI GI NO: 22531158 NR Description: unknown protein [Arabidopsis thaliana]
  misc_feature (46)..(187): NCBI GI NO: 15226390 NR Description: expressed protein [Arabidopsis thaliana]
  misc_feature (1)..(19): NCBI GI NO: 15226390 NR Description: expressed protein [Arabidopsis thaliana]
  misc_feature (73)..(187): NCBI GI NO: 15230633 NR Description: expressed protein [Arabidopsis thaliana]
  misc_feature (1)..(89): NCBI GI NO: 30680443 NR Description: expressed protein [Arabidopsis thaliana]
  misc_feature (112)..(187): NCBI GI NO: 30680443 NR Description: expressed protein [Arabidopsis thaliana]
  misc_feature (1)..(89): NCBI GI NO: 25370580 NR Description: protein T6D22.8 [imported] - Arabidopsis thaliana
  misc_feature (112)..(187): NCBI GI NO: 25370580 NR Description: protein T6D22.8 [imported] - Arabidopsis thaliana
  misc_feature (132)..(187): NCBI GI NO: 26451998 NR Description: unknown protein [Arabidopsis thaliana]
MNGGTLNFESEKTSPSNDMGFFRFEAPDNEDLFGDRPLPDWVGWGEPSEMQDAGSSMNPFLDNDESGRPQVGSPNLSSPSNGESVPSNGLPTTSDSINGNSDSSPTSVAVPSLFEEDVEFVGVELEGTEKAMDQALKEGIVGEAGPLKRNVVSKVPDKENSEEGSPGVKEFNDANYWRVDNEVAVLE

SEQ ID NO: 6235 - DNA, 488 bp, Glycine max
  misc_feature (1)..(488): Ceres Seq. ID no. 15169930
atgggcgagatattgaaagctagtggtgctagctattcttcagttgtgaagacaacgatcatgttggctgatctgcaggatttcaataaagtaaacgagatctatggcaaatatttcccggcgccagcacctgcacgatcaacctaccaagtggcggcgctgccactgaatgcccggattgagattgagtgcatcgctgctctctaatcagatcatccaaccactcattaaatcatcaataagcacccaggaatttgtggtagaggtacctgtaccagttcagtgtctgaaaactgcgggtaacaaacctttgtgtcccggataagtgatgtgtgtgtgtgtgtgtgtgagtgaacagtgcatctagtaggagaattgttgcgtggtttgttacttggattcttcgctctttagacaagaagtaccatggcatcaacatcaatagcctactgttttcttcccaataagaatgaattggcttccccaac

SEQ ID NO: 6236 - protein, 68 aa, Glycine max
  peptide (1)..(68): Ceres Seq. ID no. 15169931
  misc_feature (1)..(68): Pfam Name: Pfam Description:  Endoribonuclease L-PSP
  misc_feature (1)..(68): NCBI GI NO: 23617012 NR Description: putative translational inhibitor protein
  misc_feature (1)..(68): NCBI GI NO: 29420485 NR Description: translation-inhibitor protein [Gentiana triflora]
  misc_feature (1)..(68): NCBI GI NO: 9294558 NR Description: contains similarity to protein translationinhibitor~gene_id:MQC12
  misc_feature (1)..(68): NCBI GI NO: 15231137 NR Description: translational inhibitor protein -related
  misc_feature (1)..(66): NCBI GI NO: 5032215 NR Description: translational inhibitor protein p14.5
  misc_feature (1)..(66): NCBI GI NO: 30584193 NR Description: Homo sapiens translational inhibitor protein p14.5
  misc_feature (1)..(66): NCBI GI NO: 31616050 NR Description: Chain A, Crystal Structure Of A Human P14
  misc_feature (1)..(66): NCBI GI NO: 39579795 NR Description: Hypothetical protein CBG24261
  misc_feature (1)..(66): NCBI GI NO: 25148891 NR Description: endoribonuclease precursor (3H299)
  misc_feature (1)..(66): NCBI GI NO: 25148896 NR Description: endoribonuclease (15.2 kD) (3H299)
MGEILKASGASYSSVVKTTIMLADLQDFNKVNEIYGKYFPAPAPARSTYQVAALPLNARIEIECIAAL

SEQ ID NO: 6237 - protein, 51 aa, Glycine max
  peptide (1)..(51): Ceres Seq. ID no. 15169932
MPGLRLSASLLSNQIIQPLIKSSISTQEFVVEVPVPVQCLKTAGNKPLCPG

SEQ ID NO: 6238 - protein, 48 aa, Glycine max
  peptide (1)..(48): Ceres Seq. ID no. 15169933
  misc_feature (1)..(48): NCBI GI NO: 23617012 NR Description: putative translational inhibitor protein
  misc_feature (1)..(48): NCBI GI NO: 29420485 NR Description: translation-inhibitor protein [Gentiana triflora]
  misc_feature (1)..(48): NCBI GI NO: 9294558 NR Description: contains similarity to protein translationinhibitor~gene_id:MQC12
  misc_feature (1)..(48): NCBI GI NO: 15231137 NR Description: translational inhibitor protein -related
  misc_feature (1)..(46): NCBI GI NO: 5032215 NR Description: translational inhibitor protein p14.5
  misc_feature (1)..(46): NCBI GI NO: 31616050 NR Description: Chain A, Crystal Structure Of A Human P14
  misc_feature (1)..(46): NCBI GI NO: 30584193 NR Description: Homo sapiens translational inhibitor protein p14.5
  misc_feature (1)..(46): NCBI GI NO: 39579795 NR Description: Hypothetical protein CBG24261
  misc_feature (1)..(46): NCBI GI NO: 25148891 NR Description: endoribonuclease precursor (3H299)
  misc_feature (1)..(46): NCBI GI NO: 25148896 NR Description: endoribonuclease (15.2 kD) (3H299)
MLADLQDFNKVNEIYGKYFPAPAPARSTYQVAALPLNARIEIECIAAL

SEQ ID NO: 6239 - DNA, 2232 bp, Glycine max
  misc_feature (1)..(2232): Ceres Seq. ID no. 14308370
tttttttttacaacgcttgactgcaattggataaatatttttgatgttgtagaattaaaattagagtttcatctcctaatttatactgcaatgcaaagtcaaattttggagtaaacactaggttgtagttttttgttttcttaacaaatctttattgtgtgaaataccaaaactccaattcaaacaacaaaatgataccaaaaacatttcaggaattgcatgtacttttttcgttttcaatttaaaaaattaaaaaatgctttaattattaatatctctttgatttcttagagggatttggttgcatggtcagtggattactaatatgatttaacgaaggatagttctttgtaaattcttgatgcctgccccgtgtgttagtttactttctgatgtagaagaagattatgattagcagaacaacattgaaaattttgacttaaagaaagtagaggaacaagcagcagagttggagaaggatttgattgtcaaggaacttgaaacgcttgacgtgcttgaagaattaggagctaccaagaggattgtggaggacttgaagcagcagttacaaaaggaggctatgaaatgtttagcaactcgagatgtaaattcatatgaagaagctggaactcctgttattaaggagaaggatgaggaaaattgtggaaatattgtcaatgatgaagaacaggtgatgcaaattccaagcccatgctctatgtcatcatcacctgatatgatcttaatggagttgaaaaaagccaaattgaatctaggcaaaactataaatgaacttggggtgatacaatcctcgattgaatctttgaataagaagatgaagaaggagaaaaattttctggagaggacacgtgaaaagctagcatcaaagtttgcagcagaatctgctcaagagagggtccaagagcaaacaagattgaatccaccggcccctcatgtagagttcacctttggtaaccctgcaaataatttcaattctgattctgggcagtgcaatggaatggcagagacaagaagacctgaaccttcaaagcccttaagtgtatatgaagaatatggatttagtgttaaaactgctgagataaggtggcttgcggctaaaaagatggaagaagctgcaagggcagcagaagctattgctcttgctgaaatcaaggctctatctaatgcccagagatctttaggatttgttctgccagaacctgagaaagtcacttttgcttttggagagcgctctcccctaaaccccaaggctcagatacccaaggagtcaaccttgaagaaggtaatagattccaagtttcaaattgatgaaacaaaaatttctaagctgacaattttgaagaagttggaggaagcagctgaagaagttctacacagcaaacaagtcttgacagatgctttaaacagaattgaaactgcaaacagaaagcaacatgctgctaaggaggctctaaggagatggattccagaggatgatatgaaggagtatagcactattaattgcaacaagtttaatcaaactggaatttatcaagattctctgcaggatgtaaccaggtcaacaacagcaaacaatgatccaaagcctgctttaaggcccacaatttcaatgagagatgtacttagcagaaagcaggttcctgaaggatatgctacaagaaaggagatggaagagcacactgaacggcaaaaggtagcgttgagtcaaatgcttcaagcattgagggaagatctaactcttccaccaaagactgagaaagatgggaacaatcagaagccgtacgtagcacagaggaagaaatttggattcattcaaatatcactccccttggcaaagccaaataagaaaaggggatgaaatttcgatcctcaatccctatgcatggatgaatagccactacccatgcatctttatgttttcccatgccattctttattggttcatgtgttcacactttcatttgtttatgtagaagtttgagtgggtgtttgattctgtaaaatatatgttgtgcttgagtgattggcttataattctgtagctagctttaatggagctagtagattatgttgctattgttggatgcattggagtgatgaggaatttatccatagggtaggaaggtttttatcattggattgataatcttattgttagaagtatgatctatcatgtggttgtaccaatatataaaattatatttgttgatt

SEQ ID NO: 6240 - protein, 432 aa, Glycine max
  peptide (1)..(432): Ceres Seq. ID no. 14308371
  misc_feature (53)..(281): Pfam Name: DUF827 Pfam Description: Plant protein of unknown function
  misc_feature (77)..(431): NCBI GI NO: 15226689 NR Description: hypothetical protein [Arabidopsis thaliana]
  misc_feature (1)..(71): NCBI GI NO: 15226689 NR Description: hypothetical protein [Arabidopsis thaliana]
  misc_feature (53)..(431): NCBI GI NO: 15224495 NR Description: expressed protein [Arabidopsis thaliana]
  misc_feature (1)..(41): NCBI GI NO: 15224495 NR Description: expressed protein [Arabidopsis thaliana]
  misc_feature (1)..(385): NCBI GI NO: 33146426 NR Description: myosin heavy chain-like
  misc_feature (1)..(185): NCBI GI NO: 15228874 NR Description: expressed protein [Arabidopsis thaliana]
  misc_feature (185)..(369): NCBI GI NO: 15228874 NR Description: expressed protein [Arabidopsis thaliana]
  misc_feature (1)..(99): NCBI GI NO: 4433618 NR Description: putative myosin heavy chain
  misc_feature (1)..(308): NCBI GI NO: 15225334 NR Description: expressed protein [Arabidopsis thaliana]
  misc_feature (1)..(357): NCBI GI NO: 15234171 NR Description: hypothetical protein [Arabidopsis thaliana]
MKCLATRDVNSYEEAGTPVIKEKDEENCGNIVNDEEQVMQIPSPCSMSSSPDMILMELKKAKLNLGKTINELGVIQSSIESLNKKMKKEKNFLERTREKLASKFAAESAQERVQEQTRLNPPAPHVEFTFGNPANNFNSDSGQCNGMAETRRPEPSKPLSVYEEYGFSVKTAEIRWLAAKKMEEAARAAEAIALAEIKALSNAQRSLGFVLPEPEKVTFAFGERSPLNPKAQIPKESTLKKVIDSKFQIDETKISKLTILKKLEEAAEEVLHSKQVLTDALNRIETANRKQHAAKEALRRWIPEDDMKEYSTINCNKFNQTGIYQDSLQDVTRSTTANNDPKPALRPTISMRDVLSRKQVPEGYATRKEMEEHTERQKVALSQMLQALREDLTLPPKTEKDGNNQKPYVAQRKKFGFIQISLPLAKPNKKRG

SEQ ID NO: 6241 - protein, 394 aa, Glycine max
  peptide (1)..(394): Ceres Seq. ID no. 14308372
  misc_feature (15)..(243): Pfam Name: DUF827 Pfam Description: Plant protein of unknown function
  misc_feature (39)..(393): NCBI GI NO: 15226689 NR Description: hypothetical protein [Arabidopsis thaliana]
  misc_feature (1)..(33): NCBI GI NO: 15226689 NR Description: hypothetical protein [Arabidopsis thaliana]
  misc_feature (15)..(393): NCBI GI NO: 15224495 NR Description: expressed protein [Arabidopsis thaliana]
  misc_feature (1)..(347): NCBI GI NO: 33146426 NR Description: myosin heavy chain-like
  misc_feature (1)..(147): NCBI GI NO: 15228874 NR Description: expressed protein [Arabidopsis thaliana]
  misc_feature (147)..(331): NCBI GI NO: 15228874 NR Description: expressed protein [Arabidopsis thaliana]
  misc_feature (1)..(61): NCBI GI NO: 4433618 NR Description: putative myosin heavy chain
  misc_feature (1)..(270): NCBI GI NO: 15225334 NR Description: expressed protein [Arabidopsis thaliana]
  misc_feature (1)..(319): NCBI GI NO: 15234171 NR Description: hypothetical protein [Arabidopsis thaliana]
  misc_feature (1)..(113): NCBI GI NO: 15226689 NR Description: hypothetical protein [Arabidopsis thaliana]
MQIPSPCSMSSSPDMILMELKKAKLNLGKTINELGVIQSSIESLNKKMKKEKNFLERTREKLASKFAAESAQERVQEQTRLNPPAPHVEFTFGNPANNFNSDSGQCNGMAETRRPEPSKPLSVYEEYGFSVKTAEIRWLAAKKMEEAARAAEAIALAEIKALSNAQRSLGFVLPEPEKVTFAFGERSPLNPKAQIPKESTLKKVIDSKFQIDETKISKLTILKKLEEAAEEVLHSKQVLTDALNRIETANRKQHAAKEALRRWIPEDDMKEYSTINCNKFNQTGIYQDSLQDVTRSTTANNDPKPALRPTISMRDVLSRKQVPEGYATRKEMEEHTERQKVALSQMLQALREDLTLPPKTEKDGNNQKPYVAQRKKFGFIQISLPLAKPNKKRG

SEQ ID NO: 6242 - protein, 386 aa, Glycine max
  peptide (1)..(386): Ceres Seq. ID no. 14308373
  misc_feature (7)..(235): Pfam Name: DUF827 Pfam Description: Plant protein of unknown function
  misc_feature (31)..(385): NCBI GI NO: 15226689 NR Description: hypothetical protein [Arabidopsis thaliana]
  misc_feature (1)..(25): NCBI GI NO: 15226689 NR Description: hypothetical protein [Arabidopsis thaliana]
  misc_feature (7)..(385): NCBI GI NO: 15224495 NR Description: expressed protein [Arabidopsis thaliana]
  misc_feature (1)..(339): NCBI GI NO: 33146426 NR Description: myosin heavy chain-like
  misc_feature (1)..(139): NCBI GI NO: 15228874 NR Description: expressed protein [Arabidopsis thaliana]
  misc_feature (139)..(323): NCBI GI NO: 15228874 NR Description: expressed protein [Arabidopsis thaliana]
  misc_feature (1)..(53): NCBI GI NO: 4433618 NR Description: putative myosin heavy chain
  misc_feature (1)..(262): NCBI GI NO: 15225334 NR Description: expressed protein [Arabidopsis thaliana]
  misc_feature (1)..(311): NCBI GI NO: 15234171 NR Description: hypothetical protein [Arabidopsis thaliana]
  misc_feature (1)..(105): NCBI GI NO: 15226689 NR Description: hypothetical protein [Arabidopsis thaliana]
MSSSPDMILMELKKAKLNLGKTINELGVIQSSIESLNKKMKKEKNFLERTREKLASKFAAESAQERVQEQTRLNPPAPHVEFTFGNPANNFNSDSGQCNGMAETRRPEPSKPLSVYEEYGFSVKTAEIRWLAAKKMEEAARAAEAIALAEIKALSNAQRSLGFVLPEPEKVTFAFGERSPLNPKAQIPKESTLKKVIDSKFQIDETKISKLTILKKLEEAAEEVLHSKQVLTDALNRIETANRKQHAAKEALRRWIPEDDMKEYSTINCNKFNQTGIYQDSLQDVTRSTTANNDPKPALRPTISMRDVLSRKQVPEGYATRKEMEEHTERQKVALSQMLQALREDLTLPPKTEKDGNNQKPYVAQRKKFGFIQISLPLAKPNKKRG

SEQ ID NO: 6243 - DNA, 1245 bp, Glycine max
  misc_feature (1)..(1245): Ceres Seq. ID no. 14308278
gaagcaaacaagagcatatggatctgtggagcctaaatgcctaaaccatgctgctcaatgcacaagcattactataagacaaacctcgccaaccccggaccggacgccaaccggtccaaccaaacatcacaccggttcgaaccggccttttccttccttatatcaatcactctcctacatccccccacttcatcaagctccaattatcaactctttcaaaagggagaagaaaaggaaaggaaacaaaacgcacaaaggattattatagcaatggcagaacaaaaccaaaaccagacaactgaagctggaaggcaccaagaggttggccacaagagccttctccagagtgatgctctttaccagtatattctggagaccagtgtctacccaagagaacctgaatccatgaaagaactgagagagttgacagcaaaacacccatggaacatcatgacaacctctgcagacgaagggcaattcttgaacatgctccttaagctcatcaatgccaagaacaccatggaaattggtgtctacactggatattcacttcttgccaccgctctcgctcttcctgaagatggaaagatcttggccatggatattaacagggagaattatgaattgggtttgccagtaattaagaaagctggtgttgaccacaaaattgaattcagagaaggtcctgctctcccagttcttgatgaaatggttaaagatgagaagaaccatgggagctatgacttcatctttgtggacgcagacaaggacaactacctcaactaccacaagaggttgatagagcttgtcaaagttgggggagtgatcgggtacgacaacaccctatggaacggctctgtggtggcacccccagatgctcctctcaggaagtacgttagatactacagggacttcgtgctcgagctcaacaaggcactcgctgtggaccccaggatcgagatttgcatgctcccggttggtgatggaatcactatatgccgtcggatcaagtgattctgattttctgataatcacacaatcgtggaccaagaccaccgttgcttcttctgcaccctagtgatgattggtcatcattgagtggcacctgctaatgcatttaaaagcaatcgatattttccttttatttttttttcttcaaaatatttgtgtttgtacttttcttttctctattattcatgtggaaaacggtggacaattaattatatgcaaatgactttttttctc

SEQ ID NO: 6244 - protein, 325 aa, Glycine max
  peptide (1)..(325): Ceres Seq. ID no. 14308279
  misc_feature (112)..(324): Pfam Name: Pfam Description:  O-methyltransferase
  misc_feature (79)..(325): NCBI GI NO: 30580341 NR Description: Caffeoyl-CoA O-methyltransferase
  misc_feature (79)..(325): NCBI GI NO: 30580334 NR Description: Caffeoyl-CoA O-methyltransferase 2
  misc_feature (79)..(325): NCBI GI NO: 3023436 NR Description: Caffeoyl-CoA O-methyltransferase
  misc_feature (79)..(325): NCBI GI NO: 30580333 NR Description: Caffeoyl-CoA O-methyltransferase 1
  misc_feature (81)..(324): NCBI GI NO: 15235213 NR Description: caffeoyl-CoA 3-O-methyltransferase
  misc_feature (89)..(324): NCBI GI NO: 3023437 NR Description: Caffeoyl-CoA O-methyltransferase
  misc_feature (81)..(324): NCBI GI NO: 21595512 NR Description: caffeoyl-CoA O-methyltransferase-like protein
  misc_feature (79)..(325): NCBI GI NO: 13249171 NR Description: caffeoyl-CoA 3-O-methyltransferase
  misc_feature (79)..(324): NCBI GI NO: 30580381 NR Description: Caffeoyl-CoA O-methyltransferase 2
  misc_feature (92)..(324): NCBI GI NO: 2511737 NR Description: caffeoyl-CoA 3-O-methyltransferase 5
MPKPCCSMHKHYYKTNLANPGPDANRSNQTSHRFEPAFSFLISITLLHPPTSSSSNYQLFQKGEEKERKQNAQRIIIAMAEQNQNQTTEAGRHQEVGHKSLLQSDALYQYILETSVYPREPESMKELRELTAKHPWNIMTTSADEGQFLNMLLKLINAKNTMEIGVYTGYSLLATALALPEDGKILAMDINRENYELGLPVIKKAGVDHKIEFREGPALPVLDEMVKDEKNHGSYDFIFVDADKDNYLNYHKRLIELVKVGGVIGYDNTLWNGSVVAPPDAPLRKYVRYYRDFVLELNKALAVDPRIEICMLPVGDGITICRRIK

SEQ ID NO: 6245 - protein, 318 aa, Glycine max
  peptide (1)..(318): Ceres Seq. ID no. 14308280
  misc_feature (105)..(317): Pfam Name: Pfam Description:  O-methyltransferase
  misc_feature (72)..(318): NCBI GI NO: 30580341 NR Description: Caffeoyl-CoA O-methyltransferase
  misc_feature (72)..(318): NCBI GI NO: 30580334 NR Description: Caffeoyl-CoA O-methyltransferase 2
  misc_feature (72)..(318): NCBI GI NO: 3023436 NR Description: Caffeoyl-CoA O-methyltransferase
  misc_feature (72)..(318): NCBI GI NO: 30580333 NR Description: Caffeoyl-CoA O-methyltransferase 1
  misc_feature (74)..(317): NCBI GI NO: 15235213 NR Description: caffeoyl-CoA 3-O-methyltransferase
  misc_feature (82)..(317): NCBI GI NO: 3023437 NR Description: Caffeoyl-CoA O-methyltransferase
  misc_feature (74)..(317): NCBI GI NO: 21595512 NR Description: caffeoyl-CoA O-methyltransferase-like protein
  misc_feature (72)..(318): NCBI GI NO: 13249171 NR Description: caffeoyl-CoA 3-O-methyltransferase
  misc_feature (72)..(317): NCBI GI NO: 30580381 NR Description: Caffeoyl-CoA O-methyltransferase 2
  misc_feature (85)..(317): NCBI GI NO: 2511737 NR Description: caffeoyl-CoA 3-O-methyltransferase 5
MHKHYYKTNLANPGPDANRSNQTSHRFEPAFSFLISITLLHPPTSSSSNYQLFQKGEEKERKQNAQRIIIAMAEQNQNQTTEAGRHQEVGHKSLLQSDALYQYILETSVYPREPESMKELRELTAKHPWNIMTTSADEGQFLNMLLKLINAKNTMEIGVYTGYSLLATALALPEDGKILAMDINRENYELGLPVIKKAGVDHKIEFREGPALPVLDEMVKDEKNHGSYDFIFVDADKDNYLNYHKRLIELVKVGGVIGYDNTLWNGSVVAPPDAPLRKYVRYYRDFVLELNKALAVDPRIEICMLPVGDGITICRRIK

SEQ ID NO: 6246 - protein, 247 aa, Glycine max
  peptide (1)..(247): Ceres Seq. ID no. 14308281
  misc_feature (34)..(246): Pfam Name: Pfam Description:  O-methyltransferase
  misc_feature (1)..(247): NCBI GI NO: 30580341 NR Description: Caffeoyl-CoA O-methyltransferase
  misc_feature (1)..(247): NCBI GI NO: 30580334 NR Description: Caffeoyl-CoA O-methyltransferase 2
  misc_feature (1)..(247): NCBI GI NO: 3023436 NR Description: Caffeoyl-CoA O-methyltransferase
  misc_feature (1)..(247): NCBI GI NO: 30580333 NR Description: Caffeoyl-CoA O-methyltransferase 1
  misc_feature (3)..(246): NCBI GI NO: 15235213 NR Description: caffeoyl-CoA 3-O-methyltransferase
  misc_feature (11)..(246): NCBI GI NO: 3023437 NR Description: Caffeoyl-CoA O-methyltransferase
  misc_feature (3)..(246): NCBI GI NO: 21595512 NR Description: caffeoyl-CoA O-methyltransferase-like protein
  misc_feature (1)..(247): NCBI GI NO: 13249171 NR Description: caffeoyl-CoA 3-O-methyltransferase
  misc_feature (1)..(246): NCBI GI NO: 30580381 NR Description: Caffeoyl-CoA O-methyltransferase 2
  misc_feature (14)..(246): NCBI GI NO: 2511737 NR Description: caffeoyl-CoA 3-O-methyltransferase 5
MAEQNQNQTTEAGRHQEVGHKSLLQSDALYQYILETSVYPREPESMKELRELTAKHPWNIMTTSADEGQFLNMLLKLINAKNTMEIGVYTGYSLLATALALPEDGKILAMDINRENYELGLPVIKKAGVDHKIEFREGPALPVLDEMVKDEKNHGSYDFIFVDADKDNYLNYHKRLIELVKVGGVIGYDNTLWNGSVVAPPDAPLRKYVRYYRDFVLELNKALAVDPRIEICMLPVGDGITICRRIK

SEQ ID NO: 6247 - DNA, 1159 bp, Glycine max
  misc_feature (1)..(1159): Ceres Seq. ID no. 14308351
tttgctatatctgattgcagcaagtaaaaatgagctcagcaagatgattgagctgcagaaagaaatggaaatgctccttcaaaatgcgaaaggggaactgcaaagtaaagattcacttcttaagccattgaaacaaagtgacacacttgccctttccataactgatattcaagaagtttccagctctagtagtcatctttctattcattcgaatatacaatatgttcaaccagagtcaaaaagcgatacggttcctaatcggtttctggaatataacactagcgaacaagatgaatgtgcagaagagataaatgagctccgggcagaatttgaaattgagttgcagcgcttgcagttgtatttggatggagaagctggatttgatgatgcacaacaagagggagtcaaggtaactcttgaggattctagttcaaaaagccatagttcaagttttggtgaaataataatggaacctcaaggagcaacttatgatgtatcttttggagttcctccaattgaattggagagaaggttgcatgaactgcttgaagcaagactggaagaacggatatcagagctggagtctgcattagaatgtaagacgcaaaagcttattaagaaagagatagaggttacttggtggaaagacactgcacaacttatctcacaacatgttccagaaacttctcggttcacttttccacttgatcctgatatttctttgaagttgagtcaacttgtaggatagtttttatgaaagagtgatgttgattaagccatcaaaatattgttatcagcagtacagtttcatgacctgttgtttcttgttcttcaaaattttggtttagtcctctggagtaaatagtggtttggaggatgattttaaatgagagaacagaaattgaagggagtcaaaattgttttccattgtagagcaatacacaagatgtgtaaaaactgaaaatgttggagtcttttgagatttattcttatgttaagattggagttgggtgactgtagtaagctactgcagtgaaatttgttggatgcaacaaaactcaagcatttgactccctgcagctatttatagacaatcgcatctatattagcttgtaagatccttatcttgttcaaagacagtataattttctttcaccat

SEQ ID NO: 6248 - protein, 248 aa, Glycine max
  peptide (1)..(248): Ceres Seq. ID no. 14308352
  misc_feature (1)..(232): NCBI GI NO: 15238287 NR Description: hypothetical protein [Arabidopsis thaliana]
  misc_feature (78)..(240): NCBI GI NO: 18417879 NR Description: WRKY family transcription factor
  misc_feature (78)..(240): NCBI GI NO: 7486317 NR Description: hypothetical protein F28M20
LLYLIAASKNELSKMIELQKEMEMLLQNAKGELQSKDSLLKPLKQSDTLALSITDIQEVSSSSSHLSIHSNIQYVQPESKSDTVPNRFLEYNTSEQDECAEEINELRAEFEIELQRLQLYLDGEAGFDDAQQEGVKVTLEDSSSKSHSSSFGEIIMEPQGATYDVSFGVPPIELERRLHELLEARLEERISELESALECKTQKLIKKEIEVTWWKDTAQLISQHVPETSRFTFPLDPDISLKLSQLVG

SEQ ID NO: 6249 - protein, 234 aa, Glycine max
  peptide (1)..(234): Ceres Seq. ID no. 14308353
  misc_feature (1)..(218): NCBI GI NO: 15238287 NR Description: hypothetical protein [Arabidopsis thaliana]
  misc_feature (64)..(226): NCBI GI NO: 18417879 NR Description: WRKY family transcription factor
  misc_feature (64)..(226): NCBI GI NO: 7486317 NR Description: hypothetical protein F28M20
MIELQKEMEMLLQNAKGELQSKDSLLKPLKQSDTLALSITDIQEVSSSSSHLSIHSNIQYVQPESKSDTVPNRFLEYNTSEQDECAEEINELRAEFEIELQRLQLYLDGEAGFDDAQQEGVKVTLEDSSSKSHSSSFGEIIMEPQGATYDVSFGVPPIELERRLHELLEARLEERISELESALECKTQKLIKKEIEVTWWKDTAQLISQHVPETSRFTFPLDPDISLKLSQLVG

SEQ ID NO: 6250 - protein, 227 aa, Glycine max
  peptide (1)..(227): Ceres Seq. ID no. 14308354
  misc_feature (1)..(211): NCBI GI NO: 15238287 NR Description: hypothetical protein [Arabidopsis thaliana]
  misc_feature (57)..(219): NCBI GI NO: 18417879 NR Description: WRKY family transcription factor
  misc_feature (57)..(219): NCBI GI NO: 7486317 NR Description: hypothetical protein F28M20
MEMLLQNAKGELQSKDSLLKPLKQSDTLALSITDIQEVSSSSSHLSIHSNIQYVQPESKSDTVPNRFLEYNTSEQDECAEEINELRAEFEIELQRLQLYLDGEAGFDDAQQEGVKVTLEDSSSKSHSSSFGEIIMEPQGATYDVSFGVPPIELERRLHELLEARLEERISELESALECKTQKLIKKEIEVTWWKDTAQLISQHVPETSRFTFPLDPDISLKLSQLVG

SEQ ID NO: 6251 - DNA, 1742 bp, Glycine max
  misc_feature (1)..(1742): Ceres Seq. ID no. 12581696
cagctacgtaggccccccccccagaatgctctctgcaaccaaggaacatgaatatcacaagactacagggaggtgtgaatgtcagcagtagtgacaatcccaaacctaaaagtttaggtccagaaagttcaaatggttcagcccatgtggatcatccatctagagagttccagattgcagttagcagcaataggaaggtagtgaacgggagtacctgtagttctgttaggacaacagtaaatgaatttagtgaacgggaaatgccttacatgactaatgccaatgcttccatcattgtgaaggatgattttgataatgtcacaactacctctcaaaggattgaagatcatatggttaaggataggttagccttaaatgatgacgacttgggatccattgaaggagatatgtgtgcttcttcaacaggagttgtaagagtgcaatcaagaaagaaagctgagatgttcctagttcgaacagatggattttcttgtaccagagaaaaagtgactgaatcttctttggctttcactcatcctagcacccagcagcagatgcttatgtggaagtctatgccaaagaatgtgttattgttgaaaaagctgggggaagaactaatggaagaagcaaaaatggttgcttcttttctttatcaccaagagaaaatgaatgttcttgtggaacctgatgtgcatgacatatttgctagaattccaggctttggatttgttcagaccttctatagtcaagataccagtgatctacatgagaaagtcgattttgtggcatgcttgggtggagatggcgttatactgcatgcgtcaaatctattcagagatgctgttccccctattgtgtcatttaaccttggctcccttggttttctgacttctcatgattttgaagattacaagcaagacctacgacaagtcatccatggaaataatacacgagatggtgtgtatattactcttagaatgcgcctccgatgtgaaatttttcgtaaaggtaaagcaatgccagggaaagtatttgacatcctcaatgaggttgttgttgatcggggttctaatccatacctttcaaagattgaatgctatgaacatgatcgacttataaccaaagtacaaggtgatggagtcattgtggccacccctacaggaagtactgcctattctacagctgccggaggttccatggtccatcctaatgtcccttgcatactgtttaccccaatctgtccacattcactctcatttaggccagttatacttccagattctgctcaactagaattaaagattccggaagatgctagaagtaatgcctgggtttcatttgatgggaagagaaggcagcaactctcgagaggcgattctgtccgaatatcgatgagccagcatccccttccaactgttaacaagtttgaccaaacgggtgattggttcagtagcttgattcgctgcctaaattggaatgagaggcttgatcaaaaggctctgtgatgcatgtgaaagtgaagaacagatatgcattaccctaacgtgaggatagggcttctataattactgtacagcttgtacattgagattacagaacttagatatatagcagatacctacactttattacattggctaccattgtgaagatagggtttgccaatgttttttcaacatgtcataatggcaagatgctgttgtatatacatttataaaatgtagtaatttttttttaatctt

SEQ ID NO: 6252 - protein, 485 aa, Glycine max
  peptide (1)..(485): Ceres Seq. ID no. 12581697
  misc_feature (110)..(485): NCBI GI NO: 18395013 NR Description: expressed protein; protein id: At1g21640
  misc_feature (110)..(485): NCBI GI NO: 25518500 NR Description: hypothetical protein F8K7.5 - Arabidopsis thaliana
  misc_feature (156)..(322): NCBI GI NO: 37589440 NR Description: Unknown (protein for MGC:68997) [Xenopus laevis]
  misc_feature (329)..(482): NCBI GI NO: 37589440 NR Description: Unknown (protein for MGC:68997) [Xenopus laevis]
  misc_feature (169)..(334): NCBI GI NO: 8480400 NR Description: Putative inorganic polyphosphate/ATP-NAD kinase
  misc_feature (169)..(334): NCBI GI NO: 10434887 NR Description: unnamed protein product [Homo sapiens]
  misc_feature (169)..(334): NCBI GI NO: 12804579 NR Description: Similar to hypothetical protein FLJ13052
  misc_feature (329)..(482): NCBI GI NO: 8480400 NR Description: Putative inorganic polyphosphate/ATP-NAD kinase
  misc_feature (329)..(482): NCBI GI NO: 12804579 NR Description: Similar to hypothetical protein FLJ13052
  misc_feature (329)..(482): NCBI GI NO: 10434887 NR Description: unnamed protein product [Homo sapiens]
MNITRLQGGVNVSSSDNPKPKSLGPESSNGSAHVDHPSREFQIAVSSNRKVVNGSTCSSVRTTVNEFSEREMPYMTNANASIIVKDDFDNVTTTSQRIEDHMVKDRLALNDDDLGSIEGDMCASSTGVVRVQSRKKAEMFLVRTDGFSCTREKVTESSLAFTHPSTQQQMLMWKSMPKNVLLLKKLGEELMEEAKMVASFLYHQEKMNVLVEPDVHDIFARIPGFGFVQTFYSQDTSDLHEKVDFVACLGGDGVILHASNLFRDAVPPIVSFNLGSLGFLTSHDFEDYKQDLRQVIHGNNTRDGVYITLRMRLRCEIFRKGKAMPGKVFDILNEVVVDRGSNPYLSKIECYEHDRLITKVQGDGVIVATPTGSTAYSTAAGGSMVHPNVPCILFTPICPHSLSFRPVILPDSAQLELKIPEDARSNAWVSFDGKRRQQLSRGDSVRISMSQHPLPTVNKFDQTGDWFSSLIRCLNWNERLDQKAL

SEQ ID NO: 6253 - protein, 414 aa, Glycine max
  peptide (1)..(414): Ceres Seq. ID no. 12581698
  misc_feature (39)..(414): NCBI GI NO: 18395013 NR Description: expressed protein; protein id: At1g21640
  misc_feature (39)..(414): NCBI GI NO: 25518500 NR Description: hypothetical protein F8K7.5 - Arabidopsis thaliana
  misc_feature (85)..(251): NCBI GI NO: 37589440 NR Description: Unknown (protein for MGC:68997) [Xenopus laevis]
  misc_feature (258)..(411): NCBI GI NO: 37589440 NR Description: Unknown (protein for MGC:68997) [Xenopus laevis]
  misc_feature (98)..(263): NCBI GI NO: 8480400 NR Description: Putative inorganic polyphosphate/ATP-NAD kinase
  misc_feature (98)..(263): NCBI GI NO: 10434887 NR Description: unnamed protein product [Homo sapiens]
  misc_feature (98)..(263): NCBI GI NO: 12804579 NR Description: Similar to hypothetical protein FLJ13052
  misc_feature (258)..(411): NCBI GI NO: 8480400 NR Description: Putative inorganic polyphosphate/ATP-NAD kinase
  misc_feature (258)..(411): NCBI GI NO: 10434887 NR Description: unnamed protein product [Homo sapiens]
  misc_feature (258)..(411): NCBI GI NO: 12804579 NR Description: Similar to hypothetical protein FLJ13052
MPYMTNANASIIVKDDFDNVTTTSQRIEDHMVKDRLALNDDDLGSIEGDMCASSTGVVRVQSRKKAEMFLVRTDGFSCTREKVTESSLAFTHPSTQQQMLMWKSMPKNVLLLKKLGEELMEEAKMVASFLYHQEKMNVLVEPDVHDIFARIPGFGFVQTFYSQDTSDLHEKVDFVACLGGDGVILHASNLFRDAVPPIVSFNLGSLGFLTSHDFEDYKQDLRQVIHGNNTRDGVYITLRMRLRCEIFRKGKAMPGKVFDILNEVVVDRGSNPYLSKIECYEHDRLITKVQGDGVIVATPTGSTAYSTAAGGSMVHPNVPCILFTPICPHSLSFRPVILPDSAQLELKIPEDARSNAWVSFDGKRRQQLSRGDSVRISMSQHPLPTVNKFDQTGDWFSSLIRCLNWNERLDQKAL

SEQ ID NO: 6254 - protein, 411 aa, Glycine max
  peptide (1)..(411): Ceres Seq. ID no. 12581699
  misc_feature (36)..(411): NCBI GI NO: 18395013 NR Description: expressed protein; protein id: At1g21640
  misc_feature (36)..(411): NCBI GI NO: 25518500 NR Description: hypothetical protein F8K7.5 - Arabidopsis thaliana
  misc_feature (82)..(248): NCBI GI NO: 37589440 NR Description: Unknown (protein for MGC:68997) [Xenopus laevis]
  misc_feature (255)..(408): NCBI GI NO: 37589440 NR Description: Unknown (protein for MGC:68997) [Xenopus laevis]
  misc_feature (95)..(260): NCBI GI NO: 8480400 NR Description: Putative inorganic polyphosphate/ATP-NAD kinase
  misc_feature (95)..(260): NCBI GI NO: 10434887 NR Description: unnamed protein product [Homo sapiens]
  misc_feature (95)..(260): NCBI GI NO: 12804579 NR Description: Similar to hypothetical protein FLJ13052
  misc_feature (255)..(408): NCBI GI NO: 8480400 NR Description: Putative inorganic polyphosphate/ATP-NAD kinase
  misc_feature (255)..(408): NCBI GI NO: 10434887 NR Description: unnamed protein product [Homo sapiens]
  misc_feature (255)..(408): NCBI GI NO: 12804579 NR Description: Similar to hypothetical protein FLJ13052
MTNANASIIVKDDFDNVTTTSQRIEDHMVKDRLALNDDDLGSIEGDMCASSTGVVRVQSRKKAEMFLVRTDGFSCTREKVTESSLAFTHPSTQQQMLMWKSMPKNVLLLKKLGEELMEEAKMVASFLYHQEKMNVLVEPDVHDIFARIPGFGFVQTFYSQDTSDLHEKVDFVACLGGDGVILHASNLFRDAVPPIVSFNLGSLGFLTSHDFEDYKQDLRQVIHGNNTRDGVYITLRMRLRCEIFRKGKAMPGKVFDILNEVVVDRGSNPYLSKIECYEHDRLITKVQGDGVIVATPTGSTAYSTAAGGSMVHPNVPCILFTPICPHSLSFRPVILPDSAQLELKIPEDARSNAWVSFDGKRRQQLSRGDSVRISMSQHPLPTVNKFDQTGDWFSSLIRCLNWNERLDQKAL

SEQ ID NO: 6255 - DNA, 1552 bp, Glycine max
  misc_feature (1)..(1552): Ceres Seq. ID no. 15172321
gtgagttaattgcatttgcagagagagagagagagagagggggaagacggttgtggggattcgatgggggccaccgttcactcgccgctagtcacttatgcttccgtcatatctctgcttacactctgtcctccgtttgtcatacttctatggtacaccatgactcttgctgacggatctgtttccgagacattccattatttaaggcagaatgggttgcagggtttgctacatatatggcccacccccactcccaccgcctgcaaaatcattgcagtctatgctgcatttgaggcagcacttcagcttcttcttcccgggaaaaccgtttacggccctatttctccaaccggccaccgacctgtctacaaggcaaatggtctgcaagcctattttgtcaccttgattacttattttgctctctggtggtttgggatattcaaccctacgattgtttatcatcatttgggagaaatttattcagctctcatcttcggcagctttctcttctgtgttttcttgtacatcaagggtcatttggcaccgtcttctacagattctggctcatctggaaacttaatcattgatttttactgggggatggaactttatccacgcattggaaaacattttgacataaaagtcttcacaaactgcagatttggaatgatgtcatgggctgttcttgcactgacctactgcataaagcagtatgaagaaaatggaaaagtagcggactcaatgcttgtaaatactgcattaatgctggtatatgttaccaagtttttctggtgggaagctggatattggagcacaatggatattgcacatgatcgagctggattttatatttgctggggttgcttggtgtgggttccatctgtttatacgtctcctggaatgtaccttgtcaaccatcctgtaaatcttggcatcaagctagcgctctcaattttagtagctggcattctttgcatatacatcaactatgattgtgacaggcaaaggcaagaatttcgtaggacaaatggaaaaggcacagtctggggaaaagctccttcaaagatagaggccacatatactactacttctggggaaactaaaagaagccttcttttaacctctggatggtggggattatctcgtcactttcattatgtccctgaaatactggcagctttcttctggacagtcccagctcttttcgaacattttttgccttacttctacgtgatatttcttaccatccttctctttgatcgagcaaaacgagatgatgatcgttgcagatccaagtatggcaagtactggaaactatattgcgacaaggtaccttacagaatcattccaggaatatactgaagaatgattatcgaaaacggcttatctggagtcccccaacttaaaattaaaaaccaaggacgccatctgtagctttatattgtttggtgcctccttaagacacgtggtagattagactttcgctgagagctaattattgaattattgaaccggattttttaagctaatgtcgagacttgatttcggctcc

SEQ ID NO: 6256 - protein, 432 aa, Glycine max
  peptide (1)..(432): Ceres Seq. ID no. 15172322
  misc_feature (4)..(432): Pfam Name: Pfam Description:  Ergosterol biosynthesis ERG4/ERG24 family
  misc_feature (4)..(432): NCBI GI NO: 39726086 NR Description: sterol delta-7 reductase [Tropaeolum majus]
  misc_feature (1)..(432): NCBI GI NO: 15222967 NR Description: sterol delta-7 reductase
  misc_feature (1)..(432): NCBI GI NO: 1245182 NR Description: sterol delta-7 reductase
  misc_feature (18)..(429): NCBI GI NO: 29654463 NR Description: ergosterol biosynthesis ERG4/ERG24 family protein
  misc_feature (51)..(432): NCBI GI NO: 38969866 NR Description: 7-dehydrocholesterol reductase
  misc_feature (13)..(432): NCBI GI NO: 27924199 NR Description: Similar to 7-dehydrocholesterol reductase
  misc_feature (1)..(432): NCBI GI NO: 6681179 NR Description: 7-dehydrocholesterol reductase [Mus musculus]
  misc_feature (51)..(432): NCBI GI NO: 11693158 NR Description: 7-dehydrocholesterol reductase [Rattus norvegicus]
  misc_feature (13)..(432): NCBI GI NO: 3171089 NR Description: 7-dehydrocholesterol reductase [Homo sapiens]
  misc_feature (13)..(432): NCBI GI NO: 4503321 NR Description: 7-dehydrocholesterol reductase
MGATVHSPLVTYASVISLLTLCPPFVILLWYTMTLADGSVSETFHYLRQNGLQGLLHIWPTPTPTACKIIAVYAAFEAALQLLLPGKTVYGPISPTGHRPVYKANGLQAYFVTLITYFALWWFGIFNPTIVYHHLGEIYSALIFGSFLFCVFLYIKGHLAPSSTDSGSSGNLIIDFYWGMELYPRIGKHFDIKVFTNCRFGMMSWAVLALTYCIKQYEENGKVADSMLVNTALMLVYVTKFFWWEAGYWSTMDIAHDRAGFYICWGCLVWVPSVYTSPGMYLVNHPVNLGIKLALSILVAGILCIYINYDCDRQRQEFRRTNGKGTVWGKAPSKIEATYTTTSGETKRSLLLTSGWWGLSRHFHYVPEILAAFFWTVPALFEHFLPYFYVIFLTILLFDRAKRDDDRCRSKYGKYWKLYCDKVPYRIIPGIY

SEQ ID NO: 6257 - protein, 400 aa, Glycine max
  peptide (1)..(400): Ceres Seq. ID no. 15172323
  misc_feature (1)..(400): Pfam Name: Pfam Description:  Ergosterol biosynthesis ERG4/ERG24 family
  misc_feature (1)..(400): NCBI GI NO: 39726086 NR Description: sterol delta-7 reductase [Tropaeolum majus]
  misc_feature (1)..(400): NCBI GI NO: 15222967 NR Description: sterol delta-7 reductase
  misc_feature (1)..(400): NCBI GI NO: 1245182 NR Description: sterol delta-7 reductase
  misc_feature (1)..(397): NCBI GI NO: 29654463 NR Description: ergosterol biosynthesis ERG4/ERG24 family protein
  misc_feature (19)..(400): NCBI GI NO: 38969866 NR Description: 7-dehydrocholesterol reductase
  misc_feature (1)..(400): NCBI GI NO: 27924199 NR Description: Similar to 7-dehydrocholesterol reductase
  misc_feature (1)..(400): NCBI GI NO: 6681179 NR Description: 7-dehydrocholesterol reductase [Mus musculus]
  misc_feature (19)..(400): NCBI GI NO: 11693158 NR Description: 7-dehydrocholesterol reductase [Rattus norvegicus]
  misc_feature (1)..(400): NCBI GI NO: 3171089 NR Description: 7-dehydrocholesterol reductase [Homo sapiens]
  misc_feature (1)..(400): NCBI GI NO: 4503321 NR Description: 7-dehydrocholesterol reductase
MTLADGSVSETFHYLRQNGLQGLLHIWPTPTPTACKIIAVYAAFEAALQLLLPGKTVYGPISPTGHRPVYKANGLQAYFVTLITYFALWWFGIFNPTIVYHHLGEIYSALIFGSFLFCVFLYIKGHLAPSSTDSGSSGNLIIDFYWGMELYPRIGKHFDIKVFTNCRFGMMSWAVLALTYCIKQYEENGKVADSMLVNTALMLVYVTKFFWWEAGYWSTMDIAHDRAGFYICWGCLVWVPSVYTSPGMYLVNHPVNLGIKLALSILVAGILCIYINYDCDRQRQEFRRTNGKGTVWGKAPSKIEATYTTTSGETKRSLLLTSGWWGLSRHFHYVPEILAAFFWTVPALFEHFLPYFYVIFLTILLFDRAKRDDDRCRSKYGKYWKLYCDKVPYRIIPGIY

SEQ ID NO: 6258 - protein, 253 aa, Glycine max
  peptide (1)..(253): Ceres Seq. ID no. 15172324
  misc_feature (1)..(253): Pfam Name: Pfam Description:  Ergosterol biosynthesis ERG4/ERG24 family
  misc_feature (1)..(253): NCBI GI NO: 39726086 NR Description: sterol delta-7 reductase [Tropaeolum majus]
  misc_feature (1)..(253): NCBI GI NO: 15222967 NR Description: sterol delta-7 reductase
  misc_feature (1)..(253): NCBI GI NO: 1245182 NR Description: sterol delta-7 reductase
  misc_feature (1)..(250): NCBI GI NO: 29654463 NR Description: ergosterol biosynthesis ERG4/ERG24 family protein
  misc_feature (1)..(253): NCBI GI NO: 38969866 NR Description: 7-dehydrocholesterol reductase
  misc_feature (1)..(253): NCBI GI NO: 27924199 NR Description: Similar to 7-dehydrocholesterol reductase
  misc_feature (1)..(253): NCBI GI NO: 6681179 NR Description: 7-dehydrocholesterol reductase [Mus musculus]
  misc_feature (1)..(253): NCBI GI NO: 11693158 NR Description: 7-dehydrocholesterol reductase [Rattus norvegicus]
  misc_feature (1)..(253): NCBI GI NO: 3171089 NR Description: 7-dehydrocholesterol reductase [Homo sapiens]
  misc_feature (1)..(253): NCBI GI NO: 20138066 NR Description: 7-dehydrocholesterol reductase
MELYPRIGKHFDIKVFTNCRFGMMSWAVLALTYCIKQYEENGKVADSMLVNTALMLVYVTKFFWWEAGYWSTMDIAHDRAGFYICWGCLVWVPSVYTSPGMYLVNHPVNLGIKLALSILVAGILCIYINYDCDRQRQEFRRTNGKGTVWGKAPSKIEATYTTTSGETKRSLLLTSGWWGLSRHFHYVPEILAAFFWTVPALFEHFLPYFYVIFLTILLFDRAKRDDDRCRSKYGKYWKLYCDKVPYRIIPGIY

SEQ ID NO: 6259 - DNA, 1212 bp, Glycine max
  misc_feature (1)..(1212): Ceres Seq. ID no. 12607856
agaactaaggctgaaggaccagccaattgcggaagtaagaaatctacgtgaaaatccacaaggggatgaatgtccaaatataatctctgaaaatattcttaagtgtttatcaaacattatcttgagaatgagtgctgcaaaaaatttggattctacagctgatgtaccaccctttaggactccaaaatctaaaaactgtgtagaaggaagtgagttttgggatccttatagtatctgtttggaatttggaaagagggatagtggtccattcaagcaattacgttcaattgaagctaaatcattcgatccaaaacgaactgcaaagtctttgtttttactgcatcggttgaagcttcttctgagaaaactagcttgtgtcaacatcgagaacctcaaccaccaggagaagcttgccttctggatcaacatctacaattcatgtatgatgaatgcgtacctagaaaagggtataccagagagtcctgaaatggttgttgcgctgatgcacaaggcaacgataaatgtgggtggacacttgctaagtgcaacaactatagaacattgcattttaagacttccttatcactggaaatttacattatcgaagggagggaaaaatcatgaaacttatggactggaattgtcagaacctctagtgacatttgctctatcctgtggaacttggtcctctcctgctgtgagaatttacagagcatctcaggttgagaacgaacttgaaatggcaaaaaaagaatatttgcagactgcagttggaatttcgatatcaaagttccttatcccgaagttgctggattggtatttactggactttgcaaaagacttggaatcattgctggattggatatgcctccaactaccaagtgatgtggggaaagaagccattaagttccttgagaaaagaaaaaccgagcccctctcacaatatgtacagattatgccatatgagttcaattttagatacttgctttgcacatagtttttcttctatttctgtaatgttttattgattatgtggataggatacgatttgtaaacagctttagatcatacatatagtaagcatgcaaatgccatttgttcttttctcacttttaatagattttttaaaatgccttattaactgaagtgaacatgggaagttggagtatagaattgggtcataaatataatccttccatgtttttgatgctc

SEQ ID NO: 6260 - protein, 331 aa, Glycine max
  peptide (1)..(331): Ceres Seq. ID no. 12607857
  misc_feature (117)..(253): Pfam Name: Pfam Description:  Protein of unknown function, DUF547
  misc_feature (3)..(328): NCBI GI NO: 15239037 NR Description: putative protein; protein id: At5g42690.1
  misc_feature (74)..(329): NCBI GI NO: 25407787 NR Description: hypothetical protein AT4g37080
  misc_feature (74)..(329): NCBI GI NO: 30690854 NR Description: expressed protein [Arabidopsis thaliana]
  misc_feature (25)..(329): NCBI GI NO: 15225527 NR Description: hypothetical protein; protein id: At2g39690.1
  misc_feature (13)..(329): NCBI GI NO: 9294368 NR Description: gb|AAB97123
  misc_feature (62)..(329): NCBI GI NO: 31193902 NR Description: unknown protein
  misc_feature (25)..(329): NCBI GI NO: 34895788 NR Description: P0434B04.9
  misc_feature (62)..(294): NCBI GI NO: 15983811 NR Description: AT5g60720/mup24_130 [Arabidopsis thaliana]
  misc_feature (62)..(294): NCBI GI NO: 30697420 NR Description: expressed protein [Arabidopsis thaliana]
  misc_feature (13)..(329): NCBI GI NO: 15230524 NR Description: hypothetical protein; protein id: At3g12540.1
ELRLKDQPIAEVRNLRENPQGDECPNIISENILKCLSNIILRMSAAKNLDSTADVPPFRTPKSKNCVEGSEFWDPYSICLEFGKRDSGPFKQLRSIEAKSFDPKRTAKSLFLLHRLKLLLRKLACVNIENLNHQEKLAFWINIYNSCMMNAYLEKGIPESPEMVVALMHKATINVGGHLLSATTIEHCILRLPYHWKFTLSKGGKNHETYGLELSEPLVTFALSCGTWSSPAVRIYRASQVENELEMAKKEYLQTAVGISISKFLIPKLLDWYLLDFAKDLESLLDWICLQLPSDVGKEAIKFLEKRKTEPLSQYVQIMPYEFNFRYLLCT

SEQ ID NO: 6261 - protein, 289 aa, Glycine max
  peptide (1)..(289): Ceres Seq. ID no. 12607858
  misc_feature (75)..(211): Pfam Name: Pfam Description:  Protein of unknown function, DUF547
  misc_feature (1)..(286): NCBI GI NO: 15239037 NR Description: putative protein; protein id: At5g42690.1
  misc_feature (32)..(287): NCBI GI NO: 25407787 NR Description: hypothetical protein AT4g37080
  misc_feature (32)..(287): NCBI GI NO: 30690854 NR Description: expressed protein [Arabidopsis thaliana]
  misc_feature (1)..(287): NCBI GI NO: 15225527 NR Description: hypothetical protein; protein id: At2g39690.1
  misc_feature (1)..(287): NCBI GI NO: 9294368 NR Description: gb|AAB97123
  misc_feature (20)..(287): NCBI GI NO: 31193902 NR Description: unknown protein
  misc_feature (1)..(287): NCBI GI NO: 34895788 NR Description: P0434B04.9
  misc_feature (20)..(252): NCBI GI NO: 15983811 NR Description: AT5g60720/mup24_130 [Arabidopsis thaliana]
  misc_feature (20)..(252): NCBI GI NO: 30697420 NR Description: expressed protein [Arabidopsis thaliana]
  misc_feature (1)..(287): NCBI GI NO: 15230524 NR Description: hypothetical protein; protein id: At3g12540.1
MSAAKNLDSTADVPPFRTPKSKNCVEGSEFWDPYSICLEFGKRDSGPFKQLRSIEAKSFDPKRTAKSLFLLHRLKLLLRKLACVNIENLNHQEKLAFWINIYNSCMMNAYLEKGIPESPEMVVALMHKATINVGGHLLSATTIEHCILRLPYHWKFTLSKGGKNHETYGLELSEPLVTFALSCGTWSSPAVRIYRASQVENELEMAKKEYLQTAVGISISKFLIPKLLDWYLLDFAKDLESLLDWICLQLPSDVGKEAIKFLEKRKTEPLSQYVQIMPYEFNFRYLLCT

SEQ ID NO: 6262 - protein, 184 aa, Glycine max
  peptide (1)..(184): Ceres Seq. ID no. 12607859
  misc_feature (1)..(106): Pfam Name: Pfam Description:  Protein of unknown function, DUF547
  misc_feature (1)..(181): NCBI GI NO: 15239037 NR Description: putative protein; protein id: At5g42690.1
  misc_feature (1)..(182): NCBI GI NO: 25407787 NR Description: hypothetical protein AT4g37080
  misc_feature (1)..(182): NCBI GI NO: 30690854 NR Description: expressed protein [Arabidopsis thaliana]
  misc_feature (1)..(182): NCBI GI NO: 15225527 NR Description: hypothetical protein; protein id: At2g39690.1
  misc_feature (1)..(182): NCBI GI NO: 9294368 NR Description: gb|AAB97123
  misc_feature (1)..(182): NCBI GI NO: 31193902 NR Description: unknown protein
  misc_feature (1)..(182): NCBI GI NO: 34895788 NR Description: P0434B04.9
  misc_feature (1)..(147): NCBI GI NO: 15983811 NR Description: AT5g60720/mup24_130 [Arabidopsis thaliana]
  misc_feature (1)..(147): NCBI GI NO: 30697420 NR Description: expressed protein [Arabidopsis thaliana]
  misc_feature (1)..(182): NCBI GI NO: 15230524 NR Description: hypothetical protein; protein id: At3g12540.1
MMNAYLEKGIPESPEMVVALMHKATINVGGHLLSATTIEHCILRLPYHWKFTLSKGGKNHETYGLELSEPLVTFALSCGTWSSPAVRIYRASQVENELEMAKKEYLQTAVGISISKFLIPKLLDWYLLDFAKDLESLLDWICLQLPSDVGKEAIKFLEKRKTEPLSQYVQIMPYEFNFRYLLCT

SEQ ID NO: 6263 - DNA, 1469 bp, Glycine max
  misc_feature (1)..(1469): Ceres Seq. ID no. 15169228
gactctcttcttacttcccctttctctctgtctctaaaaaccctttttttctctctctttcacacacaccaaccagactcgatcagtggtggcagatagagagagacatgatgtcaacttccggcgccggcaggtacatggcttttccgccgtctccgtccgcgcctccgtcgccgcacctctccggtcttcgctccactcccctctccgacccggacaaatatctagctgagttgttgggagaacgtaacaagcttagtcccttcatggctgtgcttcctcactgctttcgattgtttaaccaagaaattttgcgtgtaaccacgctgatggggaatgcatcagttttaggtcaaagtgggcttgaacacgctagccccctggctactggaggaatattttcaaatggaggtgccgatgtgaacggatgggcatcacgatttcaatcagaaagacccagcttgttacagtcctcatcaacacaaaactggctgagtccacaaggtagctcatctggtattattgttaaaaagacggtcagagtagatattcctgtggacgcatatcctaattttaactttgttggtcgcctcctaggccctagaggaaactctctaaagcgtgtagaagcaagtactgagtgtcgtgtcttgatcaggggccgaggtagcattaaggatccagctagggaggaaatgatgagaggaaaacctgggtatgagcatctgaatgaacctctccacattctagttgaggcagaattaccagttgaaatagtagatgctcgcctgatgcaggcacgtgaaatacttgaagatttgctcaaaccggtggatgaatctcaggatttctacaagaagcagcaacttcgggagctagcaatgctgaatggcactcttcgtgaggagggttctcccatgtctggttctgtttcacccttccacaacagccttggtatgaagagggccaagaccagggggtaaattatcctaaagggtgagagggattttggagcttgtgttaattttctacatcatcacttaccgtgccacaggtaatgctgtcaacgaatgccctgatctgcgatcggggcactggcatcatagtgccagttctaacttgttctatgtgcagtgtgtttatattgagtttgggggaggtttaaagatggtagcacgtagtaaaggtccaattgagtttggtgaatttgcttttatagtgttggttaaggtttggttagatattcaccaaatctgtctatactactattatatggggttatatttgctgataaaaaaaaatatggggttatatttaagcttgcaataacagttttgatatgtttttggtattttctgcgaggaaggtaatgttaatggtttgtacccagattgtgaggcagataaatatctacttcaatgcgtctatgggtgacattttgtagtatctaatttagattataaattcgc

SEQ ID NO: 6264 - protein, 326 aa, Glycine max
  peptide (1)..(326): Ceres Seq. ID no. 15169229
  misc_feature (180)..(235): Pfam Name: Pfam Description:  KH domain
  misc_feature (41)..(325): NCBI GI NO: 15241136 NR Description: KH domain protein [Arabidopsis thaliana]
  misc_feature (40)..(326): NCBI GI NO: 15236738 NR Description: KH domain protein [Arabidopsis thaliana]
  misc_feature (40)..(325): NCBI GI NO: 20268733 NR Description: unknown protein [Arabidopsis thaliana]
  misc_feature (65)..(325): NCBI GI NO: 19424087 NR Description: putative RNA-binding protein
  misc_feature (40)..(324): NCBI GI NO: 12322716 NR Description: unknown protein; 28504-31237
  misc_feature (40)..(324): NCBI GI NO: 30680583 NR Description: KH domain protein [Arabidopsis thaliana]
  misc_feature (51)..(324): NCBI GI NO: 40645104 NR Description: hypothetical protein [Nicotiana tabacum]
  misc_feature (51)..(323): NCBI GI NO: 34900448 NR Description: contains EST C27129
  misc_feature (51)..(324): NCBI GI NO: 15224909 NR Description: KH domain protein [Arabidopsis thaliana]
  misc_feature (37)..(324): NCBI GI NO: 22329449 NR Description: KH domain quaking protein, putative
LSSYFPFLSVSKNPFFLSLSHTPTRLDQWWQIERDMMSTSGAGRYMAFPPSPSAPPSPHLSGLRSTPLSDPDKYLAELLGERNKLSPFMAVLPHCFRLFNQEILRVTTLMGNASVLGQSGLEHASPLATGGIFSNGGADVNGWASRFQSERPSLLQSSSTQNWLSPQGSSSGIIVKKTVRVDIPVDAYPNFNFVGRLLGPRGNSLKRVEASTECRVLIRGRGSIKDPAREEMMRGKPGYEHLNEPLHILVEAELPVEIVDARLMQAREILEDLLKPVDESQDFYKKQQLRELAMLNGTLREEGSPMSGSVSPFHNSLGMKRAKTRG

SEQ ID NO: 6265 - protein, 291 aa, Glycine max
  peptide (1)..(291): Ceres Seq. ID no. 15169230
  misc_feature (145)..(200): Pfam Name: Pfam Description:  KH domain
  misc_feature (6)..(290): NCBI GI NO: 15241136 NR Description: KH domain protein [Arabidopsis thaliana]
  misc_feature (5)..(291): NCBI GI NO: 15236738 NR Description: KH domain protein [Arabidopsis thaliana]
  misc_feature (5)..(290): NCBI GI NO: 20268733 NR Description: unknown protein [Arabidopsis thaliana]
  misc_feature (30)..(290): NCBI GI NO: 19424087 NR Description: putative RNA-binding protein
  misc_feature (5)..(289): NCBI GI NO: 12322716 NR Description: unknown protein; 28504-31237
  misc_feature (5)..(289): NCBI GI NO: 30680583 NR Description: KH domain protein [Arabidopsis thaliana]
  misc_feature (16)..(289): NCBI GI NO: 40645104 NR Description: hypothetical protein [Nicotiana tabacum]
  misc_feature (16)..(288): NCBI GI NO: 34900448 NR Description: contains EST C27129
  misc_feature (16)..(289): NCBI GI NO: 15224909 NR Description: KH domain protein [Arabidopsis thaliana]
  misc_feature (2)..(289): NCBI GI NO: 22329449 NR Description: KH domain quaking protein, putative
MMSTSGAGRYMAFPPSPSAPPSPHLSGLRSTPLSDPDKYLAELLGERNKLSPFMAVLPHCFRLFNQEILRVTTLMGNASVLGQSGLEHASPLATGGIFSNGGADVNGWASRFQSERPSLLQSSSTQNWLSPQGSSSGIIVKKTVRVDIPVDAYPNFNFVGRLLGPRGNSLKRVEASTECRVLIRGRGSIKDPAREEMMRGKPGYEHLNEPLHILVEAELPVEIVDARLMQAREILEDLLKPVDESQDFYKKQQLRELAMLNGTLREEGSPMSGSVSPFHNSLGMKRAKTRG

SEQ ID NO: 6266 - protein, 290 aa, Glycine max
  peptide (1)..(290): Ceres Seq. ID no. 15169231
  misc_feature (144)..(199): Pfam Name: Pfam Description:  KH domain
  misc_feature (5)..(289): NCBI GI NO: 15241136 NR Description: KH domain protein [Arabidopsis thaliana]
  misc_feature (4)..(290): NCBI GI NO: 15236738 NR Description: KH domain protein [Arabidopsis thaliana]
  misc_feature (4)..(289): NCBI GI NO: 20268733 NR Description: unknown protein [Arabidopsis thaliana]
  misc_feature (29)..(289): NCBI GI NO: 19424087 NR Description: putative RNA-binding protein
  misc_feature (4)..(288): NCBI GI NO: 12322716 NR Description: unknown protein; 28504-31237
  misc_feature (4)..(288): NCBI GI NO: 30680583 NR Description: KH domain protein [Arabidopsis thaliana]
  misc_feature (15)..(288): NCBI GI NO: 40645104 NR Description: hypothetical protein [Nicotiana tabacum]
  misc_feature (15)..(287): NCBI GI NO: 34900448 NR Description: contains EST C27129
  misc_feature (15)..(288): NCBI GI NO: 15224909 NR Description: KH domain protein [Arabidopsis thaliana]
  misc_feature (1)..(288): NCBI GI NO: 22329449 NR Description: KH domain quaking protein, putative
MSTSGAGRYMAFPPSPSAPPSPHLSGLRSTPLSDPDKYLAELLGERNKLSPFMAVLPHCFRLFNQEILRVTTLMGNASVLGQSGLEHASPLATGGIFSNGGADVNGWASRFQSERPSLLQSSSTQNWLSPQGSSSGIIVKKTVRVDIPVDAYPNFNFVGRLLGPRGNSLKRVEASTECRVLIRGRGSIKDPAREEMMRGKPGYEHLNEPLHILVEAELPVEIVDARLMQAREILEDLLKPVDESQDFYKKQQLRELAMLNGTLREEGSPMSGSVSPFHNSLGMKRAKTRG

SEQ ID NO: 6267 - DNA, 1458 bp, Glycine max
  misc_feature (1)..(1458): Ceres Seq. ID no. 14309703
gcgattcggtaccatccatcatcgccgttttcaaattcttcaattttcaccatcaattccctttcgcctctctcaatcgatataatttttttgcagagtttgggatttcagggttttggacgatgaacgtgggcgacctaaacaaggtttgggaaatcagggctctgaagaggaaacccgcggctgaagaagccacgaagatgttggaaaagatcgccaaacaggtccaacccatcatgcgcaaacacaaatggaggatcaaacttctctctgaaatgtgcccaagcaatccacgtcttctggggttgaatgttggagctggtatacatgtgaagttgcggctacggagaccgaacagggatttggacttctacccgtttgatcaggttctggatacgatgcttcatgagctttgccataatgcccatggccctcataatgccaacttctacaagctctgggatgaacttagaaaggaatgtgaagagttgatggctaagggaataagtggtgctggggagggatttgatcttccaggaaggcgtttaggtggttattcccgtcaacctccactttcatccctccgtaaaactgcactggaagctgcagaaaaaagagtacaattgggatctcttcttccgtctgggccaaaacgtctaggtggtgatagtgttataatgagggcccttagtccagtacaagctgctgcaatggctgcagaacggagattacaggatgacgtatggtgtggttctcaatcttgtgaaaatttggatcatgaagatgttgactatgaagttgctgagaacatcgtgcataagggggaaaatgtgggaagctcaagacaaacagacaattctactctaccttcgaatctgttatctcgaaaaagaagtcaggataccaattcaagtttacctgctaagtcatcatctagtacttctgaatttgtagatttgactatggatacaccgaaaagtagacctgacaaggagcatcaaactggacctaaacgaagatgcggtggatcagaaagcttttcacattctcaatcaaattatcaggcaggatctagttcagcaaatttatcaagtgtatctgggcgacattctgaagaatctggaatgtgggagtgtacaatgtgcactctgttgaataaaagattggctcccatatgtgagttgtgtggcactcaacagccaaaagattttagtaccaaatgcaacacttggtcttgtaaattctgtacgttggaaaacaatgtgaagttggagaagtgctcagcctgtgatcagtggagatactctcatggcccatcagtgtcaatccgagcacccaaccttggtacatagaagagctgcgtagtttgcttaatggagcacttttgatccatttttggctttagtctttacaaaattgcattactttctccaccaatctatttatttttggtttctt

SEQ ID NO: 6268 - protein, 449 aa, Glycine max
  peptide (1)..(449): Ceres Seq. ID no. 14309704
  misc_feature (371)..(401): Pfam Name: Pfam Description:  Zn-finger in Ran binding protein and others
  misc_feature (21)..(449): NCBI GI NO: 18405600 NR Description: expressed protein [Arabidopsis thaliana]
  misc_feature (21)..(449): NCBI GI NO: 8778309 NR Description: F14J16.17 [Arabidopsis thaliana]
  misc_feature (41)..(310): NCBI GI NO: 14719278 NR Description: hypothetical protein 4 [Zea mays]
  misc_feature (56)..(251): NCBI GI NO: 40746554 NR Description: hypothetical protein AN0304.2
  misc_feature (49)..(293): NCBI GI NO: 6321926 NR Description: weak suppressor of smt3; Wss1p
  misc_feature (342)..(446): NCBI GI NO: 14719278 NR Description: hypothetical protein 4 [Zea mays]
  misc_feature (48)..(170): NCBI GI NO: 23507896 NR Description: hypothetical protein [Plasmodium falciparum 3D7]
  misc_feature (59)..(210): NCBI GI NO: 19075821 NR Description: putative Zn-protease [Schizosaccharomyces pombe]
  misc_feature (63)..(207): NCBI GI NO: 9957265 NR Description: ORF556 [Trypanosoma brucei]
  misc_feature (44)..(163): NCBI GI NO: 22327362 NR Description: expressed protein [Arabidopsis thaliana]
DSVPSIIAVFKFFNFHHQFPFASLNRYNFFAEFGISGFWTMNVGDLNKVWEIRALKRKPAAEEATKMLEKIAKQVQPIMRKHKWRIKLLSEMCPSNPRLLGLNVGAGIHVKLRLRRPNRDLDFYPFDQVLDTMLHELCHNAHGPHNANFYKLWDELRKECEELMAKGISGAGEGFDLPGRRLGGYSRQPPLSSLRKTALEAAEKRVQLGSLLPSGPKRLGGDSVIMRALSPVQAAAMAAERRLQDDVWCGSQSCENLDHEDVDYEVAENIVHKGENVGSSRQTDNSTLPSNLLSRKRSQDTNSSLPAKSSSSTSEFVDLTMDTPKSRPDKEHQTGPKRRCGGSESFSHSQSNYQAGSSSANLSSVSGRHSEESGMWECTMCTLLNKRLAPICELCGTQQPKDFSTKCNTWSCKFCTLENNVKLEKCSACDQWRYSHGPSVSIRAPNLGT

SEQ ID NO: 6269 - protein, 409 aa, Glycine max
  peptide (1)..(409): Ceres Seq. ID no. 14309705
  misc_feature (331)..(361): Pfam Name: Pfam Description:  Zn-finger in Ran binding protein and others
  misc_feature (1)..(409): NCBI GI NO: 18405600 NR Description: expressed protein [Arabidopsis thaliana]
  misc_feature (1)..(409): NCBI GI NO: 8778309 NR Description: F14J16.17 [Arabidopsis thaliana]
  misc_feature (1)..(270): NCBI GI NO: 14719278 NR Description: hypothetical protein 4 [Zea mays]
  misc_feature (16)..(211): NCBI GI NO: 40746554 NR Description: hypothetical protein AN0304.2
  misc_feature (9)..(253): NCBI GI NO: 6321926 NR Description: weak suppressor of smt3; Wss1p
  misc_feature (302)..(406): NCBI GI NO: 14719278 NR Description: hypothetical protein 4 [Zea mays]
  misc_feature (8)..(130): NCBI GI NO: 23507896 NR Description: hypothetical protein [Plasmodium falciparum 3D7]
  misc_feature (19)..(170): NCBI GI NO: 19075821 NR Description: putative Zn-protease [Schizosaccharomyces pombe]
  misc_feature (23)..(167): NCBI GI NO: 9957265 NR Description: ORF556 [Trypanosoma brucei]
  misc_feature (4)..(123): NCBI GI NO: 22327362 NR Description: expressed protein [Arabidopsis thaliana]
MNVGDLNKVWEIRALKRKPAAEEATKMLEKIAKQVQPIMRKHKWRIKLLSEMCPSNPRLLGLNVGAGIHVKLRLRRPNRDLDFYPFDQVLDTMLHELCHNAHGPHNANFYKLWDELRKECEELMAKGISGAGEGFDLPGRRLGGYSRQPPLSSLRKTALEAAEKRVQLGSLLPSGPKRLGGDSVIMRALSPVQAAAMAAERRLQDDVWCGSQSCENLDHEDVDYEVAENIVHKGENVGSSRQTDNSTLPSNLLSRKRSQDTNSSLPAKSSSSTSEFVDLTMDTPKSRPDKEHQTGPKRRCGGSESFSHSQSNYQAGSSSANLSSVSGRHSEESGMWECTMCTLLNKRLAPICELCGTQQPKDFSTKCNTWSCKFCTLENNVKLEKCSACDQWRYSHGPSVSIRAPNLGT

SEQ ID NO: 6270 - protein, 383 aa, Glycine max
  peptide (1)..(383): Ceres Seq. ID no. 14309706
  misc_feature (305)..(335): Pfam Name: Pfam Description:  Zn-finger in Ran binding protein and others
  misc_feature (1)..(383): NCBI GI NO: 18405600 NR Description: expressed protein [Arabidopsis thaliana]
  misc_feature (1)..(383): NCBI GI NO: 8778309 NR Description: F14J16.17 [Arabidopsis thaliana]
  misc_feature (1)..(244): NCBI GI NO: 14719278 NR Description: hypothetical protein 4 [Zea mays]
  misc_feature (1)..(185): NCBI GI NO: 40746554 NR Description: hypothetical protein AN0304.2
  misc_feature (1)..(227): NCBI GI NO: 6321926 NR Description: weak suppressor of smt3; Wss1p
  misc_feature (276)..(380): NCBI GI NO: 14719278 NR Description: hypothetical protein 4 [Zea mays]
  misc_feature (1)..(104): NCBI GI NO: 23507896 NR Description: hypothetical protein [Plasmodium falciparum 3D7]
  misc_feature (1)..(144): NCBI GI NO: 19075821 NR Description: putative Zn-protease [Schizosaccharomyces pombe]
  misc_feature (1)..(141): NCBI GI NO: 9957265 NR Description: ORF556 [Trypanosoma brucei]
  misc_feature (1)..(97): NCBI GI NO: 22327362 NR Description: expressed protein [Arabidopsis thaliana]
MLEKIAKQVQPIMRKHKWRIKLLSEMCPSNPRLLGLNVGAGIHVKLRLRRPNRDLDFYPFDQVLDTMLHELCHNAHGPHNANFYKLWDELRKECEELMAKGISGAGEGFDLPGRRLGGYSRQPPLSSLRKTALEAAEKRVQLGSLLPSGPKRLGGDSVIMRALSPVQAAAMAAERRLQDDVWCGSQSCENLDHEDVDYEVAENIVHKGENVGSSRQTDNSTLPSNLLSRKRSQDTNSSLPAKSSSSTSEFVDLTMDTPKSRPDKEHQTGPKRRCGGSESFSHSQSNYQAGSSSANLSSVSGRHSEESGMWECTMCTLLNKRLAPICELCGTQQPKDFSTKCNTWSCKFCTLENNVKLEKCSACDQWRYSHGPSVSIRAPNLGT

SEQ ID NO: 6271 - DNA, 1246 bp, Glycine max
  misc_feature (1)..(1246): Ceres Seq. ID no. 14313583
acaagcatctctgttcagagcctcattaagtttttctctctttcacttatttattgactctccataagcccttcaaacctctctctattcctctctactagtcaccttctcccttccattcactccacttcttaacacccccaaacagaacaacggcagagcaagcagccagaaaaatggtgttgctgtccaaagcaacaacagaacaatactcctacatcaagaactacatgccaactgcattctcctcaacaattcccatagtggacctctccaaacccgatgcaaagaccctcatagtgaaggcttgtgaggagtttggattcttcaaagtcatcaaccatggtgttcccattgaagctatatcccaattggaatccgaagccttcaagttcttctctatgccactcaatgagaaggaaaaagcagggcctcccaaaccatttgggtgtctattaaacagttacatgtcttctgtgagaaaaatggcatgcgagattcttgagttgatggcagaaggattgaagattcagcaaaagaatgtgtttagcaagcttctgatggataaacagagtgactctgttttcagggtgaatcactaccctgcttgtcctgaacttgccgtgaatggtcagaacttgattgggttcggagaacatacagacccacaaatcatttctttacttaggtccaacaacacttcaggccttcagatttttcttagagatggaaactggatttcagtcccacctgatcacaaatctttcttcataaatgttggtgattctcttcaggttatgaccaatggaagatttcggagtgtgagacatagagttttggcaaatggatttaagtctaggctctcaatgatttactttggaggtccacctttgagtgaaaaaatagcgccattaccttctctcatgaaaggaaaagaaagcttatataaagaatttacgtggtttgagtacaagaattcaacctatggttcaagattggctgataataggcttggacattttgagagaattgttgcttgataatatgtagagaattatgggggcacttgtcaatacaaaatgggggttacaatagtctatatactataaatgttttttctttttcttttttctactttaaggttatttatcaattagaatgcctcacagatataggacaacgcatacaccccttttgcttcaacactagtgaatgcatctgatgtagttaacaatggagatttgat

SEQ ID NO: 6272 - protein, 287 aa, Glycine max
  peptide (1)..(287): Ceres Seq. ID no. 14313584
  misc_feature (133)..(237): Pfam Name: II Pfam Description: 2OG-Fe
  misc_feature (90)..(287): NCBI GI NO: 6446413 NR Description: gibberellin 2-beta-hydroxylase [Pisum sativum]
  misc_feature (90)..(287): NCBI GI NO: 6478202 NR Description: gibberellin 2 beta-hydroxylase [Pisum sativum]
  misc_feature (1)..(91): NCBI GI NO: 6446413 NR Description: gibberellin 2-beta-hydroxylase [Pisum sativum]
  misc_feature (1)..(91): NCBI GI NO: 6478202 NR Description: gibberellin 2 beta-hydroxylase [Pisum sativum]
  misc_feature (90)..(287): NCBI GI NO: 5579094 NR Description: gibberellin 2-oxidase [Pisum sativum]
  misc_feature (6)..(91): NCBI GI NO: 5579094 NR Description: gibberellin 2-oxidase [Pisum sativum]
  misc_feature (87)..(287): NCBI GI NO: 1666096 NR Description: dioxygenase [Marah macrocarpus]
  misc_feature (1)..(91): NCBI GI NO: 1666096 NR Description: dioxygenase [Marah macrocarpus]
  misc_feature (87)..(287): NCBI GI NO: 27123665 NR Description: gibberellin 2-oxidase [Cucurbita maxima]
  misc_feature (87)..(287): NCBI GI NO: 32127337 NR Description: Gibberellin 2-oxidase [Cucurbita maxima]
MVLLSKATTEQYSYIKNYMPTAFSSTIPIVDLSKPDAKTLIVKACEEFGFFKVINHGVPIEAISQLESEAFKFFSMPLNEKEKAGPPKPFGCLLNSYMSSVRKMACEILELMAEGLKIQQKNVFSKLLMDKQSDSVFRVNHYPACPELAVNGQNLIGFGEHTDPQIISLLRSNNTSGLQIFLRDGNWISVPPDHKSFFINVGDSLQVMTNGRFRSVRHRVLANGFKSRLSMIYFGGPPLSEKIAPLPSLMKGKESLYKEFTWFEYKNSTYGSRLADNRLGHFERIVA

SEQ ID NO: 6273 - protein, 269 aa, Glycine max
  peptide (1)..(269): Ceres Seq. ID no. 14313585
  misc_feature (115)..(219): Pfam Name: II Pfam Description: 2OG-Fe
  misc_feature (72)..(269): NCBI GI NO: 6446413 NR Description: gibberellin 2-beta-hydroxylase [Pisum sativum]
  misc_feature (72)..(269): NCBI GI NO: 6478202 NR Description: gibberellin 2 beta-hydroxylase [Pisum sativum]
  misc_feature (1)..(73): NCBI GI NO: 6446413 NR Description: gibberellin 2-beta-hydroxylase [Pisum sativum]
  misc_feature (1)..(73): NCBI GI NO: 6478202 NR Description: gibberellin 2 beta-hydroxylase [Pisum sativum]
  misc_feature (72)..(269): NCBI GI NO: 5579094 NR Description: gibberellin 2-oxidase [Pisum sativum]
  misc_feature (1)..(73): NCBI GI NO: 5579094 NR Description: gibberellin 2-oxidase [Pisum sativum]
  misc_feature (69)..(269): NCBI GI NO: 1666096 NR Description: dioxygenase [Marah macrocarpus]
  misc_feature (1)..(73): NCBI GI NO: 1666096 NR Description: dioxygenase [Marah macrocarpus]
  misc_feature (69)..(269): NCBI GI NO: 27123665 NR Description: gibberellin 2-oxidase [Cucurbita maxima]
  misc_feature (69)..(269): NCBI GI NO: 32127337 NR Description: Gibberellin 2-oxidase [Cucurbita maxima]
MPTAFSSTIPIVDLSKPDAKTLIVKACEEFGFFKVINHGVPIEAISQLESEAFKFFSMPLNEKEKAGPPKPFGCLLNSYMSSVRKMACEILELMAEGLKIQQKNVFSKLLMDKQSDSVFRVNHYPACPELAVNGQNLIGFGEHTDPQIISLLRSNNTSGLQIFLRDGNWISVPPDHKSFFINVGDSLQVMTNGRFRSVRHRVLANGFKSRLSMIYFGGPPLSEKIAPLPSLMKGKESLYKEFTWFEYKNSTYGSRLADNRLGHFERIVA

SEQ ID NO: 6274 - protein, 212 aa, Glycine max
  peptide (1)..(212): Ceres Seq. ID no. 14313586
  misc_feature (58)..(162): Pfam Name: II Pfam Description: 2OG-Fe
  misc_feature (15)..(212): NCBI GI NO: 6446413 NR Description: gibberellin 2-beta-hydroxylase [Pisum sativum]
  misc_feature (15)..(212): NCBI GI NO: 6478202 NR Description: gibberellin 2 beta-hydroxylase [Pisum sativum]
  misc_feature (1)..(16): NCBI GI NO: 6446413 NR Description: gibberellin 2-beta-hydroxylase [Pisum sativum]
  misc_feature (1)..(16): NCBI GI NO: 6478202 NR Description: gibberellin 2 beta-hydroxylase [Pisum sativum]
  misc_feature (15)..(212): NCBI GI NO: 5579094 NR Description: gibberellin 2-oxidase [Pisum sativum]
  misc_feature (1)..(16): NCBI GI NO: 5579094 NR Description: gibberellin 2-oxidase [Pisum sativum]
  misc_feature (12)..(212): NCBI GI NO: 1666096 NR Description: dioxygenase [Marah macrocarpus]
  misc_feature (1)..(16): NCBI GI NO: 1666096 NR Description: dioxygenase [Marah macrocarpus]
  misc_feature (12)..(212): NCBI GI NO: 27123665 NR Description: gibberellin 2-oxidase [Cucurbita maxima]
  misc_feature (12)..(212): NCBI GI NO: 32127337 NR Description: Gibberellin 2-oxidase [Cucurbita maxima]
MPLNEKEKAGPPKPFGCLLNSYMSSVRKMACEILELMAEGLKIQQKNVFSKLLMDKQSDSVFRVNHYPACPELAVNGQNLIGFGEHTDPQIISLLRSNNTSGLQIFLRDGNWISVPPDHKSFFINVGDSLQVMTNGRFRSVRHRVLANGFKSRLSMIYFGGPPLSEKIAPLPSLMKGKESLYKEFTWFEYKNSTYGSRLADNRLGHFERIVA

SEQ ID NO: 6275 - DNA, 1456 bp, Glycine max
  misc_feature (1)..(1456): Ceres Seq. ID no. 14310495
agggtgtagtaccgttagaagcgagtccttctacggtccttgcctctgttcagtttcattcactcctcactgtaaaacctagcaagccaaaatcacaaccattccaagtgcatgtgaaatcgcaggtttaaggtttccgtttctccatgcaatgtatcgtgtgtgttccatttgtcgctttgactttcgttctcatttcctttgaccgttaatctcggcttttcttgcggaaagtaactgttggctgatcataaatggcgcccaatccaagagtggtggcggcctttacggcaatggcgaatctcgggattcatgaatcaaaagtgaaaccagtgttgaagaaactgcttaaattgtatgataagaactgggcactcattgaagaagagagttatagggccctggctgatgcaatatttgaggaggaagagaataaggtgaatgagccagaccagaataataaaaacaagaacggagttgtggacgatgaagaagctcatacgcatggggagcctgtgcgacctttgaagaggttgcgtttgagaggccaagagggtcaatctttgcgccctctgactagcagtggccccagctcagctgcatttccgttgaaagcgcctaaattagaagatggggcagtgcccgagagtagttccagacggcagcctcaaagcatggctgcattatctgatggaaatgcaaggattggtgctcgtcatgttcccccacaagatgctgttgtcgacaagggaaagaaacctatatcacctcaacttactcccagagcgagaaggtcccttgcagagccaacagttgaagcaggagctgctctgttggcaaataacaaaatgcctcatccatttattttgatcaagcccaaggatgagcctgttgatggtataccagattatgagattccccttgcagtgattcctcctgaaccatcaagtggaggagactctctaatgggtgcagctggaaagaaagattgccatgacactgtggtatcacagtgcagagatgaaaacgttgaacatgaatatgtttttccttcctcaaattaagaagcaacttctaatgtagatgtagctttgtcgtctatgggtgaggaacaatctgtaaagataacacaaactgatgatgtttcaaaggaatctgagaccaatgactcacctattgtcagaggaaacaaagattcggtcattgcaaatggatcaatcagtgttgagtcttctgccatggctgaacttcaagttcctagttctataccctgctcgagtgatctggataatgctgtaccagctcccaagaaggttggaatgaatggtttcttacaaagtgatagtggaaaggagctggagcatcctataatcccaaattcacgtactttagtggttgttccaaaacatcagcttactaatgatgatgtaagggcagttcatgatgttaatgacct

SEQ ID NO: 6276 - protein, 269 aa, Glycine max
  peptide (1)..(269): Ceres Seq. ID no. 14310496
  misc_feature (1)..(134): NCBI GI NO: 15290521 NR Description: SET domain protein SUVR2 [Arabidopsis thaliana]
  misc_feature (1)..(134): NCBI GI NO: 9758558 NR Description: gb|AAD10665
  misc_feature (1)..(134): NCBI GI NO: 18422394 NR Description: SET-domain transcriptional regulator family
  misc_feature (1)..(83): NCBI GI NO: 7485871 NR Description: hypothetical protein F20D22
  misc_feature (1)..(269): NCBI GI NO: 25406765 NR Description: hypothetical protein
MAPNPRVVAAFTAMANLGIHESKVKPVLKKLLKLYDKNWALIEEESYRALADAIFEEEENKVNEPDQNNKNKNGVVDDEEAHTHGEPVRPLKRLRLRGQEGQSLRPLTSSGPSSAAFPLKAPKLEDGAVPESSSRRQPQSMAALSDGNARIGARHVPPQDAVVDKGKKPISPQLTPRARRSLAEPTVEAGAALLANNKMPHPFILIKPKDEPVDGIPDYEIPLAVIPPEPSSGGDSLMGAAGKKDCHDTVVSQCRDENVEHEYVFPSSN

SEQ ID NO: 6277 - protein, 256 aa, Glycine max
  peptide (1)..(256): Ceres Seq. ID no. 14310497
  misc_feature (1)..(121): NCBI GI NO: 15290521 NR Description: SET domain protein SUVR2 [Arabidopsis thaliana]
  misc_feature (1)..(121): NCBI GI NO: 9758558 NR Description: gb|AAD10665
  misc_feature (1)..(121): NCBI GI NO: 18422394 NR Description: SET-domain transcriptional regulator family
  misc_feature (1)..(70): NCBI GI NO: 7485871 NR Description: hypothetical protein F20D22
  misc_feature (1)..(256): NCBI GI NO: 25406765 NR Description: hypothetical protein
MANLGIHESKVKPVLKKLLKLYDKNWALIEEESYRALADAIFEEEENKVNEPDQNNKNKNGVVDDEEAHTHGEPVRPLKRLRLRGQEGQSLRPLTSSGPSSAAFPLKAPKLEDGAVPESSSRRQPQSMAALSDGNARIGARHVPPQDAVVDKGKKPISPQLTPRARRSLAEPTVEAGAALLANNKMPHPFILIKPKDEPVDGIPDYEIPLAVIPPEPSSGGDSLMGAAGKKDCHDTVVSQCRDENVEHEYVFPSSN

SEQ ID NO: 6278 - DNA, 1819 bp, Glycine max
  misc_feature (1)..(1819): Ceres Seq. ID no. 15176361
gatatcctctctctctctctctctctctgaacaagacccagccagccgttagggaaatcaagcacagctcaatcattgaatcttagcataaacacatacagaagaaggaaaagtggcaccctgggaggagctgatattgaaggagggtttggaagaaaaagaattttgttttgagatatatatacatatatgtgcaagtgcataggaaattaacacaaaaagatgacatggtgcaatgactctgatgaggatagggttattgaatcaacgacgccaacaataactattactcctaacactgatggcataaagctcaccgaagaaattagaaccataacatgcccctcgtgcggccataacattgaattcaaagatcagggtggaatccatgacttgccggggttaccagctggagtgaagtttgacccaaatgaccaagaaatattagaacatttggaggcaaaagtggcgtctgatgcatgcaagcttcatccccttattgacgagttcataccaacgcttgaaggcgaaaatgggatctgttatacacacccagaaaagctaccaggtgttagcaaagatggacagatccgccacttctttcacaggccctcaaaagcatacacaactggaacgaggaaaagaagaaaagttcacactgatgatgaaggaagtgaaacaagatggcacaaaacgggaaaaactagagcagtttttgcagcagccggtggtgcagtaaaaggttttaagaaaatactagtactctacaccaactatggaagacaaaagaagcctgagaaaactaattgggtgatgcatcaataccatcttggcagtactgaagaagagaaagatggagaattagttgtttcaaaggtcttctatcagacacaacctagacaatgtggcaatcccattataataaaggattcatacgaaaaaatgttgaatgatggaagtggccaagacaacattaatatatcattaatacctaaaactactgcaactcttttggattgctacactgctccttacatagattatgatcacgtccatgtgagtcataacagggaaagttcctcacaactaattattcccagctcggttgttcaagttgatggctcttatattcgcttaacaatggatgcaaagaaagcaagatttgaaagtaacactgggaagagattctaggcagagcagcaatgacaaagacttgcatataaatgttctccatattgtttcctttactaattgatcagtacgtaacattatttatatgtgggattagaatgaaggaatttcaagggttggaaaaataagttggcttccttattaagatcaatatggtgcaggcatggtggacttaatttcccataattgaccctggttgaagttgagagacaagcaagttaggtatatatatttgcggtactgtagtttgattttaattttagggtacatgtatattcgtaaaatgtgcttatagatattacaatagtagcagggatatcgtttattgactactcttcagaactatagtcagtctatatactgtattttgtctagaattgaattttgcaccccctcaatcctgaaaaaaatgctgagatgtttcattattattatattatgcgtgtcagctacttaatttgctgggaagtttgtcccttgtagttttcccccctgttttctttgaaaggtcgattgtaaaataaggtgaagacagtagatttatcttatttatggttctaaattgcggttccttgtagtttttctccctctttccaattagtgatgcggattgcagctactatgactc

SEQ ID NO: 6279 - protein, 322 aa, Glycine max
  peptide (1)..(322): Ceres Seq. ID no. 15176362
  misc_feature (61)..(204): Pfam Name: NAM Pfam Description: No apical meristem
  misc_feature (1)..(232): NCBI GI NO: 15235314 NR Description: No apical meristem (NAM) protein family
  misc_feature (1)..(230): NCBI GI NO: 18396807 NR Description: No apical meristem (NAM) protein family
  misc_feature (1)..(230): NCBI GI NO: 21554371 NR Description: NAM protein, putative [Arabidopsis thaliana]
  misc_feature (1)..(229): NCBI GI NO: 34911014 NR Description: OJ1125_C04.12
  misc_feature (53)..(230): NCBI GI NO: 6560767 NR Description: F3M18.9 [Arabidopsis thaliana]
  misc_feature (40)..(228): NCBI GI NO: 15233497 NR Description: No apical meristem (NAM) protein family
  misc_feature (40)..(228): NCBI GI NO: 15241889 NR Description: No apical meristem (NAM) protein family
  misc_feature (64)..(228): NCBI GI NO: 34906416 NR Description: P0710E05.22
  misc_feature (40)..(227): NCBI GI NO: 12320749 NR Description: unknown protein [Arabidopsis thaliana]
  misc_feature (40)..(227): NCBI GI NO: 30689293 NR Description: No apical meristem (NAM) protein family
MTWCNDSDEDRVIESTTPTITITPNTDGIKLTEEIRTITCPSCGHNIEFKDQGGIHDLPGLPAGVKFDPNDQEILEHLEAKVASDACKLHPLIDEFIPTLEGENGICYTHPEKLPGVSKDGQIRHFFHRPSKAYTTGTRKRRKVHTDDEGSETRWHKTGKTRAVFAAAGGAVKGFKKILVLYTNYGRQKKPEKTNWVMHQYHLGSTEEEKDGELVVSKVFYQTQPRQCGNPIIIKDSYEKMLNDGSGQDNINISLIPKTTATLLDCYTAPYIDYDHVHVSHNRESSSQLIIPSSVVQVDGSYIRLTMDAKKARFESNTGKRF

SEQ ID NO: 6280 - DNA, 1164 bp, Glycine max
  misc_feature (1)..(1164): Ceres Seq. ID no. 12506279
gtagcttggagcggtgttacggtgacagagtgagagtgagagtgagaaatgggtctgctttctaacagagtggagagacatgagatcaagcctggtgatcacatctacacttacagagccgttttcacctattcccatcatggcatttttgttgggggaagcaaggttgtacatttcagacctgaaaggaacttaaagtcaatgactgagacatcatcaaactgggatgatccaacatcaaacccatgtccaacctttcctgattgtggattcagacagccaaactgtggtgtagtcctttcctgcttagactgtttccttcgaaatgggtctctttactgttttgagtatgaggtttcaccatctgttttcctcagcagaataaggggtggcacatgcactactgcatcagctgacccaccagagactgttattcatcgagcaatgtatcttcttcaaaacggctttggtaattataatgtttttcagaacaattgtgaggattttgccttgtactgcaaaactggtcttttgatacaagacaagcaaggggttggaagaagtggccaagcttcttctgttattggtgctccattggctgcaatgatcacttctcctctcaagttgttaatgccaagtcctgttggtgttgctactgtaacagcaggtatgtactgcatgagcagatatgcaactgacattggtgtcagaagtgatgtgatcaaggtgccagtggaagacttggctgtgaaccttggatggacttgtcaagaggaggagatagctgaacatgaaacttcagacagacagattactaccagatgatttagcattgctctttatccttgttatggacatgaaactgttgcatgtgtcactggagttatacactagttcatagcagatttgtcttcattcatgcttatatcttttgtaattggtgtctagttattcaagttgtgtatgagatggaaatgcaataatattattacctacagtagtaactacaatgtgatgtattcctctgagacaaattttcttctggttgcctataataatgcaacatctacctactacagtgtgatgtattcctctgtgatgtattcctctgattgaaccatcttgttgtgtatcatagaaaatcaagttgaattctattttgct

SEQ ID NO: 6281 - protein, 258 aa, Glycine max
  peptide (1)..(258): Ceres Seq. ID no. 12506280
  misc_feature (97)..(178): Pfam Name: Pfam Description:  NC domain
  misc_feature (1)..(252): NCBI GI NO: 18378812 NR Description: Expressed protein; protein id: At1g01225
  misc_feature (1)..(252): NCBI GI NO: 21592684 NR Description: unknown [Arabidopsis thaliana]
  misc_feature (1)..(237): NCBI GI NO: 22328196 NR Description: unknown protein; protein id: At4g00905.1
  misc_feature (1)..(236): NCBI GI NO: 18415178 NR Description: putative protein; protein id: At5g06370
  misc_feature (1)..(249): NCBI GI NO: 18396282 NR Description: expressed protein; protein id: At3g02700
  misc_feature (1)..(249): NCBI GI NO: 21594170 NR Description: unknown [Arabidopsis thaliana]
  misc_feature (1)..(194): NCBI GI NO: 15237330 NR Description: putative protein; protein id: At5g16360.1
  misc_feature (172)..(237): NCBI GI NO: 15237330 NR Description: putative protein; protein id: At5g16360.1
  misc_feature (32)..(236): NCBI GI NO: 9758417 NR Description: gb|AAF32477
  misc_feature (1)..(232): NCBI GI NO: 15237327 NR Description: putative protein; protein id: At5g16330.1
MGLLSNRVERHEIKPGDHIYTYRAVFTYSHHGIFVGGSKVVHFRPERNLKSMTETSSNWDDPTSNPCPTFPDCGFRQPNCGVVLSCLDCFLRNGSLYCFEYEVSPSVFLSRIRGGTCTTASADPPETVIHRAMYLLQNGFGNYNVFQNNCEDFALYCKTGLLIQDKQGVGRSGQASSVIGAPLAAMITSPLKLLMPSPVGVATVTAGMYCMSRYATDIGVRSDVIKVPVEDLAVNLGWTCQEEEIAEHETSDRQITTR

SEQ ID NO: 6282 - protein, 207 aa, Glycine max
  peptide (1)..(207): Ceres Seq. ID no. 12506281
  misc_feature (46)..(127): Pfam Name: Pfam Description:  NC domain
  misc_feature (1)..(201): NCBI GI NO: 18378812 NR Description: Expressed protein; protein id: At1g01225
  misc_feature (1)..(201): NCBI GI NO: 21592684 NR Description: unknown [Arabidopsis thaliana]
  misc_feature (1)..(186): NCBI GI NO: 22328196 NR Description: unknown protein; protein id: At4g00905.1
  misc_feature (1)..(185): NCBI GI NO: 18415178 NR Description: putative protein; protein id: At5g06370
  misc_feature (1)..(198): NCBI GI NO: 18396282 NR Description: expressed protein; protein id: At3g02700
  misc_feature (1)..(198): NCBI GI NO: 21594170 NR Description: unknown [Arabidopsis thaliana]
  misc_feature (1)..(143): NCBI GI NO: 15237330 NR Description: putative protein; protein id: At5g16360.1
  misc_feature (121)..(186): NCBI GI NO: 15237330 NR Description: putative protein; protein id: At5g16360.1
  misc_feature (1)..(185): NCBI GI NO: 9758417 NR Description: gb|AAF32477
  misc_feature (1)..(181): NCBI GI NO: 15237327 NR Description: putative protein; protein id: At5g16330.1
MTETSSNWDDPTSNPCPTFPDCGFRQPNCGVVLSCLDCFLRNGSLYCFEYEVSPSVFLSRIRGGTCTTASADPPETVIHRAMYLLQNGFGNYNVFQNNCEDFALYCKTGLLIQDKQGVGRSGQASSVIGAPLAAMITSPLKLLMPSPVGVATVTAGMYCMSRYATDIGVRSDVIKVPVEDLAVNLGWTCQEEEIAEHETSDRQITTR

SEQ ID NO: 6283 - DNA, 1925 bp, Glycine max
  misc_feature (1)..(1925): Ceres Seq. ID no. 15175771
ttcgttttcaacaggcagggcatttgggagtgtctttgtttcccttcttgccctgtatgatatgagtgcttgattcgttgtcttcaaatcctgcaaggccagaggaagcaatcaactcaaacgacaccatgtctggaactatgtctccaaaaggttctttcaagaagaaagcaatcaatgcctcaaacatgctgaggaattctttgaccaggaagggtaggcgaagcagtaaggtcatgtccgttgaaatcgaggatgtccacgatgctgaggagttgaaaattgttgacgagttccgtcaagctcttattttggacgaacttcttcctgcaaaacacgatgattatcatatgatgcttagattcctgaaggctaggaaatttgatatcgagaaaacaaagcaaatgtggtctgaaatgctcaaatggaggaaggaatttggtgctgacaccatcacggaggacttcgaattcaaagaacttgatgaagtcttgcaatattatccccaaggccatcatggagtggacaaagatggaagacctgtgtacatagagagattaggccaagtcgatgccacgaagatgatgcaagtcacaaccatggatcgctacatcaaataccacgtaaaggagtttgagaggacatttgatgttaagtttgcagcttgttcaattgctgcaaagaagcacatagatcaaagtacaactatcctggacgtgcagggagtggggcttaaaagcttcagcaaacatgctagggaacttgttactcgccttcagaagattgacggtgacaactatccagagaccttgaatcgcatgttcatcatcaatgcaggttctggatttaggatactgtggaacaccgtaaaatcattccttgatcctaagaccacggcaaaaatcaatgttcttggcaacaagtatgacaccaaattgctagaaataattgatgcaagtgagttgcctgaatttttaggaggcacttgtacatgtgctgatcaaggaggctgtatgcgctctgataagggcccatggaaggatgcagaagtaatgaggatggttcagaatggtgatcacaaatgttcaaaaaaaagtgcctcacaaggcgaggaagagaaagaaaattctgaggaacacaagacttccaaattggaggcaaatcacaccccccagctttctccagttgttgaagaagaggtccctgctactaaaacttcccagcccttatcaccgatggctgataaatctgctgtgaaaaaagttgatgagaaagcttccaagcctaaggacttagcccctacagctgataaaactgcagcatcaactgagttttcgactgtgatgaaacgcatggctgagttggaggagaaaatcgtcaccatcaataataagcccactgctatgccacctgagaaggagcaaatgctgaatgcaactataactcgagccgatgacttggagaaacaacttttggctaccaagaaggctctggaggattcacttgttaagcaagaagagctttcggcttatcttgacaaaaagaagaagaagaagaagaagagatttttcttcttttaaagagcaaatccgtggatgcccaaacaagaggtccagatattaacgggaaattagcttttagtttctgcctttcaggagacttcccaaatgccccccttacatcaatgttcaacatgcgaactagtaaatattcaaaacgatcagaagagaagcatttgctcaaaatatatgaattatgataatcagaattttggtctctattaggataggacttactctctatgtgtagtatatatatatagggctatggcgatctgcacattatgcaaagcctgctctattattatgtacgtacagaatcaatcaatatctagtacaaaattagagagtatgacaatatgtttg

SEQ ID NO: 6284 - protein, 483 aa, Glycine max
  peptide (1)..(483): Ceres Seq. ID no. 15175772
  misc_feature (126)..(312): Pfam Name: Pfam Description:  CRAL/TRIO domain
  misc_feature (10)..(480): NCBI GI NO: 14486707 NR Description: phosphatidylinositol transfer-like protein IV
  misc_feature (1)..(381): NCBI GI NO: 14517816 NR Description: phosphatidylinositol transfer-like protein II
  misc_feature (398)..(477): NCBI GI NO: 14517816 NR Description: phosphatidylinositol transfer-like protein II
  misc_feature (10)..(344): NCBI GI NO: 18399733 NR Description: phosphatidylinositol phophatidylcholine transfer protein -related
  misc_feature (373)..(483): NCBI GI NO: 18399733 NR Description: phosphatidylinositol phophatidylcholine transfer protein -related
  misc_feature (10)..(344): NCBI GI NO: 15236152 NR Description: hypothetical protein [Arabidopsis thaliana]
  misc_feature (381)..(477): NCBI GI NO: 15236152 NR Description: hypothetical protein [Arabidopsis thaliana]
  misc_feature (9)..(426): NCBI GI NO: 14486705 NR Description: phosphatidylinositol transfer-like protein III
  misc_feature (388)..(480): NCBI GI NO: 14486705 NR Description: phosphatidylinositol transfer-like protein III
  misc_feature (5)..(478): NCBI GI NO: 18419847 NR Description: hosphatidylinositol/phophatidylcholine transfer
MSGTMSPKGSFKKKAINASNMLRNSLTRKGRRSSKVMSVEIEDVHDAEELKIVDEFRQALILDELLPAKHDDYHMMLRFLKARKFDIEKTKQMWSEMLKWRKEFGADTITEDFEFKELDEVLQYYPQGHHGVDKDGRPVYIERLGQVDATKMMQVTTMDRYIKYHVKEFERTFDVKFAACSIAAKKHIDQSTTILDVQGVGLKSFSKHARELVTRLQKIDGDNYPETLNRMFIINAGSGFRILWNTVKSFLDPKTTAKINVLGNKYDTKLLEIIDASELPEFLGGTCTCADQGGCMRSDKGPWKDAEVMRMVQNGDHKCSKKSASQGEEEKENSEEHKTSKLEANHTPQLSPVVEEEVPATKTSQPLSPMADKSAVKKVDEKASKPKDLAPTADKTAASTEFSTVMKRMAELEEKIVTINNKPTAMPPEKEQMLNATITRADDLEKQLLATKKALEDSLVKQEELSAYLDKKKKKKKKRFFFF

SEQ ID NO: 6285 - protein, 479 aa, Glycine max
  peptide (1)..(479): Ceres Seq. ID no. 15175773
  misc_feature (122)..(308): Pfam Name: Pfam Description:  CRAL/TRIO domain
  misc_feature (6)..(476): NCBI GI NO: 14486707 NR Description: phosphatidylinositol transfer-like protein IV
  misc_feature (1)..(377): NCBI GI NO: 14517816 NR Description: phosphatidylinositol transfer-like protein II
  misc_feature (394)..(473): NCBI GI NO: 14517816 NR Description: phosphatidylinositol transfer-like protein II
  misc_feature (6)..(340): NCBI GI NO: 18399733 NR Description: phosphatidylinositol phophatidylcholine transfer protein -related
  misc_feature (369)..(479): NCBI GI NO: 18399733 NR Description: phosphatidylinositol phophatidylcholine transfer protein -related
  misc_feature (6)..(340): NCBI GI NO: 15236152 NR Description: hypothetical protein [Arabidopsis thaliana]
  misc_feature (377)..(473): NCBI GI NO: 15236152 NR Description: hypothetical protein [Arabidopsis thaliana]
  misc_feature (5)..(422): NCBI GI NO: 14486705 NR Description: phosphatidylinositol transfer-like protein III
  misc_feature (384)..(476): NCBI GI NO: 14486705 NR Description: phosphatidylinositol transfer-like protein III
  misc_feature (1)..(474): NCBI GI NO: 18419847 NR Description: hosphatidylinositol/phophatidylcholine transfer
MSPKGSFKKKAINASNMLRNSLTRKGRRSSKVMSVEIEDVHDAEELKIVDEFRQALILDELLPAKHDDYHMMLRFLKARKFDIEKTKQMWSEMLKWRKEFGADTITEDFEFKELDEVLQYYPQGHHGVDKDGRPVYIERLGQVDATKMMQVTTMDRYIKYHVKEFERTFDVKFAACSIAAKKHIDQSTTILDVQGVGLKSFSKHARELVTRLQKIDGDNYPETLNRMFIINAGSGFRILWNTVKSFLDPKTTAKINVLGNKYDTKLLEIIDASELPEFLGGTCTCADQGGCMRSDKGPWKDAEVMRMVQNGDHKCSKKSASQGEEEKENSEEHKTSKLEANHTPQLSPVVEEEVPATKTSQPLSPMADKSAVKKVDEKASKPKDLAPTADKTAASTEFSTVMKRMAELEEKIVTINNKPTAMPPEKEQMLNATITRADDLEKQLLATKKALEDSLVKQEELSAYLDKKKKKKKKRFFFF

SEQ ID NO: 6286 - protein, 463 aa, Glycine max
  peptide (1)..(463): Ceres Seq. ID no. 15175774
  misc_feature (106)..(292): Pfam Name: Pfam Description:  CRAL/TRIO domain
  misc_feature (1)..(460): NCBI GI NO: 14486707 NR Description: phosphatidylinositol transfer-like protein IV
  misc_feature (1)..(361): NCBI GI NO: 14517816 NR Description: phosphatidylinositol transfer-like protein II
  misc_feature (378)..(457): NCBI GI NO: 14517816 NR Description: phosphatidylinositol transfer-like protein II
  misc_feature (1)..(324): NCBI GI NO: 18399733 NR Description: phosphatidylinositol phophatidylcholine transfer protein -related
  misc_feature (353)..(463): NCBI GI NO: 18399733 NR Description: phosphatidylinositol phophatidylcholine transfer protein -related
  misc_feature (1)..(324): NCBI GI NO: 15236152 NR Description: hypothetical protein [Arabidopsis thaliana]
  misc_feature (361)..(457): NCBI GI NO: 15236152 NR Description: hypothetical protein [Arabidopsis thaliana]
  misc_feature (1)..(406): NCBI GI NO: 14486705 NR Description: phosphatidylinositol transfer-like protein III
  misc_feature (368)..(460): NCBI GI NO: 14486705 NR Description: phosphatidylinositol transfer-like protein III
  misc_feature (1)..(458): NCBI GI NO: 18419847 NR Description: hosphatidylinositol/phophatidylcholine transfer
MLRNSLTRKGRRSSKVMSVEIEDVHDAEELKIVDEFRQALILDELLPAKHDDYHMMLRFLKARKFDIEKTKQMWSEMLKWRKEFGADTITEDFEFKELDEVLQYYPQGHHGVDKDGRPVYIERLGQVDATKMMQVTTMDRYIKYHVKEFERTFDVKFAACSIAAKKHIDQSTTILDVQGVGLKSFSKHARELVTRLQKIDGDNYPETLNRMFIINAGSGFRILWNTVKSFLDPKTTAKINVLGNKYDTKLLEIIDASELPEFLGGTCTCADQGGCMRSDKGPWKDAEVMRMVQNGDHKCSKKSASQGEEEKENSEEHKTSKLEANHTPQLSPVVEEEVPATKTSQPLSPMADKSAVKKVDEKASKPKDLAPTADKTAASTEFSTVMKRMAELEEKIVTINNKPTAMPPEKEQMLNATITRADDLEKQLLATKKALEDSLVKQEELSAYLDKKKKKKKKRFFFF

SEQ ID NO: 6287 - DNA, 1139 bp, Glycine max
  misc_feature (1)..(1139): Ceres Seq. ID no. 15170037
aaataaaaataacaaagcgatccaaaaaaacacacaaacaacaatcaccatgggagaggaagtagacactgcttttgtccaagcaccagaacacaggccaaaatcctcagtgatcgtggcagaaggaatccctctgattgatctctctcccataaactaccaaaacgaagacaccctcttggattcttctatcgaaaacttagtcaaagaaataggcagtgcttgcaagaaatggggtttctttcaggtgatcaatcacaaggtgcctttggataaacgagagaggattgaagaggctgcaaaaaagttctttgcacttggtttagaggaaaagttgaaggtgagaagggatgcggttaacgtgttgggttactttgaagcagaacataccaagaacgttagggactggaaagagatctatgatttcaatgttcaggaacccacttttataccaccctcagatgaaccagatgatgaggaaaacgttcagttccaatgggataaccggtggcctcagaatcctcctgagttcaaagaagcatgccaagagtatgcacaagaagtggagaaacttgcttataagttgatggaacttgttgcactgagcttaggcttagtgccaaataggttccgcgggtatttcacacataacacgagcaatatccgtctgaatcattatccagcttgcccctaccctcatctggctcttggactcggacgccacaaggacactggtgtcttgactgtgcttgctcaagatgacactggtggtctagaagttaggagaaaatcagatggagagtggattcgagtcaagcccattttcaattccttcatcatcaatgtcggtgatatgatccaggtttggagcaatgatgcttatgagagtgtagaacacagggttatggtgaactctgagaaggataggttttcaattccattctttctgaaaccagcactctacactgatgtgaagcccttggaagagttgctagatgatagaaaccctcctatatatagaccagtcaactggggtaagttccgctctgcaagaatgcgaagtaattttgccaaatccaaagttgaaaacctccaaatttatgatttcaagtttcctagtaactgagtcagagtccata

SEQ ID NO: 6288 - protein, 374 aa, Glycine max
  peptide (1)..(374): Ceres Seq. ID no. 15170038
  misc_feature (218)..(318): Pfam Name: II Pfam Description: 2OG-Fe
  misc_feature (17)..(370): NCBI GI NO: 18402079 NR Description: oxidoreductase, 2OG-Fe(II) oxygenase family
  misc_feature (19)..(370): NCBI GI NO: 18402081 NR Description: flavonol synthase family [Arabidopsis thaliana]
  misc_feature (19)..(370): NCBI GI NO: 21593702 NR Description: unknown [Arabidopsis thaliana]
  misc_feature (19)..(288): NCBI GI NO: 30685157 NR Description: flavonol synthase family [Arabidopsis thaliana]
  misc_feature (18)..(178): NCBI GI NO: 40253917 NR Description: putative Isopenicillin N synthase and relateddioxygenases
  misc_feature (243)..(370): NCBI GI NO: 40253917 NR Description: putative Isopenicillin N synthase and relateddioxygenases
  misc_feature (62)..(273): NCBI GI NO: 18103924 NR Description: putative oxylase protein [Pinus pinaster]
  misc_feature (170)..(353): NCBI GI NO: 15418964 NR Description: gibberellin 3-beta-hydroxylase 1
  misc_feature (24)..(124): NCBI GI NO: 15418964 NR Description: gibberellin 3-beta-hydroxylase 1
  misc_feature (71)..(364): NCBI GI NO: 15224472 NR Description: oxidoreductase, 2OG-Fe(II) oxygenase family
NKNNKAIQKNTQTTITMGEEVDTAFVQAPEHRPKSSVIVAEGIPLIDLSPINYQNEDTLLDSSIENLVKEIGSACKKWGFFQVINHKVPLDKRERIEEAAKKFFALGLEEKLKVRRDAVNVLGYFEAEHTKNVRDWKEIYDFNVQEPTFIPPSDEPDDEENVQFQWDNRWPQNPPEFKEACQEYAQEVEKLAYKLMELVALSLGLVPNRFRGYFTHNTSNIRLNHYPACPYPHLALGLGRHKDTGVLTVLAQDDTGGLEVRRKSDGEWIRVKPIFNSFIINVGDMIQVWSNDAYESVEHRVMVNSEKDRFSIPFFLKPALYTDVKPLEELLDDRNPPIYRPVNWGKFRSARMRSNFAKSKVENLQIYDFKFPSN

SEQ ID NO: 6289 - protein, 358 aa, Glycine max
  peptide (1)..(358): Ceres Seq. ID no. 15170039
  misc_feature (202)..(302): Pfam Name: II Pfam Description: 2OG-Fe
  misc_feature (1)..(354): NCBI GI NO: 18402079 NR Description: oxidoreductase, 2OG-Fe(II) oxygenase family
  misc_feature (3)..(354): NCBI GI NO: 18402081 NR Description: flavonol synthase family [Arabidopsis thaliana]
  misc_feature (3)..(354): NCBI GI NO: 21593702 NR Description: unknown [Arabidopsis thaliana]
  misc_feature (3)..(272): NCBI GI NO: 30685157 NR Description: flavonol synthase family [Arabidopsis thaliana]
  misc_feature (2)..(162): NCBI GI NO: 40253917 NR Description: putative Isopenicillin N synthase and relateddioxygenases
  misc_feature (227)..(354): NCBI GI NO: 40253917 NR Description: putative Isopenicillin N synthase and relateddioxygenases
  misc_feature (46)..(257): NCBI GI NO: 18103924 NR Description: putative oxylase protein [Pinus pinaster]
  misc_feature (154)..(337): NCBI GI NO: 15418964 NR Description: gibberellin 3-beta-hydroxylase 1
  misc_feature (8)..(108): NCBI GI NO: 15418964 NR Description: gibberellin 3-beta-hydroxylase 1
  misc_feature (55)..(348): NCBI GI NO: 15224472 NR Description: oxidoreductase, 2OG-Fe(II) oxygenase family
MGEEVDTAFVQAPEHRPKSSVIVAEGIPLIDLSPINYQNEDTLLDSSIENLVKEIGSACKKWGFFQVINHKVPLDKRERIEEAAKKFFALGLEEKLKVRRDAVNVLGYFEAEHTKNVRDWKEIYDFNVQEPTFIPPSDEPDDEENVQFQWDNRWPQNPPEFKEACQEYAQEVEKLAYKLMELVALSLGLVPNRFRGYFTHNTSNIRLNHYPACPYPHLALGLGRHKDTGVLTVLAQDDTGGLEVRRKSDGEWIRVKPIFNSFIINVGDMIQVWSNDAYESVEHRVMVNSEKDRFSIPFFLKPALYTDVKPLEELLDDRNPPIYRPVNWGKFRSARMRSNFAKSKVENLQIYDFKFPSN

SEQ ID NO: 6290 - DNA, 1323 bp, Glycine max
  misc_feature (1)..(1323): Ceres Seq. ID no. 14308664
attatgtttattattttcttaaatcacaaacttatcttttgcttctctctcatcactccactaccccttcttcctctttatatctcttgtgtctataataacctaatccattctacgcgatcatatatcatatcccccgattcctttttcccaccctctcaccatgactcatccctactgctctaatgacttgaatgcttggtttgacctcaattctccatgccttttttccaattcttcatcaccttgctccaataacccaccattctactttcctactactaatattagttaccgtcataactgcacaaataatggcatctcttttactcagcatattcaatcttctcccagctcctttcctcctccaaaagaagcacttactcttaacctaagccccgcaagaggtgaagatcttgatcttgaatcttccttcagtgccatgaaagtcaacaaagagaaggagaaagaattactaagcatcatgtcttctaataataactctttggatgatgaaactgtgacggtggctttgcacttagggcttccaagcactactgctacttcatcagctgatttaacttcaaacatgtactcagaaaaagaagaaaaagccacttttgcttctgagtattctccgactagaattaacaagggtcagtattggatccctacccctgctcaaattctgatcggtccaacacggttctcatgccccctttgttgcaagacgttcaacagatacaacaacatgcagatgcatatgtgggggcatggatctcaatatagaaaggggccagagtctctaaggggaactcaaccaacagcaatgcttagactcccttgctattgctgtgcacaaggatgcaagaacaacattgaccatccaagagcaaagccactcaaagactttaggaccctccaaacccattacaagagaaagcatggaatcaagcctttcatgtgtagaaaatgttgcaaagcatttgctgtgaggggtgattggaggactcacgagaaaaactgtgggaagctatggtattgctcttgtgggtccgattttaagcacaagagatctctcaaagatcatatcaaggcatttgggaatggacatagagcttatggaatcgactcatgtcttgatcaagatgatgaaccgggctcagaaattgagcaggaaaataatgaatctttaatttccaatcatagttgacgtgtaatttcaactatgaagactagacaattgaggattctcatgttttgaactaattaaattgttgactatgactaccatctctaattaacgagttctccactcccccc

SEQ ID NO: 6291 - protein, 349 aa, Glycine max
  peptide (1)..(349): Ceres Seq. ID no. 14308665
  misc_feature (292)..(317): Pfam Name: Pfam Description:  Zinc finger, C2H2 type
  misc_feature (160)..(342): NCBI GI NO: 15230370 NR Description: zinc finger - like protein [Arabidopsis thaliana]
  misc_feature (160)..(342): NCBI GI NO: 28973719 NR Description: putative zinc finger protein
  misc_feature (1)..(156): NCBI GI NO: 15230370 NR Description: zinc finger - like protein [Arabidopsis thaliana]
  misc_feature (1)..(156): NCBI GI NO: 28973719 NR Description: putative zinc finger protein
  misc_feature (1)..(338): NCBI GI NO: 15223781 NR Description: expressed protein [Arabidopsis thaliana]
  misc_feature (167)..(339): NCBI GI NO: 9294415 NR Description: zinc finger-like protein [Arabidopsis thaliana]
  misc_feature (167)..(339): NCBI GI NO: 30685975 NR Description: DNA-binding protein -related
  misc_feature (97)..(342): NCBI GI NO: 15222242 NR Description: zinc finger protein -related
  misc_feature (116)..(320): NCBI GI NO: 18253283 NR Description: transparent testa 1 [Arabidopsis thaliana]
  misc_feature (116)..(320): NCBI GI NO: 30693123 NR Description: transparent testa 1 (TT1) protein
MTHPYCSNDLNAWFDLNSPCLFSNSSSPCSNNPPFYFPTTNISYRHNCTNNGISFTQHIQSSPSSFPPPKEALTLNLSPARGEDLDLESSFSAMKVNKEKEKELLSIMSSNNNSLDDETVTVALHLGLPSTTATSSADLTSNMYSEKEEKATFASEYSPTRINKGQYWIPTPAQILIGPTRFSCPLCCKTFNRYNNMQMHMWGHGSQYRKGPESLRGTQPTAMLRLPCYCCAQGCKNNIDHPRAKPLKDFRTLQTHYKRKHGIKPFMCRKCCKAFAVRGDWRTHEKNCGKLWYCSCGSDFKHKRSLKDHIKAFGNGHRAYGIDSCLDQDDEPGSEIEQENNESLISNHS

SEQ ID NO: 6292 - protein, 256 aa, Glycine max
  peptide (1)..(256): Ceres Seq. ID no. 14308666
  misc_feature (199)..(224): Pfam Name: Pfam Description:  Zinc finger, C2H2 type
  misc_feature (67)..(249): NCBI GI NO: 15230370 NR Description: zinc finger - like protein [Arabidopsis thaliana]
  misc_feature (67)..(249): NCBI GI NO: 28973719 NR Description: putative zinc finger protein
  misc_feature (1)..(63): NCBI GI NO: 15230370 NR Description: zinc finger - like protein [Arabidopsis thaliana]
  misc_feature (1)..(63): NCBI GI NO: 28973719 NR Description: putative zinc finger protein
  misc_feature (1)..(245): NCBI GI NO: 15223781 NR Description: expressed protein [Arabidopsis thaliana]
  misc_feature (74)..(246): NCBI GI NO: 9294415 NR Description: zinc finger-like protein [Arabidopsis thaliana]
  misc_feature (74)..(246): NCBI GI NO: 30685975 NR Description: DNA-binding protein -related
  misc_feature (4)..(249): NCBI GI NO: 15222242 NR Description: zinc finger protein -related
  misc_feature (23)..(227): NCBI GI NO: 18253283 NR Description: transparent testa 1 [Arabidopsis thaliana]
  misc_feature (23)..(227): NCBI GI NO: 30693123 NR Description: transparent testa 1 (TT1) protein
MKVNKEKEKELLSIMSSNNNSLDDETVTVALHLGLPSTTATSSADLTSNMYSEKEEKATFASEYSPTRINKGQYWIPTPAQILIGPTRFSCPLCCKTFNRYNNMQMHMWGHGSQYRKGPESLRGTQPTAMLRLPCYCCAQGCKNNIDHPRAKPLKDFRTLQTHYKRKHGIKPFMCRKCCKAFAVRGDWRTHEKNCGKLWYCSCGSDFKHKRSLKDHIKAFGNGHRAYGIDSCLDQDDEPGSEIEQENNESLISNHS

SEQ ID NO: 6293 - protein, 242 aa, Glycine max
  peptide (1)..(242): Ceres Seq. ID no. 14308667
  misc_feature (185)..(210): Pfam Name: Pfam Description:  Zinc finger, C2H2 type
  misc_feature (53)..(235): NCBI GI NO: 15230370 NR Description: zinc finger - like protein [Arabidopsis thaliana]
  misc_feature (53)..(235): NCBI GI NO: 28973719 NR Description: putative zinc finger protein
  misc_feature (1)..(49): NCBI GI NO: 15230370 NR Description: zinc finger - like protein [Arabidopsis thaliana]
  misc_feature (1)..(49): NCBI GI NO: 28973719 NR Description: putative zinc finger protein
  misc_feature (1)..(231): NCBI GI NO: 15223781 NR Description: expressed protein [Arabidopsis thaliana]
  misc_feature (60)..(232): NCBI GI NO: 9294415 NR Description: zinc finger-like protein [Arabidopsis thaliana]
  misc_feature (60)..(232): NCBI GI NO: 30685975 NR Description: DNA-binding protein -related
  misc_feature (1)..(235): NCBI GI NO: 15222242 NR Description: zinc finger protein -related
  misc_feature (9)..(213): NCBI GI NO: 18253283 NR Description: transparent testa 1 [Arabidopsis thaliana]
  misc_feature (9)..(213): NCBI GI NO: 30693123 NR Description: transparent testa 1 (TT1) protein
MSSNNNSLDDETVTVALHLGLPSTTATSSADLTSNMYSEKEEKATFASEYSPTRINKGQYWIPTPAQILIGPTRFSCPLCCKTFNRYNNMQMHMWGHGSQYRKGPESLRGTQPTAMLRLPCYCCAQGCKNNIDHPRAKPLKDFRTLQTHYKRKHGIKPFMCRKCCKAFAVRGDWRTHEKNCGKLWYCSCGSDFKHKRSLKDHIKAFGNGHRAYGIDSCLDQDDEPGSEIEQENNESLISNHS

SEQ ID NO: 6294 - DNA, 1802 bp, Glycine max
  misc_feature (1)..(1802): Ceres Seq. ID no. 15225119
gtcagctacgtaggccccccccccccaaaaaattagaaaatcaaaagcagtcattcgaccaggaacacgcacgcttgagcaaagaactgtcgaataatgccgatacaatcgctgaattgcgaaaagaaatcgctcgattgatgggcgaaaatgagaaactattgaaaaatcaagccgttgctattcaaccagagagtacaagtaacagagacgatgagatccagaaattagaaaaaattgtgaatgaattacgtgaggaaaaggcaaatatggaagccgaattacaggtgctaaacgatcaagtcattaaaaacttagaaattgaagaccgaatcaagagcaccgtttttgaacttgacacaaagaacattgaaatcgccgaattgaaaaatagtttacaacaaattaaagagaatcaaaatgtgccacctgcggctatagatccgaccacgcaacaacaaatcgctgaattaaccgcaaaattgctagagaaagacgcactgcaccagtctaacatcgatttattgaatgcccaatggcaacaagtggttgatcaaaaatgtgctgaagtagcagacagttggcgtcatcatttgcaattgaaagaggaagaattcgcagccgtggaaagcgatttacgtgagaaaatgctacaacttgagcaacaatcgaataccagttcaacaacacctgaaacacaaaatacacctacctctggtgattcacgatcaaatatccaagaatcacctgaactcaaatctgacattgcgaacgccgatcaaagtgaactcgttaaaacgatgcaaagtgcattggagcaacaggaactggaaatagtttcgcttaaagaacagttggccattcgcagtgctgaatatgcccgaattgctgcgtccgtcgacccgtatgccatgaaatccacatcgagtaacagtttccaatcggttagtcaaacagaagaaactccatcgaaaggaaatgaattggatttggcactttatatgctacatcaacgtgatatgcggtgcgaagaactaaccgaagaagtgatacacttgctggaggaacgtgatacactacagctgaaactatcgaattccattcgccagattgaggagttcaaacagcgaactggagctgatgccaccgatgcatctgaagcaggcagcagcagtccggttaaatcaaacccagcttcgagcgatgcacagtcctcacacgatggcagttttaatgaacagtcacaaaatttggatttgaaattatctgaattgcacaaagtcagtcattctcgtgataaaaccctaaaggaggagcgtgaccaacggcgtcgtcaaatgaatgtattccaaaaagatgtagcaaacatgccacctgaagcgattgccgaactgtttggacccgatttcaagccaaatacacgaaacacccaaaatgcatcgtcgatgctgatggattggctgtggggacgaagtgataatgaaccacacaactgatgttccatatttaaatcattcaacttctgccaggtgcacgactacagtttgatttgtttctcttttaatctgaaacgattcggttttgatgtgggtgatctgttctttattagaaacgactcgtttaacgacctcaaattaaagtagttgcacttcaaaatcaacatgaattattaaaagccaatatttgaacgtaaaaacacataagcaaaaaaaaatcattcaatttacctgagaagaaaaaaaattatatttgtttttagattttatgatttatcgttaaatgtaaaataataaaaaatattg

SEQ ID NO: 6295 - protein, 497 aa, Glycine max
  peptide (1)..(497): Ceres Seq. ID no. 15225120
  misc_feature (10)..(446): Pfam Name: Pfam Description:  Myosin tail
  misc_feature (11)..(494): NCBI GI NO: 21428694 NR Description: SD02391p [Drosophila melanogaster]
  misc_feature (10)..(494): NCBI GI NO: 17933552 NR Description: lava lamp CG6450-PC [Drosophila melanogaster]
  misc_feature (11)..(490): NCBI GI NO: 31204359 NR Description: ENSANGP00000017337 [Anopheles gambiae]
  misc_feature (12)..(376): NCBI GI NO: 15217624 NR Description: expressed protein [Arabidopsis thaliana]
  misc_feature (9)..(377): NCBI GI NO: 25408221 NR Description: probable myosin heavy chain
  misc_feature (10)..(464): NCBI GI NO: 28830050 NR Description: similar to Entamoeba histolytica
  misc_feature (62)..(459): NCBI GI NO: 7508662 NR Description: hypothetical protein T28C6
  misc_feature (62)..(459): NCBI GI NO: 32566158 NR Description: M protein repeat and RepA / Rep+ protein KID
  misc_feature (9)..(459): NCBI GI NO: 17553764 NR Description: protein kinase beta like (3E511)
QLRRPPPPKKLENQKQSFDQEHARLSKELSNNADTIAELRKEIARLMGENEKLLKNQAVAIQPESTSNRDDEIQKLEKIVNELREEKANMEAELQVLNDQVIKNLEIEDRIKSTVFELDTKNIEIAELKNSLQQIKENQNVPPAAIDPTTQQQIAELTAKLLEKDALHQSNIDLLNAQWQQVVDQKCAEVADSWRHHLQLKEEEFAAVESDLREKMLQLEQQSNTSSTTPETQNTPTSGDSRSNIQESPELKSDIANADQSELVKTMQSALEQQELEIVSLKEQLAIRSAEYARIAASVDPYAMKSTSSNSFQSVSQTEETPSKGNELDLALYMLHQRDMRCEELTEEVIHLLEERDTLQLKLSNSIRQIEEFKQRTGADATDASEAGSSSPVKSNPASSDAQSSHDGSFNEQSQNLDLKLSELHKVSHSRDKTLKEERDQRRRQMNVFQKDVANMPPEAIAELFGPDFKPNTRNTQNASSMLMDWLWGRSDNEPHN

SEQ ID NO: 6296 - protein, 451 aa, Glycine max
  peptide (1)..(451): Ceres Seq. ID no. 15225121
  misc_feature (1)..(400): Pfam Name: Pfam Description:  Myosin tail
  misc_feature (1)..(448): NCBI GI NO: 21428694 NR Description: SD02391p [Drosophila melanogaster]
  misc_feature (1)..(448): NCBI GI NO: 17933552 NR Description: lava lamp CG6450-PC [Drosophila melanogaster]
  misc_feature (1)..(444): NCBI GI NO: 31204359 NR Description: ENSANGP00000017337 [Anopheles gambiae]
  misc_feature (1)..(330): NCBI GI NO: 15217624 NR Description: expressed protein [Arabidopsis thaliana]
  misc_feature (1)..(331): NCBI GI NO: 25408221 NR Description: probable myosin heavy chain
  misc_feature (1)..(418): NCBI GI NO: 28830050 NR Description: similar to Entamoeba histolytica
  misc_feature (16)..(413): NCBI GI NO: 7508662 NR Description: hypothetical protein T28C6
  misc_feature (16)..(413): NCBI GI NO: 32566158 NR Description: M protein repeat and RepA / Rep+ protein KID
  misc_feature (1)..(413): NCBI GI NO: 17553764 NR Description: protein kinase beta like (3E511)
MGENEKLLKNQAVAIQPESTSNRDDEIQKLEKIVNELREEKANMEAELQVLNDQVIKNLEIEDRIKSTVFELDTKNIEIAELKNSLQQIKENQNVPPAAIDPTTQQQIAELTAKLLEKDALHQSNIDLLNAQWQQVVDQKCAEVADSWRHHLQLKEEEFAAVESDLREKMLQLEQQSNTSSTTPETQNTPTSGDSRSNIQESPELKSDIANADQSELVKTMQSALEQQELEIVSLKEQLAIRSAEYARIAASVDPYAMKSTSSNSFQSVSQTEETPSKGNELDLALYMLHQRDMRCEELTEEVIHLLEERDTLQLKLSNSIRQIEEFKQRTGADATDASEAGSSSPVKSNPASSDAQSSHDGSFNEQSQNLDLKLSELHKVSHSRDKTLKEERDQRRRQMNVFQKDVANMPPEAIAELFGPDFKPNTRNTQNASSMLMDWLWGRSDNEPHN

SEQ ID NO: 6297 - protein, 408 aa, Glycine max
  peptide (1)..(408): Ceres Seq. ID no. 15225122
  misc_feature (1)..(357): Pfam Name: Pfam Description:  Myosin tail
  misc_feature (1)..(405): NCBI GI NO: 21428694 NR Description: SD02391p [Drosophila melanogaster]
  misc_feature (1)..(405): NCBI GI NO: 17933552 NR Description: lava lamp CG6450-PC [Drosophila melanogaster]
  misc_feature (1)..(401): NCBI GI NO: 31204359 NR Description: ENSANGP00000017337 [Anopheles gambiae]
  misc_feature (1)..(287): NCBI GI NO: 15217624 NR Description: expressed protein [Arabidopsis thaliana]
  misc_feature (1)..(288): NCBI GI NO: 25408221 NR Description: probable myosin heavy chain
  misc_feature (1)..(375): NCBI GI NO: 28830050 NR Description: similar to Entamoeba histolytica
  misc_feature (1)..(370): NCBI GI NO: 7508662 NR Description: hypothetical protein T28C6
  misc_feature (1)..(370): NCBI GI NO: 32566158 NR Description: M protein repeat and RepA / Rep+ protein KID
  misc_feature (1)..(370): NCBI GI NO: 17553764 NR Description: protein kinase beta like (3E511)
MEAELQVLNDQVIKNLEIEDRIKSTVFELDTKNIEIAELKNSLQQIKENQNVPPAAIDPTTQQQIAELTAKLLEKDALHQSNIDLLNAQWQQVVDQKCAEVADSWRHHLQLKEEEFAAVESDLREKMLQLEQQSNTSSTTPETQNTPTSGDSRSNIQESPELKSDIANADQSELVKTMQSALEQQELEIVSLKEQLAIRSAEYARIAASVDPYAMKSTSSNSFQSVSQTEETPSKGNELDLALYMLHQRDMRCEELTEEVIHLLEERDTLQLKLSNSIRQIEEFKQRTGADATDASEAGSSSPVKSNPASSDAQSSHDGSFNEQSQNLDLKLSELHKVSHSRDKTLKEERDQRRRQMNVFQKDVANMPPEAIAELFGPDFKPNTRNTQNASSMLMDWLWGRSDNEPHN

SEQ ID NO: 6298 - DNA, 1782 bp, Glycine max
  misc_feature (1)..(1782): Ceres Seq. ID no. 15175681
agaactcctacttcaccaaactttcagatgcctcctccctattgggatccacaatctgctgcaaacatcaatccagactttatgggaatgaattacttggattctattgtagaacttcagaagcagacacagatgctcactttggagaatcaaatagatgctgtaaaaactgggactggaggaatcgccaacgatcactatggcttagacgcttctgctgccaatttgggtgggagaaggttttctgaatttccaatgaagatgtgtcactatttcaacaaaggattctgtaagcatggaactagctgcagattctatcatgggcaagttgtccctgagaatttctctcagatgcatgcaaatgatgctattggtgaggatcaggtgatttccccagggtcactggctcagttagagtctgaaattattgagctcctaagagcaaaaggcggtccaatgtcaattgcttccctgccaatggcatactacgataaatataaaaaggtactgcaagcagatggttatttaactgagagtcagaggcatggtaagtctggctatagtttgacaaagcttcttgcacgactgaaaaatagtattcagctaataggcagacctcatgggcagcattcagtggttctggcagaagattctcccacacaaatgcaaaagggagattttgctcgaaatatcagtgcttcataccaaatatatctgacgttcccagctgacagcactttcacagaggatgatgtctcaaactacttcaacacttttggacctgttgcagatgtcagaattccaaaccagcagagaaggatgtttggatttgtgacatttgttcattcagaaactgtcaaaagtgttttggataaggggaatccccattgtgttcggggttctcgggtgcttgtgaaaccttaccgggagaaggcaaaggttaatgaaaggaagtacacagatagaattgagcaccctatttgttattcaccacactatgtagatatggacgctgaacttaactcaattccaagaagttttgggagccattgatccattaggagacacttacaactaattgaacaggaagagcaggagcaagctcttgaacgtcagagaagtcttgcacagctgcattttgcccaaaaatctttcttcagttcacctcattttggcttctccatggatgagtcaaggatttcagatgatcacttcaatttccagccagcagaagaatctttcagttttccactgcatgtcaaatccaggcatacagactccaattactctgatgaggacagcaatgaaggactcaatctcccggacagtccatttgcatttccactagatagatagtgggatgtaaacattcatagtttcagacacatacaagaaatatagagttcaaacagatccaggccaatggtagcagctttcttttgatacataatacagttcttctattgaactatttctcaattagtacagcaatttagtcaaaattccagcaagtacatacacgctgaagaagagacatgggaagaatttcctcttaacaattgggattggtggcattaacagaagtttaatgatacatgtaagaaggttatagtttttaattacagacaggtggcaaaaggtttgaattttagatcgtatagttgggttttattcatgaagtcatcggtggatgaaaagaactaagcgtattattgtacacagttttaattagattgaaggacctcttagaatccgtgtctactcactgtgaaccgctttaac

SEQ ID NO: 6299 - protein, 350 aa, Glycine max
  peptide (1)..(350): Ceres Seq. ID no. 15175682
  misc_feature (249)..(305): Pfam Name: a.k.a. RRM, RBD, or RNP domain Pfam Description: RNA recognition motif.
  misc_feature (39)..(350): NCBI GI NO: 15224480 NR Description: RNA recognition motif (RRM)-containing protein
  misc_feature (17)..(292): NCBI GI NO: 15231722 NR Description: RNA recognition motif (RRM)-containing protein
  misc_feature (82)..(314): NCBI GI NO: 27817837 NR Description: OJ1127_E01.5
  misc_feature (233)..(350): NCBI GI NO: 15231090 NR Description: RNA recognition motif (RRM)-containing protein
  misc_feature (233)..(350): NCBI GI NO: 21594547 NR Description: unknown [Arabidopsis thaliana]
  misc_feature (89)..(107): NCBI GI NO: 15231090 NR Description: RNA recognition motif (RRM)-containing protein
  misc_feature (89)..(107): NCBI GI NO: 21594547 NR Description: unknown [Arabidopsis thaliana]
  misc_feature (221)..(350): NCBI GI NO: 33146675 NR Description: putative DAZ associated protein 1
  misc_feature (87)..(159): NCBI GI NO: 33146675 NR Description: putative DAZ associated protein 1
  misc_feature (233)..(350): NCBI GI NO: 19423979 NR Description: unknown protein [Arabidopsis thaliana]
RTPTSPNFQMPPPYWDPQSAANINPDFMGMNYLDSIVELQKQTQMLTLENQIDAVKTGTGGIANDHYGLDASAANLGGRRFSEFPMKMCHYFNKGFCKHGTSCRFYHGQVVPENFSQMHANDAIGEDQVISPGSLAQLESEIIELLRAKGGPMSIASLPMAYYDKYKKVLQADGYLTESQRHGKSGYSLTKLLARLKNSIQLIGRPHGQHSVVLAEDSPTQMQKGDFARNISASYQIYLTFPADSTFTEDDVSNYFNTFGPVADVRIPNQQRRMFGFVTFVHSETVKSVLDKGNPHCVRGSRVLVKPYREKAKVNERKYTDRIEHPICYSPHYVDMDAELNSIPRSFGSH

SEQ ID NO: 6300 - protein, 341 aa, Glycine max
  peptide (1)..(341): Ceres Seq. ID no. 15175683
  misc_feature (240)..(296): Pfam Name: a.k.a. RRM, RBD, or RNP domain Pfam Description: RNA recognition motif.
  misc_feature (30)..(341): NCBI GI NO: 15224480 NR Description: RNA recognition motif (RRM)-containing protein
  misc_feature (8)..(283): NCBI GI NO: 15231722 NR Description: RNA recognition motif (RRM)-containing protein
  misc_feature (73)..(305): NCBI GI NO: 27817837 NR Description: OJ1127_E01.5
  misc_feature (224)..(341): NCBI GI NO: 15231090 NR Description: RNA recognition motif (RRM)-containing protein
  misc_feature (224)..(341): NCBI GI NO: 21594547 NR Description: unknown [Arabidopsis thaliana]
  misc_feature (80)..(98): NCBI GI NO: 15231090 NR Description: RNA recognition motif (RRM)-containing protein
  misc_feature (80)..(98): NCBI GI NO: 21594547 NR Description: unknown [Arabidopsis thaliana]
  misc_feature (212)..(341): NCBI GI NO: 33146675 NR Description: putative DAZ associated protein 1
  misc_feature (78)..(150): NCBI GI NO: 33146675 NR Description: putative DAZ associated protein 1
  misc_feature (224)..(341): NCBI GI NO: 19423979 NR Description: unknown protein [Arabidopsis thaliana]
MPPPYWDPQSAANINPDFMGMNYLDSIVELQKQTQMLTLENQIDAVKTGTGGIANDHYGLDASAANLGGRRFSEFPMKMCHYFNKGFCKHGTSCRFYHGQVVPENFSQMHANDAIGEDQVISPGSLAQLESEIIELLRAKGGPMSIASLPMAYYDKYKKVLQADGYLTESQRHGKSGYSLTKLLARLKNSIQLIGRPHGQHSVVLAEDSPTQMQKGDFARNISASYQIYLTFPADSTFTEDDVSNYFNTFGPVADVRIPNQQRRMFGFVTFVHSETVKSVLDKGNPHCVRGSRVLVKPYREKAKVNERKYTDRIEHPICYSPHYVDMDAELNSIPRSFGSH

SEQ ID NO: 6301 - protein, 323 aa, Glycine max
  peptide (1)..(323): Ceres Seq. ID no. 15175684
  misc_feature (222)..(278): Pfam Name: a.k.a. RRM, RBD, or RNP domain Pfam Description: RNA recognition motif.
  misc_feature (12)..(323): NCBI GI NO: 15224480 NR Description: RNA recognition motif (RRM)-containing protein
  misc_feature (1)..(265): NCBI GI NO: 15231722 NR Description: RNA recognition motif (RRM)-containing protein
  misc_feature (55)..(287): NCBI GI NO: 27817837 NR Description: OJ1127_E01.5
  misc_feature (206)..(323): NCBI GI NO: 15231090 NR Description: RNA recognition motif (RRM)-containing protein
  misc_feature (206)..(323): NCBI GI NO: 21594547 NR Description: unknown [Arabidopsis thaliana]
  misc_feature (62)..(80): NCBI GI NO: 15231090 NR Description: RNA recognition motif (RRM)-containing protein
  misc_feature (62)..(80): NCBI GI NO: 21594547 NR Description: unknown [Arabidopsis thaliana]
  misc_feature (194)..(323): NCBI GI NO: 33146675 NR Description: putative DAZ associated protein 1
  misc_feature (60)..(132): NCBI GI NO: 33146675 NR Description: putative DAZ associated protein 1
  misc_feature (206)..(323): NCBI GI NO: 19423979 NR Description: unknown protein [Arabidopsis thaliana]
MGMNYLDSIVELQKQTQMLTLENQIDAVKTGTGGIANDHYGLDASAANLGGRRFSEFPMKMCHYFNKGFCKHGTSCRFYHGQVVPENFSQMHANDAIGEDQVISPGSLAQLESEIIELLRAKGGPMSIASLPMAYYDKYKKVLQADGYLTESQRHGKSGYSLTKLLARLKNSIQLIGRPHGQHSVVLAEDSPTQMQKGDFARNISASYQIYLTFPADSTFTEDDVSNYFNTFGPVADVRIPNQQRRMFGFVTFVHSETVKSVLDKGNPHCVRGSRVLVKPYREKAKVNERKYTDRIEHPICYSPHYVDMDAELNSIPRSFGSH

SEQ ID NO: 6302 - DNA, 1735 bp, Glycine max
  misc_feature (1)..(1735): Ceres Seq. ID no. 14315110
gtgagtgtttttgttcctcaatcaatctaattctcccatttctcttccaatggcgtcttctctttccaccaaaccattctcagccgacgctctctccgccttcgcttctctcaattccgatctcggatccctctcccccgcctacctccgactctcactccgtcctcgtcttcccaagagacttcacatacaggcggctgggagtacctatggaaatcactttcgtgttacaacatatggggaatcacatggaggaggtgttggttgtgttattgatggatgtcctcctcgccttcctctctctgaagctgatatgcaagtggatcttgacagaaggaggccaggtcagagccgaattacaactcctagaaaggagactgatacatgtaaaatattttcaggagtttccgaaggaatcactactggaactccaattcatgtatctgtacccaatactgatcaaagaggacatgactatagcgagatggcagtagcttataggccctcccatgcagatgctacctatgacatgaagtatggtgtcagatcagttcagggtggtggtagatcttctgcaagagaaacaattggaagggttgcttctggtgctgttgctaagaaaatccttaaagaattttctggaactgagattctggcctatgtctctcaagttcataagattgttcttccagaggaccttattgatcatgacactctgactcttgatcagattgagagtaacattgttcgatgtccagacccggagtatgcagagaagatgatatctgcaattgatgctgtgcgagtgagaggtgattctgttggtggtgttgtgacatgcattgtgaggaactgtccacgaggtctcggttcaccagtatttgacaaacttgaagctgagctggctaaagctgcaatgtcattgcctgcaaccaagggctttcagtttggtagtgggtttgcaggcacctttttgactgggagtgaacacaatgatgagttctatatagatgaacatggaaacacaagaacaagaacaaatcgctctggtgggatacagggtggaatttccaatggggaaatcattaatatgagaatagctttcaagccaacatcaacaattggaaagaagcaaaagactgtgactcgagataaaaaagaaacagagtttatagcccgtggtcgccatgatccttgtgttgtcccaagagctgtacctatggtagaagcaatggtagctttggttcttgtggaccaattgatggcacaatatgcgcagtgtaatctttttcccgtaaactcagatttgcaagaacccttggtgcccatactacggccagaagaagcgctcctctgaagaggaagggggtccataaatcagtaattggcctttgataaaatcttccttatggctagtgtttaattgacacggttaattcactttgatgacaagtccaagtgaacattgtggcagatatttttgcgggtgcaatctatcgttttgtattaatgtaagttaaactatgttttcttttcctctcttcttctattttcattctgagggtgaacattgtttctagtaaaccttgttgcaaaagcagagatagatgtattcttaaagtgaactgatattaaaaattgtaagaaacgtatcagtttttggtcttaataagtgttgctctgctttgcaataaatgaaagctttggcaactttaactggctgttcacattatgt

SEQ ID NO: 6303 - protein, 435 aa, Glycine max
  peptide (1)..(435): Ceres Seq. ID no. 14315111
  misc_feature (58)..(408): Pfam Name: Pfam Description:  Chorismate synthase
  misc_feature (2)..(433): NCBI GI NO: 18402389 NR Description: chorismate synthase
  misc_feature (1)..(433): NCBI GI NO: 2492952 NR Description: Chorismate synthase 1, chloroplast precursor
  misc_feature (2)..(433): NCBI GI NO: 12229700 NR Description: Chorismate synthase, chloroplast precursor
  misc_feature (1)..(426): NCBI GI NO: 2492953 NR Description: Chorismate synthase 2, chloroplast precursor
  misc_feature (1)..(424): NCBI GI NO: 114182 NR Description: Chorismate synthase, chloroplast precursor
  misc_feature (51)..(411): NCBI GI NO: 16330007 NR Description: chorismate synthase [Synechocystis sp. PCC 6803]
  misc_feature (51)..(412): NCBI GI NO: 23039390 NR Description: hypothetical protein
  misc_feature (51)..(413): NCBI GI NO: 22298006 NR Description: chorismate synthase
  misc_feature (51)..(413): NCBI GI NO: 17228292 NR Description: chorismate synthase [Nostoc sp. PCC 7120]
  misc_feature (51)..(413): NCBI GI NO: 23126882 NR Description: hypothetical protein [Nostoc punctiforme]
MASSLSTKPFSADALSAFASLNSDLGSLSPAYLRLSLRPRLPKRLHIQAAGSTYGNHFRVTTYGESHGGGVGCVIDGCPPRLPLSEADMQVDLDRRRPGQSRITTPRKETDTCKIFSGVSEGITTGTPIHVSVPNTDQRGHDYSEMAVAYRPSHADATYDMKYGVRSVQGGGRSSARETIGRVASGAVAKKILKEFSGTEILAYVSQVHKIVLPEDLIDHDTLTLDQIESNIVRCPDPEYAEKMISAIDAVRVRGDSVGGVVTCIVRNCPRGLGSPVFDKLEAELAKAAMSLPATKGFQFGSGFAGTFLTGSEHNDEFYIDEHGNTRTRTNRSGGIQGGISNGEIINMRIAFKPTSTIGKKQKTVTRDKKETEFIARGRHDPCVVPRAVPMVEAMVALVLVDQLMAQYAQCNLFPVNSDLQEPLVPILRPEEALL

SEQ ID NO: 6304 - protein, 347 aa, Glycine max
  peptide (1)..(347): Ceres Seq. ID no. 14315112
  misc_feature (1)..(320): Pfam Name: Pfam Description:  Chorismate synthase
  misc_feature (1)..(345): NCBI GI NO: 18402389 NR Description: chorismate synthase
  misc_feature (1)..(345): NCBI GI NO: 2492952 NR Description: Chorismate synthase 1, chloroplast precursor
  misc_feature (1)..(345): NCBI GI NO: 12229700 NR Description: Chorismate synthase, chloroplast precursor
  misc_feature (1)..(338): NCBI GI NO: 2492953 NR Description: Chorismate synthase 2, chloroplast precursor
  misc_feature (1)..(336): NCBI GI NO: 114182 NR Description: Chorismate synthase, chloroplast precursor
  misc_feature (1)..(323): NCBI GI NO: 16330007 NR Description: chorismate synthase [Synechocystis sp. PCC 6803]
  misc_feature (1)..(324): NCBI GI NO: 23039390 NR Description: hypothetical protein
  misc_feature (1)..(325): NCBI GI NO: 22298006 NR Description: chorismate synthase
  misc_feature (1)..(325): NCBI GI NO: 17228292 NR Description: chorismate synthase [Nostoc sp. PCC 7120]
  misc_feature (1)..(325): NCBI GI NO: 23126882 NR Description: hypothetical protein [Nostoc punctiforme]
MQVDLDRRRPGQSRITTPRKETDTCKIFSGVSEGITTGTPIHVSVPNTDQRGHDYSEMAVAYRPSHADATYDMKYGVRSVQGGGRSSARETIGRVASGAVAKKILKEFSGTEILAYVSQVHKIVLPEDLIDHDTLTLDQIESNIVRCPDPEYAEKMISAIDAVRVRGDSVGGVVTCIVRNCPRGLGSPVFDKLEAELAKAAMSLPATKGFQFGSGFAGTFLTGSEHNDEFYIDEHGNTRTRTNRSGGIQGGISNGEIINMRIAFKPTSTIGKKQKTVTRDKKETEFIARGRHDPCVVPRAVPMVEAMVALVLVDQLMAQYAQCNLFPVNSDLQEPLVPILRPEEALL

SEQ ID NO: 6305 - protein, 290 aa, Glycine max
  peptide (1)..(290): Ceres Seq. ID no. 14315113
  misc_feature (1)..(263): Pfam Name: Pfam Description:  Chorismate synthase
  misc_feature (1)..(288): NCBI GI NO: 18402389 NR Description: chorismate synthase
  misc_feature (1)..(288): NCBI GI NO: 2492952 NR Description: Chorismate synthase 1, chloroplast precursor
  misc_feature (1)..(288): NCBI GI NO: 12229700 NR Description: Chorismate synthase, chloroplast precursor
  misc_feature (1)..(281): NCBI GI NO: 2492953 NR Description: Chorismate synthase 2, chloroplast precursor
  misc_feature (1)..(279): NCBI GI NO: 114182 NR Description: Chorismate synthase, chloroplast precursor
  misc_feature (1)..(266): NCBI GI NO: 16330007 NR Description: chorismate synthase [Synechocystis sp. PCC 6803]
  misc_feature (1)..(267): NCBI GI NO: 23039390 NR Description: hypothetical protein
  misc_feature (1)..(268): NCBI GI NO: 22298006 NR Description: chorismate synthase
  misc_feature (1)..(268): NCBI GI NO: 17228292 NR Description: chorismate synthase [Nostoc sp. PCC 7120]
  misc_feature (1)..(268): NCBI GI NO: 23126882 NR Description: hypothetical protein [Nostoc punctiforme]
MAVAYRPSHADATYDMKYGVRSVQGGGRSSARETIGRVASGAVAKKILKEFSGTEILAYVSQVHKIVLPEDLIDHDTLTLDQIESNIVRCPDPEYAEKMISAIDAVRVRGDSVGGVVTCIVRNCPRGLGSPVFDKLEAELAKAAMSLPATKGFQFGSGFAGTFLTGSEHNDEFYIDEHGNTRTRTNRSGGIQGGISNGEIINMRIAFKPTSTIGKKQKTVTRDKKETEFIARGRHDPCVVPRAVPMVEAMVALVLVDQLMAQYAQCNLFPVNSDLQEPLVPILRPEEALL

SEQ ID NO: 6306 - DNA, 1694 bp, Glycine max
  misc_feature (1)..(1694): Ceres Seq. ID no. 15175690
gaccaaaaaataattaggaaaaaaataaaaagatggaaagataatgtggttccgattcaaaccacacgattccacgaccttattatggagccgcggtggcggtagcggtggccggcgattataacggcggaggagtaagagatggttgtgttgtgaggaagattggtaagctgtgggaacatgtcgttgagaagcatagtccgtgaactcaaggagatgagagatggaattggcagcacatcaaagcggggtgcagaaagcaagcattggctcagtcggacaaagtcacatgtagcaccagatattcttgctactccatttgaacctattcaacagggacaatgggcaaatctaccatcagaattgcttctggacataatccagaggatcgaagagagtgagacatcttggcctgcccgtgctgttgttgtcttttgtgcttcagtatgtaaatcatggaggtccattacaagagagattgtcaagactcctgaacaatgtggaaggatcacatttcccatttcattgaagcagccgggtccgcgtgattctccaatacagtgctttatcaggaggaacaaagaaacttctacatatctattgtactttggtctggttccatcagagaatgacggtaataagttgttattagctgccaaaaggataagaagggcaacggacactgactttatcatatccttggctgcagatgatttttctcgagccagcaacaaatatgttggtaaactaaggtctaattttttaggtaccaagttcaccatatttgacagtcaagctccaaatgatgttgcaattcaaccaaattgtcaatctagtaggagatttcattctaagcaggtgtcaccaagacttccagcttgtaattatcttgttagcactgtttcctacgagctgaatgtcctatgcactagagggccaagaagaatgtactgtgtcatgaactccatacctgtctcagctattcaggaaggcggcaatgccccaactccagcatcttaccctcaaatatttgatgaacatttttctccatcaccagcactgaaagaaaaagttccagtcacagatttaaactctgcaagcttatcagagccaccagtatcgagccaatgctcagccgagcaattagcactgaaaaacagggctcccagatggcatgagcagcttcagtgctggtgcctaaacttcaagggtcgtgtttcagtggcttctgttaagaactttcaacttgtagctgttgttgatccatctcataatatttctgctgaggagcaagaaaaggtaatcttgcagtttggaaagattggaaaagacatattcaccatggattactgttatccgctctctaccttccaagcctttgccatctgcttgagcagctttgacactaaacctgcctgtgaatgagaagcgttacattactacattgtaattgacatctgctgagttgctggttgtcaatcatggtggcatgcagctgaaaatcatagctgttctgccgttagtattttccccttgaattggttgctgattctggaatttgttcaatctgttgtttcgtggtcctgtaaaattaaaattaaatgaagtttagtgaattctgtaatatatatgtttctggtgttcctcactcacgaatactttgatctgcttaaatactgagttttcagttgccg

SEQ ID NO: 6307 - protein, 414 aa, Glycine max
  peptide (1)..(414): Ceres Seq. ID no. 15175691
  misc_feature (119)..(414): Pfam Name: Pfam Description:  Tub family
  misc_feature (1)..(414): NCBI GI NO: 7635492 NR Description: tubby-like protein [Cicer arietinum]
  misc_feature (1)..(414): NCBI GI NO: 30680328 NR Description: F-box containing tubby family protein
  misc_feature (1)..(414): NCBI GI NO: 30793997 NR Description: putative F-box containing tubby family protein
  misc_feature (1)..(414): NCBI GI NO: 25409071 NR Description: probable Tub family protein
  misc_feature (1)..(414): NCBI GI NO: 30690823 NR Description: F-box containing tubby family protein
  misc_feature (1)..(414): NCBI GI NO: 34899264 NR Description: contains ESTsAU068695
  misc_feature (1)..(373): NCBI GI NO: 38637048 NR Description: putative chain A
  misc_feature (363)..(414): NCBI GI NO: 38637048 NR Description: putative chain A
  misc_feature (1)..(414): NCBI GI NO: 5689214 NR Description: tubby-like protein [Lemna paucicostata]
  misc_feature (1)..(414): NCBI GI NO: 18400968 NR Description: F-box containing tubby family protein
MSLRSIVRELKEMRDGIGSTSKRGAESKHWLSRTKSHVAPDILATPFEPIQQGQWANLPSELLLDIIQRIEESETSWPARAVVVFCASVCKSWRSITREIVKTPEQCGRITFPISLKQPGPRDSPIQCFIRRNKETSTYLLYFGLVPSENDGNKLLLAAKRIRRATDTDFIISLAADDFSRASNKYVGKLRSNFLGTKFTIFDSQAPNDVAIQPNCQSSRRFHSKQVSPRLPACNYLVSTVSYELNVLCTRGPRRMYCVMNSIPVSAIQEGGNAPTPASYPQIFDEHFSPSPALKEKVPVTDLNSASLSEPPVSSQCSAEQLALKNRAPRWHEQLQCWCLNFKGRVSVASVKNFQLVAVVDPSHNISAEEQEKVILQFGKIGKDIFTMDYCYPLSTFQAFAICLSSFDTKPACE

SEQ ID NO: 6308 - protein, 402 aa, Glycine max
  peptide (1)..(402): Ceres Seq. ID no. 15175692
  misc_feature (107)..(402): Pfam Name: Pfam Description:  Tub family
  misc_feature (1)..(402): NCBI GI NO: 7635492 NR Description: tubby-like protein [Cicer arietinum]
  misc_feature (1)..(402): NCBI GI NO: 30680328 NR Description: F-box containing tubby family protein
  misc_feature (1)..(402): NCBI GI NO: 30793997 NR Description: putative F-box containing tubby family protein
  misc_feature (1)..(402): NCBI GI NO: 25409071 NR Description: probable Tub family protein
  misc_feature (1)..(402): NCBI GI NO: 30690823 NR Description: F-box containing tubby family protein
  misc_feature (1)..(402): NCBI GI NO: 34899264 NR Description: contains ESTsAU068695
  misc_feature (1)..(361): NCBI GI NO: 38637048 NR Description: putative chain A
  misc_feature (351)..(402): NCBI GI NO: 38637048 NR Description: putative chain A
  misc_feature (1)..(402): NCBI GI NO: 5689214 NR Description: tubby-like protein [Lemna paucicostata]
  misc_feature (1)..(402): NCBI GI NO: 18400968 NR Description: F-box containing tubby family protein
MRDGIGSTSKRGAESKHWLSRTKSHVAPDILATPFEPIQQGQWANLPSELLLDIIQRIEESETSWPARAVVVFCASVCKSWRSITREIVKTPEQCGRITFPISLKQPGPRDSPIQCFIRRNKETSTYLLYFGLVPSENDGNKLLLAAKRIRRATDTDFIISLAADDFSRASNKYVGKLRSNFLGTKFTIFDSQAPNDVAIQPNCQSSRRFHSKQVSPRLPACNYLVSTVSYELNVLCTRGPRRMYCVMNSIPVSAIQEGGNAPTPASYPQIFDEHFSPSPALKEKVPVTDLNSASLSEPPVSSQCSAEQLALKNRAPRWHEQLQCWCLNFKGRVSVASVKNFQLVAVVDPSHNISAEEQEKVILQFGKIGKDIFTMDYCYPLSTFQAFAICLSSFDTKPACE

SEQ ID NO: 6309 - DNA, 1286 bp, Glycine max
  misc_feature (1)..(1286): Ceres Seq. ID no. 14308536
aaaacccaaaacctcttcttcttactctcttacgttaattcttcgttgtctatgatggcattggatatgattgatgttgttcccaggacgaggatggaagaagaaaatatagcaatacaagaagcagcttccgctgggttaaagagcatggagcatctcattcgtctcctttctccttcttcttctcttcacaacaacgttaataatctcaatctcaaccacctcgactgctccgaaatcaccggcttcactgtctccaagttcaaacaagtcatcaaccttctcaaccgcaccggccacgcccgcttccgccgctctccaccccaagcccaagcccaagcccaagcccaagcccaagcccaaactaatcctcaaccacaacctcagatccaacaacaagggttcagtttagatttcgtgaagcccaccattctaaactcaaagcccatcaacaaagacgaaactttgactctttcaacaacctcttcttccttcatgtcctccgtcaccaacgacgccagcgtctccgacggcaagatcggacctttcctccctccctccgccgccaaaccccctctctcctccgcccaccggaaaaagtgccgcgacgccgccgcagcactctccgccaaaccctcctgccactgctccaagaaaaggaaatcacgcgtgaaacgaacgattcgggtgccggcgataagctcaaagatcgcagatatcccaccggacgagtattcgtggagaaaatacggtcaaaaaccgatcaagggctcaccttaccctcgagggtactacaagtgcagcaccgtgagagggtgtccggcgaggaagcacgtggagcgagcgcaggatgaccccaagatgctaatagtgacttacgagggtgagcaccgtcacgtgctgccgttaacttccgccgccggcgttagtttcggccattgagttaatcgacggcgtcttttggaaacttgacgggggacgttaaatgagcgtcggatcgtgaagtaacggcggatgcgaacaaggatcgattcggttcgaggacggaaaaagaaaagtggcaactaaagtcaactttcgcgttgtggaatgattttgttgacgaggacttttgtgtaaatttgaccccaagtaaagtagtgcaggtctcaaagaatgaaaattatagtgatctcatctgtttttctttatttctattttttttttaaaagagacatttatttatttatttatttgatgttagagttgaattggttgaaggatggggctgcaataattttcttggt

SEQ ID NO: 6310 - protein, 313 aa, Glycine max
  peptide (1)..(313): Ceres Seq. ID no. 14308537
  misc_feature (241)..(301): Pfam Name: Pfam Description:  WRKY DNA -binding domain
  misc_feature (24)..(168): NCBI GI NO: 4760596 NR Description: DNA-binding protein NtWRKY3 [Nicotiana tabacum]
  misc_feature (156)..(301): NCBI GI NO: 4760596 NR Description: DNA-binding protein NtWRKY3 [Nicotiana tabacum]
  misc_feature (19)..(307): NCBI GI NO: 38346908 NR Description: OSJNBb0015N08.8
  misc_feature (75)..(299): NCBI GI NO: 4894963 NR Description: DNA-binding protein WRKY3 [Avena sativa]
  misc_feature (137)..(306): NCBI GI NO: 10798760 NR Description: WRKY transcription factor Nt-SubD48
  misc_feature (30)..(148): NCBI GI NO: 10798760 NR Description: WRKY transcription factor Nt-SubD48
  misc_feature (156)..(299): NCBI GI NO: 7488950 NR Description: DNA-binding protein WRKY3 - parsley
  misc_feature (19)..(150): NCBI GI NO: 7488950 NR Description: DNA-binding protein WRKY3 - parsley
  misc_feature (29)..(302): NCBI GI NO: 38175580 NR Description: putative DNA-binding protein NtWRKY3
  misc_feature (19)..(150): NCBI GI NO: 4680251 NR Description: transcription factor
KTQNLFFLLSYVNSSLSMMALDMIDVVPRTRMEEENIAIQEAASAGLKSMEHLIRLLSPSSSLHNNVNNLNLNHLDCSEITGFTVSKFKQVINLLNRTGHARFRRSPPQAQAQAQAQAQAQTNPQPQPQIQQQGFSLDFVKPTILNSKPINKDETLTLSTTSSSFMSSVTNDASVSDGKIGPFLPPSAAKPPLSSAHRKKCRDAAAALSAKPSCHCSKKRKSRVKRTIRVPAISSKIADIPPDEYSWRKYGQKPIKGSPYPRGYYKCSTVRGCPARKHVERAQDDPKMLIVTYEGEHRHVLPLTSAAGVSFGH

SEQ ID NO: 6311 - protein, 296 aa, Glycine max
  peptide (1)..(296): Ceres Seq. ID no. 14308538
  misc_feature (224)..(284): Pfam Name: Pfam Description:  WRKY DNA -binding domain
  misc_feature (7)..(151): NCBI GI NO: 4760596 NR Description: DNA-binding protein NtWRKY3 [Nicotiana tabacum]
  misc_feature (139)..(284): NCBI GI NO: 4760596 NR Description: DNA-binding protein NtWRKY3 [Nicotiana tabacum]
  misc_feature (2)..(290): NCBI GI NO: 38346908 NR Description: OSJNBb0015N08.8
  misc_feature (58)..(282): NCBI GI NO: 4894963 NR Description: DNA-binding protein WRKY3 [Avena sativa]
  misc_feature (120)..(289): NCBI GI NO: 10798760 NR Description: WRKY transcription factor Nt-SubD48
  misc_feature (13)..(131): NCBI GI NO: 10798760 NR Description: WRKY transcription factor Nt-SubD48
  misc_feature (139)..(282): NCBI GI NO: 7488950 NR Description: DNA-binding protein WRKY3 - parsley
  misc_feature (2)..(133): NCBI GI NO: 7488950 NR Description: DNA-binding protein WRKY3 - parsley
  misc_feature (12)..(285): NCBI GI NO: 38175580 NR Description: putative DNA-binding protein NtWRKY3
  misc_feature (2)..(133): NCBI GI NO: 4680251 NR Description: transcription factor
MMALDMIDVVPRTRMEEENIAIQEAASAGLKSMEHLIRLLSPSSSLHNNVNNLNLNHLDCSEITGFTVSKFKQVINLLNRTGHARFRRSPPQAQAQAQAQAQAQTNPQPQPQIQQQGFSLDFVKPTILNSKPINKDETLTLSTTSSSFMSSVTNDASVSDGKIGPFLPPSAAKPPLSSAHRKKCRDAAAALSAKPSCHCSKKRKSRVKRTIRVPAISSKIADIPPDEYSWRKYGQKPIKGSPYPRGYYKCSTVRGCPARKHVERAQDDPKMLIVTYEGEHRHVLPLTSAAGVSFGH

SEQ ID NO: 6312 - protein, 295 aa, Glycine max
  peptide (1)..(295): Ceres Seq. ID no. 14308539
  misc_feature (223)..(283): Pfam Name: Pfam Description:  WRKY DNA -binding domain
  misc_feature (6)..(150): NCBI GI NO: 4760596 NR Description: DNA-binding protein NtWRKY3 [Nicotiana tabacum]
  misc_feature (138)..(283): NCBI GI NO: 4760596 NR Description: DNA-binding protein NtWRKY3 [Nicotiana tabacum]
  misc_feature (1)..(289): NCBI GI NO: 38346908 NR Description: OSJNBb0015N08.8
  misc_feature (57)..(281): NCBI GI NO: 4894963 NR Description: DNA-binding protein WRKY3 [Avena sativa]
  misc_feature (119)..(288): NCBI GI NO: 10798760 NR Description: WRKY transcription factor Nt-SubD48
  misc_feature (12)..(130): NCBI GI NO: 10798760 NR Description: WRKY transcription factor Nt-SubD48
  misc_feature (138)..(281): NCBI GI NO: 7488950 NR Description: DNA-binding protein WRKY3 - parsley
  misc_feature (1)..(132): NCBI GI NO: 7488950 NR Description: DNA-binding protein WRKY3 - parsley
  misc_feature (11)..(284): NCBI GI NO: 38175580 NR Description: putative DNA-binding protein NtWRKY3
  misc_feature (1)..(132): NCBI GI NO: 4680251 NR Description: transcription factor
MALDMIDVVPRTRMEEENIAIQEAASAGLKSMEHLIRLLSPSSSLHNNVNNLNLNHLDCSEITGFTVSKFKQVINLLNRTGHARFRRSPPQAQAQAQAQAQAQTNPQPQPQIQQQGFSLDFVKPTILNSKPINKDETLTLSTTSSSFMSSVTNDASVSDGKIGPFLPPSAAKPPLSSAHRKKCRDAAAALSAKPSCHCSKKRKSRVKRTIRVPAISSKIADIPPDEYSWRKYGQKPIKGSPYPRGYYKCSTVRGCPARKHVERAQDDPKMLIVTYEGEHRHVLPLTSAAGVSFGH

SEQ ID NO: 6313 - DNA, 1118 bp, Glycine max
  misc_feature (1)..(1118): Ceres Seq. ID no. 14312730
ttattagtttctatataaatataaggacttaaatattaagtctatcaggaacaacatatatatgctcatcccttctcctctggtttacaaagttctctttaagctgtggtgaagaaagtcatgatcaactaatatttactttatcactgcctctcaaactagaggttttatttggttactttctcattgagcatgtcaataaaagtttgtctatagagacccttattacgctattgcttgcaggtaatggatgagtatgacgagcaatccgaggttgctgaccgacttagaatcagggtatttctcttctattctcttgattactatttactgagtatcaaatgaaacttaatctggataaaactgacctacctcccttggagacagctaagtatcagccatcaggttaatctaaatgtttgttggccaacttgtcttcaatgttccgtggttagtcttcatttgcatgatttctctagtttactctaattaactggtgcacatgccattttcgttttgggtctggtttatcttggcattgctttttatgattatctctaaaactatctttactttcttcacctctcttttatggttaattccatcttcttcctatccgcgatatagatatcggttgtgcatcatttttgctactagctactgcatgtaatcactacactttctagtattcatgctttatgatatgttgaatatgaagcggaaacaaactgatgcaggccgtgcctcttttccacttctacaaagatggggtcctgttggaagcattcccaaccagagacaaagataggattcttgcagctattctcaagtactcatctcttgaagctgaagatatcttaggttaacatcaagagatggggtcatggcaccctcggggactgttgtgcactgcagggaaattagtaaatttttgtacgtgacaaagttcattaaacagcatgttgtatacacaaaataaaatactttagtcctgtcagcctaattcactttgttaggataggatattttcttgcaaaatatctagtgaagagtttaatgtacactacgatacgccttctctttctccagaggtcataaataaaattttcattctgctt

SEQ ID NO: 6314 - protein, 55 aa, Glycine max
  peptide (1)..(55): Ceres Seq. ID no. 14312731
MPFSFWVWFILALLFMIISKTIFTFFTSLLWLIPSSSYPRYRYRLCIIFATSYCM

SEQ ID NO: 6315 - protein, 44 aa, Glycine max
  peptide (1)..(44): Ceres Seq. ID no. 14312732
  misc_feature (1)..(36): Pfam Name: Pfam Description:  Thioredoxin
  misc_feature (1)..(39): NCBI GI NO: 18390799 NR Description: thioredoxin family [Arabidopsis thaliana]
  misc_feature (1)..(39): NCBI GI NO: 25406995 NR Description: hypothetical protein
MQAVPLFHFYKDGVLLEAFPTRDKDRILAAILKYSSLEAEDILG

SEQ ID NO: 6316 - protein, 40 aa, Glycine max
  peptide (1)..(40): Ceres Seq. ID no. 14312733
MIISKTIFTFFTSLLWLIPSSSYPRYRYRLCIIFATSYCM

SEQ ID NO: 6317 - DNA, 1426 bp, Glycine max
  misc_feature (1)..(1426): Ceres Seq. ID no. 14308148
aatttttttttcattcaaggacaacatgtagagtttttttatagcaactacgggccagaaaaatgtagagtaaacattatggatcaattcataaacattttttcacgtggggaggaaaatgtgagttgtgatttagtgaataaaattttaacaatatatcaaattgttacacaactgatcatggaccttgcctgagcctgaaccatcattttttttaagttagagctttaagaatacagcaggacataatgtttttcttggagtaggagaatgtgaggttggcagtggaaagatgcctgttgcatttactgtctcttgatctgtgattgttttttggtccctttattaataaaattgagttgagagtcatgactacaggagctgaaactattcactgagcagtcttagtaatatatacattaacaaaaggtaatatacgtatacagactttatatttttattttttcaatttaagcgtcctatacttcagtgacagactagtgtgtggttttttataacttccaatttatcttccgagcttgaccgttgattctacattgcagagggaaaaatcccatgaattggttagagtgacaagtcccatggtctactagtctttattctttaccaagtaacatacatagtatcttcaacaaggacttatctgcatacattgtggcactaaaattcattttatatcgtaaatttgaaacccaagacatgtatagacatctcagctgcacagtgagactaatggtgggtaagcattctcacatgcgtgggagaaaaaaggaaagatttacttgttttaagtatatattaatttatttggtctctccttttaaaatcttctcccagggagcaaattttgctgatgttatacaaatgactgacatctttgaggggagtattattcggagtgctagaaggcttgacgagtttttgaatcagttgcgtgctgctgctaatgcagttggagaggctgacttggagaagaaatttgcagctgcaagtgaaagccttcgacgaggtattatgtttgcaaattctttgtatctgtgacttgtttttctccagaccttacgttatatctcacggtcattccggctggctgaaagtttactttcccatccaaccttttggcatgcacccacttccttctcttaaaagctttctggtgtaaatatttgtatgctgtcactaatggtaaagggtgtgaatatagagtgatagaaaaatctggtcaatagatagaaaattccggtcaataaaggttcatcttgagagtcgcagatcattcatttatttaccttcagaacctctagtctgtctggggcttgaggagtgagggtgccgaagatatttgtttgtaatttgctgaaaaattttcaatacaaattttgattgatagttcattattttagtg

SEQ ID NO: 6318 - protein, 113 aa, Glycine max
  peptide (1)..(113): Ceres Seq. ID no. 14308149
  misc_feature (36)..(113): NCBI GI NO: 16024936 NR Description: HUA enhancer 2 [Arabidopsis thaliana]
  misc_feature (36)..(113): NCBI GI NO: 18396436 NR Description: RNA helicase (HUA enhancer 2/HEN2)
  misc_feature (36)..(113): NCBI GI NO: 25307597 NR Description: hypothetical protein At2g06990
  misc_feature (36)..(113): NCBI GI NO: 34854226 NR Description: similar to RIKEN cDNA 2610528A15
  misc_feature (36)..(113): NCBI GI NO: 21619317 NR Description: Similar to KIAA0052 protein [Homo sapiens]
  misc_feature (36)..(113): NCBI GI NO: 34783197 NR Description: Unknown (protein for IMAGE:4849317) [Homo sapiens]
  misc_feature (36)..(113): NCBI GI NO: 15928685 NR Description: 2610528A15Rik protein [Mus musculus]
  misc_feature (24)..(113): NCBI GI NO: 31231980 NR Description: ENSANGP00000020973 [Anopheles gambiae]
  misc_feature (36)..(113): NCBI GI NO: 39104516 NR Description: mKIAA0052 protein [Mus musculus]
  misc_feature (44)..(113): NCBI GI NO: 28829653 NR Description: similar to Homo sapiens (Human)
MYRHLSCTVRLMVGKHSHMRGRKKERFTCFKYILIYLVSPFKIFSQGANFADVIQMTDIFEGSIIRSARRLDEFLNQLRAAANAVGEADLEKKFAAASESLRRGIMFANSLYL

SEQ ID NO: 6319 - protein, 102 aa, Glycine max
  peptide (1)..(102): Ceres Seq. ID no. 14308150
  misc_feature (25)..(102): NCBI GI NO: 16024936 NR Description: HUA enhancer 2 [Arabidopsis thaliana]
  misc_feature (25)..(102): NCBI GI NO: 18396436 NR Description: RNA helicase (HUA enhancer 2/HEN2)
  misc_feature (25)..(102): NCBI GI NO: 25307597 NR Description: hypothetical protein At2g06990
  misc_feature (25)..(102): NCBI GI NO: 34854226 NR Description: similar to RIKEN cDNA 2610528A15
  misc_feature (25)..(102): NCBI GI NO: 21619317 NR Description: Similar to KIAA0052 protein [Homo sapiens]
  misc_feature (25)..(102): NCBI GI NO: 34783197 NR Description: Unknown (protein for IMAGE:4849317) [Homo sapiens]
  misc_feature (25)..(102): NCBI GI NO: 15928685 NR Description: 2610528A15Rik protein [Mus musculus]
  misc_feature (13)..(102): NCBI GI NO: 31231980 NR Description: ENSANGP00000020973 [Anopheles gambiae]
  misc_feature (25)..(102): NCBI GI NO: 39104516 NR Description: mKIAA0052 protein [Mus musculus]
  misc_feature (33)..(102): NCBI GI NO: 28829653 NR Description: similar to Homo sapiens (Human)
MVGKHSHMRGRKKERFTCFKYILIYLVSPFKIFSQGANFADVIQMTDIFEGSIIRSARRLDEFLNQLRAAANAVGEADLEKKFAAASESLRRGIMFANSLYL

SEQ ID NO: 6320 - protein, 95 aa, Glycine max
  peptide (1)..(95): Ceres Seq. ID no. 14308151
  misc_feature (18)..(95): NCBI GI NO: 16024936 NR Description: HUA enhancer 2 [Arabidopsis thaliana]
  misc_feature (18)..(95): NCBI GI NO: 18396436 NR Description: RNA helicase (HUA enhancer 2/HEN2)
  misc_feature (18)..(95): NCBI GI NO: 25307597 NR Description: hypothetical protein At2g06990
  misc_feature (18)..(95): NCBI GI NO: 34854226 NR Description: similar to RIKEN cDNA 2610528A15
  misc_feature (18)..(95): NCBI GI NO: 21619317 NR Description: Similar to KIAA0052 protein [Homo sapiens]
  misc_feature (18)..(95): NCBI GI NO: 34783197 NR Description: Unknown (protein for IMAGE:4849317) [Homo sapiens]
  misc_feature (18)..(95): NCBI GI NO: 15928685 NR Description: 2610528A15Rik protein [Mus musculus]
  misc_feature (6)..(95): NCBI GI NO: 31231980 NR Description: ENSANGP00000020973 [Anopheles gambiae]
  misc_feature (18)..(95): NCBI GI NO: 39104516 NR Description: mKIAA0052 protein [Mus musculus]
  misc_feature (26)..(95): NCBI GI NO: 28829653 NR Description: similar to Homo sapiens (Human)
MRGRKKERFTCFKYILIYLVSPFKIFSQGANFADVIQMTDIFEGSIIRSARRLDEFLNQLRAAANAVGEADLEKKFAAASESLRRGIMFANSLYL

SEQ ID NO: 6321 - DNA, 1182 bp, Glycine max
  misc_feature (1)..(1182): Ceres Seq. ID no. 15169220
ttacttggaagatgggaagcagggacgccttcattgtcttgtttgcggcactggcactggcaggtctgcaaaagattttccagatatgcatgctctcattatgcacacatacaacccagataatgccgattcacgtattgatcatttgggattacacaaagctctgtgtgttttaatgcgttggaactactcaaagcctcctgataactcaaaggcatatcagtttttacctgctgatgaagcagcagcaaatcaggatgatctgatcatgtggccacctttggtgatcattcataacacaaataccggaaaaaatagagatggtcgtatggagggtttgggaaacaaaatgatggataataaaattagagagcttggatttgtgggtggcaaatcaaagtcattatacggaagagatggtcatttgggcataacactggttaaatttgctggggaccaatcaggctttaaggaggccattcgacttgctgaacactttgagaaggaaaaccatggacgcaaggattgggaccgtgtgcagtcacaaacattaggaaaggatgatgagaataatgcaaaccttgtgaaggtggatgagaaaaaagtagataaaaggagggttttgtatggctatcttgggactgcttttgatcttgacaaagttgattttgacacaaggaagaaggctttcatagagagcaggagagaatacaaaccacccatgtagtttttggactatacatgggaatggctatgtaaaatggaatacatggaaagtttttccagttgcattataatcccgattcctgaagatgataaaaagcttttatgtattgtgctgaccatttcatgtacaataggaggcagcattgccatcatttttattttattccacataatttatgctgaattttcctgccatagtaatatttaggcacattaagaagatttgtttgtctttccaccatctgacaacctggaacgcactactcacttaaagtcaatgactggaatctaaagtcttggtcttgtcctcgcttttctccatgttgtctgggaactgtttgtttacagtttagattttttcaattacaatggtggggcatggaaatttgtacgcatgatttcctgccaactctgtaaatccctcattagtagccctcctagtagttgattgtttgt

SEQ ID NO: 6322 - protein, 241 aa, Glycine max
  peptide (1)..(241): Ceres Seq. ID no. 15169221
  misc_feature (85)..(195): Pfam Name: Pfam Description:  XS domain
  misc_feature (34)..(236): NCBI GI NO: 9293880 NR Description: gene_id:MCB17.19~unknown protein
  misc_feature (1)..(239): NCBI GI NO: 22773240 NR Description: Hypothetical protein
  misc_feature (59)..(236): NCBI GI NO: 30686649 NR Description: expressed protein [Arabidopsis thaliana]
  misc_feature (110)..(236): NCBI GI NO: 15081713 NR Description: AT3g22430/MCB17_17 [Arabidopsis thaliana]
  misc_feature (6)..(182): NCBI GI NO: 34912988 NR Description: putative transcription factor X1
  misc_feature (15)..(182): NCBI GI NO: 20467991 NR Description: putative transcription factor X1
YLEDGKQGRLHCLVCGTGTGRSAKDFPDMHALIMHTYNPDNADSRIDHLGLHKALCVLMRWNYSKPPDNSKAYQFLPADEAAANQDDLIMWPPLVIIHNTNTGKNRDGRMEGLGNKMMDNKIRELGFVGGKSKSLYGRDGHLGITLVKFAGDQSGFKEAIRLAEHFEKENHGRKDWDRVQSQTLGKDDENNANLVKVDEKKVDKRRVLYGYLGTAFDLDKVDFDTRKKAFIESRREYKPPM

SEQ ID NO: 6323 - protein, 213 aa, Glycine max
  peptide (1)..(213): Ceres Seq. ID no. 15169222
  misc_feature (57)..(167): Pfam Name: Pfam Description:  XS domain
  misc_feature (6)..(208): NCBI GI NO: 9293880 NR Description: gene_id:MCB17.19~unknown protein
  misc_feature (1)..(211): NCBI GI NO: 22773240 NR Description: Hypothetical protein
  misc_feature (31)..(208): NCBI GI NO: 30686649 NR Description: expressed protein [Arabidopsis thaliana]
  misc_feature (82)..(208): NCBI GI NO: 15081713 NR Description: AT3g22430/MCB17_17 [Arabidopsis thaliana]
  misc_feature (1)..(154): NCBI GI NO: 34912988 NR Description: putative transcription factor X1
  misc_feature (1)..(154): NCBI GI NO: 20467991 NR Description: putative transcription factor X1
MHALIMHTYNPDNADSRIDHLGLHKALCVLMRWNYSKPPDNSKAYQFLPADEAAANQDDLIMWPPLVIIHNTNTGKNRDGRMEGLGNKMMDNKIRELGFVGGKSKSLYGRDGHLGITLVKFAGDQSGFKEAIRLAEHFEKENHGRKDWDRVQSQTLGKDDENNANLVKVDEKKVDKRRVLYGYLGTAFDLDKVDFDTRKKAFIESRREYKPPM

SEQ ID NO: 6324 - protein, 208 aa, Glycine max
  peptide (1)..(208): Ceres Seq. ID no. 15169223
  misc_feature (52)..(162): Pfam Name: Pfam Description:  XS domain
  misc_feature (1)..(203): NCBI GI NO: 9293880 NR Description: gene_id:MCB17.19~unknown protein
  misc_feature (1)..(206): NCBI GI NO: 22773240 NR Description: Hypothetical protein
  misc_feature (26)..(203): NCBI GI NO: 30686649 NR Description: expressed protein [Arabidopsis thaliana]
  misc_feature (77)..(203): NCBI GI NO: 15081713 NR Description: AT3g22430/MCB17_17 [Arabidopsis thaliana]
  misc_feature (1)..(149): NCBI GI NO: 34912988 NR Description: putative transcription factor X1
  misc_feature (1)..(149): NCBI GI NO: 20467991 NR Description: putative transcription factor X1
MHTYNPDNADSRIDHLGLHKALCVLMRWNYSKPPDNSKAYQFLPADEAAANQDDLIMWPPLVIIHNTNTGKNRDGRMEGLGNKMMDNKIRELGFVGGKSKSLYGRDGHLGITLVKFAGDQSGFKEAIRLAEHFEKENHGRKDWDRVQSQTLGKDDENNANLVKVDEKKVDKRRVLYGYLGTAFDLDKVDFDTRKKAFIESRREYKPPM

SEQ ID NO: 6325 - DNA, 1628 bp, Glycine max
  misc_feature (1)..(1628): Ceres Seq. ID no. 14308813
agtgcagtgtgaagtgcgtataatccatattctcatggcttccgttgcattcagaaacctaaattctaagcgcttccttttctctttgcatttcacaaatgctaattaccattcactctctcgtggaacttgcaccgtcatatcccaaaactgcaataatgcatttcctttggagctcgtttctctacggagatccttagccactttcgctcgaacaaagccccatcttaacgtgggcacaattgggcatgttgatcatgggaaaaccacactgactgctgcaattaccaaggtgctagctgaagaaggtaaagctaaggccattgcctttgaggacatagacaaggctcccgaggagaagaagagagggattactattgcgactgctcatgtagagtacgagacagcaaagaggcactatgcccatgttgattgcccaggacatgcagactatgttaagaacatgataactggagctgcacaaatggatggtggaattcttgtcgtttctgctcctgatgggccaatgcctcaaacaaaggaacatatactgcttgctcgtcaggttggtgtgccatcattggtctgctttctaaataaggttgatgctgttgatgatccagagttgcttgaacttgtggaaatggagcttcgtgaactgcttaatttctacaaatttcctggggatgatattccaattgtacgaggttctgctctggctgcattgcagggaactaatgaagaacttggaaagaaggctatcttaaaactaatggatgctgtggatgaatacatttcggatcctgtgcggcaacttgacaaacctttcttaatgccagtagaagatgttttctcaattcaggggcgtggaactgttgtgactggtcgtgttgaacaaggcaccatcaaagtaggtgaggaggttgaagtattgggactaacacagagtggacctttgaagactactgtaactggtgtggaaatgttcaagaaaattttggatcgaggggaagctggtgataatgtgggacttcttctacgtggtctgaagcgcgatgatgtacagagaggaatggtcgtgaccaagcctggtgcatttaaaacatataagaagtttgaagcagagatttatgttctctcaaaagatgaaggtggccgtcatactgcttttttctctaattataagccacagttttacttgaggactgcagatgttaccggaaaggtggaattaccggaaagtgttaagatggttatgcctggtgataatgtgactgctacttttgagctgatatcacctgttcctcttgaaataggacaaagatttgctttgagagagggaggcagaacagttggtgcaggagttgtttccaaagtgatggcctaggatgttggtctaaattctacaacatcttttgtaatttgtaaataagttgagtagggactgagagctatgttctaggaggattctatggtgtgactattttttgacacttggtgcgctggttccgtttcaatgtgttttgttttgtttattttagagaattatactagttcattatgtttttcgtggaccagagggaaaatggttcaaattttttggtttagttaataatgtcaatttcttc

SEQ ID NO: 6326 - protein, 461 aa, Glycine max
  peptide (1)..(461): Ceres Seq. ID no. 14308814
  misc_feature (73)..(269): Pfam Name: Pfam Description:  Elongation factor Tu GTP binding domain
  misc_feature (12)..(460): NCBI GI NO: 15236220 NR Description: elongation factor Tu (EF-Tu), putative
  misc_feature (61)..(460): NCBI GI NO: 1149571 NR Description: mitochondrial elongation factor Tu
  misc_feature (56)..(459): NCBI GI NO: 18001149 NR Description: translational elongation factor Tu [Oryza sativa]
  misc_feature (64)..(461): NCBI GI NO: 11181616 NR Description: translational elongation factor EF-TuM [Zea mays]
  misc_feature (57)..(460): NCBI GI NO: 22966137 NR Description: hypothetical protein [Rhodospirillum rubrum]
  misc_feature (67)..(460): NCBI GI NO: 23054529 NR Description: hypothetical protein [Geobacter metallireducens]
  misc_feature (67)..(459): NCBI GI NO: 23108387 NR Description: hypothetical protein
  misc_feature (69)..(460): NCBI GI NO: 22966124 NR Description: hypothetical protein [Rhodospirillum rubrum]
  misc_feature (69)..(460): NCBI GI NO: 22998293 NR Description: hypothetical protein [Magnetococcus sp. MC-1]
  misc_feature (61)..(460): NCBI GI NO: 459241 NR Description: chloroplast elongation factor TuB(EF-TuB)
VQCEVRIIHILMASVAFRNLNSKRFLFSLHFTNANYHSLSRGTCTVISQNCNNAFPLELVSLRRSLATFARTKPHLNVGTIGHVDHGKTTLTAAITKVLAEEGKAKAIAFEDIDKAPEEKKRGITIATAHVEYETAKRHYAHVDCPGHADYVKNMITGAAQMDGGILVVSAPDGPMPQTKEHILLARQVGVPSLVCFLNKVDAVDDPELLELVEMELRELLNFYKFPGDDIPIVRGSALAALQGTNEELGKKAILKLMDAVDEYISDPVRQLDKPFLMPVEDVFSIQGRGTVVTGRVEQGTIKVGEEVEVLGLTQSGPLKTTVTGVEMFKKILDRGEAGDNVGLLLRGLKRDDVQRGMVVTKPGAFKTYKKFEAEIYVLSKDEGGRHTAFFSNYKPQFYLRTADVTGKVELPESVKMVMPGDNVTATFELISPVPLEIGQRFALREGGRTVGAGVVSKVMA

SEQ ID NO: 6327 - protein, 450 aa, Glycine max
  peptide (1)..(450): Ceres Seq. ID no. 14308815
  misc_feature (62)..(258): Pfam Name: Pfam Description:  Elongation factor Tu GTP binding domain
  misc_feature (1)..(449): NCBI GI NO: 15236220 NR Description: elongation factor Tu (EF-Tu), putative
  misc_feature (50)..(449): NCBI GI NO: 1149571 NR Description: mitochondrial elongation factor Tu
  misc_feature (45)..(448): NCBI GI NO: 18001149 NR Description: translational elongation factor Tu [Oryza sativa]
  misc_feature (53)..(450): NCBI GI NO: 11181616 NR Description: translational elongation factor EF-TuM [Zea mays]
  misc_feature (46)..(449): NCBI GI NO: 22966137 NR Description: hypothetical protein [Rhodospirillum rubrum]
  misc_feature (56)..(449): NCBI GI NO: 23054529 NR Description: hypothetical protein [Geobacter metallireducens]
  misc_feature (56)..(448): NCBI GI NO: 23108387 NR Description: hypothetical protein
  misc_feature (58)..(449): NCBI GI NO: 22966124 NR Description: hypothetical protein [Rhodospirillum rubrum]
  misc_feature (58)..(449): NCBI GI NO: 22998293 NR Description: hypothetical protein [Magnetococcus sp. MC-1]
  misc_feature (50)..(449): NCBI GI NO: 459241 NR Description: chloroplast elongation factor TuB(EF-TuB)
MASVAFRNLNSKRFLFSLHFTNANYHSLSRGTCTVISQNCNNAFPLELVSLRRSLATFARTKPHLNVGTIGHVDHGKTTLTAAITKVLAEEGKAKAIAFEDIDKAPEEKKRGITIATAHVEYETAKRHYAHVDCPGHADYVKNMITGAAQMDGGILVVSAPDGPMPQTKEHILLARQVGVPSLVCFLNKVDAVDDPELLELVEMELRELLNFYKFPGDDIPIVRGSALAALQGTNEELGKKAILKLMDAVDEYISDPVRQLDKPFLMPVEDVFSIQGRGTVVTGRVEQGTIKVGEEVEVLGLTQSGPLKTTVTGVEMFKKILDRGEAGDNVGLLLRGLKRDDVQRGMVVTKPGAFKTYKKFEAEIYVLSKDEGGRHTAFFSNYKPQFYLRTADVTGKVELPESVKMVMPGDNVTATFELISPVPLEIGQRFALREGGRTVGAGVVSKVMA

SEQ ID NO: 6328 - protein, 307 aa, Glycine max
  peptide (1)..(307): Ceres Seq. ID no. 14308816
  misc_feature (1)..(115): Pfam Name: Pfam Description:  Elongation factor Tu GTP binding domain
  misc_feature (1)..(306): NCBI GI NO: 15236220 NR Description: elongation factor Tu (EF-Tu), putative
  misc_feature (1)..(306): NCBI GI NO: 1149571 NR Description: mitochondrial elongation factor Tu
  misc_feature (1)..(305): NCBI GI NO: 18001149 NR Description: translational elongation factor Tu [Oryza sativa]
  misc_feature (1)..(307): NCBI GI NO: 11181616 NR Description: translational elongation factor EF-TuM [Zea mays]
  misc_feature (1)..(306): NCBI GI NO: 22966137 NR Description: hypothetical protein [Rhodospirillum rubrum]
  misc_feature (1)..(306): NCBI GI NO: 23054529 NR Description: hypothetical protein [Geobacter metallireducens]
  misc_feature (1)..(305): NCBI GI NO: 23108387 NR Description: hypothetical protein
  misc_feature (1)..(306): NCBI GI NO: 22966124 NR Description: hypothetical protein [Rhodospirillum rubrum]
  misc_feature (1)..(306): NCBI GI NO: 22998293 NR Description: hypothetical protein [Magnetococcus sp. MC-1]
  misc_feature (1)..(306): NCBI GI NO: 459241 NR Description: chloroplast elongation factor TuB(EF-TuB)
MITGAAQMDGGILVVSAPDGPMPQTKEHILLARQVGVPSLVCFLNKVDAVDDPELLELVEMELRELLNFYKFPGDDIPIVRGSALAALQGTNEELGKKAILKLMDAVDEYISDPVRQLDKPFLMPVEDVFSIQGRGTVVTGRVEQGTIKVGEEVEVLGLTQSGPLKTTVTGVEMFKKILDRGEAGDNVGLLLRGLKRDDVQRGMVVTKPGAFKTYKKFEAEIYVLSKDEGGRHTAFFSNYKPQFYLRTADVTGKVELPESVKMVMPGDNVTATFELISPVPLEIGQRFALREGGRTVGAGVVSKVMA

SEQ ID NO: 6329 - DNA, 1772 bp, Glycine max
  misc_feature (1)..(1772): Ceres Seq. ID no. 15177814
aatgtaatgtaatgcagcaaagagggaaaggtaacaaccgtagatccaggagtttctcaaggtcccgtctcgctgttgaaggcacttagccacacacacacacccaccgctttcagctatggatgagcgtcacattcagaaatcttactggcttcagcattccgccgatctctccgtcgaggcaatgatgctcgattccaaagccgctcatctcgacaaagaagagagacccgaggtgctttccctattacctccattcgaaggcaagtccgttattgagcttggtgctggtattggtcgatttactggtgaattggctctgaaagctggtcaattgcttgctgtggacttcattgacactgctatcaagaagaatgaaaccatcaatggacaccacaaccatgtcaaattcttgtgtgctgatgtcacatctccaaatatgtcaaataacgtttctgaaggatccgttgacgtcgttttctcaaattggttacttatgtatctctcagatattgaggttgaaaaattagctgaaaggatggtcagatggttaaaagatggtggatatatattctttagagaatcttgtttccaccaatctggagattcaaagagaaaatacaaccctactcactacagggaacccagattttataccaaggtatttaaagagtgccatatgagtgataatactgggaattcctttgagctttctcttgtgggatgtaaatgcattggagcttatgttcgaaataagaagaatcaaaaccagatttgctggatatggcagaaagttaggtcacaagatgataggggtttccagcgcttcttggatagagttgaatacagccacaagagtattttacgatatgaacggatgtatggcccaggctttgtgagcactggtggacttgaaacgacaaaggagtttgtggcaaagctgggactaaagcctggtcagaaagttctggatgttggttgtggtgttgggggaggtgatttctacatggctgagaattttgatgttgaggttattggcattgacctctccataaacatgatttctcttgctattgaacgtgctattggactgaactacgctgttgaatttgattgtgcggattgctatagaaaaacatatcctgagaatacatttgatgtaatatacactcgggacaccatgctgcacgtcaaagataaaccaacattattcagatcattttacaagtggttgaagcctggaggaaaaattctaatcacagattactgcaaaagtgctggaagtccatctttagaatttgctgagtacataaaaaaaggaggatattatctccatgacattaaagcgtataggcagatgcttgaggatgcgggatttgatgatgtcattgccgaggatcgaactgatcagtttgtgaacacgctacagcaggagttaaatgcccttgagaacaagaaggacgattttattggtgacttcagcgaggaagactacaatgagattgtcgaaagatggaaggcaaagcagaccaggggtgcatctagagagcagatgtggggcttgttcattgccaagaaaaattgacatgctttattgctatcatatgccttgttctagctatatttaattcctgtgtggccggaatagttatctgtgtcttttatgttggtttaagattcatagctgctttcgaattagaatgacgatctgctgagaggagaatgctcttcgatttgaataacaatggtcacttgccattggcttccttgct

SEQ ID NO: 6330 - protein, 488 aa, Glycine max
  peptide (1)..(488): Ceres Seq. ID no. 15177815
  misc_feature (1)..(487): NCBI GI NO: 24212082 NR Description: Phosphoethanolamine N-methyltransferase
  misc_feature (2)..(488): NCBI GI NO: 30684743 NR Description: phosphoethanolamine N-methyltransferase, putative
  misc_feature (3)..(488): NCBI GI NO: 32478660 NR Description: phosphoethanolamine N-methyltransferase
  misc_feature (2)..(488): NCBI GI NO: 20260388 NR Description: unknown protein [Arabidopsis thaliana]
  misc_feature (2)..(488): NCBI GI NO: 9294501 NR Description: methyl transferase-like protein
  misc_feature (2)..(488): NCBI GI NO: 15219502 NR Description: phosphoethanolamine N-methyltransferase -related
  misc_feature (2)..(488): NCBI GI NO: 24212080 NR Description: Putative phosphoethanolamine N-methyltransferase 3
  misc_feature (12)..(487): NCBI GI NO: 15221909 NR Description: phosphoethanolamine N-methyltransferase -related
  misc_feature (1)..(487): NCBI GI NO: 28436074 NR Description: phosphoethanolamine N-methyltransferase
  misc_feature (116)..(487): NCBI GI NO: 39582205 NR Description: Hypothetical protein CBG08775
MDERHIQKSYWLQHSADLSVEAMMLDSKAAHLDKEERPEVLSLLPPFEGKSVIELGAGIGRFTGELALKAGQLLAVDFIDTAIKKNETINGHHNHVKFLCADVTSPNMSNNVSEGSVDVVFSNWLLMYLSDIEVEKLAERMVRWLKDGGYIFFRESCFHQSGDSKRKYNPTHYREPRFYTKVFKECHMSDNTGNSFELSLVGCKCIGAYVRNKKNQNQICWIWQKVRSQDDRGFQRFLDRVEYSHKSILRYERMYGPGFVSTGGLETTKEFVAKLGLKPGQKVLDVGCGVGGGDFYMAENFDVEVIGIDLSINMISLAIERAIGLNYAVEFDCADCYRKTYPENTFDVIYTRDTMLHVKDKPTLFRSFYKWLKPGGKILITDYCKSAGSPSLEFAEYIKKGGYYLHDIKAYRQMLEDAGFDDVIAEDRTDQFVNTLQQELNALENKKDDFIGDFSEEDYNEIVERWKAKQTRGASREQMWGLFIAKKN

SEQ ID NO: 6331 - protein, 466 aa, Glycine max
  peptide (1)..(466): Ceres Seq. ID no. 15177816
  misc_feature (1)..(465): NCBI GI NO: 24212082 NR Description: Phosphoethanolamine N-methyltransferase
  misc_feature (1)..(466): NCBI GI NO: 30684743 NR Description: phosphoethanolamine N-methyltransferase, putative
  misc_feature (1)..(466): NCBI GI NO: 32478660 NR Description: phosphoethanolamine N-methyltransferase
  misc_feature (1)..(466): NCBI GI NO: 20260388 NR Description: unknown protein [Arabidopsis thaliana]
  misc_feature (1)..(466): NCBI GI NO: 9294501 NR Description: methyl transferase-like protein
  misc_feature (1)..(466): NCBI GI NO: 15219502 NR Description: phosphoethanolamine N-methyltransferase -related
  misc_feature (1)..(466): NCBI GI NO: 24212080 NR Description: Putative phosphoethanolamine N-methyltransferase 3
  misc_feature (1)..(465): NCBI GI NO: 15221909 NR Description: phosphoethanolamine N-methyltransferase -related
  misc_feature (1)..(465): NCBI GI NO: 28436074 NR Description: phosphoethanolamine N-methyltransferase
  misc_feature (94)..(465): NCBI GI NO: 39582205 NR Description: Hypothetical protein CBG08775
MMLDSKAAHLDKEERPEVLSLLPPFEGKSVIELGAGIGRFTGELALKAGQLLAVDFIDTAIKKNETINGHHNHVKFLCADVTSPNMSNNVSEGSVDVVFSNWLLMYLSDIEVEKLAERMVRWLKDGGYIFFRESCFHQSGDSKRKYNPTHYREPRFYTKVFKECHMSDNTGNSFELSLVGCKCIGAYVRNKKNQNQICWIWQKVRSQDDRGFQRFLDRVEYSHKSILRYERMYGPGFVSTGGLETTKEFVAKLGLKPGQKVLDVGCGVGGGDFYMAENFDVEVIGIDLSINMISLAIERAIGLNYAVEFDCADCYRKTYPENTFDVIYTRDTMLHVKDKPTLFRSFYKWLKPGGKILITDYCKSAGSPSLEFAEYIKKGGYYLHDIKAYRQMLEDAGFDDVIAEDRTDQFVNTLQQELNALENKKDDFIGDFSEEDYNEIVERWKAKQTRGASREQMWGLFIAKKN

SEQ ID NO: 6332 - protein, 465 aa, Glycine max
  peptide (1)..(465): Ceres Seq. ID no. 15177817
  misc_feature (1)..(464): NCBI GI NO: 24212082 NR Description: Phosphoethanolamine N-methyltransferase
  misc_feature (1)..(465): NCBI GI NO: 30684743 NR Description: phosphoethanolamine N-methyltransferase, putative
  misc_feature (1)..(465): NCBI GI NO: 32478660 NR Description: phosphoethanolamine N-methyltransferase
  misc_feature (1)..(465): NCBI GI NO: 20260388 NR Description: unknown protein [Arabidopsis thaliana]
  misc_feature (1)..(465): NCBI GI NO: 9294501 NR Description: methyl transferase-like protein
  misc_feature (1)..(465): NCBI GI NO: 15219502 NR Description: phosphoethanolamine N-methyltransferase -related
  misc_feature (1)..(465): NCBI GI NO: 24212080 NR Description: Putative phosphoethanolamine N-methyltransferase 3
  misc_feature (1)..(464): NCBI GI NO: 15221909 NR Description: phosphoethanolamine N-methyltransferase -related
  misc_feature (1)..(464): NCBI GI NO: 28436074 NR Description: phosphoethanolamine N-methyltransferase
  misc_feature (93)..(464): NCBI GI NO: 39582205 NR Description: Hypothetical protein CBG08775
MLDSKAAHLDKEERPEVLSLLPPFEGKSVIELGAGIGRFTGELALKAGQLLAVDFIDTAIKKNETINGHHNHVKFLCADVTSPNMSNNVSEGSVDVVFSNWLLMYLSDIEVEKLAERMVRWLKDGGYIFFRESCFHQSGDSKRKYNPTHYREPRFYTKVFKECHMSDNTGNSFELSLVGCKCIGAYVRNKKNQNQICWIWQKVRSQDDRGFQRFLDRVEYSHKSILRYERMYGPGFVSTGGLETTKEFVAKLGLKPGQKVLDVGCGVGGGDFYMAENFDVEVIGIDLSINMISLAIERAIGLNYAVEFDCADCYRKTYPENTFDVIYTRDTMLHVKDKPTLFRSFYKWLKPGGKILITDYCKSAGSPSLEFAEYIKKGGYYLHDIKAYRQMLEDAGFDDVIAEDRTDQFVNTLQQELNALENKKDDFIGDFSEEDYNEIVERWKAKQTRGASREQMWGLFIAKKN

SEQ ID NO: 6333 - DNA, 1107 bp, Glycine max
  misc_feature (1)..(1107): Ceres Seq. ID no. 14312769
tctagattcacaagtactatcaaagcatatgaagaataaatcatcgtgcgattttatggttccttctaatcataactactctgttaggctgagtccaatatgttgtaagctatcagaaagtgggattgaggagaaccacacgagcacgagcacgggcgagaggccctctaagatcaaggacaggatggaggagtacaatatagctatgaagaaaatgatgaggaacccttatgagtatcaccatgatctgggtatgaattatactcttataacggacaatttgattgttggctcccaaccacagaaacctgaagacatagatcacctcaaaaaggaagagggtgtggcatacattttaaacttgcaacaagataacgatgttgagtattggggagtagacttgcagtcaataataagaaggtctcgtgaacttgaaattagccacacaaggagaccggcaaaagactttgatccagattccttgcaaaatgaactacctaaagcagtctcatccttagaatgggcaatttctgagggaaaaggaagagtttatgtgcattgtacggctggacttggaagagctccagcggtggcaattgcttatttgttctggttttgtgacatgaatctaaatgaagcatatgatatgctaacttcaaagagaccttgtggaccaaataaaagagcaatacgtggcgctacttatgatttggctaagaatgatccttggaaggagccatttgagactcttccagaatatgcatttgaggatatagcagattgggaaaggaacttgattcaagatcgtgcccgctcccttcgtggaatttgacaacttcggtttctacttatctgagattcctacataggttgccacccttgctgggatggtatcaggtgccatgatactgctcaagttggagatattttttcaagcatattcatactgatatgggcacatagcttacaacgtgtacgaaatattcagtatagtacagactatagagtggtaaataatcaattttgcgaataatgcaccataattgtagacgtcctaataatatctgagagtgcaaaatgcctagttgatctattggtctgtcaaag

SEQ ID NO: 6334 - protein, 276 aa, Glycine max
  peptide (1)..(276): Ceres Seq. ID no. 14312770
  misc_feature (86)..(222): Pfam Name: Pfam Description:  Dual specificity phosphatase, catalytic domain
  misc_feature (10)..(275): NCBI GI NO: 21592631 NR Description: unknown [Arabidopsis thaliana]
  misc_feature (10)..(275): NCBI GI NO: 18399058 NR Description: expressed protein [Arabidopsis thaliana]
  misc_feature (48)..(258): NCBI GI NO: 18409505 NR Description: expressed protein [Arabidopsis thaliana]
  misc_feature (48)..(258): NCBI GI NO: 16612246 NR Description: AT3g52180/F4F15_290 [Arabidopsis thaliana]
  misc_feature (48)..(237): NCBI GI NO: 11288831 NR Description: hypothetical protein F4F15
  misc_feature (48)..(258): NCBI GI NO: 21536905 NR Description: unknown [Arabidopsis thaliana]
  misc_feature (57)..(237): NCBI GI NO: 14970762 NR Description: protein tyrosine phosphatase
  misc_feature (62)..(237): NCBI GI NO: 18395843 NR Description: expressed protein [Arabidopsis thaliana]
  misc_feature (62)..(237): NCBI GI NO: 21592520 NR Description: unknown [Arabidopsis thaliana]
  misc_feature (62)..(237): NCBI GI NO: 6016710 NR Description: unknown protein [Arabidopsis thaliana]
LDSQVLSKHMKNKSSCDFMVPSNHNYSVRLSPICCKLSESGIEENHTSTSTGERPSKIKDRMEEYNIAMKKMMRNPYEYHHDLGMNYTLITDNLIVGSQPQKPEDIDHLKKEEGVAYILNLQQDNDVEYWGVDLQSIIRRSRELEISHTRRPAKDFDPDSLQNELPKAVSSLEWAISEGKGRVYVHCTAGLGRAPAVAIAYLFWFCDMNLNEAYDMLTSKRPCGPNKRAIRGATYDLAKNDPWKEPFETLPEYAFEDIADWERNLIQDRARSLRGI

SEQ ID NO: 6335 - protein, 267 aa, Glycine max
  peptide (1)..(267): Ceres Seq. ID no. 14312771
  misc_feature (77)..(213): Pfam Name: Pfam Description:  Dual specificity phosphatase, catalytic domain
  misc_feature (1)..(266): NCBI GI NO: 21592631 NR Description: unknown [Arabidopsis thaliana]
  misc_feature (1)..(266): NCBI GI NO: 18399058 NR Description: expressed protein [Arabidopsis thaliana]
  misc_feature (39)..(249): NCBI GI NO: 18409505 NR Description: expressed protein [Arabidopsis thaliana]
  misc_feature (39)..(249): NCBI GI NO: 16612246 NR Description: AT3g52180/F4F15_290 [Arabidopsis thaliana]
  misc_feature (39)..(228): NCBI GI NO: 11288831 NR Description: hypothetical protein F4F15
  misc_feature (39)..(249): NCBI GI NO: 21536905 NR Description: unknown [Arabidopsis thaliana]
  misc_feature (48)..(228): NCBI GI NO: 14970762 NR Description: protein tyrosine phosphatase
  misc_feature (53)..(228): NCBI GI NO: 18395843 NR Description: expressed protein [Arabidopsis thaliana]
  misc_feature (53)..(228): NCBI GI NO: 21592520 NR Description: unknown [Arabidopsis thaliana]
  misc_feature (53)..(228): NCBI GI NO: 6016710 NR Description: unknown protein [Arabidopsis thaliana]
MKNKSSCDFMVPSNHNYSVRLSPICCKLSESGIEENHTSTSTGERPSKIKDRMEEYNIAMKKMMRNPYEYHHDLGMNYTLITDNLIVGSQPQKPEDIDHLKKEEGVAYILNLQQDNDVEYWGVDLQSIIRRSRELEISHTRRPAKDFDPDSLQNELPKAVSSLEWAISEGKGRVYVHCTAGLGRAPAVAIAYLFWFCDMNLNEAYDMLTSKRPCGPNKRAIRGATYDLAKNDPWKEPFETLPEYAFEDIADWERNLIQDRARSLRGI

SEQ ID NO: 6336 - protein, 258 aa, Glycine max
  peptide (1)..(258): Ceres Seq. ID no. 14312772
  misc_feature (68)..(204): Pfam Name: Pfam Description:  Dual specificity phosphatase, catalytic domain
  misc_feature (1)..(257): NCBI GI NO: 21592631 NR Description: unknown [Arabidopsis thaliana]
  misc_feature (1)..(257): NCBI GI NO: 18399058 NR Description: expressed protein [Arabidopsis thaliana]
  misc_feature (30)..(240): NCBI GI NO: 18409505 NR Description: expressed protein [Arabidopsis thaliana]
  misc_feature (30)..(240): NCBI GI NO: 16612246 NR Description: AT3g52180/F4F15_290 [Arabidopsis thaliana]
  misc_feature (30)..(219): NCBI GI NO: 11288831 NR Description: hypothetical protein F4F15
  misc_feature (30)..(240): NCBI GI NO: 21536905 NR Description: unknown [Arabidopsis thaliana]
  misc_feature (39)..(219): NCBI GI NO: 14970762 NR Description: protein tyrosine phosphatase
  misc_feature (44)..(219): NCBI GI NO: 18395843 NR Description: expressed protein [Arabidopsis thaliana]
  misc_feature (44)..(219): NCBI GI NO: 21592520 NR Description: unknown [Arabidopsis thaliana]
  misc_feature (44)..(219): NCBI GI NO: 6016710 NR Description: unknown protein [Arabidopsis thaliana]
MVPSNHNYSVRLSPICCKLSESGIEENHTSTSTGERPSKIKDRMEEYNIAMKKMMRNPYEYHHDLGMNYTLITDNLIVGSQPQKPEDIDHLKKEEGVAYILNLQQDNDVEYWGVDLQSIIRRSRELEISHTRRPAKDFDPDSLQNELPKAVSSLEWAISEGKGRVYVHCTAGLGRAPAVAIAYLFWFCDMNLNEAYDMLTSKRPCGPNKRAIRGATYDLAKNDPWKEPFETLPEYAFEDIADWERNLIQDRARSLRGI

SEQ ID NO: 6337 - DNA, 1522 bp, Glycine max
  misc_feature (1)..(1522): Ceres Seq. ID no. 15169061
atagagaaccaaaacgcgacgcaattgcactttttcttcttctttcgcagctcagaatcgctcaaacaatgacagaggatagcagcgttagggtttcttcttccgacaaaacctccgcggccaacgatgcttcgcagacgcggcagagaaagaagagaaagtgggatcaaccggcggagtcattgatgccagttgggatggcagttcctggagcactccctttgagcaatgccgtgtctcttggaggggttgcatttcctgccatggctccgatgatctccggagctcttttgaggaatcctctggcagcttcttctcagcttccgcaacacacagttgcagctgctgttgccgcacaaaaattgaatcaacaaaagatccaagatgaattaataattgctcgagaaattgtcataaatgatgcagagtcttctgttcgctacaagttgacaaaacgccagacacaagaggagatccagaggtgcactggtgccatagttataactagggggaagtatcggctacctaatgcgccacatgatggagggaagccgctgtatcttcacatctctgcaggagctcatataaaagagacagcagaacggattttagctgttgatcgtgctgctgcaatgattgaagaaatgctcaaacaggagcaaaattcacagtcaatttcttccgcctcaccttctgctttggttaatatactgaagatgctgagtacatgcgtgtttttgggctttgatgctgatccttctttgaacattgttgctcgtatacgtggaccaaatgtaagcccttccctacccaattgatttatctagtcactcttggaggttgggttcatctatgacctgatgtggtttagtctgccacattttattagacaattgccacagtctagaagttttttttggtctcttttgattgtgatgtgaccccttggtcatctgctgtttttgttttcatactattctagtctttcactcactaggattacctgtgtctttgttctcaacttatgatttgatggtgcgaaaatacttgggtgttactaggagtactgattttccaagagttgattaagcaataaaagggaggactggggagactggaagagtgttgttacagtttatggttacatgagaaatactaggaacacactcttttaaacacaccctcttttatttgttgaaatttattgaaaatgactaaattttgtgtgtctcacatcatatttaatgattctctctcttgattttgtagtttcaataatttttaaccaattagagagtgtgtttctagcacttctcatgtttacatatggcattgtaatacttgttaggtgctgaaagtgatattcagatggatggaattggaaaatggttcttctgatgacttttgaagcacattttgtatgtgaatactttaatccaagagactggggtgaaagtatgtccacacatacactcaatcacaagtcacaagaacaaatgatgcttatcaaatatttctttac

SEQ ID NO: 6338 - protein, 271 aa, Glycine max
  peptide (1)..(271): Ceres Seq. ID no. 15169062
  misc_feature (111)..(264): NCBI GI NO: 11994521 NR Description: gene_id:MUO10.12~unknown protein
  misc_feature (50)..(216): NCBI GI NO: 20072609 NR Description: Similar to KIAA0907 protein [Homo sapiens]
  misc_feature (50)..(216): NCBI GI NO: 31281052 NR Description: BLOM7 gamma [Homo sapiens]
  misc_feature (50)..(216): NCBI GI NO: 26350189 NR Description: unnamed protein product [Mus musculus]
  misc_feature (50)..(216): NCBI GI NO: 40788982 NR Description: KIAA0907 protein [Homo sapiens]
  misc_feature (50)..(216): NCBI GI NO: 7662372 NR Description: KIAA0907 protein [Homo sapiens]
  misc_feature (50)..(216): NCBI GI NO: 31281048 NR Description: BLOM7 alpha [Homo sapiens]
  misc_feature (50)..(216): NCBI GI NO: 13879294 NR Description: RIKEN cDNA 2810403A07 [Mus musculus]
  misc_feature (50)..(216): NCBI GI NO: 21362269 NR Description: RIKEN cDNA 2810403A07 [Mus musculus]
  misc_feature (50)..(236): NCBI GI NO: 28277613 NR Description: Similar to KIAA0907 protein [Danio rerio]
REPKRDAIALFLLLSQLRIAQTMTEDSSVRVSSSDKTSAANDASQTRQRKKRKWDQPAESLMPVGMAVPGALPLSNAVSLGGVAFPAMAPMISGALLRNPLAASSQLPQHTVAAAVAAQKLNQQKIQDELIIAREIVINDAESSVRYKLTKRQTQEEIQRCTGAIVITRGKYRLPNAPHDGGKPLYLHISAGAHIKETAERILAVDRAAAMIEEMLKQEQNSQSISSASPSALVNILKMLSTCVFLGFDADPSLNIVARIRGPNVSPSLPN

SEQ ID NO: 6339 - protein, 249 aa, Glycine max
  peptide (1)..(249): Ceres Seq. ID no. 15169063
  misc_feature (89)..(242): NCBI GI NO: 11994521 NR Description: gene_id:MUO10.12~unknown protein
  misc_feature (28)..(194): NCBI GI NO: 20072609 NR Description: Similar to KIAA0907 protein [Homo sapiens]
  misc_feature (28)..(194): NCBI GI NO: 31281052 NR Description: BLOM7 gamma [Homo sapiens]
  misc_feature (28)..(194): NCBI GI NO: 26350189 NR Description: unnamed protein product [Mus musculus]
  misc_feature (28)..(194): NCBI GI NO: 40788982 NR Description: KIAA0907 protein [Homo sapiens]
  misc_feature (28)..(194): NCBI GI NO: 7662372 NR Description: KIAA0907 protein [Homo sapiens]
  misc_feature (28)..(194): NCBI GI NO: 31281048 NR Description: BLOM7 alpha [Homo sapiens]
  misc_feature (28)..(194): NCBI GI NO: 13879294 NR Description: RIKEN cDNA 2810403A07 [Mus musculus]
  misc_feature (28)..(194): NCBI GI NO: 21362269 NR Description: RIKEN cDNA 2810403A07 [Mus musculus]
  misc_feature (28)..(214): NCBI GI NO: 28277613 NR Description: Similar to KIAA0907 protein [Danio rerio]
MTEDSSVRVSSSDKTSAANDASQTRQRKKRKWDQPAESLMPVGMAVPGALPLSNAVSLGGVAFPAMAPMISGALLRNPLAASSQLPQHTVAAAVAAQKLNQQKIQDELIIAREIVINDAESSVRYKLTKRQTQEEIQRCTGAIVITRGKYRLPNAPHDGGKPLYLHISAGAHIKETAERILAVDRAAAMIEEMLKQEQNSQSISSASPSALVNILKMLSTCVFLGFDADPSLNIVARIRGPNVSPSLPN

SEQ ID NO: 6340 - protein, 210 aa, Glycine max
  peptide (1)..(210): Ceres Seq. ID no. 15169064
  misc_feature (50)..(203): NCBI GI NO: 11994521 NR Description: gene_id:MUO10.12~unknown protein
  misc_feature (1)..(155): NCBI GI NO: 20072609 NR Description: Similar to KIAA0907 protein [Homo sapiens]
  misc_feature (1)..(155): NCBI GI NO: 31281052 NR Description: BLOM7 gamma [Homo sapiens]
  misc_feature (1)..(155): NCBI GI NO: 26350189 NR Description: unnamed protein product [Mus musculus]
  misc_feature (1)..(155): NCBI GI NO: 40788982 NR Description: KIAA0907 protein [Homo sapiens]
  misc_feature (1)..(155): NCBI GI NO: 7662372 NR Description: KIAA0907 protein [Homo sapiens]
  misc_feature (1)..(155): NCBI GI NO: 31281048 NR Description: BLOM7 alpha [Homo sapiens]
  misc_feature (1)..(155): NCBI GI NO: 13879294 NR Description: RIKEN cDNA 2810403A07 [Mus musculus]
  misc_feature (1)..(155): NCBI GI NO: 21362269 NR Description: RIKEN cDNA 2810403A07 [Mus musculus]
  misc_feature (1)..(175): NCBI GI NO: 28277613 NR Description: Similar to KIAA0907 protein [Danio rerio]
MPVGMAVPGALPLSNAVSLGGVAFPAMAPMISGALLRNPLAASSQLPQHTVAAAVAAQKLNQQKIQDELIIAREIVINDAESSVRYKLTKRQTQEEIQRCTGAIVITRGKYRLPNAPHDGGKPLYLHISAGAHIKETAERILAVDRAAAMIEEMLKQEQNSQSISSASPSALVNILKMLSTCVFLGFDADPSLNIVARIRGPNVSPSLPN

SEQ ID NO: 6341 - DNA, 1494 bp, Glycine max
  misc_feature (1)..(1494): Ceres Seq. ID no. 14313336
attagaatcttggaatatactaatagacatgaatatttttataaatattaatagtagattatataacaacttgaaatttattgcagagatctaaattgtggtaattttaaggtaaccgaaaatgcacacttggtttctcaaaaacaattctctgatttctctctttctgtatctctatcatctctctttcttttcaattatacattttatttctgagtagctacatctaccttgttgcagaacttctaggtctgaaaacaggttatttcagtttaagacaaattaaagctgctactaataactttgacccagcaaataagataggtgaaggaggctttggaccagtattcaagggtgtactatcagatggtgctgtgattgctgttaagcagctctcctccaaatcaaagcaagggaatcgtgaattcatcaatgaaataggcatgatatctgctttgcagcatccaaaccttgtgaaactttatggctgctgcattgaaggaaaccagctgctgctagtatatcagtacatggagaacaatagtcttgctcgtgcactttttggtaaagaacatgagaggatgcaattggactggcccagaagaatgcaaatttgtctgggtatagcaaagggcttagcttatcttcataaggaatcaaggttgaaaatagtgcacagggatattaaggcaaccaatgtcttacttgataaacatctgcatgccaagatctctgactttggtttagccaaacttgatgaagaagagaatactcatatcagcacaagaatagctgggacaattggttacatggctcctgagtatgctatgaggggttacttgactgacaaagcagatgtctatagctttggaattgtagctttagagattgttagtggaaagagcaacacaaattataggccaaaggaggagtttgtatatcttttagattgggcctatgttctccaagagcaaggaaaccttctggagctggtggatccaagtcttggttcaaagtactcctcagaagaggccatgagaatgctgctgttagcactcttgtgcaccaacccttctcccactcttagaccatgtatgtcatcagtagtgagcatgcttgagggaaaaactccaattcaagcaccaataattaaacgcggtgacagtgcagaagatgtaagatttaaagcctttgagatgctatcacaagacagtcaaactcatgtctcttctgcattctcagaagaaagtatagagcaaagaagcaaatcaatggggggaccatggcttgactcctccatatcacttccaagtagaattgattaggcttcaaccgatcaacttattagatattccaattatgtgtgatttgcaagtcggggaagttaactcattaaattttaattcatagttgcttgctatatgtatggtggtttaaaggctattaatggaggtttccaacaaaaggggtaatttcatttggaattttattaag

SEQ ID NO: 6342 - protein, 293 aa, Glycine max
  peptide (1)..(293): Ceres Seq. ID no. 14313337
  misc_feature (1)..(291): NCBI GI NO: 15220790 NR Description: receptor-related serine/threonine kinase
  misc_feature (1)..(291): NCBI GI NO: 25405630 NR Description: hypothetical protein T3F20.24
  misc_feature (1)..(291): NCBI GI NO: 15220789 NR Description: receptor-related serine/threonine kinase
  misc_feature (1)..(291): NCBI GI NO: 25405628 NR Description: hypothetical protein T3F20.25
  misc_feature (1)..(266): NCBI GI NO: 15222473 NR Description: leucine-rich repeat transmembrane protein kinase
  misc_feature (1)..(266): NCBI GI NO: 25406989 NR Description: hypothetical protein
  misc_feature (1)..(293): NCBI GI NO: 11994595 NR Description: receptor-like serine/threonine kinase
  misc_feature (1)..(293): NCBI GI NO: 15231938 NR Description: receptor-related serine/threonine kinase
  misc_feature (1)..(269): NCBI GI NO: 15220901 NR Description: leucine-rich repeat transmembrane protein kinase
  misc_feature (1)..(269): NCBI GI NO: 25405986 NR Description: protein F12M16.30
MISALQHPNLVKLYGCCIEGNQLLLVYQYMENNSLARALFGKEHERMQLDWPRRMQICLGIAKGLAYLHKESRLKIVHRDIKATNVLLDKHLHAKISDFGLAKLDEEENTHISTRIAGTIGYMAPEYAMRGYLTDKADVYSFGIVALEIVSGKSNTNYRPKEEFVYLLDWAYVLQEQGNLLELVDPSLGSKYSSEEAMRMLLLALLCTNPSPTLRPCMSSVVSMLEGKTPIQAPIIKRGDSAEDVRFKAFEMLSQDSQTHVSSAFSEESIEQRSKSMGGPWLDSSISLPSRID

SEQ ID NO: 6343 - protein, 264 aa, Glycine max
  peptide (1)..(264): Ceres Seq. ID no. 14313338
  misc_feature (1)..(262): NCBI GI NO: 15220790 NR Description: receptor-related serine/threonine kinase
  misc_feature (1)..(262): NCBI GI NO: 25405630 NR Description: hypothetical protein T3F20.24
  misc_feature (1)..(262): NCBI GI NO: 15220789 NR Description: receptor-related serine/threonine kinase
  misc_feature (1)..(262): NCBI GI NO: 25405628 NR Description: hypothetical protein T3F20.25
  misc_feature (1)..(237): NCBI GI NO: 15222473 NR Description: leucine-rich repeat transmembrane protein kinase
  misc_feature (1)..(237): NCBI GI NO: 25406989 NR Description: hypothetical protein
  misc_feature (1)..(264): NCBI GI NO: 11994595 NR Description: receptor-like serine/threonine kinase
  misc_feature (1)..(264): NCBI GI NO: 15231938 NR Description: receptor-related serine/threonine kinase
  misc_feature (1)..(240): NCBI GI NO: 15220901 NR Description: leucine-rich repeat transmembrane protein kinase
  misc_feature (1)..(240): NCBI GI NO: 25405986 NR Description: protein F12M16.30
MENNSLARALFGKEHERMQLDWPRRMQICLGIAKGLAYLHKESRLKIVHRDIKATNVLLDKHLHAKISDFGLAKLDEEENTHISTRIAGTIGYMAPEYAMRGYLTDKADVYSFGIVALEIVSGKSNTNYRPKEEFVYLLDWAYVLQEQGNLLELVDPSLGSKYSSEEAMRMLLLALLCTNPSPTLRPCMSSVVSMLEGKTPIQAPIIKRGDSAEDVRFKAFEMLSQDSQTHVSSAFSEESIEQRSKSMGGPWLDSSISLPSRID

SEQ ID NO: 6344 - protein, 247 aa, Glycine max
  peptide (1)..(247): Ceres Seq. ID no. 14313339
  misc_feature (1)..(245): NCBI GI NO: 15220790 NR Description: receptor-related serine/threonine kinase
  misc_feature (1)..(245): NCBI GI NO: 25405630 NR Description: hypothetical protein T3F20.24
  misc_feature (1)..(245): NCBI GI NO: 15220789 NR Description: receptor-related serine/threonine kinase
  misc_feature (1)..(245): NCBI GI NO: 25405628 NR Description: hypothetical protein T3F20.25
  misc_feature (1)..(220): NCBI GI NO: 15222473 NR Description: leucine-rich repeat transmembrane protein kinase
  misc_feature (1)..(220): NCBI GI NO: 25406989 NR Description: hypothetical protein
  misc_feature (1)..(247): NCBI GI NO: 11994595 NR Description: receptor-like serine/threonine kinase
  misc_feature (1)..(247): NCBI GI NO: 15231938 NR Description: receptor-related serine/threonine kinase
  misc_feature (1)..(223): NCBI GI NO: 15220901 NR Description: leucine-rich repeat transmembrane protein kinase
  misc_feature (1)..(223): NCBI GI NO: 25405986 NR Description: protein F12M16.30
MQLDWPRRMQICLGIAKGLAYLHKESRLKIVHRDIKATNVLLDKHLHAKISDFGLAKLDEEENTHISTRIAGTIGYMAPEYAMRGYLTDKADVYSFGIVALEIVSGKSNTNYRPKEEFVYLLDWAYVLQEQGNLLELVDPSLGSKYSSEEAMRMLLLALLCTNPSPTLRPCMSSVVSMLEGKTPIQAPIIKRGDSAEDVRFKAFEMLSQDSQTHVSSAFSEESIEQRSKSMGGPWLDSSISLPSRID

SEQ ID NO: 6345 - DNA, 535 bp, Glycine max
  misc_feature (1)..(535): Ceres Seq. ID no. 13594104
  misc_feature (21)..(21): n is a, c, t, g, unknown, or other
  misc_feature (22)..(22): n is a, c, t, g, unknown, or other
  misc_feature (20)..(20): n is a, c, t, g, unknown, or other
ggcatcatcacagacatggnnntctctgcctctgcaattcagcgggctcaagtgctccccactctcatcttcttctctcttctttaaaccttctctttggacccaacaatcccaaaagcgcgtttcaattaccattgcgaactcaatagcaatagccaatgcgcagaacaaagagagagcgaggcttaagaaactcttcgaagaagcctacgagagatgccgcaatgctccaatggaaggtgtctccttcaccatcgaagacttcactgctgctcttgacaagtacgacttcgattctgaagttggcggcaagattaaaggcactgtgttctacacagataacaatggagcagttgttgatatcactgcaaagtcttcggcatatttgccactgcaagaggcgtgcatccacagggttaagcatgttgaagaagcaggcttagttcctgggttcaaagaggagtttttgatcattggtgagaactcaatagatgatagcttggtcttgagtttaaggtctcttcagtttgacctt

SEQ ID NO: 6346 - protein, 178 aa, Glycine max
  peptide (1)..(178): Ceres Seq. ID no. 13594105
  misc_feature (98)..(172): Pfam Name: Pfam Description:  S1 RNA binding domain
  misc_feature (8)..(177): NCBI GI NO: 30692346 NR Description: ribosomal protein S1 [Arabidopsis thaliana]
  misc_feature (8)..(177): NCBI GI NO: 133872 NR Description: 30S ribosomal protein S1, chloroplast precursor
  misc_feature (81)..(176): NCBI GI NO: 16330162 NR Description: 30S ribosomal protein S1
  misc_feature (67)..(176): NCBI GI NO: 33863935 NR Description: 30S ribosomal protein S1, homolog A
  misc_feature (74)..(176): NCBI GI NO: 1173225 NR Description: 30S ribosomal protein S1
  misc_feature (72)..(176): NCBI GI NO: 33866517 NR Description: 30S ribosomal protein S1, homolog A
  misc_feature (77)..(176): NCBI GI NO: 23040654 NR Description: hypothetical protein
  misc_feature (74)..(176): NCBI GI NO: 33860870 NR Description: 30S ribosomal protein S1, homolog A
  misc_feature (74)..(176): NCBI GI NO: 17227632 NR Description: 30S ribosomal protein S1 [Nostoc sp. PCC 7120]
  misc_feature (74)..(176): NCBI GI NO: 23128852 NR Description: hypothetical protein [Nostoc punctiforme]
  misc_feature (7)..(7): Xaa is any aa, unknown or other
ASSQTWXSLPLQFSGLKCSPLSSSSLFFKPSLWTQQSQKRVSITIANSIAIANAQNKERARLKKLFEEAYERCRNAPMEGVSFTIEDFTAALDKYDFDSEVGGKIKGTVFYTDNNGAVVDITAKSSAYLPLQEACIHRVKHVEEAGLVPGFKEEFLIIGENSIDDSLVLSLRSLQFDL

SEQ ID NO: 6347 - protein, 101 aa, Glycine max
  peptide (1)..(101): Ceres Seq. ID no. 13594106
  misc_feature (21)..(95): Pfam Name: Pfam Description:  S1 RNA binding domain
  misc_feature (1)..(100): NCBI GI NO: 30692346 NR Description: ribosomal protein S1 [Arabidopsis thaliana]
  misc_feature (1)..(100): NCBI GI NO: 133872 NR Description: 30S ribosomal protein S1, chloroplast precursor
  misc_feature (4)..(99): NCBI GI NO: 16330162 NR Description: 30S ribosomal protein S1
  misc_feature (1)..(99): NCBI GI NO: 33863935 NR Description: 30S ribosomal protein S1, homolog A
  misc_feature (1)..(99): NCBI GI NO: 1173225 NR Description: 30S ribosomal protein S1
  misc_feature (1)..(99): NCBI GI NO: 33866517 NR Description: 30S ribosomal protein S1, homolog A
  misc_feature (1)..(99): NCBI GI NO: 23040654 NR Description: hypothetical protein
  misc_feature (1)..(99): NCBI GI NO: 33860870 NR Description: 30S ribosomal protein S1, homolog A
  misc_feature (1)..(99): NCBI GI NO: 17227632 NR Description: 30S ribosomal protein S1 [Nostoc sp. PCC 7120]
  misc_feature (1)..(99): NCBI GI NO: 23128852 NR Description: hypothetical protein [Nostoc punctiforme]
MEGVSFTIEDFTAALDKYDFDSEVGGKIKGTVFYTDNNGAVVDITAKSSAYLPLQEACIHRVKHVEEAGLVPGFKEEFLIIGENSIDDSLVLSLRSLQFDL

SEQ ID NO: 6348 - protein, 94 aa, Glycine max
  peptide (1)..(94): Ceres Seq. ID no. 13594107
MRRTKRERGLRNSSKKPTRDAAMLQWKVSPSPSKTSLLLLTSTTSILKLAARLKALCSTQITMEQLLISLQSLRHICHCKRRASTGLSMLKKQA

SEQ ID NO: 6349 - DNA, 824 bp, Glycine max
  misc_feature (1)..(824): Ceres Seq. ID no. 12467471
atcagcaaatcctcttcagtttctgcatctctaatacttcaactcactgtattatcttgagtaattttgcagagaagtaaaatatgagcaggccaggagactggaattgcaggtcgtgccagcacctgaactttcagaggagagactcatgccagcgatgtggggactcaaaatatggagatagagttgttgattttggtggttttggaggaagaggagggtcctcatttggtttaactggctcagatgttcgccccggcgactggtactgtgctgctgctaactgtggtgcacacaactttgctagccgctcaagctgcttcaagtgtggtgctttcaaggatgacttggctggaggaggctataacagttctgacatcttgcgctccagagcttttggtggcagtggaagacctggatggaaatctggtgattggatatgcagcagatcaggatgcaatgagcacaactttgctagcagaatggaatgttttaaatgcagtgctcccagggacacgtactagaaaaaatgagtttatcctagcaagaaaggctacattaattaatggagatgctgcaagatttctttattaatttctttgggatgttgaagacagtgtgaattctgaaaaggtggtttaaaatcccatgttacagagaagctagccagctgcatcccttagggtctttctcagatttacctcaagagctacaacaatgttgttttggtgctttaaactactttctttagttttggcgttagagagttcatttattgtatggtgcgtggttttcttaaatgaatatgaatctcttttcttgtc

SEQ ID NO: 6350 - protein, 146 aa, Glycine max
  peptide (1)..(146): Ceres Seq. ID no. 12467472
  misc_feature (114)..(144): Pfam Name: Pfam Description:  Zn-finger in Ran binding protein and others
  misc_feature (1)..(144): NCBI GI NO: 15232662 NR Description: putative zinc finger protein; protein id:At3g15680
  misc_feature (1)..(144): NCBI GI NO: 21595771 NR Description: putative zinc finger protein
  misc_feature (3)..(145): NCBI GI NO: 28849863 NR Description: zinc finger transcription factor ZFP30
  misc_feature (1)..(144): NCBI GI NO: 5803246 NR Description: ESTs AU077984
  misc_feature (1)..(144): NCBI GI NO: 5679336 NR Description: putative zinc finger protein [Oryza sativa]
  misc_feature (5)..(144): NCBI GI NO: 15225776 NR Description: putative second messenger-dependent protein kinase
  misc_feature (1)..(116): NCBI GI NO: 15239445 NR Description: putative protein; protein id: At5g25490.1
  misc_feature (33)..(144): NCBI GI NO: 15239445 NR Description: putative protein; protein id: At5g25490.1
  misc_feature (1)..(61): NCBI GI NO: 27368046 NR Description: zinc finger protein [Gossypium hirsutum]
  misc_feature (1)..(90): NCBI GI NO: 34913970 NR Description: B1110C07.23
MSRPGDWNCRSCQHLNFQRRDSCQRCGDSKYGDRVVDFGGFGGRGGSSFGLTGSDVRPGDWYCAAANCGAHNFASRSSCFKCGAFKDDLAGGGYNSSDILRSRAFGGSGRPGWKSGDWICSRSGCNEHNFASRMECFKCSAPRDTY

SEQ ID NO: 6351 - protein, 115 aa, Glycine max
  peptide (1)..(115): Ceres Seq. ID no. 12467473
MFAPATGTVLLLTVVHTTLLAAQAASSVVLSRMTWLEEAITVLTSCAPELLVAVEDLDGNLVIGYAADQDAMSTTLLAEWNVLNAVLPGTRTRKNEFILARKATLINGDAARFLY

SEQ ID NO: 6352 - protein, 83 aa, Glycine max
  peptide (1)..(83): Ceres Seq. ID no. 12467474
MTWLEEAITVLTSCAPELLVAVEDLDGNLVIGYAADQDAMSTTLLAEWNVLNAVLPGTRTRKNEFILARKATLINGDAARFLY

SEQ ID NO: 6353 - DNA, 1347 bp, Glycine max
  misc_feature (1)..(1347): Ceres Seq. ID no. 14307573
gaatgaagcgattattgattagtacaaaaaaaaaaaaaaaaaagagaattttggggagcactcatcaaccatggtgatgttgtttgcacacacagattcagtagtcactcactagttctcggagaaaaccaagtgtcagtaataactaacaagcaaaacagaaaagaatacggattcgattcggagagatcaaccatgaagaacgaccacaacaacaacaacaacaacagcgccgagcatagcaaagacactaccgttggaatcctagattcccgattcaaccagaccctcagaaatgttcaagggttactcaagggtcgtaacattcctggtaaaatattattgagccagagggttgaatctcccgattacacaagcttatcctcaccgacttatataaggagctcctcatacagtgaaactggcacaagtgaccagacatctgagacggtagaggaggaagttcacagtacaagtaaaccatttggtattcccaatgacaataagttaaaaatatcagcatccaatgtagagagctcatccgaagaagtccggaaatcttccatgggtgcaagagctacagattctgcaagagttatgaagttcactaaggtgctttcagagacaatggttaaattagagaaattgcgtgaattttcttggagtggtgttccagattatatgcgtcctacagtgtggagacttctcttgggatatgcaccacctaattcagatagaagggagggagttttgaaaaggaagcgccttgagtatcttgactgtgtttctcagtattatgatattcctgatacagaacgctcggatgatgagatcaatatgcttcgccagattgctgttgattgtccaagaactgtacctgaagtttcattctttcaacaacagcaagttcagaaatcattggagcgtattctgtacacatgggccattcggcatcctgcaagtggatatgttcaggggataaatgatcttgttacgccatttttagttgttttcctatcagaatacttggaagggggcatagataattggtcaatgtctgatttatcttcagatgaaatctctaatatagaggccgactgctattggtgcttgtcaaagttgcttgatggtatgcaagaccattatacgtttgcccaaccaggaattcaaaggcttgtttttaagttgaaggaattggtcaggaggattgatggtaacttttttctcttaccgaacctcagttttaggaaaatataactacatttggctaaattattctctcactctatattaatgctctctcttatttcacattgtggagataccgagagattaggataaaattgc

SEQ ID NO: 6354 - protein, 353 aa, Glycine max
  peptide (1)..(353): Ceres Seq. ID no. 14307574
  misc_feature (25)..(339): NCBI GI NO: 18402435 NR Description: expressed protein [Arabidopsis thaliana]
  misc_feature (142)..(339): NCBI GI NO: 25408101 NR Description: hypothetical protein At2g30710
  misc_feature (130)..(339): NCBI GI NO: 37181052 NR Description: TBC domain-containing protein [Rattus norvegicus]
  misc_feature (130)..(339): NCBI GI NO: 38348532 NR Description: Unknown (protein for MGC:61359) [Mus musculus]
  misc_feature (130)..(339): NCBI GI NO: 25008321 NR Description: TBC1 domain family protein C22orf4-like
  misc_feature (130)..(339): NCBI GI NO: 31616088 NR Description: dJ744I24.2 (novel protein (containing FLJ20337))
  misc_feature (130)..(339): NCBI GI NO: 40068063 NR Description: chromosome 6 open reading frame 197 [Homo sapiens]
  misc_feature (92)..(339): NCBI GI NO: 22507409 NR Description: chromosome 22 open reading frame 4
  misc_feature (108)..(339): NCBI GI NO: 13874508 NR Description: hypothetical protein [Macaca fascicularis]
  misc_feature (108)..(339): NCBI GI NO: 25008320 NR Description: TBC1 domain family protein C22orf4 homolog
MKNDHNNNNNNSAEHSKDTTVGILDSRFNQTLRNVQGLLKGRNIPGKILLSQRVESPDYTSLSSPTYIRSSSYSETGTSDQTSETVEEEVHSTSKPFGIPNDNKLKISASNVESSSEEVRKSSMGARATDSARVMKFTKVLSETMVKLEKLREFSWSGVPDYMRPTVWRLLLGYAPPNSDRREGVLKRKRLEYLDCVSQYYDIPDTERSDDEINMLRQIAVDCPRTVPEVSFFQQQQVQKSLERILYTWAIRHPASGYVQGINDLVTPFLVVFLSEYLEGGIDNWSMSDLSSDEISNIEADCYWCLSKLLDGMQDHYTFAQPGIQRLVFKLKELVRRIDGNFFLLPNLSFRKI

SEQ ID NO: 6355 - protein, 230 aa, Glycine max
  peptide (1)..(230): Ceres Seq. ID no. 14307575
  misc_feature (1)..(216): NCBI GI NO: 18402435 NR Description: expressed protein [Arabidopsis thaliana]
  misc_feature (19)..(216): NCBI GI NO: 25408101 NR Description: hypothetical protein At2g30710
  misc_feature (7)..(216): NCBI GI NO: 37181052 NR Description: TBC domain-containing protein [Rattus norvegicus]
  misc_feature (7)..(216): NCBI GI NO: 38348532 NR Description: Unknown (protein for MGC:61359) [Mus musculus]
  misc_feature (7)..(216): NCBI GI NO: 25008321 NR Description: TBC1 domain family protein C22orf4-like
  misc_feature (7)..(216): NCBI GI NO: 31616088 NR Description: dJ744I24.2 (novel protein (containing FLJ20337))
  misc_feature (7)..(216): NCBI GI NO: 40068063 NR Description: chromosome 6 open reading frame 197 [Homo sapiens]
  misc_feature (1)..(216): NCBI GI NO: 22507409 NR Description: chromosome 22 open reading frame 4
  misc_feature (1)..(216): NCBI GI NO: 13874508 NR Description: hypothetical protein [Macaca fascicularis]
  misc_feature (1)..(216): NCBI GI NO: 25008320 NR Description: TBC1 domain family protein C22orf4 homolog
MGARATDSARVMKFTKVLSETMVKLEKLREFSWSGVPDYMRPTVWRLLLGYAPPNSDRREGVLKRKRLEYLDCVSQYYDIPDTERSDDEINMLRQIAVDCPRTVPEVSFFQQQQVQKSLERILYTWAIRHPASGYVQGINDLVTPFLVVFLSEYLEGGIDNWSMSDLSSDEISNIEADCYWCLSKLLDGMQDHYTFAQPGIQRLVFKLKELVRRIDGNFFLLPNLSFRKI

SEQ ID NO: 6356 - protein, 219 aa, Glycine max
  peptide (1)..(219): Ceres Seq. ID no. 14307576
  misc_feature (1)..(205): NCBI GI NO: 18402435 NR Description: expressed protein [Arabidopsis thaliana]
  misc_feature (8)..(205): NCBI GI NO: 25408101 NR Description: hypothetical protein At2g30710
  misc_feature (1)..(205): NCBI GI NO: 37181052 NR Description: TBC domain-containing protein [Rattus norvegicus]
  misc_feature (1)..(205): NCBI GI NO: 38348532 NR Description: Unknown (protein for MGC:61359) [Mus musculus]
  misc_feature (1)..(205): NCBI GI NO: 25008321 NR Description: TBC1 domain family protein C22orf4-like
  misc_feature (1)..(205): NCBI GI NO: 40068063 NR Description: chromosome 6 open reading frame 197 [Homo sapiens]
  misc_feature (1)..(205): NCBI GI NO: 31616088 NR Description: dJ744I24.2 (novel protein (containing FLJ20337))
  misc_feature (1)..(205): NCBI GI NO: 22507409 NR Description: chromosome 22 open reading frame 4
  misc_feature (1)..(205): NCBI GI NO: 13874508 NR Description: hypothetical protein [Macaca fascicularis]
  misc_feature (1)..(205): NCBI GI NO: 25008320 NR Description: TBC1 domain family protein C22orf4 homolog
MKFTKVLSETMVKLEKLREFSWSGVPDYMRPTVWRLLLGYAPPNSDRREGVLKRKRLEYLDCVSQYYDIPDTERSDDEINMLRQIAVDCPRTVPEVSFFQQQQVQKSLERILYTWAIRHPASGYVQGINDLVTPFLVVFLSEYLEGGIDNWSMSDLSSDEISNIEADCYWCLSKLLDGMQDHYTFAQPGIQRLVFKLKELVRRIDGNFFLLPNLSFRKI

SEQ ID NO: 6357 - DNA, 622 bp, Glycine max
  misc_feature (1)..(622): Ceres Seq. ID no. 14307522
attttgatttgtcagttttattggtttgctgaatagaagtaggattagaaatcatgaggatcaatagccaatgatattttgtaagtgataggaactactggacctgggggaggcagttgggactcaaagccgaggtctttcccaagaacttattgatatgcttccaacctcaaagtacaaatttggtagtttattcaagagaaaaaattctgggaaaaggtgtgtaatttgtcagatgacatacagaagaggtgaccagcaaatgaaattgccatgcagccatgtctatcatggtgaatgcatcaccaagtggcttagcattaacaagaaatgtcctgtttgcaacactgaggtttttggcgaggaatcaacgcattagcatcaaggtggcaaaagaggatcctttttgctctattaatttttgcttctcatccaactcaccctctccctcccattctcttttttaagttttaattttttacacgtaggtaggtgtagtatgaagaactatggcagctctcacacaatatatgttttgtttactagaaacaacctattggagtcgcatcttcttgtggttaatgtgtgattttgtgtgtattcatgcaatatatattctctt

SEQ ID NO: 6358 - protein, 73 aa, Glycine max
  peptide (1)..(73): Ceres Seq. ID no. 14307523
  misc_feature (22)..(62): Pfam Name: RING finger Pfam Description: Zinc finger, C3HC4 type
  misc_feature (1)..(73): NCBI GI NO: 22331928 NR Description: zinc finger
  misc_feature (1)..(68): NCBI GI NO: 38567912 NR Description: OSJNBa0088I22.8
  misc_feature (1)..(66): NCBI GI NO: 18402411 NR Description: zinc finger
  misc_feature (1)..(66): NCBI GI NO: 21536693 NR Description: unknown [Arabidopsis thaliana]
  misc_feature (1)..(66): NCBI GI NO: 10334499 NR Description: hypothetical protein [Cicer arietinum]
  misc_feature (1)..(68): NCBI GI NO: 34898016 NR Description: ESTs C26000
  misc_feature (1)..(65): NCBI GI NO: 15232746 NR Description: zinc-finger protein-related protein
  misc_feature (1)..(66): NCBI GI NO: 15240204 NR Description: zinc finger
  misc_feature (1)..(71): NCBI GI NO: 10129643 NR Description: Pspzf zinc finger protein-like
  misc_feature (1)..(71): NCBI GI NO: 20466428 NR Description: Pspzf zinc finger protein-like
MLPTSKYKFGSLFKRKNSGKRCVICQMTYRRGDQQMKLPCSHVYHGECITKWLSINKKCPVCNTEVFGEESTH

SEQ ID NO: 6359 - protein, 61 aa, Glycine max
  peptide (1)..(61): Ceres Seq. ID no. 14307524
MSIMVNASPSGLALTRNVLFATLRFLARNQRISIKVAKEDPFCSINFCFSSNSPSPSHSLF

SEQ ID NO: 6360 - protein, 58 aa, Glycine max
  peptide (1)..(58): Ceres Seq. ID no. 14307525
MVNASPSGLALTRNVLFATLRFLARNQRISIKVAKEDPFCSINFCFSSNSPSPSHSLF

SEQ ID NO: 6361 - DNA, 1160 bp, Glycine max
  misc_feature (1)..(1160): Ceres Seq. ID no. 13589868
tctctctttcactctttctccgagaacaaaaaaaaaaacgtgattcgctcttctcttcgaataaaccacaaaaccaacaaacgagaagaggagtgagagaagatggggttgtcgttcacgaagctgttcagcaggttgtttgcgaagaaggaaatgaggattctgatggtaggtctcgatgctgctggtaagacaaccatcttgtacaagctcaagcttggagaaatcgtcaccaccatccccaccatcggatttaatgttgagactgtggagtacaagaacatcagcttcactgtgtgggatgttggtggtcaggacaagatccgtcctctgtggaggcattatttccagaacactcagggtctcatttttgtggttgatagcaatgatagggatcgagtggttgaggcaagggatgagttgcacaggatgttgaatgaggatgaacttagagatgctgttttgcttgtttttgccaacaagcaagatcttcctaatgcaatgaatgctgcagaaataactgacaagcttggacttcattcactccgtcaacgccactggtatatccaaagcacttgtgcaacttctggagagggtctctatgagggtttggactggctttctaacaacattgccagcaaggcatgagacatttgaaaatttttggtcttgtctggtgatttcctgctgagtatggcggttcttggagaaagatgcttatcctttcttgtcaatgttgtaatagcagaatgcttgctagaagtattctcttcttttgtgtaacttgggtttgtatgattgcttaaattagctaatacttttagctataattggaactcttggatcctcttgtgcgtgccttgtttgtgttcattttgttagtttgatttttggttgaatatttccgtgcgttttgttcttggagtgcttgttggtgatgatagttgaatgaggattagaaaattgcgccagtttttgctcttgggccaagagtcacctgttcaaatattgtctttgcgaaattccagttcagatagacttggtacctgtttgttttaaagttgagcagacctaattttgatagaattggttaattatttattgtgattcagatgtgtgtctaaattaattatagtaataaagtttatattgaaacatgc

SEQ ID NO: 6362 - protein, 181 aa, Glycine max
  peptide (1)..(181): Ceres Seq. ID no. 13589869
  misc_feature (4)..(177): Pfam Name: Pfam Description:  ADP-ribosylation factor family
  misc_feature (1)..(181): NCBI GI NO: 39653273 NR Description: ADP-ribosylation factor [Medicago sativa]
  misc_feature (1)..(181): NCBI GI NO: 11131026 NR Description: ADP-ribosylation factor
  misc_feature (1)..(181): NCBI GI NO: 30681825 NR Description: ADP-ribosylation factor, putative
  misc_feature (1)..(181): NCBI GI NO: 15226521 NR Description: ADP-ribosylation factor 1 (ARF1)
  misc_feature (1)..(181): NCBI GI NO: 1703375 NR Description: ADP-RIBOSYLATION FACTOR 1
  misc_feature (1)..(181): NCBI GI NO: 15223164 NR Description: ADP-ribosylation factor 1 (ARF1), putative
  misc_feature (1)..(180): NCBI GI NO: 6573751 NR Description: F20B24.7 [Arabidopsis thaliana]
  misc_feature (1)..(181): NCBI GI NO: 1703380 NR Description: ADP-RIBOSYLATION FACTOR
  misc_feature (1)..(181): NCBI GI NO: 25294169 NR Description: ADP-ribosylation factor [imported] - pepper
  misc_feature (1)..(180): NCBI GI NO: 15241463 NR Description: ADP-ribosylation factor  ARF1, putative
MGLSFTKLFSRLFAKKEMRILMVGLDAAGKTTILYKLKLGEIVTTIPTIGFNVETVEYKNISFTVWDVGGQDKIRPLWRHYFQNTQGLIFVVDSNDRDRVVEARDELHRMLNEDELRDAVLLVFANKQDLPNAMNAAEITDKLGLHSLRQRHWYIQSTCATSGEGLYEGLDWLSNNIASKA

SEQ ID NO: 6363 - protein, 164 aa, Glycine max
  peptide (1)..(164): Ceres Seq. ID no. 13589870
  misc_feature (1)..(160): Pfam Name: Pfam Description:  ADP-ribosylation factor family
  misc_feature (1)..(164): NCBI GI NO: 39653273 NR Description: ADP-ribosylation factor [Medicago sativa]
  misc_feature (1)..(164): NCBI GI NO: 11131026 NR Description: ADP-ribosylation factor
  misc_feature (1)..(164): NCBI GI NO: 30681825 NR Description: ADP-ribosylation factor, putative
  misc_feature (1)..(164): NCBI GI NO: 15226521 NR Description: ADP-ribosylation factor 1 (ARF1)
  misc_feature (1)..(164): NCBI GI NO: 1703375 NR Description: ADP-RIBOSYLATION FACTOR 1
  misc_feature (1)..(164): NCBI GI NO: 15223164 NR Description: ADP-ribosylation factor 1 (ARF1), putative
  misc_feature (1)..(163): NCBI GI NO: 6573751 NR Description: F20B24.7 [Arabidopsis thaliana]
  misc_feature (1)..(164): NCBI GI NO: 1703380 NR Description: ADP-RIBOSYLATION FACTOR
  misc_feature (1)..(164): NCBI GI NO: 25294169 NR Description: ADP-ribosylation factor [imported] - pepper
  misc_feature (1)..(163): NCBI GI NO: 15241463 NR Description: ADP-ribosylation factor  ARF1, putative
MRILMVGLDAAGKTTILYKLKLGEIVTTIPTIGFNVETVEYKNISFTVWDVGGQDKIRPLWRHYFQNTQGLIFVVDSNDRDRVVEARDELHRMLNEDELRDAVLLVFANKQDLPNAMNAAEITDKLGLHSLRQRHWYIQSTCATSGEGLYEGLDWLSNNIASKA

SEQ ID NO: 6364 - protein, 160 aa, Glycine max
  peptide (1)..(160): Ceres Seq. ID no. 13589871
  misc_feature (1)..(156): Pfam Name: Pfam Description:  ADP-ribosylation factor family
  misc_feature (1)..(160): NCBI GI NO: 39653273 NR Description: ADP-ribosylation factor [Medicago sativa]
  misc_feature (1)..(160): NCBI GI NO: 11131026 NR Description: ADP-ribosylation factor
  misc_feature (1)..(160): NCBI GI NO: 30681825 NR Description: ADP-ribosylation factor, putative
  misc_feature (1)..(160): NCBI GI NO: 15226521 NR Description: ADP-ribosylation factor 1 (ARF1)
  misc_feature (1)..(160): NCBI GI NO: 1703375 NR Description: ADP-RIBOSYLATION FACTOR 1
  misc_feature (1)..(160): NCBI GI NO: 15223164 NR Description: ADP-ribosylation factor 1 (ARF1), putative
  misc_feature (1)..(159): NCBI GI NO: 6573751 NR Description: F20B24.7 [Arabidopsis thaliana]
  misc_feature (1)..(160): NCBI GI NO: 1703380 NR Description: ADP-RIBOSYLATION FACTOR
  misc_feature (1)..(160): NCBI GI NO: 25294169 NR Description: ADP-ribosylation factor [imported] - pepper
  misc_feature (1)..(159): NCBI GI NO: 15241463 NR Description: ADP-ribosylation factor  ARF1, putative
MVGLDAAGKTTILYKLKLGEIVTTIPTIGFNVETVEYKNISFTVWDVGGQDKIRPLWRHYFQNTQGLIFVVDSNDRDRVVEARDELHRMLNEDELRDAVLLVFANKQDLPNAMNAAEITDKLGLHSLRQRHWYIQSTCATSGEGLYEGLDWLSNNIASKA

SEQ ID NO: 6365 - DNA, 1575 bp, Glycine max
  misc_feature (1)..(1575): Ceres Seq. ID no. 14303790
gtcattgacttcatcaactctttgcaggacgatgagtactcctccagttgttgagcgcgtttcagaatgcttcatcaagccgcagcactccaaccatgaatcaaaccaaatctgctacttaacaccttgggatattgctatgttgtctgctcactatatccaaaagggccttctcttcaagaagccctcatcaccacttgttagtcacaataatttcatagagaacctgttgcagaagctcaagcactctctttctctcaccctcttccatttctatcctttggctggtcgccttgtcacccaccaaacccatgaccctcccttctatgctgttttcgttgattgcaacaacagtgatggagccagattcatccatgcaactttagatatgaccatatctgatatcctctctcccgttgacgttccacccattgttcaatcattgtttgaccaccacaaagctgtcaaccatgacggtcacacaatgccgttgttgtccgtccaagtcactgaatttgtggatggtgttttcataggttgttccatgaaccacactcttggtgatggcacttcttattggaatttcttcaacacatggtctcagatctttcaagttcaaggccatgaacatgatgttcccatttcgcacccacccattcacaatcgctggtttccagagggttgcggtccattaatcaaccttcccttcaaacatcacgacgattttataaacagatatgaaacaccgttgctgagagagagaatcttccacttctcagcagagtctattgcaaaactgaaagcaaaggctaactcggagtgcaacacaaccaaaatctcatcgttccaatcattatcggcacttgtttggagatgcataactcgtgcgcggcgcttgccgtatgatcaaagaacaagttgcaagttgtccgcaaacaacagaacaagaatggaaccaccactgcctcaggagtactttggaaactcaatttatacactgaatgcaggaaccgccacctcagggaaattgcttgagaatggtataggttgggcagcatggaagttgcacaaatcggttgtaaaccataacgacagagcggtgttggaaacgctcaaagagtggttagagagtcctctgatatatgatcttggtcgttattttgacccgtactgtgtgatgatgggtagctcacccaggttcaacatgtatgggaatgagtttggaatgggaaaggcagttgcacttagaagtgggtatgccaacaaatttgatggaaaagtaacatcatacccaggccatgaaggaggaggaagcgtagatttggaagtgtgtctttcgccagctgtaatgagtgcactggaatcggacgaggagttcatgaatattgctctagtttctgtttacaatcctctctagtcattattcactgttacttccatcgcccccataataatcatttgtcctagaataatccgttatctttaattagtattattttaaaatatatcatgttaatgtgttttatgtattgtgaattcatatatcatataataacaacacgtgatttattttgt

SEQ ID NO: 6366 - protein, 471 aa, Glycine max
  peptide (1)..(471): Ceres Seq. ID no. 14303791
  misc_feature (17)..(460): Pfam Name: Pfam Description:  Transferase family
  misc_feature (11)..(462): NCBI GI NO: 15239072 NR Description: hydroxycinnamoyl benzoyltransferase-related
  misc_feature (12)..(462): NCBI GI NO: 15240871 NR Description: hydroxycinnamoyl benzoyltransferase-related
  misc_feature (12)..(462): NCBI GI NO: 15241431 NR Description: hydroxycinnamoyl benzoyltransferase-related
  misc_feature (12)..(462): NCBI GI NO: 15241433 NR Description: hydroxycinnamoyl benzoyltransferase-related
  misc_feature (12)..(458): NCBI GI NO: 24413968 NR Description: N-hydroxycinnamoyl/benzoyltransferase-like protein~contains EST AU096989
  misc_feature (13)..(459): NCBI GI NO: 34899602 NR Description: N-hydroxycinnamoyl benzoyltransferase-like protein
  misc_feature (20)..(273): NCBI GI NO: 21666314 NR Description: AER [Nicotiana tabacum]
  misc_feature (277)..(460): NCBI GI NO: 21666314 NR Description: AER [Nicotiana tabacum]
  misc_feature (17)..(275): NCBI GI NO: 15240918 NR Description: transferase family [Arabidopsis thaliana]
  misc_feature (276)..(469): NCBI GI NO: 15240918 NR Description: transferase family [Arabidopsis thaliana]
SLTSSTLCRTMSTPPVVERVSECFIKPQHSNHESNQICYLTPWDIAMLSAHYIQKGLLFKKPSSPLVSHNNFIENLLQKLKHSLSLTLFHFYPLAGRLVTHQTHDPPFYAVFVDCNNSDGARFIHATLDMTISDILSPVDVPPIVQSLFDHHKAVNHDGHTMPLLSVQVTEFVDGVFIGCSMNHTLGDGTSYWNFFNTWSQIFQVQGHEHDVPISHPPIHNRWFPEGCGPLINLPFKHHDDFINRYETPLLRERIFHFSAESIAKLKAKANSECNTTKISSFQSLSALVWRCITRARRLPYDQRTSCKLSANNRTRMEPPLPQEYFGNSIYTLNAGTATSGKLLENGIGWAAWKLHKSVVNHNDRAVLETLKEWLESPLIYDLGRYFDPYCVMMGSSPRFNMYGNEFGMGKAVALRSGYANKFDGKVTSYPGHEGGGSVDLEVCLSPAVMSALESDEEFMNIALVSVYNPL

SEQ ID NO: 6367 - protein, 461 aa, Glycine max
  peptide (1)..(461): Ceres Seq. ID no. 14303792
  misc_feature (7)..(450): Pfam Name: Pfam Description:  Transferase family
  misc_feature (1)..(452): NCBI GI NO: 15239072 NR Description: hydroxycinnamoyl benzoyltransferase-related
  misc_feature (2)..(452): NCBI GI NO: 15240871 NR Description: hydroxycinnamoyl benzoyltransferase-related
  misc_feature (2)..(452): NCBI GI NO: 15241431 NR Description: hydroxycinnamoyl benzoyltransferase-related
  misc_feature (2)..(452): NCBI GI NO: 15241433 NR Description: hydroxycinnamoyl benzoyltransferase-related
  misc_feature (2)..(448): NCBI GI NO: 24413968 NR Description: N-hydroxycinnamoyl/benzoyltransferase-like protein~contains EST AU096989
  misc_feature (3)..(449): NCBI GI NO: 34899602 NR Description: N-hydroxycinnamoyl benzoyltransferase-like protein
  misc_feature (10)..(263): NCBI GI NO: 21666314 NR Description: AER [Nicotiana tabacum]
  misc_feature (267)..(450): NCBI GI NO: 21666314 NR Description: AER [Nicotiana tabacum]
  misc_feature (7)..(265): NCBI GI NO: 15240918 NR Description: transferase family [Arabidopsis thaliana]
  misc_feature (266)..(459): NCBI GI NO: 15240918 NR Description: transferase family [Arabidopsis thaliana]
MSTPPVVERVSECFIKPQHSNHESNQICYLTPWDIAMLSAHYIQKGLLFKKPSSPLVSHNNFIENLLQKLKHSLSLTLFHFYPLAGRLVTHQTHDPPFYAVFVDCNNSDGARFIHATLDMTISDILSPVDVPPIVQSLFDHHKAVNHDGHTMPLLSVQVTEFVDGVFIGCSMNHTLGDGTSYWNFFNTWSQIFQVQGHEHDVPISHPPIHNRWFPEGCGPLINLPFKHHDDFINRYETPLLRERIFHFSAESIAKLKAKANSECNTTKISSFQSLSALVWRCITRARRLPYDQRTSCKLSANNRTRMEPPLPQEYFGNSIYTLNAGTATSGKLLENGIGWAAWKLHKSVVNHNDRAVLETLKEWLESPLIYDLGRYFDPYCVMMGSSPRFNMYGNEFGMGKAVALRSGYANKFDGKVTSYPGHEGGGSVDLEVCLSPAVMSALESDEEFMNIALVSVYNPL

SEQ ID NO: 6368 - protein, 425 aa, Glycine max
  peptide (1)..(425): Ceres Seq. ID no. 14303793
  misc_feature (1)..(414): Pfam Name: Pfam Description:  Transferase family
  misc_feature (1)..(416): NCBI GI NO: 15239072 NR Description: hydroxycinnamoyl benzoyltransferase-related
  misc_feature (1)..(416): NCBI GI NO: 15240871 NR Description: hydroxycinnamoyl benzoyltransferase-related
  misc_feature (1)..(416): NCBI GI NO: 15241431 NR Description: hydroxycinnamoyl benzoyltransferase-related
  misc_feature (1)..(416): NCBI GI NO: 15241433 NR Description: hydroxycinnamoyl benzoyltransferase-related
  misc_feature (1)..(412): NCBI GI NO: 24413968 NR Description: N-hydroxycinnamoyl/benzoyltransferase-like protein~contains EST AU096989
  misc_feature (1)..(413): NCBI GI NO: 34899602 NR Description: N-hydroxycinnamoyl benzoyltransferase-like protein
  misc_feature (1)..(227): NCBI GI NO: 21666314 NR Description: AER [Nicotiana tabacum]
  misc_feature (231)..(414): NCBI GI NO: 21666314 NR Description: AER [Nicotiana tabacum]
  misc_feature (1)..(229): NCBI GI NO: 15240918 NR Description: transferase family [Arabidopsis thaliana]
  misc_feature (230)..(423): NCBI GI NO: 15240918 NR Description: transferase family [Arabidopsis thaliana]
MLSAHYIQKGLLFKKPSSPLVSHNNFIENLLQKLKHSLSLTLFHFYPLAGRLVTHQTHDPPFYAVFVDCNNSDGARFIHATLDMTISDILSPVDVPPIVQSLFDHHKAVNHDGHTMPLLSVQVTEFVDGVFIGCSMNHTLGDGTSYWNFFNTWSQIFQVQGHEHDVPISHPPIHNRWFPEGCGPLINLPFKHHDDFINRYETPLLRERIFHFSAESIAKLKAKANSECNTTKISSFQSLSALVWRCITRARRLPYDQRTSCKLSANNRTRMEPPLPQEYFGNSIYTLNAGTATSGKLLENGIGWAAWKLHKSVVNHNDRAVLETLKEWLESPLIYDLGRYFDPYCVMMGSSPRFNMYGNEFGMGKAVALRSGYANKFDGKVTSYPGHEGGGSVDLEVCLSPAVMSALESDEEFMNIALVSVYNPL

SEQ ID NO: 6369 - DNA, 1619 bp, Glycine max
  misc_feature (1)..(1619): Ceres Seq. ID no. 14310427
agaatctgtgacacagtctgatgggattattggtatacaaagcactgagacagtcaatgcaagaatggaagagggatatcatcatgcatccacatctacacagaccagtccagatgaaaatgggatgaaaaatattcaaccagagcaactggaaatacaagaaatggggagaagagagagtgcattaggcaaagatatagagcaacaacctaccctcctagaggagtatcacttgaggaataaatcagaaagaagccctgcaacttatatatctagtcatgactttactgagaatagccattttcctgaaggaaaagaggcacttaatggtgctatggaggagttaaaagatggttacatttctgagaatgggaaactggttcttgatttcttgcaagccatccatgctgcagagaaaaggcaggctgacttagatgcacatgcttttaacgaagagaagaaagtgttaaaggaaaaatatgaaaagaagttgaaagatgcagctgccagagaacttatgctcgctgaggaggctgcaatgttggacagggagctaaaaagagagagagcaaaagcatcccttgctatcaagtcacttcaagaaaagatggaagagaaactgaagacagaactagaacaaaaggagattgaaactgatttgaagtttaaacaaactcaggaattagcaaaggcagagttaaatgcagccatagcaaatgagaaggcagctcaaattgaaaaaatggctgaagcaaatgttaatataaatgccttatgcatggcattttatgctcgatctgaagaagctcgtcaaagtcatgctacacaaaattttgctttgagagcacttgcattggaagatgcactatctaaaggacttccaattgagacagaaatagcatctttgcagtcttatcttggaagcacagataaagattcagttttggatttggtgctagcatcccttcctgaagaaacacgaagcaacggcacagacacacaactgcagttaaagcagaagtttgatgccttaaaaggtagtgtaagacacttcagcttcttcccaccgggagggggaggtatgttggcacattctttggcacatgtagcatcctggttgaaggttagggaagacaatcaatctggtgatgggatcgaatctgtgatcaataaagttgaagtttatttggcagaaggaaaacttgctgaagcagcagcttgtctagaagaaagtgtgagaggcacacaagctgcagaaattgttgcaggttgggtgaggcaagcaagaaacagggctatttctgagcaagcagtgctgcttcttcaatcctatgccaattcccttagctttacatgattctcaaattttgaatatttacaaaaccatgtgaattcaatacatggcagagattatctttggcggattattccaacgggaattattgacctatgaggaaaaaaaataacgtttttgtttcataggagcagaaattagttgattctgtgaattctatgcaactccagtggcattggagttttgaccgaagtgatatcaggctctgtataattttgccttttgttttacctgaataacagaaatgttgcattgcaacatattg

SEQ ID NO: 6370 - protein, 451 aa, Glycine max
  peptide (1)..(451): Ceres Seq. ID no. 14310428
  misc_feature (49)..(345): Pfam Name: Pfam Description:  Myosin tail
  misc_feature (59)..(451): NCBI GI NO: 18420505 NR Description: expressed protein [Arabidopsis thaliana]
  misc_feature (102)..(451): NCBI GI NO: 32492176 NR Description: OSJNBb0034I13.6
  misc_feature (18)..(451): NCBI GI NO: 7487220 NR Description: hypothetical protein T19P19
  misc_feature (150)..(445): NCBI GI NO: 40739918 NR Description: hypothetical protein AN3843.2
  misc_feature (141)..(445): NCBI GI NO: 32409187 NR Description: hypothetical protein [Neurospora crassa]
ESVTQSDGIIGIQSTETVNARMEEGYHHASTSTQTSPDENGMKNIQPEQLEIQEMGRRESALGKDIEQQPTLLEEYHLRNKSERSPATYISSHDFTENSHFPEGKEALNGAMEELKDGYISENGKLVLDFLQAIHAAEKRQADLDAHAFNEEKKVLKEKYEKKLKDAAARELMLAEEAAMLDRELKRERAKASLAIKSLQEKMEEKLKTELEQKEIETDLKFKQTQELAKAELNAAIANEKAAQIEKMAEANVNINALCMAFYARSEEARQSHATQNFALRALALEDALSKGLPIETEIASLQSYLGSTDKDSVLDLVLASLPEETRSNGTDTQLQLKQKFDALKGSVRHFSFFPPGGGGMLAHSLAHVASWLKVREDNQSGDGIESVINKVEVYLAEGKLAEAAACLEESVRGTQAAEIVAGWVRQARNRAISEQAVLLLQSYANSLSFT

SEQ ID NO: 6371 - protein, 430 aa, Glycine max
  peptide (1)..(430): Ceres Seq. ID no. 14310429
  misc_feature (28)..(324): Pfam Name: Pfam Description:  Myosin tail
  misc_feature (38)..(430): NCBI GI NO: 18420505 NR Description: expressed protein [Arabidopsis thaliana]
  misc_feature (81)..(430): NCBI GI NO: 32492176 NR Description: OSJNBb0034I13.6
  misc_feature (1)..(430): NCBI GI NO: 7487220 NR Description: hypothetical protein T19P19
  misc_feature (129)..(424): NCBI GI NO: 40739918 NR Description: hypothetical protein AN3843.2
  misc_feature (120)..(424): NCBI GI NO: 32409187 NR Description: hypothetical protein [Neurospora crassa]
MEEGYHHASTSTQTSPDENGMKNIQPEQLEIQEMGRRESALGKDIEQQPTLLEEYHLRNKSERSPATYISSHDFTENSHFPEGKEALNGAMEELKDGYISENGKLVLDFLQAIHAAEKRQADLDAHAFNEEKKVLKEKYEKKLKDAAARELMLAEEAAMLDRELKRERAKASLAIKSLQEKMEEKLKTELEQKEIETDLKFKQTQELAKAELNAAIANEKAAQIEKMAEANVNINALCMAFYARSEEARQSHATQNFALRALALEDALSKGLPIETEIASLQSYLGSTDKDSVLDLVLASLPEETRSNGTDTQLQLKQKFDALKGSVRHFSFFPPGGGGMLAHSLAHVASWLKVREDNQSGDGIESVINKVEVYLAEGKLAEAAACLEESVRGTQAAEIVAGWVRQARNRAISEQAVLLLQSYANSLSFT

SEQ ID NO: 6372 - protein, 410 aa, Glycine max
  peptide (1)..(410): Ceres Seq. ID no. 14310430
  misc_feature (8)..(304): Pfam Name: Pfam Description:  Myosin tail
  misc_feature (18)..(410): NCBI GI NO: 18420505 NR Description: expressed protein [Arabidopsis thaliana]
  misc_feature (61)..(410): NCBI GI NO: 32492176 NR Description: OSJNBb0034I13.6
  misc_feature (1)..(410): NCBI GI NO: 7487220 NR Description: hypothetical protein T19P19
  misc_feature (109)..(404): NCBI GI NO: 40739918 NR Description: hypothetical protein AN3843.2
  misc_feature (100)..(404): NCBI GI NO: 32409187 NR Description: hypothetical protein [Neurospora crassa]
MKNIQPEQLEIQEMGRRESALGKDIEQQPTLLEEYHLRNKSERSPATYISSHDFTENSHFPEGKEALNGAMEELKDGYISENGKLVLDFLQAIHAAEKRQADLDAHAFNEEKKVLKEKYEKKLKDAAARELMLAEEAAMLDRELKRERAKASLAIKSLQEKMEEKLKTELEQKEIETDLKFKQTQELAKAELNAAIANEKAAQIEKMAEANVNINALCMAFYARSEEARQSHATQNFALRALALEDALSKGLPIETEIASLQSYLGSTDKDSVLDLVLASLPEETRSNGTDTQLQLKQKFDALKGSVRHFSFFPPGGGGMLAHSLAHVASWLKVREDNQSGDGIESVINKVEVYLAEGKLAEAAACLEESVRGTQAAEIVAGWVRQARNRAISEQAVLLLQSYANSLSFT

SEQ ID NO: 6373 - DNA, 942 bp, Glycine max
  misc_feature (1)..(942): Ceres Seq. ID no. 15170072
aacagaccttctacttttgcgaacagctgttagacttgagttgagtcacagtcatcgtctgttcaggatcatattcacgccccctctctctctctctctctctctctctctcttactttgtgtctttctatctctctcttcaattccaaaaccctacccccatccaattccaattcaccctcaatcatgggttctgaaggttccactgtcgtcgttcctaggaacttcagattattggaagagcttgagagaggtgagaagggaattggagatggaactgttagctatggaatggatgatgctgatgatatctacatgcagtcctggactgggactattattggtccccctggtactgttcatgaagggcgtatataccagctgaaattattttgtggcaaggattatccagacaatccaccaactgttagatttcagactaggattaacatgacttgtgtcaaccaagaaactggagtggttgagccacatttgtttcctatgcttgctaattggcaaagagagtgtacaatggaagacattttgatgcaattgaagaaagaaatgatatctccacaaaatcggaagctagctcagccacctgaaggcaatgaagatggcaggattgaccaaaaggggcttgctctgagatgttgtgtcatgtaattcaggtgagaaccaaagaataataatgtaaataattcaatagataatccttttgtgggttaactcatttataaatgtaattatggaccattcgcttatgtaacatggagcaattaaagagcgactacgaatccttgaaaatttatagtcaatcgtgttgaagctgattttactgtggtttctaatttggaagtgtgtatacattcatctgtgtaggtgtgaaccgtatgcacactttgatcctaatattgtgggataacattcaatttatcattg

SEQ ID NO: 6374 - protein, 159 aa, Glycine max
  peptide (1)..(159): Ceres Seq. ID no. 15170073
  misc_feature (1)..(159): NCBI GI NO: 18395221 NR Description: ubiquitin-conjugating enzyme family
  misc_feature (10)..(159): NCBI GI NO: 13324790 NR Description: putative DNA-binding protein [Oryza sativa]
  misc_feature (1)..(159): NCBI GI NO: 18409647 NR Description: ubiquitin-conjugating enzyme family
  misc_feature (1)..(159): NCBI GI NO: 21593918 NR Description: E2, ubiquitin-conjugating enzyme, putative
  misc_feature (1)..(159): NCBI GI NO: 25326240 NR Description: protein F26F24.10
  misc_feature (1)..(141): NCBI GI NO: 18409633 NR Description: ubiquitin-conjugating enzyme family
  misc_feature (1)..(141): NCBI GI NO: 30693656 NR Description: ubiquitin-conjugating enzyme family
  misc_feature (1)..(141): NCBI GI NO: 18404032 NR Description: ubiquitin-conjugating enzyme family
  misc_feature (1)..(141): NCBI GI NO: 30686662 NR Description: ubiquitin-conjugating enzyme family
  misc_feature (1)..(141): NCBI GI NO: 32488709 NR Description: OSJNBa0088H09.10
MGSEGSTVVVPRNFRLLEELERGEKGIGDGTVSYGMDDADDIYMQSWTGTIIGPPGTVHEGRIYQLKLFCGKDYPDNPPTVRFQTRINMTCVNQETGVVEPHLFPMLANWQRECTMEDILMQLKKEMISPQNRKLAQPPEGNEDGRIDQKGLALRCCVM

SEQ ID NO: 6375 - protein, 127 aa, Glycine max
  peptide (1)..(127): Ceres Seq. ID no. 15170074
TDLLLLRTAVRLELSHSHRLFRIIFTPPLSLSLSLSLLLCVFLSLSSIPKPYPHPIPIHPQSWVLKVPLSSFLGTSDYWKSLREVRRELEMELLAMEWMMLMISTCSPGLGLLLVPLVLFMKGVYTS

SEQ ID NO: 6376 - protein, 124 aa, Glycine max
  peptide (1)..(124): Ceres Seq. ID no. 15170075
  misc_feature (1)..(124): NCBI GI NO: 18395221 NR Description: ubiquitin-conjugating enzyme family
  misc_feature (1)..(124): NCBI GI NO: 13324790 NR Description: putative DNA-binding protein [Oryza sativa]
  misc_feature (1)..(124): NCBI GI NO: 18409647 NR Description: ubiquitin-conjugating enzyme family
  misc_feature (1)..(124): NCBI GI NO: 21593918 NR Description: E2, ubiquitin-conjugating enzyme, putative
  misc_feature (1)..(124): NCBI GI NO: 25326240 NR Description: protein F26F24.10
  misc_feature (1)..(106): NCBI GI NO: 18409633 NR Description: ubiquitin-conjugating enzyme family
  misc_feature (1)..(106): NCBI GI NO: 30693656 NR Description: ubiquitin-conjugating enzyme family
  misc_feature (1)..(106): NCBI GI NO: 18404032 NR Description: ubiquitin-conjugating enzyme family
  misc_feature (1)..(106): NCBI GI NO: 30686662 NR Description: ubiquitin-conjugating enzyme family
  misc_feature (1)..(106): NCBI GI NO: 32488709 NR Description: OSJNBa0088H09.10
MDDADDIYMQSWTGTIIGPPGTVHEGRIYQLKLFCGKDYPDNPPTVRFQTRINMTCVNQETGVVEPHLFPMLANWQRECTMEDILMQLKKEMISPQNRKLAQPPEGNEDGRIDQKGLALRCCVM

SEQ ID NO: 6377 - DNA, 539 bp, Glycine max
  misc_feature (1)..(539): Ceres Seq. ID no. 15226994
tcagctacgtaggccccccccccatgcttcatgttgcgtaaatgggtatcctctgaacatgaaagttctcagttagaagatgagaatgtgcagtcacaagatggtagtagtgtcaaatcttctggacttgtagaaaatgctgaagttcaaaatgagcgatccaagtccttgtcaatttttggagttttaatttccccaaagcttcgagcctcccagctgtcatttgagaaagcactagagacactcatagaaatagccaatatgcaatcgtcattgttatattcttttcaccaacttcgaagggtggaagataccaaagaataaaaaagtaccagctctttcaggtgtttgtgtcaaataataaattactgcggttgacaggctgacaatatcacaaggggttacattattttcctaaataaaattctcttatctttccctccacctaaagaggagagagacaagaaaattactagcaaagtctttggaatatgttattgattttatgaggaactaatgaagatgagtttttttttccc

SEQ ID NO: 6378 - protein, 97 aa, Glycine max
  peptide (1)..(97): Ceres Seq. ID no. 15226995
  misc_feature (12)..(89): NCBI GI NO: 15218031 NR Description: expressed protein [Arabidopsis thaliana]
  misc_feature (10)..(90): NCBI GI NO: 32488295 NR Description: OSJNBb0065L13.4
MLRKWVSSEHESSQLEDENVQSQDGSSVKSSGLVENAEVQNERSKSLSIFGVLISPKLRASQLSFEKALETLIEIANMQSSLLYSFHQLRRVEDTKE

SEQ ID NO: 6379 - DNA, 2640 bp, Glycine max
  misc_feature (1)..(2640): Ceres Seq. ID no. 15176110
gagtgaacaaattccgcggcatacaatccagccgcaagggcatctgggtattgcaggaagtgaattgcccttctgtattgatagaagcagggttcatgtccaacccatctgatatgtccaatctgaagagcactgcttaccagcagaaaatggccggcgctatattgaccggtatccagcaatatttatcggctcatgaaaatcaaaccaccttcattccggtagatactaccatagaagtgaaagtaaaagatacggctgctcatcctttgtttgtagttgacggagaaaaaatgggtcggaagggtttgaaagaattaaaactggatccaaatgatattgacaatattagtgttttaaaagatgaggccgcctttaaaaagtatggcgaggaaggcaaaaacggagttgtagagatcaccactaaaaagcaagtagctgactctacaacgacaaagcagcatagtaaagctgatctgatgatgaaaaaattgaatgagctgaaaaaagataatgagaaatcttatttcgagattgatggtaaatccgtcatcactaccaaaagcgggcagacggtttggatagaagttgtcacagacctggtattggtagacggaaagcgggtgagtgttgacgaacttaacacatcatacaagcgaaatgattttgttgaggccgctggaaacgattattcaaaaaaataccacaaaggaatattgttactatccacacgcacacattcaattaaagaaatacaaaaaatgctggcagtaaactaaactgctgatcattcgattattttttcttctttcgcttctttgaaggatggtatatttcaatagcttgtttgataagttgcaatagttcctcttgctgaatattagcaggatcaacaacaggttcagcgaatgccagcactttctctaaagtgaggtcttttgtataaggagaacctttcaatacagcgccgaacatgcttactgccgcagcgaattggtaagcatgttcggctttttcaattgctatgggttgattagatgctgtaaatgcatgatgcataaaagatgcgctgtcgggaagctggtagcgcaaatcaatggaggccaggttttccgttgatgaatgagtagttgccggttctatttcaaacaaagccatcagggcatgcccactgccgatttctccaccttccaattcacgggtactgtcgttcaaagcggttctcttgttgtcaaagccaatcaggcggtaggttttgacaaggttgggattgaagcgaacgataaccgttgcattgttggcaacagcatataatgtttgtgtgaattcagttaccaatactttttgtgcttcgcctaaatgatccagataagcaaaattgccattgccttttttagccagcacttccagcttgctgtctttataattgcccatgcctactcccaggcaagtaaggtaaataccgcttttgcgatattgaacaatcaggtcttccagctctttttccgatgattgtcccacattgaaatccccatcggtagccagtatcaccctattgttgccattgcgcatataagtgtgcgaagccaatgcataagcctgctggatggctccggcgcccggtgtatcacccgcagcactcagcgaatcgatgactgctttgatctttttcttttcagcgcctcctgttggcgccaatgcaatgcgcacattgccgccgtaagtcatgatactgatggtatcctgcggacgtaaattatctgccagtaacttgaatgccgactgcagcaaggggagccggttgggcttatccatcgagccagacacatcgatcaaaaaaacaagattggaaggaggcacactgtcaagttgcaattgcggtgcatgaatatgaaggtacagcagttgatgttcctgctgccaggggcaggatgtaacggttgtctggcaggtaaaggcacgggaattttcagcagcagggtaactgaaataattgagcatttcttcaatgcggatcgcatgcacaggcacccgcatattattgtgaatgaaacgacggatattactataagaagctttgtcgatgttcagtgcaaaacctgtttccggatattgcgatgcctgaataaaacggttttccataatgtcgctgtagctctcgcccattacagaagcaggtacaactggttctgtttggagatggttggtgagagagctgagcctggccctgtaaaaatttgccaactcaggctgcattttcaaaacaaagaactggggcttcctggtatcgatggcagtacgcagggtatcataaccttcgtaagacaatgtgatggtatcaatgagcctggaagaagggatgccaaagctgcccaggttgccggtataatatggataagtgccggtgcttgccaattgtatgcgtacgccctgtaataaacgcccctgctcatccttcacttctccacgcaggtaattctgccccatgagcaggcagggaagtaaacaagcaagtaataaccaggcgacagctttcatctgtatgcatggatttactacaatttactgaaaaaagcgcgtatttacacgctaggcatctgttttgagctggtataattcgcggatattcctgcccaggcc

SEQ ID NO: 6380 - protein, 258 aa, Glycine max
  peptide (1)..(258): Ceres Seq. ID no. 15176111
  misc_feature (1)..(63): Pfam Name: Pfam Description:  N-acetylmuramoyl-L-alanine amidase
VNKFRGIQSSRKGIWVLQEVNCPSVLIEAGFMSNPSDMSNLKSTAYQQKMAGAILTGIQQYLSAHENQTTFIPVDTTIEVKVKDTAAHPLFVVDGEKMGRKGLKELKLDPNDIDNISVLKDEAAFKKYGEEGKNGVVEITTKKQVADSTTTKQHSKADLMMKKLNELKKDNEKSYFEIDGKSVITTKSGQTVWIEVVTDLVLVDGKRVSVDELNTSYKRNDFVEAAGNDYSKKYHKGILLLSTRTHSIKEIQKMLAVN

SEQ ID NO: 6381 - protein, 227 aa, Glycine max
  peptide (1)..(227): Ceres Seq. ID no. 15176112
MSNPSDMSNLKSTAYQQKMAGAILTGIQQYLSAHENQTTFIPVDTTIEVKVKDTAAHPLFVVDGEKMGRKGLKELKLDPNDIDNISVLKDEAAFKKYGEEGKNGVVEITTKKQVADSTTTKQHSKADLMMKKLNELKKDNEKSYFEIDGKSVITTKSGQTVWIEVVTDLVLVDGKRVSVDELNTSYKRNDFVEAAGNDYSKKYHKGILLLSTRTHSIKEIQKMLAVN

SEQ ID NO: 6382 - protein, 221 aa, Glycine max
  peptide (1)..(221): Ceres Seq. ID no. 15176113
MSNLKSTAYQQKMAGAILTGIQQYLSAHENQTTFIPVDTTIEVKVKDTAAHPLFVVDGEKMGRKGLKELKLDPNDIDNISVLKDEAAFKKYGEEGKNGVVEITTKKQVADSTTTKQHSKADLMMKKLNELKKDNEKSYFEIDGKSVITTKSGQTVWIEVVTDLVLVDGKRVSVDELNTSYKRNDFVEAAGNDYSKKYHKGILLLSTRTHSIKEIQKMLAVN

SEQ ID NO: 6383 - DNA, 1006 bp, Glycine max
  misc_feature (1)..(1006): Ceres Seq. ID no. 15169858
aattcacttccgctaacacgcaattcacaaatcacaaatcacaaatcacaaatcacaaaggtcttttcatttctgctgattatcctcttcagccgccatggaatcggaggctgtcttgaacctcttcgattcttgctggtttgaggttaacattttgaagacaaattcaagtcctcacatatcaattacaagttataacgaaagtttagattatgagataaaagaagaagaagaagaagaagaagaaccaaagctacccttgatccgaaccagccacaccagatccatgagtgaccaattatccatgataacgacaagcttcaaccatgattctctgtcaccagactcagtgcttcttctccatccaaagctccaaatcatactctcaggaaaagaagccactgactcagaatctgatgaggtgttgtgtcccaagaagaacaaaaaaatctcaagcaatggaactaggaagaggagggagagcaagagtttgtcagaccttgaatttgaggagctaaaagggttcatggatctgggttttgttttctcagaggaggataaagactcaagcttggcttcaattattcctgggttgcaaaggctagggaaaaaggaagaggaaaaagaagaagatgatgattgtgatgagataagtgttccaaggccttacctttctgaagcatgggaggttcaggaatgtgataggagaaaaaaagagaaccctttggtgaattggaaaatgcctgctatcaacaatgaaactgacatgaaagaaagtctcagatggtgggctcacactgttgcttccactgtcagatgatgatgaacttcttcataatccaaaaattttcttctttttctttcgtttcatatatacattttccttgttcttttttcaatttttctatgtatttattcccttttctaaaattttttctggaatctggcattccacaaaatttgttacatgtaattttagataaaaagagaggaaatttcattttgc

SEQ ID NO: 6384 - protein, 240 aa, Glycine max
  peptide (1)..(240): Ceres Seq. ID no. 15169859
  misc_feature (1)..(240): NCBI GI NO: 15227995 NR Description: expressed protein [Arabidopsis thaliana]
  misc_feature (130)..(240): NCBI GI NO: 34904512 NR Description: OSJNBa0010K01.19
  misc_feature (58)..(240): NCBI GI NO: 30689349 NR Description: expressed protein [Arabidopsis thaliana]
MESEAVLNLFDSCWFEVNILKTNSSPHISITSYNESLDYEIKEEEEEEEEPKLPLIRTSHTRSMSDQLSMITTSFNHDSLSPDSVLLLHPKLQIILSGKEATDSESDEVLCPKKNKKISSNGTRKRRESKSLSDLEFEELKGFMDLGFVFSEEDKDSSLASIIPGLQRLGKKEEEKEEDDDCDEISVPRPYLSEAWEVQECDRRKKENPLVNWKMPAINNETDMKESLRWWAHTVASTVR

SEQ ID NO: 6385 - protein, 177 aa, Glycine max
  peptide (1)..(177): Ceres Seq. ID no. 15169860
  misc_feature (1)..(177): NCBI GI NO: 15227995 NR Description: expressed protein [Arabidopsis thaliana]
  misc_feature (67)..(177): NCBI GI NO: 34904512 NR Description: OSJNBa0010K01.19
  misc_feature (1)..(177): NCBI GI NO: 30689349 NR Description: expressed protein [Arabidopsis thaliana]
MSDQLSMITTSFNHDSLSPDSVLLLHPKLQIILSGKEATDSESDEVLCPKKNKKISSNGTRKRRESKSLSDLEFEELKGFMDLGFVFSEEDKDSSLASIIPGLQRLGKKEEEKEEDDDCDEISVPRPYLSEAWEVQECDRRKKENPLVNWKMPAINNETDMKESLRWWAHTVASTVR

SEQ ID NO: 6386 - protein, 171 aa, Glycine max
  peptide (1)..(171): Ceres Seq. ID no. 15169861
  misc_feature (1)..(171): NCBI GI NO: 15227995 NR Description: expressed protein [Arabidopsis thaliana]
  misc_feature (61)..(171): NCBI GI NO: 34904512 NR Description: OSJNBa0010K01.19
  misc_feature (1)..(171): NCBI GI NO: 30689349 NR Description: expressed protein [Arabidopsis thaliana]
MITTSFNHDSLSPDSVLLLHPKLQIILSGKEATDSESDEVLCPKKNKKISSNGTRKRRESKSLSDLEFEELKGFMDLGFVFSEEDKDSSLASIIPGLQRLGKKEEEKEEDDDCDEISVPRPYLSEAWEVQECDRRKKENPLVNWKMPAINNETDMKESLRWWAHTVASTVR

SEQ ID NO: 6387 - DNA, 1782 bp, Glycine max
  misc_feature (1)..(1782): Ceres Seq. ID no. 15176457
cgagacttcttttttcttgtgatgacaattcacaaaacaccaaagttaatcaaacaacgttctatgatggttgtgggatgccgacaccattaacaaacgggaagtgcggtttaggacctccatgatcaacaagaacatgctagagctactcagctagttactattttttttatctgtaagaattgaagacaaattatctcttacatgctcaatagactaagctagctagtataagaaaaggccctctctgccctactcctttttcactacactttctcacccactacactacactatgtttccccagccatggatcttcttgatagctaccatcattgcaatttcactgttcatgtcctcactggttgagtcatttccagtagctgataaggtcaaatccttgcctgaacagtcacctgtttccttccaacaatttgctggctttgtacccgttgatgacaagaaccagagagctcttttttactactttgttgaagcagaaaccaaccctgcttcaaagcctctagttctctggctcaatggagggcctggttgtacatctgtaggagttggagccttcacagaacatggtccttttgttacaaatcaaggagaagctattgagaaaaatcagtatagttggaacaaagaggcaaacattttgtacctagagtcaccagcaggcgttggattctcttactctctcaatttgtcattttataaaacactgaacgatgaaatcacagcccgagacagtctggttttcctgcggcgctggtttgccaagttcccagaatacaagaatagagatttttatataacgggagagagttatggaggtcactatgtacctcaacttgctgaactcataattaagagtaaagtgaatttcaacctaaagggcatagcaataggaaaccctcttctggatttcgacactgatatgaatgcagtcgatgaatattactggtctcatggaataataagtgattatgcatacaaaatcaggacctctctatgtaactcgtctagagtattaagagaatacttcagtggccaaatttccaaagattgtcttgttgcagctcaaaaagtctcagaagaatattcttttacaaatttcatcgacccatattacgttgttggggagaaatgtctttcttacaatgtttctcaggcaggttttcttagggagacgctaaattcagggatgtttcagtttaggaactctcattatgtgcttcaaacagaagaacctgaccagcaagttgatgagtgtaatttgaaatattcagagatgtacttgaacaggaaagatgtgcagaaggctctccatgcccggctggagggaaccaccaaatatcgtttgtgcagcaagattgtacaaacaaattatgacccattgaacagagagataccaacaattaatgttgtcggcttccttgtaaaatcaggtcttcgagtcatcgtatacagtggggatcaagactctgtgattccattcatgggcacgagaagattggttgatagactagcaaagacactaggacttaaaacaaccctgccttacagtgcctggtttgtggacaagcaggttggaggatggacaaaagtttatggcaatcacctcacgtacaccacaataagaggagcttcacatggcactccagctactcaaccaaagagatcttttgttttgtttaatgcgtttcttcaagggaaaccactccctaaagcatgaaaaatttaatgcttagttaataaatgtcattgccatataag

SEQ ID NO: 6388 - protein, 481 aa, Glycine max
  peptide (1)..(481): Ceres Seq. ID no. 15176458
  misc_feature (37)..(303): Pfam Name: Pfam Description:  Serine carboxypeptidase
  misc_feature (9)..(363): NCBI GI NO: 30685740 NR Description: serine carboxypeptidase -related
  misc_feature (317)..(480): NCBI GI NO: 30685740 NR Description: serine carboxypeptidase -related
  misc_feature (1)..(303): NCBI GI NO: 25289785 NR Description: probable serine carboxypeptidase II
  misc_feature (317)..(480): NCBI GI NO: 25289785 NR Description: probable serine carboxypeptidase II
  misc_feature (1)..(295): NCBI GI NO: 18396647 NR Description: serine carboxypeptidase -related
  misc_feature (315)..(480): NCBI GI NO: 18396647 NR Description: serine carboxypeptidase -related
  misc_feature (9)..(303): NCBI GI NO: 25289793 NR Description: probable serine carboxypeptidase II
  misc_feature (317)..(480): NCBI GI NO: 25289793 NR Description: probable serine carboxypeptidase II
  misc_feature (31)..(295): NCBI GI NO: 38347156 NR Description: OSJNBa0039C07.2
  misc_feature (316)..(479): NCBI GI NO: 38347156 NR Description: OSJNBa0039C07.2
MFPQPWIFLIATIIAISLFMSSLVESFPVADKVKSLPEQSPVSFQQFAGFVPVDDKNQRALFYYFVEAETNPASKPLVLWLNGGPGCTSVGVGAFTEHGPFVTNQGEAIEKNQYSWNKEANILYLESPAGVGFSYSLNLSFYKTLNDEITARDSLVFLRRWFAKFPEYKNRDFYITGESYGGHYVPQLAELIIKSKVNFNLKGIAIGNPLLDFDTDMNAVDEYYWSHGIISDYAYKIRTSLCNSSRVLREYFSGQISKDCLVAAQKVSEEYSFTNFIDPYYVVGEKCLSYNVSQAGFLRETLNSGMFQFRNSHYVLQTEEPDQQVDECNLKYSEMYLNRKDVQKALHARLEGTTKYRLCSKIVQTNYDPLNREIPTINVVGFLVKSGLRVIVYSGDQDSVIPFMGTRRLVDRLAKTLGLKTTLPYSAWFVDKQVGGWTKVYGNHLTYTTIRGASHGTPATQPKRSFVLFNAFLQGKPLPKA

SEQ ID NO: 6389 - protein, 462 aa, Glycine max
  peptide (1)..(462): Ceres Seq. ID no. 15176459
  misc_feature (18)..(284): Pfam Name: Pfam Description:  Serine carboxypeptidase
  misc_feature (1)..(344): NCBI GI NO: 30685740 NR Description: serine carboxypeptidase -related
  misc_feature (298)..(461): NCBI GI NO: 30685740 NR Description: serine carboxypeptidase -related
  misc_feature (1)..(284): NCBI GI NO: 25289785 NR Description: probable serine carboxypeptidase II
  misc_feature (298)..(461): NCBI GI NO: 25289785 NR Description: probable serine carboxypeptidase II
  misc_feature (1)..(276): NCBI GI NO: 18396647 NR Description: serine carboxypeptidase -related
  misc_feature (296)..(461): NCBI GI NO: 18396647 NR Description: serine carboxypeptidase -related
  misc_feature (1)..(284): NCBI GI NO: 25289793 NR Description: probable serine carboxypeptidase II
  misc_feature (298)..(461): NCBI GI NO: 25289793 NR Description: probable serine carboxypeptidase II
  misc_feature (12)..(276): NCBI GI NO: 38347156 NR Description: OSJNBa0039C07.2
  misc_feature (297)..(460): NCBI GI NO: 38347156 NR Description: OSJNBa0039C07.2
MSSLVESFPVADKVKSLPEQSPVSFQQFAGFVPVDDKNQRALFYYFVEAETNPASKPLVLWLNGGPGCTSVGVGAFTEHGPFVTNQGEAIEKNQYSWNKEANILYLESPAGVGFSYSLNLSFYKTLNDEITARDSLVFLRRWFAKFPEYKNRDFYITGESYGGHYVPQLAELIIKSKVNFNLKGIAIGNPLLDFDTDMNAVDEYYWSHGIISDYAYKIRTSLCNSSRVLREYFSGQISKDCLVAAQKVSEEYSFTNFIDPYYVVGEKCLSYNVSQAGFLRETLNSGMFQFRNSHYVLQTEEPDQQVDECNLKYSEMYLNRKDVQKALHARLEGTTKYRLCSKIVQTNYDPLNREIPTINVVGFLVKSGLRVIVYSGDQDSVIPFMGTRRLVDRLAKTLGLKTTLPYSAWFVDKQVGGWTKVYGNHLTYTTIRGASHGTPATQPKRSFVLFNAFLQGKPLPKA

SEQ ID NO: 6390 - protein, 265 aa, Glycine max
  peptide (1)..(265): Ceres Seq. ID no. 15176460
  misc_feature (1)..(87): Pfam Name: Pfam Description:  Serine carboxypeptidase
  misc_feature (1)..(147): NCBI GI NO: 30685740 NR Description: serine carboxypeptidase -related
  misc_feature (101)..(264): NCBI GI NO: 30685740 NR Description: serine carboxypeptidase -related
  misc_feature (1)..(87): NCBI GI NO: 25289785 NR Description: probable serine carboxypeptidase II
  misc_feature (101)..(264): NCBI GI NO: 25289785 NR Description: probable serine carboxypeptidase II
  misc_feature (1)..(79): NCBI GI NO: 18396647 NR Description: serine carboxypeptidase -related
  misc_feature (99)..(264): NCBI GI NO: 18396647 NR Description: serine carboxypeptidase -related
  misc_feature (1)..(87): NCBI GI NO: 25289793 NR Description: probable serine carboxypeptidase II
  misc_feature (101)..(264): NCBI GI NO: 25289793 NR Description: probable serine carboxypeptidase II
  misc_feature (1)..(79): NCBI GI NO: 38347156 NR Description: OSJNBa0039C07.2
  misc_feature (100)..(263): NCBI GI NO: 38347156 NR Description: OSJNBa0039C07.2
MNAVDEYYWSHGIISDYAYKIRTSLCNSSRVLREYFSGQISKDCLVAAQKVSEEYSFTNFIDPYYVVGEKCLSYNVSQAGFLRETLNSGMFQFRNSHYVLQTEEPDQQVDECNLKYSEMYLNRKDVQKALHARLEGTTKYRLCSKIVQTNYDPLNREIPTINVVGFLVKSGLRVIVYSGDQDSVIPFMGTRRLVDRLAKTLGLKTTLPYSAWFVDKQVGGWTKVYGNHLTYTTIRGASHGTPATQPKRSFVLFNAFLQGKPLPKA

SEQ ID NO: 6391 - DNA, 1322 bp, Glycine max
  misc_feature (1)..(1322): Ceres Seq. ID no. 15225507
tcacagatgaacaaagtcacagctagaagctctcaagaaatgtcttccaagaggcaccactttcattggacaaataaggttgggactgaggatggcgaagttcccacttcagaatcattctcaacactcatcaaagaggagaaaaaacatgaagacaaggtttctattgttgctgctgctgccgaggcaacaaaagcaccagcatctcatgtaacaaggaagaagaagctgcaagcagtggcagtctcaagaatccggtctgtgctcaccgtgttcaacaacaacagcaacaacaaccgatcctcgaactcatctttaggcctcggctcgcgcgtggtcggaaccttattcggctatcgacgagggcacgtgcactttgcattccagaaggaccccacttcccagccagccttcctcatagagctggctacgccaataagtgttcttgttcgcgagatggcgtccgggttggtcagaattgcccttgaatgtgacaaggagaaagaaacagagaagaaacatgtgaggctgcttgaagagcctctgtggaggacttactgcaatggcaagaagtgtggctttgccaccagaagagagtgtggaccaaaggattgggatgttctcaaagcagttgaaccaatttcaatgggtgctggtgttttgccaggaaataatagtaataataataataatagtggagctgaagcagtagggtcagagggtgaaatcatgtacatgagggcaaagtttgagagaattgttgggtccagagactctgaagctttctacatgatgaatcctgatagcaatggtgctcctgaactcagtgtttacttgcttagagtctagcaaccttgcaagcttgcaagatctctgtttattatacttaattttcctctttgttttgggttattggtatactacttgcttagctcttcaatcatgaacatggttgatctagtcttctccagatttttctttttttcatgtagtatattaagtgggtttacttttttttttgttagaataggtgagtaggctaagtaaggaagacggggggagatagtgggtaaccaatactttacagcattgtggtgtgtggggggtgggtcatgaaaggtgtatatgtgtaattttttttccctttccaatccttttaattaatgatatgagggatggaggttaatgcaagtcatcattgtcttggcatttttagttggttgaaatagcttttgatcatttcatcatgtcatcttattgtgaaattgccctcttcgccgttatgtactaattgcttgtcgattaatcaattaattccctat

SEQ ID NO: 6392 - protein, 282 aa, Glycine max
  peptide (1)..(282): Ceres Seq. ID no. 15225508
  misc_feature (111)..(172): Pfam Name: Pfam Description:  Protein of unknown function, DUF617
  misc_feature (11)..(172): NCBI GI NO: 15237221 NR Description: expressed protein [Arabidopsis thaliana]
  misc_feature (165)..(282): NCBI GI NO: 15237221 NR Description: expressed protein [Arabidopsis thaliana]
  misc_feature (2)..(282): NCBI GI NO: 11994755 NR Description: gb|AAB84348
  misc_feature (3)..(282): NCBI GI NO: 15230862 NR Description: expressed protein [Arabidopsis thaliana]
  misc_feature (3)..(168): NCBI GI NO: 34911646 NR Description: P0039G05.26
  misc_feature (176)..(282): NCBI GI NO: 34911646 NR Description: P0039G05.26
  misc_feature (102)..(282): NCBI GI NO: 21593037 NR Description: unknown [Arabidopsis thaliana]
  misc_feature (102)..(282): NCBI GI NO: 18405770 NR Description: expressed protein [Arabidopsis thaliana]
  misc_feature (109)..(282): NCBI GI NO: 15240220 NR Description: hypothetical protein [Arabidopsis thaliana]
  misc_feature (97)..(282): NCBI GI NO: 15227126 NR Description: hypothetical protein [Arabidopsis thaliana]
SQMNKVTARSSQEMSSKRHHFHWTNKVGTEDGEVPTSESFSTLIKEEKKHEDKVSIVAAAAEATKAPASHVTRKKKLQAVAVSRIRSVLTVFNNNSNNNRSSNSSLGLGSRVVGTLFGYRRGHVHFAFQKDPTSQPAFLIELATPISVLVREMASGLVRIALECDKEKETEKKHVRLLEEPLWRTYCNGKKCGFATRRECGPKDWDVLKAVEPISMGAGVLPGNNSNNNNNSGAEAVGSEGEIMYMRAKFERIVGSRDSEAFYMMNPDSNGAPELSVYLLRV

SEQ ID NO: 6393 - protein, 280 aa, Glycine max
  peptide (1)..(280): Ceres Seq. ID no. 15225509
  misc_feature (109)..(170): Pfam Name: Pfam Description:  Protein of unknown function, DUF617
  misc_feature (9)..(170): NCBI GI NO: 15237221 NR Description: expressed protein [Arabidopsis thaliana]
  misc_feature (163)..(280): NCBI GI NO: 15237221 NR Description: expressed protein [Arabidopsis thaliana]
  misc_feature (1)..(280): NCBI GI NO: 11994755 NR Description: gb|AAB84348
  misc_feature (1)..(280): NCBI GI NO: 15230862 NR Description: expressed protein [Arabidopsis thaliana]
  misc_feature (1)..(166): NCBI GI NO: 34911646 NR Description: P0039G05.26
  misc_feature (174)..(280): NCBI GI NO: 34911646 NR Description: P0039G05.26
  misc_feature (100)..(280): NCBI GI NO: 21593037 NR Description: unknown [Arabidopsis thaliana]
  misc_feature (100)..(280): NCBI GI NO: 18405770 NR Description: expressed protein [Arabidopsis thaliana]
  misc_feature (107)..(280): NCBI GI NO: 15240220 NR Description: hypothetical protein [Arabidopsis thaliana]
  misc_feature (95)..(280): NCBI GI NO: 15227126 NR Description: hypothetical protein [Arabidopsis thaliana]
MNKVTARSSQEMSSKRHHFHWTNKVGTEDGEVPTSESFSTLIKEEKKHEDKVSIVAAAAEATKAPASHVTRKKKLQAVAVSRIRSVLTVFNNNSNNNRSSNSSLGLGSRVVGTLFGYRRGHVHFAFQKDPTSQPAFLIELATPISVLVREMASGLVRIALECDKEKETEKKHVRLLEEPLWRTYCNGKKCGFATRRECGPKDWDVLKAVEPISMGAGVLPGNNSNNNNNSGAEAVGSEGEIMYMRAKFERIVGSRDSEAFYMMNPDSNGAPELSVYLLRV

SEQ ID NO: 6394 - protein, 269 aa, Glycine max
  peptide (1)..(269): Ceres Seq. ID no. 15225510
  misc_feature (98)..(159): Pfam Name: Pfam Description:  Protein of unknown function, DUF617
  misc_feature (1)..(159): NCBI GI NO: 15237221 NR Description: expressed protein [Arabidopsis thaliana]
  misc_feature (152)..(269): NCBI GI NO: 15237221 NR Description: expressed protein [Arabidopsis thaliana]
  misc_feature (1)..(269): NCBI GI NO: 11994755 NR Description: gb|AAB84348
  misc_feature (1)..(269): NCBI GI NO: 15230862 NR Description: expressed protein [Arabidopsis thaliana]
  misc_feature (1)..(155): NCBI GI NO: 34911646 NR Description: P0039G05.26
  misc_feature (163)..(269): NCBI GI NO: 34911646 NR Description: P0039G05.26
  misc_feature (89)..(269): NCBI GI NO: 21593037 NR Description: unknown [Arabidopsis thaliana]
  misc_feature (89)..(269): NCBI GI NO: 18405770 NR Description: expressed protein [Arabidopsis thaliana]
  misc_feature (96)..(269): NCBI GI NO: 15240220 NR Description: hypothetical protein [Arabidopsis thaliana]
  misc_feature (84)..(269): NCBI GI NO: 15227126 NR Description: hypothetical protein [Arabidopsis thaliana]
MSSKRHHFHWTNKVGTEDGEVPTSESFSTLIKEEKKHEDKVSIVAAAAEATKAPASHVTRKKKLQAVAVSRIRSVLTVFNNNSNNNRSSNSSLGLGSRVVGTLFGYRRGHVHFAFQKDPTSQPAFLIELATPISVLVREMASGLVRIALECDKEKETEKKHVRLLEEPLWRTYCNGKKCGFATRRECGPKDWDVLKAVEPISMGAGVLPGNNSNNNNNSGAEAVGSEGEIMYMRAKFERIVGSRDSEAFYMMNPDSNGAPELSVYLLRV

SEQ ID NO: 6395 - DNA, 1427 bp, Glycine max
  misc_feature (1)..(1427): Ceres Seq. ID no. 14302555
tctttccttctatctgacacacagagtcgccgactgactctgcactctgcaacagatgaagcacccaacatggcctcgcacctcctcttctcccttctcctctcttcctttctccaaccgttccgaattcttcaccacgcgcctctgcgcgcgtcctccgctgccgtcccctcccggcgccggcgacttctcggcgctcccctacgacgtgctggcgaagatcgccgcctccttcgacgaccccaacctccgcgcggcgtcactggtgtgccgcgcctggtgcgaggcgctgcggccgctgcgggaggccatggcgctgctcctctgggggaagcgcttcaagcacggccaccgtggcgtcggccccaaccccgatagggccctcgactccttcatcaaagccgccgcgcgcggctccgccctcgccatggtcgacgccggcctcatctactgggagcgaggcgagaagcccaaggccatggagttttatcataaggctgcggaactcggaaacccttctgcgcagtgcaatttgggactttcctatctccaagctgaacctccgaacactgagctagctgtcaaatggttacataaagcttctgtttgtgggaatgttcgtgcccagtaccagcttgcgctttgtctgcatcgcggtggtgggagggtccgtagcaatctgaaagaagctgctaaatggtatatgaaagctgcagagggtgggtatgtccgtgccatgtacaatatctccttgtgcttctcctttggggaaggactgacacgtaatcatcaactagcaagaaaatggatgaagcgggctgcggatcgtgggcatagtaaagctcaatttgagcatggacttgctctcttttctgagggagacatgatgaaggctgtggtttacttggaacttgctactcgtgctggtgaaaaaggtgctgctcatgtcaagaatgcagttcttcatcggctttcatcagcttcacgtgatcacgccatgcatctagctaacagttggcgtgcattgccatcaagttgagccaatccttatgttggtttgtgatgaagaagttgcatgaccttggtcggtggcatcagaagagtgaagtcaactaagaatacctaagcatagaaacaaggaaagcaggaggagctgactaagaaactacctttgcctgctaatcctgactatagtggttttcctataatataaagaaaactagttggtgggcgtttgtaaaagctagttgaatttgaatcctttgtaaaacgccccattgactagttgcaagttcctctcaagttccccttacaactgtgcagggtagaatgtggtgggcgttttttgtcataagtggcatctagaaaattgcaacgtcatatactcatattactccatattatataggatgaatgactgattaagt

SEQ ID NO: 6396 - protein, 327 aa, Glycine max
  peptide (1)..(327): Ceres Seq. ID no. 14302556
  misc_feature (124)..(255): Pfam Name: Pfam Description:  TPR repeat region
  misc_feature (20)..(325): NCBI GI NO: 18409624 NR Description: F-box protein family [Arabidopsis thaliana]
  misc_feature (20)..(325): NCBI GI NO: 25406056 NR Description: hypothetical protein F5A18.23
  misc_feature (34)..(322): NCBI GI NO: 38344482 NR Description: OSJNBa0022H21.17
  misc_feature (78)..(274): NCBI GI NO: 39997985 NR Description: conserved hypothetical protein
  misc_feature (92)..(312): NCBI GI NO: 22999260 NR Description: hypothetical protein [Magnetococcus sp. MC-1]
  misc_feature (92)..(300): NCBI GI NO: 22999260 NR Description: hypothetical protein [Magnetococcus sp. MC-1]
  misc_feature (92)..(300): NCBI GI NO: 22999260 NR Description: hypothetical protein [Magnetococcus sp. MC-1]
  misc_feature (73)..(299): NCBI GI NO: 26247143 NR Description: Hypothetical protein [Escherichia coli CFT073]
  misc_feature (92)..(292): NCBI GI NO: 9967440 NR Description: SEL1L [Mesocricetus auratus]
  misc_feature (92)..(292): NCBI GI NO: 6851089 NR Description: SEL1L [Homo sapiens]
MKHPTWPRTSSSPFSSLPFSNRSEFFTTRLCARPPLPSPPGAGDFSALPYDVLAKIAASFDDPNLRAASLVCRAWCEALRPLREAMALLLWGKRFKHGHRGVGPNPDRALDSFIKAAARGSALAMVDAGLIYWERGEKPKAMEFYHKAAELGNPSAQCNLGLSYLQAEPPNTELAVKWLHKASVCGNVRAQYQLALCLHRGGGRVRSNLKEAAKWYMKAAEGGYVRAMYNISLCFSFGEGLTRNHQLARKWMKRAADRGHSKAQFEHGLALFSEGDMMKAVVYLELATRAGEKGAAHVKNAVLHRLSSASRDHAMHLANSWRALPSS

SEQ ID NO: 6397 - protein, 242 aa, Glycine max
  peptide (1)..(242): Ceres Seq. ID no. 14302557
  misc_feature (39)..(170): Pfam Name: Pfam Description:  TPR repeat region
  misc_feature (1)..(240): NCBI GI NO: 18409624 NR Description: F-box protein family [Arabidopsis thaliana]
  misc_feature (1)..(240): NCBI GI NO: 25406056 NR Description: hypothetical protein F5A18.23
  misc_feature (1)..(237): NCBI GI NO: 38344482 NR Description: OSJNBa0022H21.17
  misc_feature (1)..(189): NCBI GI NO: 39997985 NR Description: conserved hypothetical protein
  misc_feature (7)..(227): NCBI GI NO: 22999260 NR Description: hypothetical protein [Magnetococcus sp. MC-1]
  misc_feature (7)..(215): NCBI GI NO: 22999260 NR Description: hypothetical protein [Magnetococcus sp. MC-1]
  misc_feature (7)..(215): NCBI GI NO: 22999260 NR Description: hypothetical protein [Magnetococcus sp. MC-1]
  misc_feature (1)..(214): NCBI GI NO: 26247143 NR Description: Hypothetical protein [Escherichia coli CFT073]
  misc_feature (7)..(207): NCBI GI NO: 9967440 NR Description: SEL1L [Mesocricetus auratus]
  misc_feature (7)..(207): NCBI GI NO: 6851089 NR Description: SEL1L [Homo sapiens]
MALLLWGKRFKHGHRGVGPNPDRALDSFIKAAARGSALAMVDAGLIYWERGEKPKAMEFYHKAAELGNPSAQCNLGLSYLQAEPPNTELAVKWLHKASVCGNVRAQYQLALCLHRGGGRVRSNLKEAAKWYMKAAEGGYVRAMYNISLCFSFGEGLTRNHQLARKWMKRAADRGHSKAQFEHGLALFSEGDMMKAVVYLELATRAGEKGAAHVKNAVLHRLSSASRDHAMHLANSWRALPSS

SEQ ID NO: 6398 - protein, 203 aa, Glycine max
  peptide (1)..(203): Ceres Seq. ID no. 14302558
  misc_feature (1)..(131): Pfam Name: Pfam Description:  TPR repeat region
  misc_feature (1)..(201): NCBI GI NO: 18409624 NR Description: F-box protein family [Arabidopsis thaliana]
  misc_feature (1)..(201): NCBI GI NO: 25406056 NR Description: hypothetical protein F5A18.23
  misc_feature (1)..(198): NCBI GI NO: 38344482 NR Description: OSJNBa0022H21.17
  misc_feature (1)..(150): NCBI GI NO: 39997985 NR Description: conserved hypothetical protein
  misc_feature (1)..(188): NCBI GI NO: 22999260 NR Description: hypothetical protein [Magnetococcus sp. MC-1]
  misc_feature (1)..(176): NCBI GI NO: 22999260 NR Description: hypothetical protein [Magnetococcus sp. MC-1]
  misc_feature (1)..(176): NCBI GI NO: 22999260 NR Description: hypothetical protein [Magnetococcus sp. MC-1]
  misc_feature (1)..(175): NCBI GI NO: 26247143 NR Description: Hypothetical protein [Escherichia coli CFT073]
  misc_feature (1)..(168): NCBI GI NO: 9967440 NR Description: SEL1L [Mesocricetus auratus]
  misc_feature (1)..(168): NCBI GI NO: 6851089 NR Description: SEL1L [Homo sapiens]
MVDAGLIYWERGEKPKAMEFYHKAAELGNPSAQCNLGLSYLQAEPPNTELAVKWLHKASVCGNVRAQYQLALCLHRGGGRVRSNLKEAAKWYMKAAEGGYVRAMYNISLCFSFGEGLTRNHQLARKWMKRAADRGHSKAQFEHGLALFSEGDMMKAVVYLELATRAGEKGAAHVKNAVLHRLSSASRDHAMHLANSWRALPSS

SEQ ID NO: 6399 - DNA, 1482 bp, Glycine max
  misc_feature (1)..(1482): Ceres Seq. ID no. 15176941
gataagtaattaaatcaagaatcttctaagattaacaaatggtgcatataggttgtatgatagtcatcttttttcctttaccattgttataacataatcatcacattggtgatattaattggcaggattgtttggagttataagagacccaaaatttagacttggtcattatgatgagtatggatataactcatttgtatttattacctttggacactactttctaccattcttggcaggcaagtttttgtttgggatgacattgtttattgtgcttttgatatacaaatggagaaaaaggcatttgtcaatatatgaaaatattgaaaattatctggaacaaaataacctgatgcctattggatactcatacaaagaaattaagaagatggctagaggtttcaaggagaaattgggtggaggaggctatggcattgtattcaagggaaagttgcatagtgggccttctgtggcaattaaaatgctacataaagcaaaaggtagcggccaagactttattagtgaaattgcaacaattggaagaatacatcatcaaaatgtagtacaactaattggatattgtgttgaaggctcaaaacgtgcccttgtttatgaattcatgcccaatggatctcttgacaaatttatttttcccaaagatggaaatatacatttaacatatgacgaaatatataatatagcaattggagtagctcgtgggattgcttatctccatcatgggtgtgagatgaaaattttgcattttgatatcaaaccccataacatccttcttgatgaaacattcaccccaaaggtctctgactttggattggcaaaactatatccaatagataatagcattgtgactaggacagaggcaagagggacaattggatatatggctccagaattattttatggaaatattggaggaatatcccacaaggctgatgtttatagctttgggatgcttttgatagatatgacaaataagaggaagaacccaaatccccatgcagatgatcattcaagtcaactttactttcctacttggatttataatcaacttggaaaagagacagatatagaaatggaaggtgtcacagaggaggaaaagaagatgatcattgtttcactttggtgtatacagttgaaaccaagcgatcgcccctcaatgaacaaagtagtggaaatgcttgaaggagatattgaaagcctggaaatacctccaaagccttctctatatccacatgatacaatggaaaatgatcaaagcatctactctagtcaaacaatgtcaacggacttcattagttcttctagttattccaaggaaattgtgactaatcctttggtagaggatgttatttgataatgcacagtagttatgtatttgtattcaccttattgtcttaaacacctgttcatctgtaatatttattttatctaaaagatttcctattgttttatctttcaaagttc

SEQ ID NO: 6400 - protein, 371 aa, Glycine max
  peptide (1)..(371): Ceres Seq. ID no. 15176942
  misc_feature (1)..(364): NCBI GI NO: 34895254 NR Description: putative receptor kinase
  misc_feature (1)..(327): NCBI GI NO: 5679314 NR Description: receptor kinase [Oryza sativa]
  misc_feature (1)..(327): NCBI GI NO: 8575482 NR Description: receptor-like kinase [Oryza sativa]
  misc_feature (1)..(327): NCBI GI NO: 34895226 NR Description: putative receptor kinase
  misc_feature (1)..(327): NCBI GI NO: 7716485 NR Description: receptor-like protein kinase [Oryza sativa]
  misc_feature (1)..(327): NCBI GI NO: 34895258 NR Description: putative receptor kinase
  misc_feature (1)..(327): NCBI GI NO: 7489698 NR Description: receptor kinase homolog LRK10 - wheat
  misc_feature (1)..(364): NCBI GI NO: 8575488 NR Description: receptor-like kinase [Oryza sativa]
  misc_feature (1)..(329): NCBI GI NO: 34895300 NR Description: putative receptor kinase
  misc_feature (1)..(327): NCBI GI NO: 13377502 NR Description: LRK33 [Triticum aestivum]
MTLFIVLLIYKWRKRHLSIYENIENYLEQNNLMPIGYSYKEIKKMARGFKEKLGGGGYGIVFKGKLHSGPSVAIKMLHKAKGSGQDFISEIATIGRIHHQNVVQLIGYCVEGSKRALVYEFMPNGSLDKFIFPKDGNIHLTYDEIYNIAIGVARGIAYLHHGCEMKILHFDIKPHNILLDETFTPKVSDFGLAKLYPIDNSIVTRTEARGTIGYMAPELFYGNIGGISHKADVYSFGMLLIDMTNKRKNPNPHADDHSSQLYFPTWIYNQLGKETDIEMEGVTEEEKKMIIVSLWCIQLKPSDRPSMNKVVEMLEGDIESLEIPPKPSLYPHDTMENDQSIYSSQTMSTDFISSSSYSKEIVTNPLVEDVI

SEQ ID NO: 6401 - protein, 339 aa, Glycine max
  peptide (1)..(339): Ceres Seq. ID no. 15176943
  misc_feature (1)..(332): NCBI GI NO: 34895254 NR Description: putative receptor kinase
  misc_feature (1)..(295): NCBI GI NO: 5679314 NR Description: receptor kinase [Oryza sativa]
  misc_feature (1)..(295): NCBI GI NO: 8575482 NR Description: receptor-like kinase [Oryza sativa]
  misc_feature (1)..(295): NCBI GI NO: 34895226 NR Description: putative receptor kinase
  misc_feature (1)..(295): NCBI GI NO: 7716485 NR Description: receptor-like protein kinase [Oryza sativa]
  misc_feature (1)..(295): NCBI GI NO: 34895258 NR Description: putative receptor kinase
  misc_feature (1)..(295): NCBI GI NO: 7489698 NR Description: receptor kinase homolog LRK10 - wheat
  misc_feature (1)..(332): NCBI GI NO: 8575488 NR Description: receptor-like kinase [Oryza sativa]
  misc_feature (1)..(297): NCBI GI NO: 34895300 NR Description: putative receptor kinase
  misc_feature (1)..(295): NCBI GI NO: 13377502 NR Description: LRK33 [Triticum aestivum]
MPIGYSYKEIKKMARGFKEKLGGGGYGIVFKGKLHSGPSVAIKMLHKAKGSGQDFISEIATIGRIHHQNVVQLIGYCVEGSKRALVYEFMPNGSLDKFIFPKDGNIHLTYDEIYNIAIGVARGIAYLHHGCEMKILHFDIKPHNILLDETFTPKVSDFGLAKLYPIDNSIVTRTEARGTIGYMAPELFYGNIGGISHKADVYSFGMLLIDMTNKRKNPNPHADDHSSQLYFPTWIYNQLGKETDIEMEGVTEEEKKMIIVSLWCIQLKPSDRPSMNKVVEMLEGDIESLEIPPKPSLYPHDTMENDQSIYSSQTMSTDFISSSSYSKEIVTNPLVEDVI

SEQ ID NO: 6402 - protein, 327 aa, Glycine max
  peptide (1)..(327): Ceres Seq. ID no. 15176944
  misc_feature (1)..(320): NCBI GI NO: 34895254 NR Description: putative receptor kinase
  misc_feature (1)..(283): NCBI GI NO: 5679314 NR Description: receptor kinase [Oryza sativa]
  misc_feature (1)..(283): NCBI GI NO: 34895226 NR Description: putative receptor kinase
  misc_feature (1)..(283): NCBI GI NO: 8575482 NR Description: receptor-like kinase [Oryza sativa]
  misc_feature (1)..(283): NCBI GI NO: 7716485 NR Description: receptor-like protein kinase [Oryza sativa]
  misc_feature (1)..(283): NCBI GI NO: 34895258 NR Description: putative receptor kinase
  misc_feature (1)..(283): NCBI GI NO: 7489698 NR Description: receptor kinase homolog LRK10 - wheat
  misc_feature (1)..(320): NCBI GI NO: 8575488 NR Description: receptor-like kinase [Oryza sativa]
  misc_feature (1)..(285): NCBI GI NO: 34895300 NR Description: putative receptor kinase
  misc_feature (1)..(283): NCBI GI NO: 13377502 NR Description: LRK33 [Triticum aestivum]
MARGFKEKLGGGGYGIVFKGKLHSGPSVAIKMLHKAKGSGQDFISEIATIGRIHHQNVVQLIGYCVEGSKRALVYEFMPNGSLDKFIFPKDGNIHLTYDEIYNIAIGVARGIAYLHHGCEMKILHFDIKPHNILLDETFTPKVSDFGLAKLYPIDNSIVTRTEARGTIGYMAPELFYGNIGGISHKADVYSFGMLLIDMTNKRKNPNPHADDHSSQLYFPTWIYNQLGKETDIEMEGVTEEEKKMIIVSLWCIQLKPSDRPSMNKVVEMLEGDIESLEIPPKPSLYPHDTMENDQSIYSSQTMSTDFISSSSYSKEIVTNPLVEDVI

SEQ ID NO: 6403 - DNA, 1282 bp, Glycine max
  misc_feature (1)..(1282): Ceres Seq. ID no. 15226408
agcacaaatcaaactgtgtgttctttgattgtgaagaaaaagctttgatgcaataggtaccatgatggtaggctctctgatcagcaaatggctttgctgcaatatcagcgtgaaaatcttcattttttgagtgaggagattcttcgattgcaagagtgtctaagcaaatatgagggaactgatgatcggagcacaccacaggttgaccttgcccatctactagctgctcgtgatcaagagttacggacactttctgcagagatgaaccaagtgcaatctgagttgaggcttgcccgttccttgattgctgaaagggactcagagatccaacatgttcgcacgaccaacaaccaggtatctcactggatttactaatactgaaaagtgtatgtgctttgactgcaaggtgcttacagtaaacatcctaacagtatgtagaagagaatgaaagactaagagctatcttaggggaatggagcacccgggctgccaaggtatttattattcatatctgcaataaatgcgaacagctaccaactgttacaatatatactccatccggtcttaatttataagcaaaaaagacatgtttcacacttattaagaaaattagttaattttattaaattgtgtcattttcaattaaaaaataaacattttctaaactatatttcattgaaacttgatatcaagcataaaaaaaagtctttgaccttaataaatgaagaatattttagagagaatctcattaaataagacataggtaattaagatttgtttatatttaagacacaaaaataagaaacatgcccagttcgtgttgagcatttaacactacagtattatattcgagaccagaggttgagtacttcggttgggttttgttgttgtgaaagtatattctgcttaaaccttttattatcaatgattaaagcttgagcgagcactggaggctgagcggatgtcaactcttgaattacaaaggaaactttcaacgcttagaagtcaatcatatacagcagatgaagcaaacgaacttggagcttaactcacttgcaggcaaatatggaacatgcccagttcgtgttgttgagcatttaaccttgttctcacaatttaaaaagaacacttagacgtgtgtccaaggtaccgtcactattgtggagagattcaatgtacatattagcttcaaatagggttttatttttgttaagagaaattcaaattgatgtaatttaattgagttatcgtgcgccattgttctccaaaaaaaaaaaaaaaa

SEQ ID NO: 6404 - protein, 95 aa, Glycine max
  peptide (1)..(95): Ceres Seq. ID no. 15226409
  misc_feature (17)..(89): NCBI GI NO: 15242018 NR Description: expressed protein [Arabidopsis thaliana]
  misc_feature (1)..(18): NCBI GI NO: 15242018 NR Description: expressed protein [Arabidopsis thaliana]
  misc_feature (1)..(89): NCBI GI NO: 18396221 NR Description: expressed protein [Arabidopsis thaliana]
  misc_feature (1)..(89): NCBI GI NO: 20453094 NR Description: At2g06010/F5K7.23 [Arabidopsis thaliana]
  misc_feature (1)..(90): NCBI GI NO: 25411202 NR Description: hypothetical protein At2g06010
MALLQYQRENLHFLSEEILRLQECLSKYEGTDDRSTPQVDLAHLLAARDQELRTLSAEMNQVQSELRLARSLIAERDSEIQHVRTTNNQVSHWIY

SEQ ID NO: 6405 - DNA, 1238 bp, Glycine max
  misc_feature (1)..(1238): Ceres Seq. ID no. 14312789
tttcaccgatttcatgttgtgtacttggagaccaatgcgaaatgctgccaaaattttgtcaaatttaacaaaatagaattaaccctgatgtatgaagctaccataaaagacggtcttcccaaatgggatagggccacacctataataaaaaagtgagattttcatgcatcgaataactttgagagtatgaccgagttattacttagatggatcgaagttggatgaatgaaagtcgcatcagcccagaatatgaggaaggcgtcgagcaattcttacaatttgcttcagaaagaggtcaaccggatgaagatggaaaatattattgtccttgcatcaattgtttgaatgaaagacgacaaatactggatgacatacgagagcatctgttgtgtgatggaattaagaggaattatacgacgtggatatggcatggtgaaatgacagacatgcagagtgggcaacaatccgaaccgtttgatgtagaaatgggagatcgcttggaggatatgattcgtgaccttggacaagagtcttttcagcaagcacatgcccctatgtatgatacattacaaactgattcaaagaaacctttgtatccggggtgcaagaattcgttgacgctgttgtcggcagttttaagtctggttaatatcaaagccagatatgggtggagtgacaaaaactttagttcactgcttcaagtagtgcacgacatgcttccagaggaaaacacattgcctaaaagttactatcaagcaaagaaaatattgtgtcccatgggtatggagtatcagaagattcatgtttgcccgaatgattgcatattatacagacatcaatttcaagaaatgtacaataagaatctatgtttgtattcaatagtgctttgaaaggacttgacgatactcaacaaagtaaatccaagactcctgctaggtggattgttgttaaatgtaatagacaaaaaggaagcactgagtgtgagtattacgtcatgcattggatgtcaactataatcttaggaaatttccagaataattgggaaatgtatttcactgatcctagaccattggaaccagaaagattgaaggcacttcgcaaccagtgggcaaagtactatttgaaagtgaaaaatgaaacttaggatgtttagacaatcttgtaattgtagtttatatttacttaatttacaattcatgtctcaacattaaatatgttttaaattcatagtaattagt

SEQ ID NO: 6406 - protein, 227 aa, Glycine max
  peptide (1)..(227): Ceres Seq. ID no. 14312790
  misc_feature (169)..(222): Pfam Name: Pfam Description:  Transposase family tnp2
  misc_feature (98)..(215): NCBI GI NO: 34894078 NR Description: putative retrotransposable elements TNP2 protein
  misc_feature (1)..(77): NCBI GI NO: 34894078 NR Description: putative retrotransposable elements TNP2 protein
  misc_feature (98)..(215): NCBI GI NO: 32489782 NR Description: OSJNBb0018A10.13
  misc_feature (1)..(77): NCBI GI NO: 32489782 NR Description: OSJNBb0018A10.13
  misc_feature (1)..(221): NCBI GI NO: 38344499 NR Description: OSJNBa0013A04.15
  misc_feature (1)..(221): NCBI GI NO: 38344518 NR Description: OSJNBa0016N04.11
  misc_feature (98)..(215): NCBI GI NO: 38345997 NR Description: OSJNBa0073L13.7
  misc_feature (1)..(77): NCBI GI NO: 38345997 NR Description: OSJNBa0073L13.7
  misc_feature (98)..(215): NCBI GI NO: 38345570 NR Description: OSJNBa0027H06.6
  misc_feature (1)..(77): NCBI GI NO: 38345570 NR Description: OSJNBa0027H06.6
MDRSWMNESRISPEYEEGVEQFLQFASERGQPDEDGKYYCPCINCLNERRQILDDIREHLLCDGIKRNYTTWIWHGEMTDMQSGQQSEPFDVEMGDRLEDMIRDLGQESFQQAHAPMYDTLQTDSKKPLYPGCKNSLTLLSAVLSLVNIKARYGWSDKNFSSLLQVVHDMLPEENTLPKSYYQAKKILCPMGMEYQKIHVCPNDCILYRHQFQEMYNKNLCLYSIVL

SEQ ID NO: 6407 - protein, 222 aa, Glycine max
  peptide (1)..(222): Ceres Seq. ID no. 14312791
  misc_feature (164)..(217): Pfam Name: Pfam Description:  Transposase family tnp2
  misc_feature (93)..(210): NCBI GI NO: 34894078 NR Description: putative retrotransposable elements TNP2 protein
  misc_feature (1)..(72): NCBI GI NO: 34894078 NR Description: putative retrotransposable elements TNP2 protein
  misc_feature (93)..(210): NCBI GI NO: 32489782 NR Description: OSJNBb0018A10.13
  misc_feature (1)..(72): NCBI GI NO: 32489782 NR Description: OSJNBb0018A10.13
  misc_feature (1)..(216): NCBI GI NO: 38344499 NR Description: OSJNBa0013A04.15
  misc_feature (1)..(216): NCBI GI NO: 38344518 NR Description: OSJNBa0016N04.11
  misc_feature (93)..(210): NCBI GI NO: 38345997 NR Description: OSJNBa0073L13.7
  misc_feature (1)..(72): NCBI GI NO: 38345997 NR Description: OSJNBa0073L13.7
  misc_feature (93)..(210): NCBI GI NO: 38345570 NR Description: OSJNBa0027H06.6
  misc_feature (1)..(72): NCBI GI NO: 38345570 NR Description: OSJNBa0027H06.6
MNESRISPEYEEGVEQFLQFASERGQPDEDGKYYCPCINCLNERRQILDDIREHLLCDGIKRNYTTWIWHGEMTDMQSGQQSEPFDVEMGDRLEDMIRDLGQESFQQAHAPMYDTLQTDSKKPLYPGCKNSLTLLSAVLSLVNIKARYGWSDKNFSSLLQVVHDMLPEENTLPKSYYQAKKILCPMGMEYQKIHVCPNDCILYRHQFQEMYNKNLCLYSIVL

SEQ ID NO: 6408 - protein, 150 aa, Glycine max
  peptide (1)..(150): Ceres Seq. ID no. 14312792
  misc_feature (92)..(145): Pfam Name: Pfam Description:  Transposase family tnp2
  misc_feature (21)..(138): NCBI GI NO: 34894078 NR Description: putative retrotransposable elements TNP2 protein
  misc_feature (21)..(138): NCBI GI NO: 32489782 NR Description: OSJNBb0018A10.13
  misc_feature (1)..(144): NCBI GI NO: 38344499 NR Description: OSJNBa0013A04.15
  misc_feature (1)..(144): NCBI GI NO: 38344518 NR Description: OSJNBa0016N04.11
  misc_feature (21)..(138): NCBI GI NO: 38345997 NR Description: OSJNBa0073L13.7
  misc_feature (21)..(138): NCBI GI NO: 38345570 NR Description: OSJNBa0027H06.6
  misc_feature (21)..(138): NCBI GI NO: 21740606 NR Description: OSJNBb0089K24.2
  misc_feature (21)..(138): NCBI GI NO: 34898838 NR Description: OJ1058_A12.17
  misc_feature (21)..(138): NCBI GI NO: 34909086 NR Description: putative retrotransposable elements TNP2
  misc_feature (21)..(138): NCBI GI NO: 38346477 NR Description: OSJNBa0021F22.10
MTDMQSGQQSEPFDVEMGDRLEDMIRDLGQESFQQAHAPMYDTLQTDSKKPLYPGCKNSLTLLSAVLSLVNIKARYGWSDKNFSSLLQVVHDMLPEENTLPKSYYQAKKILCPMGMEYQKIHVCPNDCILYRHQFQEMYNKNLCLYSIVL

SEQ ID NO: 6409 - DNA, 1694 bp, Glycine max
  misc_feature (1)..(1694): Ceres Seq. ID no. 15171476
agagttaagagagccatatatcatggggtactatttggtattcgttggtgtgttcttgtggtgtgccatggctagtcacattaatggactagccatgatggatggaaagttaatgagttcctcggcaaataattatgactatggagatgctcttggcaaagccatcttgttttttgaaggacaacgctcggggaacttgcccgccacccaaagagtgaagtggaggggagactccgctctctctgatggcaaacttcaaaacgtggatttgattggaggatattacgatgctggagataacgtcaagtttggatggccaatggcatttacaactagcttattgagttgggctgctgtagagtacgagagtgagatatcttcggtgaaccagcttggttacctccacagtgctattcattggggcgcagactttatactgagagcccacacttccccaaccaccctctatacacaggtgggagatgggaacgctgatcacaattgttgggagcgcccggaagacatggatacagcaagggcagtgtacaagatagatgctaattccccgggaactgaagccgcagctgagtctgctgctgctcttgctgctgcttcaattgtcttcaagaaaatagatgccaattattcctccacgctattaagcaagtcaaaatcactgtttgattttgcagacaagtataggggttcttactcgggttcttgtccattctattgctcgtactcaggttaccaggatgaactgttatgggctgcttcttggctatataaggcgagtggagaaagcaagtacttgagttactccataggcaaccaaggttggagtcaggcggtgtctgaattcagctgggataacaaatatgttggagctcagacattactaacggaggaattctatggtgggaagaaagacttggccaagtttaagagtgacgttgaatcatttatatgttcagtgatgccagcaagtagctctctacagattaaaacaactcctggtgggcttctatttactagagacagcagtaatttgcaatatgccacgagctcaaccatggtgctattcattttctctaaaatcctaaacagaaatcacattgatagaatacattgtggttctgcgcttttcaccccgtctcagattagagcctttgcaaaaacacaggtggactacatactaggaagcaatccgatgaagatgtcttacatggtgggatttggcagtaaatacccaaagcaattacatcacagaggctcatccatcccttcaatcaatgttcatccgaccaaggtgggttgcaatgatggtctctcagtttattacaattctgctaatccaaatccaaatactcatgtgggtgcgattgttggaggccccgattcaaatgaccgattcagtgatgcaagatctgactattcccacagcgaacctaccacctacatgaatgctgctttcgtggcttcagtgtctgctttgcttggcaaaacgaccgatcgaaaccaaattcaggactctgcagtttccccatatcgatgctagggaaactaatgaagttaattaatgtaacataatcaccgattatatatgtgtcagtggtactagttatttaccctgccatatattgaaactccacttttatgggctggtataataaaatcatacgtactgttttacc

SEQ ID NO: 6410 - protein, 518 aa, Glycine max
  peptide (1)..(518): Ceres Seq. ID no. 15171477
  misc_feature (46)..(498): Pfam Name: Pfam Description:  Glycosyl hydrolase family 9
  misc_feature (8)..(502): NCBI GI NO: 1039431 NR Description: cellulase [Phaseolus vulgaris]
  misc_feature (8)..(502): NCBI GI NO: 1346225 NR Description: Endoglucanase precursor
  misc_feature (8)..(502): NCBI GI NO: 228690 NR Description: abscission cellulase
  misc_feature (16)..(505): NCBI GI NO: 575404 NR Description: cellulase [Sambucus nigra]
  misc_feature (16)..(505): NCBI GI NO: 1076692 NR Description: cellulase (EC 3.2.1.4) - European elder (fragment)
  misc_feature (46)..(518): NCBI GI NO: 1363496 NR Description: cellulase (EC 3.2.1.4) 3D precursor - pepper
  misc_feature (46)..(518): NCBI GI NO: 1655543 NR Description: cellulase; endo-beta-1,4-glucanase
  misc_feature (32)..(502): NCBI GI NO: 15236526 NR Description: glycosyl hydrolase family 9 [Arabidopsis thaliana]
  misc_feature (46)..(504): NCBI GI NO: 7488977 NR Description: cellulase (EC 3.2.1.4) Cel1 precursor - tomato
  misc_feature (30)..(502): NCBI GI NO: 30681176 NR Description: glycosyl hydrolase family 9 [Arabidopsis thaliana]
ELREPYIMGYYLVFVGVFLWCAMASHINGLAMMDGKLMSSSANNYDYGDALGKAILFFEGQRSGNLPATQRVKWRGDSALSDGKLQNVDLIGGYYDAGDNVKFGWPMAFTTSLLSWAAVEYESEISSVNQLGYLHSAIHWGADFILRAHTSPTTLYTQVGDGNADHNCWERPEDMDTARAVYKIDANSPGTEAAAESAAALAAASIVFKKIDANYSSTLLSKSKSLFDFADKYRGSYSGSCPFYCSYSGYQDELLWAASWLYKASGESKYLSYSIGNQGWSQAVSEFSWDNKYVGAQTLLTEEFYGGKKDLAKFKSDVESFICSVMPASSSLQIKTTPGGLLFTRDSSNLQYATSSTMVLFIFSKILNRNHIDRIHCGSALFTPSQIRAFAKTQVDYILGSNPMKMSYMVGFGSKYPKQLHHRGSSIPSINVHPTKVGCNDGLSVYYNSANPNPNTHVGAIVGGPDSNDRFSDARSDYSHSEPTTYMNAAFVASVSALLGKTTDRNQIQDSAVSPYRC

SEQ ID NO: 6411 - protein, 511 aa, Glycine max
  peptide (1)..(511): Ceres Seq. ID no. 15171478
  misc_feature (39)..(491): Pfam Name: Pfam Description:  Glycosyl hydrolase family 9
  misc_feature (1)..(495): NCBI GI NO: 1039431 NR Description: cellulase [Phaseolus vulgaris]
  misc_feature (1)..(495): NCBI GI NO: 1346225 NR Description: Endoglucanase precursor
  misc_feature (1)..(495): NCBI GI NO: 228690 NR Description: abscission cellulase
  misc_feature (9)..(498): NCBI GI NO: 575404 NR Description: cellulase [Sambucus nigra]
  misc_feature (9)..(498): NCBI GI NO: 1076692 NR Description: cellulase (EC 3.2.1.4) - European elder (fragment)
  misc_feature (39)..(511): NCBI GI NO: 1363496 NR Description: cellulase (EC 3.2.1.4) 3D precursor - pepper
  misc_feature (39)..(511): NCBI GI NO: 1655543 NR Description: cellulase; endo-beta-1,4-glucanase
  misc_feature (25)..(495): NCBI GI NO: 15236526 NR Description: glycosyl hydrolase family 9 [Arabidopsis thaliana]
  misc_feature (39)..(497): NCBI GI NO: 7488977 NR Description: cellulase (EC 3.2.1.4) Cel1 precursor - tomato
  misc_feature (23)..(495): NCBI GI NO: 30681176 NR Description: glycosyl hydrolase family 9 [Arabidopsis thaliana]
MGYYLVFVGVFLWCAMASHINGLAMMDGKLMSSSANNYDYGDALGKAILFFEGQRSGNLPATQRVKWRGDSALSDGKLQNVDLIGGYYDAGDNVKFGWPMAFTTSLLSWAAVEYESEISSVNQLGYLHSAIHWGADFILRAHTSPTTLYTQVGDGNADHNCWERPEDMDTARAVYKIDANSPGTEAAAESAAALAAASIVFKKIDANYSSTLLSKSKSLFDFADKYRGSYSGSCPFYCSYSGYQDELLWAASWLYKASGESKYLSYSIGNQGWSQAVSEFSWDNKYVGAQTLLTEEFYGGKKDLAKFKSDVESFICSVMPASSSLQIKTTPGGLLFTRDSSNLQYATSSTMVLFIFSKILNRNHIDRIHCGSALFTPSQIRAFAKTQVDYILGSNPMKMSYMVGFGSKYPKQLHHRGSSIPSINVHPTKVGCNDGLSVYYNSANPNPNTHVGAIVGGPDSNDRFSDARSDYSHSEPTTYMNAAFVASVSALLGKTTDRNQIQDSAVSPYRC

SEQ ID NO: 6412 - protein, 496 aa, Glycine max
  peptide (1)..(496): Ceres Seq. ID no. 15171479
  misc_feature (24)..(476): Pfam Name: Pfam Description:  Glycosyl hydrolase family 9
  misc_feature (1)..(480): NCBI GI NO: 1039431 NR Description: cellulase [Phaseolus vulgaris]
  misc_feature (1)..(480): NCBI GI NO: 1346225 NR Description: Endoglucanase precursor
  misc_feature (1)..(480): NCBI GI NO: 228690 NR Description: abscission cellulase
  misc_feature (1)..(483): NCBI GI NO: 575404 NR Description: cellulase [Sambucus nigra]
  misc_feature (1)..(483): NCBI GI NO: 1076692 NR Description: cellulase (EC 3.2.1.4) - European elder (fragment)
  misc_feature (24)..(496): NCBI GI NO: 1363496 NR Description: cellulase (EC 3.2.1.4) 3D precursor - pepper
  misc_feature (24)..(496): NCBI GI NO: 1655543 NR Description: cellulase; endo-beta-1,4-glucanase
  misc_feature (10)..(480): NCBI GI NO: 15236526 NR Description: glycosyl hydrolase family 9 [Arabidopsis thaliana]
  misc_feature (24)..(482): NCBI GI NO: 7488977 NR Description: cellulase (EC 3.2.1.4) Cel1 precursor - tomato
  misc_feature (8)..(480): NCBI GI NO: 30681176 NR Description: glycosyl hydrolase family 9 [Arabidopsis thaliana]
MASHINGLAMMDGKLMSSSANNYDYGDALGKAILFFEGQRSGNLPATQRVKWRGDSALSDGKLQNVDLIGGYYDAGDNVKFGWPMAFTTSLLSWAAVEYESEISSVNQLGYLHSAIHWGADFILRAHTSPTTLYTQVGDGNADHNCWERPEDMDTARAVYKIDANSPGTEAAAESAAALAAASIVFKKIDANYSSTLLSKSKSLFDFADKYRGSYSGSCPFYCSYSGYQDELLWAASWLYKASGESKYLSYSIGNQGWSQAVSEFSWDNKYVGAQTLLTEEFYGGKKDLAKFKSDVESFICSVMPASSSLQIKTTPGGLLFTRDSSNLQYATSSTMVLFIFSKILNRNHIDRIHCGSALFTPSQIRAFAKTQVDYILGSNPMKMSYMVGFGSKYPKQLHHRGSSIPSINVHPTKVGCNDGLSVYYNSANPNPNTHVGAIVGGPDSNDRFSDARSDYSHSEPTTYMNAAFVASVSALLGKTTDRNQIQDSAVSPYRC

SEQ ID NO: 6413 - DNA, 1141 bp, Glycine max
  misc_feature (1)..(1141): Ceres Seq. ID no. 14312777
aaaaaaaaaaaaaacgcgcactctatataagtgcattttttccctttctctttcatcaaattgtgcttgtgattgtctttgtatcacgaaaactatacgattcgattccttgttttcaatggacaccttcttcaattctcaatcttcttcttcttcgagaagccgctggagttacgatactctcaagaatttccgtgagatctctccgctggttcagaatcacatcaaacgggtttattttacgttatgttgcgctgtggtggctgctgctgttggagcttttcttcatgttctgtggaacattgggggttttctcaccacgttggcttccattggaagcatggtttggttgctatctacaccccctgttgaagagcaaaagaggttgtctctgttgatggcttcggccttgtttcagggcgcttccattggacctctgattgatttggctattgccattgatcctagccttattgttagtgcatttgtggcaacttctttggcttttgcttgcttctctgcggcagctttagttgcaaggcgtagggagtacctctaccttggtggtttgctttcttctgggctgtccattcttatgtggttgcactttgcttcctctctctttgggggctcaattgcactcttcaagtttgagctgtactttgggcttttggtgtttgtgggctacgttatagtagacactcaagaaattattgaaagggctcactttggtgacctggattatgtgaagcatgcattgacattgttcactgatttggctgcaatctttgtgcgaattcttattataatgttgaagaattcatctgagagaaatgagaagaagaagaaaaggagagattagtaggctgaccgaccgactcgagctcaggcttctctacagtaatttagtttgtggagaatacataattagctgtttagatgatgttggtcccttgtgtagttagttagctatgtgtttgctgtaatggtaaatgtcaggatttcttttaaacatcttcatatgtatttgccaatatcataatgtgtcgtataacatcataccttggtttaagcagcatgttgacgaaaccttcactaaattttatttttgggtttagtttattttatacattaagtggac

SEQ ID NO: 6414 - protein, 286 aa, Glycine max
  peptide (1)..(286): Ceres Seq. ID no. 14312778
  misc_feature (65)..(274): Pfam Name: Pfam Description:  Uncharacterised protein family UPF0005
  misc_feature (39)..(286): NCBI GI NO: 14719276 NR Description: Bax inhibitor 1 [Nicotiana tabacum]
  misc_feature (39)..(286): NCBI GI NO: 21593125 NR Description: Bax inhibitor-1 like [Arabidopsis thaliana]
  misc_feature (39)..(286): NCBI GI NO: 15238017 NR Description: Bax inhibitor-1 (BI-1), putative
  misc_feature (39)..(286): NCBI GI NO: 14719274 NR Description: Bax inhibitor 1 [Brassica napus]
  misc_feature (39)..(284): NCBI GI NO: 17981376 NR Description: bax inhibitor-like protein [Brassica oleracea]
  misc_feature (40)..(285): NCBI GI NO: 12229685 NR Description: Bax inhibitor-1 (BI-1) (OsBI-1)
  misc_feature (40)..(285): NCBI GI NO: 13940165 NR Description: BAX inhibitor 1 [Hordeum vulgare subsp. vulgare]
  misc_feature (56)..(283): NCBI GI NO: 15236582 NR Description: Bax inhibitor-1 (BI1) family
  misc_feature (57)..(282): NCBI GI NO: 21311961 NR Description: testis enhanced gene transcript; Bax inhibitor-1
  misc_feature (57)..(282): NCBI GI NO: 26331690 NR Description: unnamed protein product [Mus musculus]
KKKKTRTLYKCIFSLSLSSNCACDCLCITKTIRFDSLFSMDTFFNSQSSSSSRSRWSYDTLKNFREISPLVQNHIKRVYFTLCCAVVAAAVGAFLHVLWNIGGFLTTLASIGSMVWLLSTPPVEEQKRLSLLMASALFQGASIGPLIDLAIAIDPSLIVSAFVATSLAFACFSAAALVARRREYLYLGGLLSSGLSILMWLHFASSLFGGSIALFKFELYFGLLVFVGYVIVDTQEIIERAHFGDLDYVKHALTLFTDLAAIFVRILIIMLKNSSERNEKKKKRRD

SEQ ID NO: 6415 - protein, 247 aa, Glycine max
  peptide (1)..(247): Ceres Seq. ID no. 14312779
  misc_feature (26)..(235): Pfam Name: Pfam Description:  Uncharacterised protein family UPF0005
  misc_feature (1)..(247): NCBI GI NO: 14719276 NR Description: Bax inhibitor 1 [Nicotiana tabacum]
  misc_feature (1)..(247): NCBI GI NO: 21593125 NR Description: Bax inhibitor-1 like [Arabidopsis thaliana]
  misc_feature (1)..(247): NCBI GI NO: 15238017 NR Description: Bax inhibitor-1 (BI-1), putative
  misc_feature (1)..(247): NCBI GI NO: 14719274 NR Description: Bax inhibitor 1 [Brassica napus]
  misc_feature (1)..(245): NCBI GI NO: 17981376 NR Description: bax inhibitor-like protein [Brassica oleracea]
  misc_feature (1)..(246): NCBI GI NO: 12229685 NR Description: Bax inhibitor-1 (BI-1) (OsBI-1)
  misc_feature (1)..(246): NCBI GI NO: 13940165 NR Description: BAX inhibitor 1 [Hordeum vulgare subsp. vulgare]
  misc_feature (17)..(244): NCBI GI NO: 15236582 NR Description: Bax inhibitor-1 (BI1) family
  misc_feature (18)..(243): NCBI GI NO: 21311961 NR Description: testis enhanced gene transcript; Bax inhibitor-1
  misc_feature (18)..(243): NCBI GI NO: 26331690 NR Description: unnamed protein product [Mus musculus]
MDTFFNSQSSSSSRSRWSYDTLKNFREISPLVQNHIKRVYFTLCCAVVAAAVGAFLHVLWNIGGFLTTLASIGSMVWLLSTPPVEEQKRLSLLMASALFQGASIGPLIDLAIAIDPSLIVSAFVATSLAFACFSAAALVARRREYLYLGGLLSSGLSILMWLHFASSLFGGSIALFKFELYFGLLVFVGYVIVDTQEIIERAHFGDLDYVKHALTLFTDLAAIFVRILIIMLKNSSERNEKKKKRRD

SEQ ID NO: 6416 - protein, 173 aa, Glycine max
  peptide (1)..(173): Ceres Seq. ID no. 14312780
  misc_feature (1)..(161): Pfam Name: Pfam Description:  Uncharacterised protein family UPF0005
  misc_feature (1)..(173): NCBI GI NO: 14719276 NR Description: Bax inhibitor 1 [Nicotiana tabacum]
  misc_feature (1)..(173): NCBI GI NO: 21593125 NR Description: Bax inhibitor-1 like [Arabidopsis thaliana]
  misc_feature (1)..(173): NCBI GI NO: 15238017 NR Description: Bax inhibitor-1 (BI-1), putative
  misc_feature (1)..(173): NCBI GI NO: 14719274 NR Description: Bax inhibitor 1 [Brassica napus]
  misc_feature (1)..(171): NCBI GI NO: 17981376 NR Description: bax inhibitor-like protein [Brassica oleracea]
  misc_feature (1)..(172): NCBI GI NO: 12229685 NR Description: Bax inhibitor-1 (BI-1) (OsBI-1)
  misc_feature (1)..(172): NCBI GI NO: 13940165 NR Description: BAX inhibitor 1 [Hordeum vulgare subsp. vulgare]
  misc_feature (1)..(170): NCBI GI NO: 15236582 NR Description: Bax inhibitor-1 (BI1) family
  misc_feature (1)..(169): NCBI GI NO: 21311961 NR Description: testis enhanced gene transcript; Bax inhibitor-1
  misc_feature (1)..(169): NCBI GI NO: 26331690 NR Description: unnamed protein product [Mus musculus]
MVWLLSTPPVEEQKRLSLLMASALFQGASIGPLIDLAIAIDPSLIVSAFVATSLAFACFSAAALVARRREYLYLGGLLSSGLSILMWLHFASSLFGGSIALFKFELYFGLLVFVGYVIVDTQEIIERAHFGDLDYVKHALTLFTDLAAIFVRILIIMLKNSSERNEKKKKRRD

SEQ ID NO: 6417 - DNA, 1551 bp, Glycine max
  misc_feature (1)..(1551): Ceres Seq. ID no. 14308437
gggagagaaaaacgaagagtgagtcaccgttccgtgttcccgccgagtcggtataaacgagtgagcgagtcacaactcaccgcgctgcatggaccctctagaagctttggtcgcccaaatccaagggctttcgagcactcccggcgacctcactcgcctccacagtgttctgaagcaagccgatgactcgctccgatccgagtcaagtcgcctcgctccgattctcacccagctcgacccctccattcattccctcgggtttctctacatcctagaagcttcaatgaccgatccggtaaccaaaacgcaggctgagaccgtcgttccgatcgttactaggtttattggcgcttgcagcccggagcagattcgcttagcgcctgataaatttttatctgtctgtaagaggttaaaggatcaagtgatgctgctggaagctccgatacggggtgtggctcctttgttcactgctcttcggaaacttcaggtctccacagaacacttgactccactacactcagagtttcttctgctgtgcttgttggcaaagtgctacaaaactggtctatccattttggatgatgatgtttttgaagtagaccaaccacgagacctttttctctactgttattatggaggtatgatatgcattggacagaagcgctttcagaaggcattggacctcctgcataatgttgtaactgctcccatgtctaccataaatgctatagctgttgaagcttacaaaaagtatatattggtttctctcattcgtcatggacagttctcaaccagtcttcctaagtattcttcttcgactgctcaaaggaacctgaagaacttttgtcagccttacgtcgaattggctaatagttatggcactggacaaattgaagaactagaggcatatgccagggcaaatgcagagaagtttgaatctgacaacaaccttggactggttaatcaggttgtatcatccatgtataagcggaatattcagagattgacccagacatacttgaccctttctctccatgatatagccagcacagtgcagttaaatagccccaaagaagctgaaatgcatgtgctacaaatgattcaggatggcgaaatatatgcaactatcaaccagaaggatggaatggtgagattcttggaggatcctgaacagtataaaacctgtgaaatgattgaacatattgattcatcaatccaaagaataatggcactctcaaggaaacttactgcgacagacgaacaaatttcatgcgatcagttgtatttgtctaaggctggaagagagagacaaagatatgactttgatgactttgacgttccacaaaagttcaacatttaaggggctaggaatgatggaagtagatctggttatggtccatcacccgtttcctttatcttttgttattcctggttctgagagtgggggagtgttttatttcagtcccaaatggaagagtgcttgttctgaggatgttgaattgtctcaacttattaactatataaaatctataactgattctttgcacattt

SEQ ID NO: 6418 - protein, 423 aa, Glycine max
  peptide (1)..(423): Ceres Seq. ID no. 14308438
  misc_feature (254)..(358): Pfam Name: Pfam Description:  PCI domain
  misc_feature (1)..(423): NCBI GI NO: 16930463 NR Description: AT5g14250/F18O22_40 [Arabidopsis thaliana]
  misc_feature (1)..(423): NCBI GI NO: 18417330 NR Description: COP9 complex subunit 3, FUS11
  misc_feature (1)..(377): NCBI GI NO: 11290078 NR Description: hypothetical protein F18O22
  misc_feature (185)..(405): NCBI GI NO: 1001955 NR Description: unknown protein
  misc_feature (4)..(403): NCBI GI NO: 39795809 NR Description: Unknown (protein for MGC:77615) [Danio rerio]
  misc_feature (4)..(403): NCBI GI NO: 28279587 NR Description: Similar to COP9 constitutive photomorphogenichomolog subunit 3
  misc_feature (4)..(403): NCBI GI NO: 23238222 NR Description: COP9 constitutive photomorphogenic homolog subunit3
  misc_feature (4)..(403): NCBI GI NO: 34870793 NR Description: similar to COP9 constitutive photomorphogenichomolog subunit 3
  misc_feature (4)..(403): NCBI GI NO: 6753488 NR Description: COP9
  misc_feature (4)..(403): NCBI GI NO: 27696965 NR Description: Similar to COP9
MDPLEALVAQIQGLSSTPGDLTRLHSVLKQADDSLRSESSRLAPILTQLDPSIHSLGFLYILEASMTDPVTKTQAETVVPIVTRFIGACSPEQIRLAPDKFLSVCKRLKDQVMLLEAPIRGVAPLFTALRKLQVSTEHLTPLHSEFLLLCLLAKCYKTGLSILDDDVFEVDQPRDLFLYCYYGGMICIGQKRFQKALDLLHNVVTAPMSTINAIAVEAYKKYILVSLIRHGQFSTSLPKYSSSTAQRNLKNFCQPYVELANSYGTGQIEELEAYARANAEKFESDNNLGLVNQVVSSMYKRNIQRLTQTYLTLSLHDIASTVQLNSPKEAEMHVLQMIQDGEIYATINQKDGMVRFLEDPEQYKTCEMIEHIDSSIQRIMALSRKLTATDEQISCDQLYLSKAGRERQRYDFDDFDVPQKFNI

SEQ ID NO: 6419 - protein, 358 aa, Glycine max
  peptide (1)..(358): Ceres Seq. ID no. 14308439
  misc_feature (189)..(293): Pfam Name: Pfam Description:  PCI domain
  misc_feature (1)..(358): NCBI GI NO: 16930463 NR Description: AT5g14250/F18O22_40 [Arabidopsis thaliana]
  misc_feature (1)..(358): NCBI GI NO: 18417330 NR Description: COP9 complex subunit 3, FUS11
  misc_feature (1)..(312): NCBI GI NO: 11290078 NR Description: hypothetical protein F18O22
  misc_feature (120)..(340): NCBI GI NO: 1001955 NR Description: unknown protein
  misc_feature (1)..(338): NCBI GI NO: 39795809 NR Description: Unknown (protein for MGC:77615) [Danio rerio]
  misc_feature (1)..(338): NCBI GI NO: 28279587 NR Description: Similar to COP9 constitutive photomorphogenichomolog subunit 3
  misc_feature (1)..(338): NCBI GI NO: 23238222 NR Description: COP9 constitutive photomorphogenic homolog subunit3
  misc_feature (1)..(338): NCBI GI NO: 34870793 NR Description: similar to COP9 constitutive photomorphogenichomolog subunit 3
  misc_feature (1)..(338): NCBI GI NO: 6753488 NR Description: COP9
  misc_feature (1)..(338): NCBI GI NO: 27696965 NR Description: Similar to COP9
MTDPVTKTQAETVVPIVTRFIGACSPEQIRLAPDKFLSVCKRLKDQVMLLEAPIRGVAPLFTALRKLQVSTEHLTPLHSEFLLLCLLAKCYKTGLSILDDDVFEVDQPRDLFLYCYYGGMICIGQKRFQKALDLLHNVVTAPMSTINAIAVEAYKKYILVSLIRHGQFSTSLPKYSSSTAQRNLKNFCQPYVELANSYGTGQIEELEAYARANAEKFESDNNLGLVNQVVSSMYKRNIQRLTQTYLTLSLHDIASTVQLNSPKEAEMHVLQMIQDGEIYATINQKDGMVRFLEDPEQYKTCEMIEHIDSSIQRIMALSRKLTATDEQISCDQLYLSKAGRERQRYDFDDFDVPQKFNI

SEQ ID NO: 6420 - protein, 311 aa, Glycine max
  peptide (1)..(311): Ceres Seq. ID no. 14308440
  misc_feature (142)..(246): Pfam Name: Pfam Description:  PCI domain
  misc_feature (1)..(311): NCBI GI NO: 16930463 NR Description: AT5g14250/F18O22_40 [Arabidopsis thaliana]
  misc_feature (1)..(311): NCBI GI NO: 18417330 NR Description: COP9 complex subunit 3, FUS11
  misc_feature (1)..(265): NCBI GI NO: 11290078 NR Description: hypothetical protein F18O22
  misc_feature (73)..(293): NCBI GI NO: 1001955 NR Description: unknown protein
  misc_feature (1)..(291): NCBI GI NO: 39795809 NR Description: Unknown (protein for MGC:77615) [Danio rerio]
  misc_feature (1)..(291): NCBI GI NO: 28279587 NR Description: Similar to COP9 constitutive photomorphogenichomolog subunit 3
  misc_feature (1)..(291): NCBI GI NO: 23238222 NR Description: COP9 constitutive photomorphogenic homolog subunit3
  misc_feature (1)..(291): NCBI GI NO: 34870793 NR Description: similar to COP9 constitutive photomorphogenichomolog subunit 3
  misc_feature (1)..(291): NCBI GI NO: 6753488 NR Description: COP9
  misc_feature (1)..(291): NCBI GI NO: 27696965 NR Description: Similar to COP9
MLLEAPIRGVAPLFTALRKLQVSTEHLTPLHSEFLLLCLLAKCYKTGLSILDDDVFEVDQPRDLFLYCYYGGMICIGQKRFQKALDLLHNVVTAPMSTINAIAVEAYKKYILVSLIRHGQFSTSLPKYSSSTAQRNLKNFCQPYVELANSYGTGQIEELEAYARANAEKFESDNNLGLVNQVVSSMYKRNIQRLTQTYLTLSLHDIASTVQLNSPKEAEMHVLQMIQDGEIYATINQKDGMVRFLEDPEQYKTCEMIEHIDSSIQRIMALSRKLTATDEQISCDQLYLSKAGRERQRYDFDDFDVPQKFNI

SEQ ID NO: 6421 - DNA, 1508 bp, Glycine max
  misc_feature (1)..(1508): Ceres Seq. ID no. 15176748
ggaagaaagagagaaggtataagcagccgttttttctgttggtatatgaaggtggtgaaggaagaagaagaagaatggtgacggaccaagatatagcgaaaggggtggagtccctactgcgtcactctgacccaaactccataactacggtaaacggcgtcgttcagcagctggaggccaaactagggttagacctctctcacaaggccagtttcatcagagaccagatcgatcatcttctccggtcacagccacagacatttgctcctcaccctcctccacttcacaaagactattttgcccctcacacccaactgcacttcccaaccacccactttgctccccattttgccctccatgacgagatcaacttcctgcagcacccccaccctcctccaccgcgtaaagtcgagacctttcctcctcaaaatgttgcccctcctcaagtgcccaaagaaagtgtgcaaactggaagcaaaagaagaggtggtgctggtggtctaaacaaagtttgtggtgtttctcctgaacttcaggcggttgttggtgagccggcaatgccaagaactgaaattgtgaggcagctgtgggcatacataaagaaaaacaacctccaagatcctggtaacaaaagaaagataatttgtgatgatgccctgcgtttggtatttgagacagactgcaccgatatgttcaagatgaatcagttgctagctaaacacattatcccacttggtcctacaaaggagtcacaggctaaacgagtgaaggtggatactgaaattaagactgaaagtgctgaacctgctccatctaccgtggcaatatctgaagcgcttgccaaatttttgggcactgagggaagagagatgcaacagtctgaagccataagacttgtttgggagtacatcaagcttcaccatttggaggatcctttaaattcaatggtgatattatgcgatgcaaagcttcaagagctacttggatgtgaaagcatttctgctttaggaataccagagatgttagcacgtcatcatctatttaaacagtctgacacccgttagtgctgatcaattattgccatataagggtatgatctgcacaaaacgctggttatatgtttctgctcgttgctagatcgtataggaactttttacttattcctgtcacttcatttatctctttgttcactgacgtatgtaaactgtatgttgtctgacggttattaggttggttgtttagaatgacaatgtataccttgagctaggcaagaagtatattgtatttaatatatgccctttaggttacccgtgcattttattttatcagttctcaatgtctaacctcaactggctgatcgaattagtgatacttttgtacattgagatacaccaactactctgaaatgcaccttgtttttaccaaattttgtgaaaaatctcttggctttacatacatgagccgtgtgcagacttacatctaatctgaagtttctaatgtatacttat

SEQ ID NO: 6422 - protein, 353 aa, Glycine max
  peptide (1)..(353): Ceres Seq. ID no. 15176749
  misc_feature (41)..(350): NCBI GI NO: 21537175 NR Description: unknown [Arabidopsis thaliana]
  misc_feature (41)..(350): NCBI GI NO: 18415906 NR Description: expressed protein [Arabidopsis thaliana]
  misc_feature (41)..(309): NCBI GI NO: 7486830 NR Description: hypothetical protein T10I14
  misc_feature (92)..(350): NCBI GI NO: 32488657 NR Description: OSJNBa0087O24.7
  misc_feature (150)..(346): NCBI GI NO: 15230276 NR Description: hypothetical protein [Arabidopsis thaliana]
  misc_feature (25)..(82): NCBI GI NO: 15230276 NR Description: hypothetical protein [Arabidopsis thaliana]
  misc_feature (159)..(264): NCBI GI NO: 15222765 NR Description: hypothetical protein [Arabidopsis thaliana]
  misc_feature (25)..(82): NCBI GI NO: 15222765 NR Description: hypothetical protein [Arabidopsis thaliana]
  misc_feature (159)..(262): NCBI GI NO: 25405318 NR Description: hypothetical protein F13F21.4
  misc_feature (25)..(82): NCBI GI NO: 25405318 NR Description: hypothetical protein F13F21.4
KKERRYKQPFFLLVYEGGEGRRRRMVTDQDIAKGVESLLRHSDPNSITTVNGVVQQLEAKLGLDLSHKASFIRDQIDHLLRSQPQTFAPHPPPLHKDYFAPHTQLHFPTTHFAPHFALHDEINFLQHPHPPPPRKVETFPPQNVAPPQVPKESVQTGSKRRGGAGGLNKVCGVSPELQAVVGEPAMPRTEIVRQLWAYIKKNNLQDPGNKRKIICDDALRLVFETDCTDMFKMNQLLAKHIIPLGPTKESQAKRVKVDTEIKTESAEPAPSTVAISEALAKFLGTEGREMQQSEAIRLVWEYIKLHHLEDPLNSMVILCDAKLQELLGCESISALGIPEMLARHHLFKQSDTR

SEQ ID NO: 6423 - protein, 329 aa, Glycine max; identical to SEQ ID NO: 5656
  peptide (1)..(329): Ceres Seq. ID no. 15176750
  misc_feature (17)..(326): NCBI GI NO: 21537175 NR Description: unknown [Arabidopsis thaliana]
  misc_feature (17)..(326): NCBI GI NO: 18415906 NR Description: expressed protein [Arabidopsis thaliana]
  misc_feature (17)..(285): NCBI GI NO: 7486830 NR Description: hypothetical protein T10I14
  misc_feature (68)..(326): NCBI GI NO: 32488657 NR Description: OSJNBa0087O24.7
  misc_feature (126)..(322): NCBI GI NO: 15230276 NR Description: hypothetical protein [Arabidopsis thaliana]
  misc_feature (1)..(58): NCBI GI NO: 15230276 NR Description: hypothetical protein [Arabidopsis thaliana]
  misc_feature (135)..(240): NCBI GI NO: 15222765 NR Description: hypothetical protein [Arabidopsis thaliana]
  misc_feature (1)..(58): NCBI GI NO: 15222765 NR Description: hypothetical protein [Arabidopsis thaliana]
  misc_feature (135)..(238): NCBI GI NO: 25405318 NR Description: hypothetical protein F13F21.4
  misc_feature (1)..(58): NCBI GI NO: 25405318 NR Description: hypothetical protein F13F21.4

SEQ ID NO: 6424 - DNA, 1256 bp, Glycine max
  misc_feature (1)..(1256): Ceres Seq. ID no. 14316326
aattccacctcacattccttatcttccttcttcttttcaatcgtcgtcgattttcagtttccgattatgagaatctgatttcagaattcaaaaaaagaaaaagaaaaagaaaaaatgaacacgttaatctcaccgccttctacaaaccgttaccttggtggggtcccttactctttcctctctccgcttcgaaacatcaccaccaaccttaaccttccgaggttccattccacggttgctaccaacttcttgtcacactctccggttcttgccacactctccgcacgtgccacttctgatgaagtagacacgcaaacagtggttgaggaacttgcagaggagaagaaagtggaagagaacaccaacgaggacaacacatccactttttcttctcctattgacaaagaacttaaaaaggttgctcagaagactgctgctacctttgcaccaagggcttccacggctacaaaaaaccctgcagtgcccggaacggttctgtacagtgtttttgaggttcaagggtatgtttcaatgttgttggggggagctttgtcttttaatctcatcttcccttctgatgaacctgacatttggagattaatgggaatgtggtccatttggatgttcacaattccttcattacgagctcgagattgctcaaagaatgagaaagaagctctcaactatctttttctcctcatcccattgatcaatgttataatcccattcttttggaagtcctttgctgttgtttggtcagcagatgtagtagccttcttgggaatgtacgcatggaagtttggatggcttcagagaacggattaaggaacccaaacttggttgttaacagttatcaaggcttgttggctcgtctttcgcatggatctcaattttatgacacacaccaatgagatgtgacattccttgtagcacttcatggtccccaactcctggatgagtgatttctcatggagtagcctttgcatctacaagggcagtaagataccgacgttgcatccttcctattatcaaatgaagagaatgctataggtcgttttcaaaagttttgcatattgtattatcgccgtgtctcacattgcagaaaatttgaaatttcagaatgtaatcaagaatctcccaaagatgaaatataacgtagtcatgatatgtagattttgcatcagaggtggttgagattttagttttcaaatgcaattttcgaaataaaacatttgataaaaatagagttgaaattc

SEQ ID NO: 6425 - protein, 236 aa, Glycine max
  peptide (1)..(236): Ceres Seq. ID no. 14316327
  misc_feature (80)..(236): NCBI GI NO: 18407519 NR Description: expressed protein [Arabidopsis thaliana]
  misc_feature (80)..(232): NCBI GI NO: 25370849 NR Description: hypothetical protein At2g48070
MNTLISPPSTNRYLGGVPYSFLSPLRNITTNLNLPRFHSTVATNFLSHSPVLATLSARATSDEVDTQTVVEELAEEKKVEENTNEDNTSTFSSPIDKELKKVAQKTAATFAPRASTATKNPAVPGTVLYSVFEVQGYVSMLLGGALSFNLIFPSDEPDIWRLMGMWSIWMFTIPSLRARDCSKNEKEALNYLFLLIPLINVIIPFFWKSFAVVWSADVVAFLGMYAWKFGWLQRTD

SEQ ID NO: 6426 - DNA, 1404 bp, Glycine max
  misc_feature (1)..(1404): Ceres Seq. ID no. 14313317
tttttacttttatttatttttaccgtgcccacattgtaaaatagagaagttaattgataacactacatgccacacatttgagcgcataagtaccaacataagcatgtgatgaagtgggtacgaggggagaagttgaaagttgaaacaacagtcactctctattagattagatcagcagtgtaaggtaattctgtgtgagactggtcctctctgcaaactgtgttttgggacgaagatattgtaattttgcacccttggcttttaacgcacaattggaaacccccacatggcccatatctgaattgacaaaatacaaattagttgcagcacttaaaagcctctttttttcagcaacttcagtgggttctcacaactaattaacaacttgatagtacaatataaacaaatcaaaatgaaataagctaaggtgaatttactttaactcgcgcgtgaaccgatcaacactaaccctataggcatgtaaaaagttgtttcaggtaatgttaaatgaatactgaatgtgtagttgtgtattcttctatatatgttttaaactgatattgctcacgttatataacgttttggctaaactcatatttttatgtattgttcaatcaatgttacatgtttcatggttgtttcaattatttgccagccccctcctgtggtaacagtagttctcaaagttcgaatgcattgtgaagcatgtgctcaagttatacaaaagcgaatccgcaagattcaaggagtagagtcagtggagacaagcttgggaaatgatcaagtcatagtaaaaggtgtgattgacccagcaaagcttgttgattatgtgtacaagaggaccaaaaagcaagcttctattgtgaaagaggaggaaaaggaaaagaaggaagaagaggagaaaaaggaagagaaagaaaaagagaaaaaagaaggtgaagaaagcaagggagaagatgctgaagagggtgatactaaaactgacatcaagcgaagtgaatactggccattaaggtcctacgttgactacgttgactacccttatgctcctcagattttcagtgatgagaacccaaatgcatgcactgtaatgtagatcagtctattgtactaactcggtattttttagtagctgatcaactgaagcaacttgtgctgtgctgagtcgttggagcgtggaataagatgcatggttgtgaatatttcaaggctttgtatatgatttccacggcatccctcagagttggcattctatatatggagatggatgccttgtttcttatgtttatgagctttctacgtatttccttgccaaagggtggctagaatcagttgtgttagtgtgtactgaatttcggcctacaacttcaattatgtacctataatgatggcattaattaatag

SEQ ID NO: 6427 - protein, 164 aa, Glycine max
  peptide (1)..(164): Ceres Seq. ID no. 14313318
  misc_feature (76)..(162): Pfam Name: Pfam Description:  Hsp90 protein
  misc_feature (18)..(163): NCBI GI NO: 37532382 NR Description: putative ATFP3
  misc_feature (18)..(133): NCBI GI NO: 9758294 NR Description: contains similarity to ATFP3~gene_id:MLE2.16
  misc_feature (18)..(133): NCBI GI NO: 18424719 NR Description: copper chaperone (CCH)-related
  misc_feature (18)..(133): NCBI GI NO: 4097547 NR Description: ATFP3 [Arabidopsis thaliana]
  misc_feature (20)..(133): NCBI GI NO: 38344582 NR Description: OSJNBa0053B21.14
  misc_feature (18)..(134): NCBI GI NO: 4097571 NR Description: GMFP5 [Glycine max]
  misc_feature (22)..(133): NCBI GI NO: 21594005 NR Description: unknown [Arabidopsis thaliana]
  misc_feature (135)..(164): NCBI GI NO: 4097571 NR Description: GMFP5 [Glycine max]
  misc_feature (22)..(133): NCBI GI NO: 18420811 NR Description: copper-binding protein family
  misc_feature (21)..(164): NCBI GI NO: 22327990 NR Description: heavy-metal-associated domain-containing protein
MYCSINVTCFMVVSIICQPPPVVTVVLKVRMHCEACAQVIQKRIRKIQGVESVETSLGNDQVIVKGVIDPAKLVDYVYKRTKKQASIVKEEEKEKKEEEEKKEEKEKEKKEGEESKGEDAEEGDTKTDIKRSEYWPLRSYVDYVDYPYAPQIFSDENPNACTVM

SEQ ID NO: 6428 - protein, 154 aa, Glycine max
  peptide (1)..(154): Ceres Seq. ID no. 14313319
  misc_feature (66)..(152): Pfam Name: Pfam Description:  Hsp90 protein
  misc_feature (8)..(153): NCBI GI NO: 37532382 NR Description: putative ATFP3
  misc_feature (8)..(123): NCBI GI NO: 9758294 NR Description: contains similarity to ATFP3~gene_id:MLE2.16
  misc_feature (8)..(123): NCBI GI NO: 18424719 NR Description: copper chaperone (CCH)-related
  misc_feature (8)..(123): NCBI GI NO: 4097547 NR Description: ATFP3 [Arabidopsis thaliana]
  misc_feature (10)..(123): NCBI GI NO: 38344582 NR Description: OSJNBa0053B21.14
  misc_feature (8)..(124): NCBI GI NO: 4097571 NR Description: GMFP5 [Glycine max]
  misc_feature (12)..(123): NCBI GI NO: 21594005 NR Description: unknown [Arabidopsis thaliana]
  misc_feature (125)..(154): NCBI GI NO: 4097571 NR Description: GMFP5 [Glycine max]
  misc_feature (12)..(123): NCBI GI NO: 18420811 NR Description: copper-binding protein family
  misc_feature (11)..(154): NCBI GI NO: 22327990 NR Description: heavy-metal-associated domain-containing protein
MVVSIICQPPPVVTVVLKVRMHCEACAQVIQKRIRKIQGVESVETSLGNDQVIVKGVIDPAKLVDYVYKRTKKQASIVKEEEKEKKEEEEKKEEKEKEKKEGEESKGEDAEEGDTKTDIKRSEYWPLRSYVDYVDYPYAPQIFSDENPNACTVM

SEQ ID NO: 6429 - protein, 134 aa, Glycine max
  peptide (1)..(134): Ceres Seq. ID no. 14313320
  misc_feature (46)..(132): Pfam Name: Pfam Description:  Hsp90 protein
  misc_feature (1)..(133): NCBI GI NO: 37532382 NR Description: putative ATFP3
  misc_feature (1)..(103): NCBI GI NO: 9758294 NR Description: contains similarity to ATFP3~gene_id:MLE2.16
  misc_feature (1)..(103): NCBI GI NO: 18424719 NR Description: copper chaperone (CCH)-related
  misc_feature (1)..(103): NCBI GI NO: 4097547 NR Description: ATFP3 [Arabidopsis thaliana]
  misc_feature (1)..(103): NCBI GI NO: 38344582 NR Description: OSJNBa0053B21.14
  misc_feature (1)..(104): NCBI GI NO: 4097571 NR Description: GMFP5 [Glycine max]
  misc_feature (1)..(103): NCBI GI NO: 21594005 NR Description: unknown [Arabidopsis thaliana]
  misc_feature (105)..(134): NCBI GI NO: 4097571 NR Description: GMFP5 [Glycine max]
  misc_feature (1)..(103): NCBI GI NO: 18420811 NR Description: copper-binding protein family
  misc_feature (1)..(134): NCBI GI NO: 22327990 NR Description: heavy-metal-associated domain-containing protein
MHCEACAQVIQKRIRKIQGVESVETSLGNDQVIVKGVIDPAKLVDYVYKRTKKQASIVKEEEKEKKEEEEKKEEKEKEKKEGEESKGEDAEEGDTKTDIKRSEYWPLRSYVDYVDYPYAPQIFSDENPNACTVM

SEQ ID NO: 6430 - DNA, 1350 bp, Glycine max
  misc_feature (1)..(1350): Ceres Seq. ID no. 12364854
cagctacgtaggccccccccccccgatgaaaccatgctgttgcaaagaaaggatggcaagattacagctggtactacgaatgctaaagtttcccatttaatggagtccatcgagaaagattatgtctttgtcaattcccatttcgcatcattggaggctttctctgactactttgaagcatctgtgcaagatagttcctcgcacaggatttctctgtttccttcaaagaggactaatatggaggttagagatgcaaaacaaacaaaggatctgccctcttcctccactgaaggattagaaaatttaaaaagcaataaacttgaggcatgtgcagcttcctgtgaatttgctgccttaaggaaagaacatcaaatttccccactgcacccttcaaacaggttacagttgttgcatcagtatgtgcagatcattgctgaactttcacaagaaaagtataacacaggactgtatctagagtctcttgcagttgagttggtggttttggctatatggaaacagactctagaaatttgtagctcttggatggcctcaattacaaagagtgagttgcctggaagcagttcagctaatgaatccatatctgccagagatattaacttgccacagtctacagaacagaaaataaattttagtgatccttcatctatctccctgtgggccaaacatgagtttattgatgcagttgatcgtgctgagaaactatcatgtcatgttcaaaatatggataaggcaactgagatgccagatgcaatggaaattatattccaaaaagctctcttaattgggacaagtggtgctgtagatgaatatatggagatcagagatagggctgctgcatcttactcaaaagcgatgcttctactttcatttattgtggcagaagcagagaaccttccactgaacccaccattttcacttgttgccactaataaggagcgaatctcacaatatattcacagcttgcagtctcgtaaagaatcttcatcagagtcctcttcaaagaaagtgcttatacttttatcaaagtaaattactggtttttatagtttgtcttttcatcaccacttttggaatcggtgaagcaatttgttgctgacatcaatgttgacttcctgtgatgagtgcagacgagagactacctttgacagataccatgttgtatatagatagatagatataacctatcatggccttgtaaggggactttgcctttactgcatgatttcatgtatagaatgttatttctttgacatggaatttgtaaatagtgtatagctcatagtcttttacaattttgaaaccactatgatcaatcaattgaaatttctc

SEQ ID NO: 6431 - protein, 349 aa, Glycine max
  peptide (1)..(349): Ceres Seq. ID no. 12364855
  misc_feature (87)..(332): NCBI GI NO: 18412205 NR Description: serine/threonine-protein kinase-like protein
  misc_feature (100)..(332): NCBI GI NO: 11358841 NR Description: serine/threonine- protein kinase-like protein -Arabidopsis thaliana
  misc_feature (17)..(280): NCBI GI NO: 34902242 NR Description: Putative serine/threonine protein kinase
  misc_feature (34)..(331): NCBI GI NO: 34902042 NR Description: putative S_TKc
  misc_feature (29)..(331): NCBI GI NO: 25408568 NR Description: hypothetical protein At2g37850
  misc_feature (29)..(331): NCBI GI NO: 20268768 NR Description: unknown protein [Arabidopsis thaliana]
  misc_feature (29)..(331): NCBI GI NO: 30687278 NR Description: protein kinase family [Arabidopsis thaliana]
  misc_feature (29)..(331): NCBI GI NO: 30687274 NR Description: protein kinase family [Arabidopsis thaliana]
  misc_feature (35)..(331): NCBI GI NO: 26452168 NR Description: unknown protein [Arabidopsis thaliana]
  misc_feature (35)..(331): NCBI GI NO: 11357820 NR Description: hypothetical protein F5K20
QLRRPPPPDETMLLQRKDGKITAGTTNAKVSHLMESIEKDYVFVNSHFASLEAFSDYFEASVQDSSSHRISLFPSKRTNMEVRDAKQTKDLPSSSTEGLENLKSNKLEACAASCEFAALRKEHQISPLHPSNRLQLLHQYVQIIAELSQEKYNTGLYLESLAVELVVLAIWKQTLEICSSWMASITKSELPGSSSANESISARDINLPQSTEQKINFSDPSSISLWAKHEFIDAVDRAEKLSCHVQNMDKATEMPDAMEIIFQKALLIGTSGAVDEYMEIRDRAAASYSKAMLLLSFIVAEAENLPLNPPFSLVATNKERISQYIHSLQSRKESSSESSSKKVLILLSK

SEQ ID NO: 6432 - protein, 338 aa, Glycine max
  peptide (1)..(338): Ceres Seq. ID no. 12364856
  misc_feature (76)..(321): NCBI GI NO: 18412205 NR Description: serine/threonine-protein kinase-like protein
  misc_feature (89)..(321): NCBI GI NO: 11358841 NR Description: serine/threonine- protein kinase-like protein -Arabidopsis thaliana
  misc_feature (6)..(269): NCBI GI NO: 34902242 NR Description: Putative serine/threonine protein kinase
  misc_feature (23)..(320): NCBI GI NO: 34902042 NR Description: putative S_TKc
  misc_feature (18)..(320): NCBI GI NO: 25408568 NR Description: hypothetical protein At2g37850
  misc_feature (18)..(320): NCBI GI NO: 20268768 NR Description: unknown protein [Arabidopsis thaliana]
  misc_feature (18)..(320): NCBI GI NO: 30687278 NR Description: protein kinase family [Arabidopsis thaliana]
  misc_feature (18)..(320): NCBI GI NO: 30687274 NR Description: protein kinase family [Arabidopsis thaliana]
  misc_feature (24)..(320): NCBI GI NO: 26452168 NR Description: unknown protein [Arabidopsis thaliana]
  misc_feature (24)..(320): NCBI GI NO: 11357820 NR Description: hypothetical protein F5K20
MLLQRKDGKITAGTTNAKVSHLMESIEKDYVFVNSHFASLEAFSDYFEASVQDSSSHRISLFPSKRTNMEVRDAKQTKDLPSSSTEGLENLKSNKLEACAASCEFAALRKEHQISPLHPSNRLQLLHQYVQIIAELSQEKYNTGLYLESLAVELVVLAIWKQTLEICSSWMASITKSELPGSSSANESISARDINLPQSTEQKINFSDPSSISLWAKHEFIDAVDRAEKLSCHVQNMDKATEMPDAMEIIFQKALLIGTSGAVDEYMEIRDRAAASYSKAMLLLSFIVAEAENLPLNPPFSLVATNKERISQYIHSLQSRKESSSESSSKKVLILLSK

SEQ ID NO: 6433 - protein, 316 aa, Glycine max
  peptide (1)..(316): Ceres Seq. ID no. 12364857
  misc_feature (54)..(299): NCBI GI NO: 18412205 NR Description: serine/threonine-protein kinase-like protein
  misc_feature (67)..(299): NCBI GI NO: 11358841 NR Description: serine/threonine- protein kinase-like protein -Arabidopsis thaliana
  misc_feature (1)..(247): NCBI GI NO: 34902242 NR Description: Putative serine/threonine protein kinase
  misc_feature (1)..(298): NCBI GI NO: 34902042 NR Description: putative S_TKc
  misc_feature (1)..(298): NCBI GI NO: 25408568 NR Description: hypothetical protein At2g37850
  misc_feature (1)..(298): NCBI GI NO: 20268768 NR Description: unknown protein [Arabidopsis thaliana]
  misc_feature (1)..(298): NCBI GI NO: 30687278 NR Description: protein kinase family [Arabidopsis thaliana]
  misc_feature (1)..(298): NCBI GI NO: 30687274 NR Description: protein kinase family [Arabidopsis thaliana]
  misc_feature (2)..(298): NCBI GI NO: 26452168 NR Description: unknown protein [Arabidopsis thaliana]
  misc_feature (2)..(298): NCBI GI NO: 11357820 NR Description: hypothetical protein F5K20
MESIEKDYVFVNSHFASLEAFSDYFEASVQDSSSHRISLFPSKRTNMEVRDAKQTKDLPSSSTEGLENLKSNKLEACAASCEFAALRKEHQISPLHPSNRLQLLHQYVQIIAELSQEKYNTGLYLESLAVELVVLAIWKQTLEICSSWMASITKSELPGSSSANESISARDINLPQSTEQKINFSDPSSISLWAKHEFIDAVDRAEKLSCHVQNMDKATEMPDAMEIIFQKALLIGTSGAVDEYMEIRDRAAASYSKAMLLLSFIVAEAENLPLNPPFSLVATNKERISQYIHSLQSRKESSSESSSKKVLILLSK

SEQ ID NO: 6434 - DNA, 1253 bp, Glycine max
  misc_feature (1)..(1253): Ceres Seq. ID no. 15176208
gggcatcccttgtctgtcgtttggcatcatatttcaaaggaggctcagaatagctggtcgacacgccagccagatccacaaatcggaaagaatcagagcgccgtcaaaaaccgccgtccacggcggtgaaactcgccttcgaatccagagcctctctcggttcctcactcttctcacatcgagcgcaacgccaaaaaatcgaatttcacgatggaagagttggagcagtggaaggaacaactttctcacttcgctaacctagctttggatcgtcttctcgaggttcctccgaatcagctctacgcagctgctgcaatcgtgattttcacaacgctgcttcttctctcaattcggttgttcaagcgtgcgaagtcaaacactgttgtgttggccgggctcagcgggagtggaaaaactgttatcttctatcagcttagggatggctctactcatcagggtactgttacatcaatggagcctaatgaaggcacttttattcttcacaacgagaaaacaaggaagggcaagataaaacctgttcatgttgttgatgttcctgggcattctcggcttcgacccaaactggatgagtacttgcctcaagcagctgggatagtttttgtggtagatgctttggactttttaccaaactgccgtgctgcttcagagtacctttatgatctattgactaaaggaagtgttgtgaggaagaagattccagtgcttattctctgcaacaaaacagacaaagtcactgctcatactaaagagtttatccgaaaacagatggagaaggaaatagacaaattacgggcatcaaggagtgcaatatcagcagctgacattgcaaatgagttcaccctgggggtacccggtgagccatttttttttacccagtgctctaacaaagtgacaactgcagatgcttctggtttaactggggaaatatctcagctggaagagtttatcagagaacatgtaaagcaatagctggatgttgtgtttaaacttgcggatttttgctgaattgaatgaatgtgtagtgttgttcttcttggttgctatttctttgatttcaaagaactgtctggataagaagaggcaaaaaagagaaaaaggtgttttggggtggggcttggggtgttcggagtaggaatcatgatgttgggatcaataaggatttacttcattgcaagccctggtattttgattggactataatgatttatctaattgtatcgatacttttattt

SEQ ID NO: 6435 - protein, 259 aa, Glycine max
  peptide (1)..(259): Ceres Seq. ID no. 15176209
  misc_feature (42)..(198): Pfam Name: Pfam Description:  ADP-ribosylation factor family
  misc_feature (1)..(258): NCBI GI NO: 15239201 NR Description: signal recognition particle receptor beta subunit-related protein
  misc_feature (1)..(258): NCBI GI NO: 15224229 NR Description: signal recognition particle receptor beta subunit -related
  misc_feature (1)..(253): NCBI GI NO: 31218892 NR Description: ENSANGP00000020947 [Anopheles gambiae]
  misc_feature (34)..(240): NCBI GI NO: 32450191 NR Description: Unknown (protein for MGC:64420) [Xenopus laevis]
  misc_feature (37)..(256): NCBI GI NO: 23509141 NR Description: hypothetical protein [Plasmodium falciparum 3D7]
  misc_feature (34)..(240): NCBI GI NO: 38174090 NR Description: Unknown (protein for MGC:75930)
  misc_feature (21)..(253): NCBI GI NO: 28574941 NR Description: Signal recognition particle receptor beta CG33162-PA
  misc_feature (32)..(253): NCBI GI NO: 6678137 NR Description: signal recognition particle receptor, B subunit
  misc_feature (32)..(253): NCBI GI NO: 12842535 NR Description: unnamed protein product [Mus musculus]
  misc_feature (32)..(244): NCBI GI NO: 27721301 NR Description: similar to signal recognition particle receptor
MEELEQWKEQLSHFANLALDRLLEVPPNQLYAAAAIVIFTTLLLLSIRLFKRAKSNTVVLAGLSGSGKTVIFYQLRDGSTHQGTVTSMEPNEGTFILHNEKTRKGKIKPVHVVDVPGHSRLRPKLDEYLPQAAGIVFVVDALDFLPNCRAASEYLYDLLTKGSVVRKKIPVLILCNKTDKVTAHTKEFIRKQMEKEIDKLRASRSAISAADIANEFTLGVPGEPFFFTQCSNKVTTADASGLTGEISQLEEFIREHVKQ

SEQ ID NO: 6436 - protein, 172 aa, Glycine max
  peptide (1)..(172): Ceres Seq. ID no. 15176210
  misc_feature (1)..(111): Pfam Name: Pfam Description:  ADP-ribosylation factor family
  misc_feature (1)..(171): NCBI GI NO: 15239201 NR Description: signal recognition particle receptor beta subunit-related protein
  misc_feature (1)..(171): NCBI GI NO: 15224229 NR Description: signal recognition particle receptor beta subunit -related
  misc_feature (1)..(166): NCBI GI NO: 31218892 NR Description: ENSANGP00000020947 [Anopheles gambiae]
  misc_feature (1)..(153): NCBI GI NO: 32450191 NR Description: Unknown (protein for MGC:64420) [Xenopus laevis]
  misc_feature (1)..(169): NCBI GI NO: 23509141 NR Description: hypothetical protein [Plasmodium falciparum 3D7]
  misc_feature (1)..(153): NCBI GI NO: 38174090 NR Description: Unknown (protein for MGC:75930)
  misc_feature (1)..(166): NCBI GI NO: 28574941 NR Description: Signal recognition particle receptor beta CG33162-PA
  misc_feature (1)..(166): NCBI GI NO: 6678137 NR Description: signal recognition particle receptor, B subunit
  misc_feature (1)..(166): NCBI GI NO: 12842535 NR Description: unnamed protein product [Mus musculus]
  misc_feature (1)..(157): NCBI GI NO: 27721301 NR Description: similar to signal recognition particle receptor
MEPNEGTFILHNEKTRKGKIKPVHVVDVPGHSRLRPKLDEYLPQAAGIVFVVDALDFLPNCRAASEYLYDLLTKGSVVRKKIPVLILCNKTDKVTAHTKEFIRKQMEKEIDKLRASRSAISAADIANEFTLGVPGEPFFFTQCSNKVTTADASGLTGEISQLEEFIREHVKQ

SEQ ID NO: 6437 - DNA, 1388 bp, Glycine max
  misc_feature (1)..(1388): Ceres Seq. ID no. 14308274
gaagaaaacatctagctgaagattccaatcggagctcagaaaaaagaaacctaatcgccgatcgcgtcgccgtcgcgccgaaagtcaccggactactgcctgcttctaaatagcttataatcttatctgaagatagagatatcatcatgggagaggtggcagtaatgcattctgagcctctgcagtttgattgcaatgacatgaagcatatcactgagaaagatgtatataatctattgtcaaacgaagagcacatacttggagaagaatcaagtcaatcatcaaatgacaaaaagatcaatgatttgagagagagaggatacatgaagtatggatgtcaacattaccgaagaagatgccgtattagggccccctgttgtgatgagatttttgattgccgccattgtcacaatgaggcaaaaaataatatcaacattgaccagaagcatagacacgatattccccgccatcaagttaaacaggtgatatgttctctttgtgagacagaacaagaggttcagcaaaattgtattaactgtggcgtttgtatgggcaagtacttctgtgggacgtgtaagctctttgatgatgatgtatctaagcagcagtatcattgcagtggctgtggaatttgcagaactggaggatgtgaaaatttcttccactgccacaaatgtggttgttgctactcaactcagctgaaaaacagccacccttgcgtggaaggagcaatgcatcatgattgccccatttgctttgagtatttgtttgaatctgtgaatgatgtcactgttctgctctgtggacatacaatacataagagctgcctaaaggaaatgagggaacatttccagtatgcatgccctctctgcttgaagtcggtttgtgatatgtcaaaggtttgggagaaatttgacttggagattgctgctacaccaatgcctgaaccgtatcaaaacaaaatggtttggatcctttgcaatgattgtggcaaaagttctcacgtgcagttccatcttgttgctcaaaagtgcttgaactgcaagtcctacaacacacgggaaacaagaggctgagcaagtggtaatggttatttataggaccacttttgctctcacttcattgctgtgtaggtgtagtggcaatccaagtgcatcctttattgaggaaaatgcatgtgggaattgtcatttaattgcaggcaggccgaaccacatccaagagaaaaacggtttatcacgttgatgtggtgtcgagggtagtgtagagtcagcaattgtcgtgttggttatttcgtgttggggaaacccttttagtgttccagtgttcactcctgtaatgtttgtttgggattaatgccaactttcaaattagctgttactttatag

SEQ ID NO: 6438 - protein, 309 aa, Glycine max
  peptide (1)..(309): Ceres Seq. ID no. 14308275
  misc_feature (64)..(147): Pfam Name: Pfam Description:  CHY zinc finger
  misc_feature (21)..(306): NCBI GI NO: 34910658 NR Description: putative PGPD14 protein
  misc_feature (42)..(309): NCBI GI NO: 4105798 NR Description: PGPD14 [Petunia x hybrida]
  misc_feature (44)..(309): NCBI GI NO: 15237169 NR Description: PGPD14 protein [Arabidopsis thaliana]
  misc_feature (56)..(309): NCBI GI NO: 21593716 NR Description: PGPD14 protein [Arabidopsis thaliana]
  misc_feature (61)..(309): NCBI GI NO: 37535002 NR Description: putative PGPD14 protein
  misc_feature (52)..(305): NCBI GI NO: 15238890 NR Description: expressed protein [Arabidopsis thaliana]
  misc_feature (48)..(305): NCBI GI NO: 30102616 NR Description: At3g62970 [Arabidopsis thaliana]
  misc_feature (48)..(305): NCBI GI NO: 30695702 NR Description: expressed protein [Arabidopsis thaliana]
  misc_feature (48)..(305): NCBI GI NO: 11358168 NR Description: hypothetical protein T20O10
  misc_feature (63)..(309): NCBI GI NO: 13386058 NR Description: androgen receptor N-terminal-interacting protein
MGEVAVMHSEPLQFDCNDMKHITEKDVYNLLSNEEHILGEESSQSSNDKKINDLRERGYMKYGCQHYRRRCRIRAPCCDEIFDCRHCHNEAKNNINIDQKHRHDIPRHQVKQVICSLCETEQEVQQNCINCGVCMGKYFCGTCKLFDDDVSKQQYHCSGCGICRTGGCENFFHCHKCGCCYSTQLKNSHPCVEGAMHHDCPICFEYLFESVNDVTVLLCGHTIHKSCLKEMREHFQYACPLCLKSVCDMSKVWEKFDLEIAATPMPEPYQNKMVWILCNDCGKSSHVQFHLVAQKCLNCKSYNTRETRG

SEQ ID NO: 6439 - protein, 303 aa, Glycine max
  peptide (1)..(303): Ceres Seq. ID no. 14308276
  misc_feature (58)..(141): Pfam Name: Pfam Description:  CHY zinc finger
  misc_feature (15)..(300): NCBI GI NO: 34910658 NR Description: putative PGPD14 protein
  misc_feature (36)..(303): NCBI GI NO: 4105798 NR Description: PGPD14 [Petunia x hybrida]
  misc_feature (38)..(303): NCBI GI NO: 15237169 NR Description: PGPD14 protein [Arabidopsis thaliana]
  misc_feature (50)..(303): NCBI GI NO: 21593716 NR Description: PGPD14 protein [Arabidopsis thaliana]
  misc_feature (55)..(303): NCBI GI NO: 37535002 NR Description: putative PGPD14 protein
  misc_feature (46)..(299): NCBI GI NO: 15238890 NR Description: expressed protein [Arabidopsis thaliana]
  misc_feature (42)..(299): NCBI GI NO: 30102616 NR Description: At3g62970 [Arabidopsis thaliana]
  misc_feature (42)..(299): NCBI GI NO: 30695702 NR Description: expressed protein [Arabidopsis thaliana]
  misc_feature (42)..(299): NCBI GI NO: 11358168 NR Description: hypothetical protein T20O10
  misc_feature (57)..(303): NCBI GI NO: 13386058 NR Description: androgen receptor N-terminal-interacting protein
MHSEPLQFDCNDMKHITEKDVYNLLSNEEHILGEESSQSSNDKKINDLRERGYMKYGCQHYRRRCRIRAPCCDEIFDCRHCHNEAKNNINIDQKHRHDIPRHQVKQVICSLCETEQEVQQNCINCGVCMGKYFCGTCKLFDDDVSKQQYHCSGCGICRTGGCENFFHCHKCGCCYSTQLKNSHPCVEGAMHHDCPICFEYLFESVNDVTVLLCGHTIHKSCLKEMREHFQYACPLCLKSVCDMSKVWEKFDLEIAATPMPEPYQNKMVWILCNDCGKSSHVQFHLVAQKCLNCKSYNTRETRG

SEQ ID NO: 6440 - protein, 291 aa, Glycine max
  peptide (1)..(291): Ceres Seq. ID no. 14308277
  misc_feature (46)..(129): Pfam Name: Pfam Description:  CHY zinc finger
  misc_feature (3)..(288): NCBI GI NO: 34910658 NR Description: putative PGPD14 protein
  misc_feature (24)..(291): NCBI GI NO: 4105798 NR Description: PGPD14 [Petunia x hybrida]
  misc_feature (26)..(291): NCBI GI NO: 15237169 NR Description: PGPD14 protein [Arabidopsis thaliana]
  misc_feature (38)..(291): NCBI GI NO: 21593716 NR Description: PGPD14 protein [Arabidopsis thaliana]
  misc_feature (43)..(291): NCBI GI NO: 37535002 NR Description: putative PGPD14 protein
  misc_feature (34)..(287): NCBI GI NO: 15238890 NR Description: expressed protein [Arabidopsis thaliana]
  misc_feature (30)..(287): NCBI GI NO: 30102616 NR Description: At3g62970 [Arabidopsis thaliana]
  misc_feature (30)..(287): NCBI GI NO: 30695702 NR Description: expressed protein [Arabidopsis thaliana]
  misc_feature (30)..(287): NCBI GI NO: 11358168 NR Description: hypothetical protein T20O10
  misc_feature (45)..(291): NCBI GI NO: 13386058 NR Description: androgen receptor N-terminal-interacting protein
MKHITEKDVYNLLSNEEHILGEESSQSSNDKKINDLRERGYMKYGCQHYRRRCRIRAPCCDEIFDCRHCHNEAKNNINIDQKHRHDIPRHQVKQVICSLCETEQEVQQNCINCGVCMGKYFCGTCKLFDDDVSKQQYHCSGCGICRTGGCENFFHCHKCGCCYSTQLKNSHPCVEGAMHHDCPICFEYLFESVNDVTVLLCGHTIHKSCLKEMREHFQYACPLCLKSVCDMSKVWEKFDLEIAATPMPEPYQNKMVWILCNDCGKSSHVQFHLVAQKCLNCKSYNTRETRG

SEQ ID NO: 6441 - DNA, 1314 bp, Glycine max
  misc_feature (1)..(1314): Ceres Seq. ID no. 14312844
aaggaataagtttgcacaccgaaggaagtaggaagtattgctcagttactttccatgatgtctaatttcgtttccaattagactcgtatttctagacttgcgggacagagctgccctcgagaaaatattttcaaccaataagtttgatgctgtgatacattttgctgggcttaaggcagtgggtgaaagcgtggataaaccactgctctactttgacaacaacttgatagggacaatcgttctatttgaagtcatggctgcccacggatgcaagaagcttgtgttctcatcttcagcaactgtatatggctggccaaaggaggtcccatgtaccgaagagttccctttgtcagcgacaaacccatatggacgaaccaagcttatcatcgaagaaatttgtcgtgatatctaccgtgcagattctgattggaaagttatactgttgagatacttcaacccagttggtgcacatcccagtggttatattggtgaagatcctcgtggaattccaaacaatctcatgccctttgttcaacaagtggcagttggcagacgccctgcattgactgtttttggaaacgattataaaacaactgacggcactggagttcgtgattacattcatgttcttgatttagcagatgggcatattgcggcattgcgtaaactcaatgatcctaaaataggttgtgaggtttataacttgggaacaggaaagggaacatctgttttggagatggtaaacgcttttgaacaggcctctggaaagaaaattccacttgcaatggctggtcggagacctggagatgctgaaattgtttatgcatcaacagagaaagcggaaagagaacttaattggaagactaaatatagcatcgatgatatgtgccgcgatcaatggaattgggctagcaaaaacccttatggctatggtgcatctgcagattcctccaattgatgtcgatgattgtcggatatagtatatatgttctcttttggggtctttttgaaccctgtcgcccaataggtccctaaagtttttctttagctattctaaggtggaagttaaatcatttcctagtttattatgaattataataaagtggtaaataagtagtggtttagtttacttagcgattctttaggttccaactcacagaatattgaatgggtattctctcatgttcttcatgaacatgactgcatcctgttttgtaaatctaaaccacacattatagagtatgactaaccggtataatcttaccttacctcattatccataataaagttttacatagcattatatgctaaaag

SEQ ID NO: 6442 - protein, 234 aa, Glycine max
  peptide (1)..(234): Ceres Seq. ID no. 14312845
  misc_feature (1)..(223): Pfam Name: Pfam Description:  NAD dependent epimerase/dehydratase family
  misc_feature (1)..(234): NCBI GI NO: 11386775 NR Description: UDP-glucose 4-epimerase GEPI48
  misc_feature (1)..(234): NCBI GI NO: 15236663 NR Description: UDP-glucose 4-epimerase
  misc_feature (1)..(234): NCBI GI NO: 12643850 NR Description: Probable UDP-glucose 4-epimerase At4g10960
  misc_feature (1)..(234): NCBI GI NO: 21536846 NR Description: UDPglucose 4-epimerase-like protein
  misc_feature (1)..(234): NCBI GI NO: 15236988 NR Description: UDP-glucose 4-epimerase
  misc_feature (1)..(234): NCBI GI NO: 21553659 NR Description: UDP-galactose 4-epimerase-like protein
  misc_feature (1)..(233): NCBI GI NO: 32130594 NR Description: UDP-glucose-4-epimerase [Zea mays]
  misc_feature (1)..(234): NCBI GI NO: 21715990 NR Description: UDP-glucose 4-epimerase
  misc_feature (1)..(233): NCBI GI NO: 15217653 NR Description: UDP-glucose 4-epimerase
  misc_feature (1)..(233): NCBI GI NO: 40253348 NR Description: putative UDP-glucose 4-epimerase
MAAHGCKKLVFSSSATVYGWPKEVPCTEEFPLSATNPYGRTKLIIEEICRDIYRADSDWKVILLRYFNPVGAHPSGYIGEDPRGIPNNLMPFVQQVAVGRRPALTVFGNDYKTTDGTGVRDYIHVLDLADGHIAALRKLNDPKIGCEVYNLGTGKGTSVLEMVNAFEQASGKKIPLAMAGRRPGDAEIVYASTEKAERELNWKTKYSIDDMCRDQWNWASKNPYGYGASADSSN

SEQ ID NO: 6443 - protein, 145 aa, Glycine max
  peptide (1)..(145): Ceres Seq. ID no. 14312846
  misc_feature (1)..(134): Pfam Name: Pfam Description:  NAD dependent epimerase/dehydratase family
  misc_feature (1)..(145): NCBI GI NO: 11386775 NR Description: UDP-glucose 4-epimerase GEPI48
  misc_feature (1)..(145): NCBI GI NO: 15236663 NR Description: UDP-glucose 4-epimerase
  misc_feature (1)..(145): NCBI GI NO: 12643850 NR Description: Probable UDP-glucose 4-epimerase At4g10960
  misc_feature (1)..(145): NCBI GI NO: 21536846 NR Description: UDPglucose 4-epimerase-like protein
  misc_feature (1)..(145): NCBI GI NO: 15236988 NR Description: UDP-glucose 4-epimerase
  misc_feature (1)..(145): NCBI GI NO: 21553659 NR Description: UDP-galactose 4-epimerase-like protein
  misc_feature (1)..(144): NCBI GI NO: 32130594 NR Description: UDP-glucose-4-epimerase [Zea mays]
  misc_feature (1)..(145): NCBI GI NO: 21715990 NR Description: UDP-glucose 4-epimerase
  misc_feature (1)..(144): NCBI GI NO: 15217653 NR Description: UDP-glucose 4-epimerase
  misc_feature (1)..(144): NCBI GI NO: 40253348 NR Description: putative UDP-glucose 4-epimerase
MPFVQQVAVGRRPALTVFGNDYKTTDGTGVRDYIHVLDLADGHIAALRKLNDPKIGCEVYNLGTGKGTSVLEMVNAFEQASGKKIPLAMAGRRPGDAEIVYASTEKAERELNWKTKYSIDDMCRDQWNWASKNPYGYGASADSSN

SEQ ID NO: 6444 - DNA, 1378 bp, Glycine max
  misc_feature (1)..(1378): Ceres Seq. ID no. 15226111
  misc_feature (772)..(772): n is a, c, t, g, unknown, or other
  misc_feature (770)..(770): n is a, c, t, g, unknown, or other
  misc_feature (771)..(771): n is a, c, t, g, unknown, or other
  misc_feature (769)..(769): n is a, c, t, g, unknown, or other
  misc_feature (768)..(768): n is a, c, t, g, unknown, or other
cagctacgtaggccccccccccaaaacttgagtatgagaagcagcttgttgatgatgatcaggtgaaaatgaatcatttcaaatcctttcttatttcttaaattttaatctaaaaaaattacatatttattatttttctttgaaccaactgcaattgttcaaatgcttcttccattatgcaatattaaccagttactaatacaactatgaattttgttttattaaaagtgtttattgcttcataagtaggtagctttactctggccattcttgatattaattcctttttgatatttattgtgttaaattgttgcttgtaattagcaaatattggaagaatgttgaacctcaaccgtatctagatattcatgttgatactcgtagcagccatggataataagtccacacagcatatatgttaccactgttacttgtatttgctatttgtgcaatgcttcatttgaagcttaaaagtctcatttggatagtcaattttagtcttgatgctcgatatttttgactaaattctagtttctgaattgtaggatcagcaagcagagacaacaacttttagatttgaaaagaatatgaaagatgtaggtgtgggttcaatgttagaggcacctgaatctcctgtggaatggcctctgcaattcaagcagcagcaaagagaaatagtggaactgtggcaagcctgcaaggtatcattgttccacaggacttacttctttcttttattcaggggtgatccaactgactccatatacnnnnnaggtggagtttagaagattatctttcctcaaagaaacatttgccagtggaaatcagtccatgaacgcttcaaggttctctttctctcttgtttctgtcacatgagcatctgatatgcatggtgcttaatgttgactgacatacatgtgtttgtttggggaaacagcgcgaagggtgttcagcgggagagagaggtgctggtcaagcttatgcagagaaggctatccgaggaagagaggaagaatctcttcagcaagtggggcattgaattggattcaaagcgccggaggaagcagctggcgaatcgcatatggagcagcaccgatatgaatcacatcgtggagagtgctgcggttgttgcaaagttattgagctttacagggctgaaggagatgtttggccttagcttctcaccacatacctgggcgtctcttttttaggccaccaaatttattcttattttaattacctaatccctgtcaagtgtgaatactcagtctcttagatacattacaacctgtatttcaacgagttaagaacaatttctagtataacataacatgttctgctcgtttcattttgcctattaatcaatatgttttccgct

SEQ ID NO: 6445 - protein, 103 aa, Glycine max
  peptide (1)..(103): Ceres Seq. ID no. 15226112
  misc_feature (12)..(96): NCBI GI NO: 38567877 NR Description: OSJNBa0091D06.23
  misc_feature (12)..(96): NCBI GI NO: 38344976 NR Description: OSJNBa0011L07.1
  misc_feature (12)..(96): NCBI GI NO: 15208467 NR Description: kinesin heavy chain [Zea mays]
  misc_feature (13)..(96): NCBI GI NO: 15208447 NR Description: kinesin heavy chain [Zea mays]
  misc_feature (12)..(95): NCBI GI NO: 30693419 NR Description: expressed protein [Arabidopsis thaliana]
  misc_feature (15)..(95): NCBI GI NO: 30698217 NR Description: kinesin heavy chain DNA binding protein-related
  misc_feature (12)..(96): NCBI GI NO: 15234898 NR Description: kinesin like protein [Arabidopsis thaliana]
  misc_feature (15)..(80): NCBI GI NO: 10177425 NR Description: kinesin heavy chain DNA binding protein-like
  misc_feature (13)..(98): NCBI GI NO: 15238979 NR Description: kinesin heavy chain-related protein
  misc_feature (12)..(95): NCBI GI NO: 34914660 NR Description: putative kinesin
MLTDIHVFVWGNSAKGVQREREVLVKLMQRRLSEEERKNLFSKWGIELDSKRRRKQLANRIWSSTDMNHIVESAAVVAKLLSFTGLKEMFGLSFSPHTWASLF

SEQ ID NO: 6446 - protein, 76 aa, Glycine max
  peptide (1)..(76): Ceres Seq. ID no. 15226113
  misc_feature (1)..(69): NCBI GI NO: 38567877 NR Description: OSJNBa0091D06.23
  misc_feature (1)..(69): NCBI GI NO: 38344976 NR Description: OSJNBa0011L07.1
  misc_feature (1)..(69): NCBI GI NO: 15208467 NR Description: kinesin heavy chain [Zea mays]
  misc_feature (1)..(69): NCBI GI NO: 15208447 NR Description: kinesin heavy chain [Zea mays]
  misc_feature (1)..(68): NCBI GI NO: 30693419 NR Description: expressed protein [Arabidopsis thaliana]
  misc_feature (1)..(68): NCBI GI NO: 30698217 NR Description: kinesin heavy chain DNA binding protein-related
  misc_feature (1)..(69): NCBI GI NO: 15234898 NR Description: kinesin like protein [Arabidopsis thaliana]
  misc_feature (1)..(53): NCBI GI NO: 10177425 NR Description: kinesin heavy chain DNA binding protein-like
  misc_feature (1)..(71): NCBI GI NO: 15238979 NR Description: kinesin heavy chain-related protein
  misc_feature (1)..(68): NCBI GI NO: 34914660 NR Description: putative kinesin
MQRRLSEEERKNLFSKWGIELDSKRRRKQLANRIWSSTDMNHIVESAAVVAKLLSFTGLKEMFGLSFSPHTWASLF

SEQ ID NO: 6447 - protein, 65 aa, Glycine max
  peptide (1)..(65): Ceres Seq. ID no. 15226114
  misc_feature (1)..(60): NCBI GI NO: 38567877 NR Description: OSJNBa0091D06.23
  misc_feature (1)..(60): NCBI GI NO: 38344976 NR Description: OSJNBa0011L07.1
  misc_feature (1)..(60): NCBI GI NO: 15208467 NR Description: kinesin heavy chain [Zea mays]
  misc_feature (1)..(60): NCBI GI NO: 15208447 NR Description: kinesin heavy chain [Zea mays]
  misc_feature (1)..(60): NCBI GI NO: 30693419 NR Description: expressed protein [Arabidopsis thaliana]
  misc_feature (1)..(60): NCBI GI NO: 30698217 NR Description: kinesin heavy chain DNA binding protein-related
  misc_feature (22)..(65): NCBI GI NO: 15234898 NR Description: kinesin like protein [Arabidopsis thaliana]
  misc_feature (1)..(60): NCBI GI NO: 10177425 NR Description: kinesin heavy chain DNA binding protein-like
  misc_feature (23)..(65): NCBI GI NO: 15238979 NR Description: kinesin heavy chain-related protein
  misc_feature (1)..(65): NCBI GI NO: 34914660 NR Description: putative kinesin
  misc_feature (61)..(61): Xaa is any aa, unknown or other
  misc_feature (62)..(62): Xaa is any aa, unknown or other
MKDVGVGSMLEAPESPVEWPLQFKQQQREIVELWQACKVSLFHRTYFFLLFRGDPTDSIYXXGGV

SEQ ID NO: 6448 - DNA, 1217 bp, Glycine max
  misc_feature (1)..(1217): Ceres Seq. ID no. 15176204
ggagtgagaatagccatgtctacttcaaagagcgtcagcagttctagtgaagatgacaatgaacttagaagagggccttggactcttgaagaggataatttgctctcccaatatatttctagtcatggagaagggcgatggaatttgctagctaaacgttcaggattaaagcgaactgggaaaagttgcagattaaggtggctaaattatctaaagccagatgtaaaacggggaaatttaaccccacaagagcaacttataatcctcgaactccactcaaagtggggaaacaggtggtcaaaaattgcacaaaatttgccaggcagaacagacaatgaaatcaagaactattggagaactaggattcagaaacaggcaagacatttgaaaattgacactgacagcagagagtttcaggaacttgttaggcgtttctggatgcctagattgcttcaaaaagccaaagaatcatcttcttcagccatgtcaattcaaaaccaggcaactcctatgccttttgatggtgtttctcagcattcaactgttgggaccataccatcacattcacacaccccttggcagggaccttgtatgaatgaagctggtcccacttacatggaccaacatgagcagaactcagactctgaacacaacaatggttcatgcatctccttgtctgagtcagcaaattttccaaaagtgcctcagcattttggacgcaccaccatcacccaatatcatgccttgaataacaatgactttggcaccttcacatatgacggctacaatgtaagcaacaatgtctatgagatggacaacttcaaaacgcctactacaagggtggctgaggatgcgcaatacccaactggtgattgtcaaatggtaggaagcaattgggtaaacagcgattttgcatgtaacatgtggaacatggatgaattgtggcaatttagcaagttacaaaaataagattttagggtttggtttttttggagttaccaagactctatctttggtgatgttattattgttatcatgaactgttgattagctactaccaaattaattaatacagatggtgattgttttctgtacatctgttttgcattactctgttttgcaatttgtattgattgagaaaagtcattaattagtcactagttcaaaacacaaacagttggagattgagtgctaataaagatttcgtaaatataaag

SEQ ID NO: 6449 - protein, 322 aa, Glycine max
  peptide (1)..(322): Ceres Seq. ID no. 15176205
  misc_feature (77)..(122): Pfam Name: Pfam Description:  Myb-like DNA-binding domain
  misc_feature (4)..(187): NCBI GI NO: 34895506 NR Description: putative myb-related transcription factor
  misc_feature (2)..(318): NCBI GI NO: 7446183 NR Description: ABA-induced myb-related protein Cpm10 -Craterostigma plantagineum
  misc_feature (7)..(160): NCBI GI NO: 15221373 NR Description: myb family transcription factor
  misc_feature (2)..(318): NCBI GI NO: 7446184 NR Description: myb-related protein Cpm5
  misc_feature (9)..(158): NCBI GI NO: 18395645 NR Description: myb family transcription factor(MYB116)
  misc_feature (4)..(318): NCBI GI NO: 7446185 NR Description: dehydration-induced myb-related protein Cpm7 -Craterostigma plantagineum
  misc_feature (9)..(210): NCBI GI NO: 34898110 NR Description: putative typical P-type R2R3 Myb protein
  misc_feature (21)..(172): NCBI GI NO: 19073328 NR Description: typical P-type R2R3 Myb protein [Sorghum bicolor]
  misc_feature (11)..(181): NCBI GI NO: 23476307 NR Description: myb-like transcription factor 5
  misc_feature (11)..(181): NCBI GI NO: 14249015 NR Description: myb-like transcription factor Myb 5
GVRIAMSTSKSVSSSSEDDNELRRGPWTLEEDNLLSQYISSHGEGRWNLLAKRSGLKRTGKSCRLRWLNYLKPDVKRGNLTPQEQLIILELHSKWGNRWSKIAQNLPGRTDNEIKNYWRTRIQKQARHLKIDTDSREFQELVRRFWMPRLLQKAKESSSSAMSIQNQATPMPFDGVSQHSTVGTIPSHSHTPWQGPCMNEAGPTYMDQHEQNSDSEHNNGSCISLSESANFPKVPQHFGRTTITQYHALNNNDFGTFTYDGYNVSNNVYEMDNFKTPTTRVAEDAQYPTGDCQMVGSNWVNSDFACNMWNMDELWQFSKLQK

SEQ ID NO: 6450 - protein, 317 aa, Glycine max
  peptide (1)..(317): Ceres Seq. ID no. 15176206
  misc_feature (72)..(117): Pfam Name: Pfam Description:  Myb-like DNA-binding domain
  misc_feature (1)..(182): NCBI GI NO: 34895506 NR Description: putative myb-related transcription factor
  misc_feature (1)..(313): NCBI GI NO: 7446183 NR Description: ABA-induced myb-related protein Cpm10 -Craterostigma plantagineum
  misc_feature (2)..(155): NCBI GI NO: 15221373 NR Description: myb family transcription factor
  misc_feature (1)..(313): NCBI GI NO: 7446184 NR Description: myb-related protein Cpm5
  misc_feature (4)..(153): NCBI GI NO: 18395645 NR Description: myb family transcription factor(MYB116)
  misc_feature (1)..(313): NCBI GI NO: 7446185 NR Description: dehydration-induced myb-related protein Cpm7 -Craterostigma plantagineum
  misc_feature (4)..(205): NCBI GI NO: 34898110 NR Description: putative typical P-type R2R3 Myb protein
  misc_feature (16)..(167): NCBI GI NO: 19073328 NR Description: typical P-type R2R3 Myb protein [Sorghum bicolor]
  misc_feature (6)..(176): NCBI GI NO: 23476307 NR Description: myb-like transcription factor 5
  misc_feature (6)..(176): NCBI GI NO: 14249015 NR Description: myb-like transcription factor Myb 5
MSTSKSVSSSSEDDNELRRGPWTLEEDNLLSQYISSHGEGRWNLLAKRSGLKRTGKSCRLRWLNYLKPDVKRGNLTPQEQLIILELHSKWGNRWSKIAQNLPGRTDNEIKNYWRTRIQKQARHLKIDTDSREFQELVRRFWMPRLLQKAKESSSSAMSIQNQATPMPFDGVSQHSTVGTIPSHSHTPWQGPCMNEAGPTYMDQHEQNSDSEHNNGSCISLSESANFPKVPQHFGRTTITQYHALNNNDFGTFTYDGYNVSNNVYEMDNFKTPTTRVAEDAQYPTGDCQMVGSNWVNSDFACNMWNMDELWQFSKLQK

SEQ ID NO: 6451 - protein, 176 aa, Glycine max
  peptide (1)..(176): Ceres Seq. ID no. 15176207
  misc_feature (1)..(41): NCBI GI NO: 34895506 NR Description: putative myb-related transcription factor
  misc_feature (1)..(172): NCBI GI NO: 7446183 NR Description: ABA-induced myb-related protein Cpm10 -Craterostigma plantagineum
  misc_feature (1)..(14): NCBI GI NO: 15221373 NR Description: myb family transcription factor
  misc_feature (1)..(172): NCBI GI NO: 7446184 NR Description: myb-related protein Cpm5
  misc_feature (1)..(12): NCBI GI NO: 18395645 NR Description: myb family transcription factor(MYB116)
  misc_feature (1)..(172): NCBI GI NO: 7446185 NR Description: dehydration-induced myb-related protein Cpm7 -Craterostigma plantagineum
  misc_feature (1)..(64): NCBI GI NO: 34898110 NR Description: putative typical P-type R2R3 Myb protein
  misc_feature (1)..(26): NCBI GI NO: 19073328 NR Description: typical P-type R2R3 Myb protein [Sorghum bicolor]
  misc_feature (1)..(35): NCBI GI NO: 23476307 NR Description: myb-like transcription factor 5
  misc_feature (1)..(35): NCBI GI NO: 14249015 NR Description: myb-like transcription factor Myb 5
MPRLLQKAKESSSSAMSIQNQATPMPFDGVSQHSTVGTIPSHSHTPWQGPCMNEAGPTYMDQHEQNSDSEHNNGSCISLSESANFPKVPQHFGRTTITQYHALNNNDFGTFTYDGYNVSNNVYEMDNFKTPTTRVAEDAQYPTGDCQMVGSNWVNSDFACNMWNMDELWQFSKLQK

SEQ ID NO: 6452 - DNA, 1158 bp, Glycine max
  misc_feature (1)..(1158): Ceres Seq. ID no. 14316324
aatcccaagagagttggaaaacaaagtatagagtgaaagaatgggtgagaaaagcaagattttgatcataggaggcaccggctacatcggcaaacatatagtggaagcaagcgcaaaggctggaaatcccacttttgctttggtgagggaatccacactctctgacccctccaaggcacaactcatccacaattttgaggctttgggcgttaatttggtccgcggggatctgtacgatcatgagaagttggtgaaagctatcaagcaagtagatgtcgtcatatccacgctgggtcacctgcagcttgccgatcagctcaagatcatcgctgccattaaggaagccggtaatgttaagaggtttttcccttcggaattcggtaacgacgtggatcgtgtccatgccgtggaaccagcaaaatctgcattagctatcaaagcccaaattcgacgcagcattgaagccgaaggcatcccctatacgtacgtttccagcaactacttcgctggctattttcttcccacattagcacaaccaggtgcttttgctccacctccacccaaagacaaagtcattatcttgggcgatggaaatcctaaagcaattttcaacaaggaagaggacattggaacctacaccatcagggctgtggatgaccctaggacattgaacaagattctctacctcaggccccctaagaacatttactcgttcaacgagcttgtggccttgtgggagaacaagattggcaagaccctcgaaaaaatttatgtaccagaggagaaggttctcaaggacatcgaagaggcacctcttccaatcaatgtggtattagcaatcaaccactcagtgttcgtgaagggtgaccacaccaactttgagattgagccatctttcggggttgaggcttctgagttgtacccggatgtcaactacaccaccgtggaagaataccttggtcagttcgcttgagaatttaaaaggagaaagatgctcttgtgatcggatatttaaataatctgagttgttgatttggagagtggaagattgtgttttatgtcaaaagatcgctatgtgatgtaatcttgcctttcatgtgtagaatgttcctacttgaatggttgaaaaataataaatgacttacgagttgagataac

SEQ ID NO: 6453 - protein, 310 aa, Glycine max
  peptide (1)..(310): Ceres Seq. ID no. 14316325
  misc_feature (4)..(309): Pfam Name: Pfam Description:  Isoflavone reductase
  misc_feature (1)..(309): NCBI GI NO: 10764491 NR Description: allergenic isoflavone reductase-like protein Bet v6
  misc_feature (1)..(302): NCBI GI NO: 4731376 NR Description: isoflavone reductase homolog Bet v 6.0101
  misc_feature (1)..(302): NCBI GI NO: 7484603 NR Description: 2'-hydroxyisoflavone reductase (EC 1
  misc_feature (1)..(309): NCBI GI NO: 3243234 NR Description: isoflavone reductase related protein
  misc_feature (1)..(309): NCBI GI NO: 7578895 NR Description: phenylcoumaran benzylic ether reductase homolog Fi1
  misc_feature (1)..(308): NCBI GI NO: 6525021 NR Description: isoflavone reductase-like NAD
  misc_feature (4)..(309): NCBI GI NO: 6573171 NR Description: isoflavone reductase homolog 2 [Glycine max]
  misc_feature (1)..(309): NCBI GI NO: 7578897 NR Description: phenylcoumaran benzylic ether reductase homolog Fi2
  misc_feature (1)..(309): NCBI GI NO: 3114901 NR Description: phenylcoumaran benzylic ether reductase
  misc_feature (1)..(309): NCBI GI NO: 3114903 NR Description: phenylcoumaran benzylic ether reductase
MGEKSKILIIGGTGYIGKHIVEASAKAGNPTFALVRESTLSDPSKAQLIHNFEALGVNLVRGDLYDHEKLVKAIKQVDVVISTLGHLQLADQLKIIAAIKEAGNVKRFFPSEFGNDVDRVHAVEPAKSALAIKAQIRRSIEAEGIPYTYVSSNYFAGYFLPTLAQPGAFAPPPPKDKVIILGDGNPKAIFNKEEDIGTYTIRAVDDPRTLNKILYLRPPKNIYSFNELVALWENKIGKTLEKIYVPEEKVLKDIEEAPLPINVVLAINHSVFVKGDHTNFEIEPSFGVEASELYPDVNYTTVEEYLGQFA

SEQ ID NO: 6454 - DNA, 1298 bp, Glycine max
  misc_feature (1)..(1298): Ceres Seq. ID no. 14308787
gatcagcaccaattaaagaagaaatatgggaaatgaaggtattatgaatggtgttacccccgggaaggctaccatattagctcttggcaaggctttccctcatcagcttgtcatgcaagagtatttagttgatggatatttcagggacacaaactgtgacagtcctgaactcaagcagaagctcactagactttgcaagacaaccacagtgaaaacaaggtatgtggtaatgtcagaggagatactgaaaaagtatccagaacttgcggctgaaggcatccccacagtaaagcaacgactagagatatgcaatgaggcagtgacagaaatggccattgaagcttcccaagcttgcatcaacaactggggtggatctttatcagacataacacacttagtttatgtgtcatccagtgaagctagattacccggtggtgacctttacctagccaaaggactaggactgagccctgatactcaacgagtcatgctctattttgctggttgttcgggaggcgtggccggcttacgtgttgcgaaagacatagctgagaacaaccctggaagccgagtgctgattgctacctcagaaactacaattattgggttcaagccaccaagtgcagatagaccttatgatctagttggggtggcactctttggggatggtgctggtgcaatgataattggctcagacccaatattggagtctgagaagcctctctttgagcttcacactgcagttcaggagtttttgccacacactgagaagaaaatagatgggaggctgacagaagaaggaataagcttcaagttagcaagggaacttcctcaaataattgaagacaatgttgaaggattctgtgacaagttaataagtgttgttgggtttgagaacaaggagtacaacaagatgttttgggctgttcatccggggggtcctgccatcttgaaccgcattgaaaagaggcttgatttgttgccagagaagctgagtgcaagtagaagggctctcatggattatggcaatgctagcagtaacaccattgtgtatgtgcttgagtatatgatagaggaaggtctcaagattagaaaggatgccagaggagatcttgaatggggcttaatacttgcttttggaccagggattacatttgagggaattcttgccaggaacttgtgtgcttgatgatattattatcacaagatgtgtttatgtgatacgtgactccatcaaaagcatattcaagactataatgatcaaaagaagaaaagtcttaaataaaaactttaaccgt

SEQ ID NO: 6455 - protein, 387 aa, Glycine max
  peptide (1)..(387): Ceres Seq. ID no. 14308788
  misc_feature (1)..(225): Pfam Name: Pfam Description:  Chalcone and stilbene synthases
  misc_feature (1)..(385): NCBI GI NO: 18418528 NR Description: chalcone and stilbene synthase family
  misc_feature (1)..(385): NCBI GI NO: 7433787 NR Description: anther-specific protein homolog T11I11
  misc_feature (1)..(387): NCBI GI NO: 34902722 NR Description: putative chalcone synthase
  misc_feature (12)..(385): NCBI GI NO: 7433790 NR Description: chalcone synthase homolog ChS1 - Monterey pine
  misc_feature (13)..(385): NCBI GI NO: 15217605 NR Description: chalcone and stilbene synthase family
  misc_feature (20)..(385): NCBI GI NO: 7433783 NR Description: anther-specific protein - wood tobacco
  misc_feature (13)..(385): NCBI GI NO: 21554288 NR Description: putative chalcone synthase [Arabidopsis thaliana]
  misc_feature (13)..(385): NCBI GI NO: 15236691 NR Description: chalcone and stilbene synthase family
  misc_feature (2)..(385): NCBI GI NO: 37535500 NR Description: anther-specific protein YY2
  misc_feature (2)..(385): NCBI GI NO: 7433785 NR Description: chalcone synthase homolog - rice
MGNEGIMNGVTPGKATILALGKAFPHQLVMQEYLVDGYFRDTNCDSPELKQKLTRLCKTTTVKTRYVVMSEEILKKYPELAAEGIPTVKQRLEICNEAVTEMAIEASQACINNWGGSLSDITHLVYVSSSEARLPGGDLYLAKGLGLSPDTQRVMLYFAGCSGGVAGLRVAKDIAENNPGSRVLIATSETTIIGFKPPSADRPYDLVGVALFGDGAGAMIIGSDPILESEKPLFELHTAVQEFLPHTEKKIDGRLTEEGISFKLARELPQIIEDNVEGFCDKLISVVGFENKEYNKMFWAVHPGGPAILNRIEKRLDLLPEKLSASRRALMDYGNASSNTIVYVLEYMIEEGLKIRKDARGDLEWGLILAFGPGITFEGILARNLCA

SEQ ID NO: 6456 - protein, 381 aa, Glycine max
  peptide (1)..(381): Ceres Seq. ID no. 14308789
  misc_feature (1)..(219): Pfam Name: Pfam Description:  Chalcone and stilbene synthases
  misc_feature (1)..(379): NCBI GI NO: 18418528 NR Description: chalcone and stilbene synthase family
  misc_feature (1)..(379): NCBI GI NO: 7433787 NR Description: anther-specific protein homolog T11I11
  misc_feature (1)..(381): NCBI GI NO: 34902722 NR Description: putative chalcone synthase
  misc_feature (6)..(379): NCBI GI NO: 7433790 NR Description: chalcone synthase homolog ChS1 - Monterey pine
  misc_feature (7)..(379): NCBI GI NO: 15217605 NR Description: chalcone and stilbene synthase family
  misc_feature (14)..(379): NCBI GI NO: 7433783 NR Description: anther-specific protein - wood tobacco
  misc_feature (7)..(379): NCBI GI NO: 21554288 NR Description: putative chalcone synthase [Arabidopsis thaliana]
  misc_feature (7)..(379): NCBI GI NO: 15236691 NR Description: chalcone and stilbene synthase family
  misc_feature (1)..(379): NCBI GI NO: 37535500 NR Description: anther-specific protein YY2
  misc_feature (1)..(379): NCBI GI NO: 7433785 NR Description: chalcone synthase homolog - rice
MNGVTPGKATILALGKAFPHQLVMQEYLVDGYFRDTNCDSPELKQKLTRLCKTTTVKTRYVVMSEEILKKYPELAAEGIPTVKQRLEICNEAVTEMAIEASQACINNWGGSLSDITHLVYVSSSEARLPGGDLYLAKGLGLSPDTQRVMLYFAGCSGGVAGLRVAKDIAENNPGSRVLIATSETTIIGFKPPSADRPYDLVGVALFGDGAGAMIIGSDPILESEKPLFELHTAVQEFLPHTEKKIDGRLTEEGISFKLARELPQIIEDNVEGFCDKLISVVGFENKEYNKMFWAVHPGGPAILNRIEKRLDLLPEKLSASRRALMDYGNASSNTIVYVLEYMIEEGLKIRKDARGDLEWGLILAFGPGITFEGILARNLCA

SEQ ID NO: 6457 - protein, 358 aa, Glycine max
  peptide (1)..(358): Ceres Seq. ID no. 14308790
  misc_feature (1)..(196): Pfam Name: Pfam Description:  Chalcone and stilbene synthases
  misc_feature (1)..(356): NCBI GI NO: 18418528 NR Description: chalcone and stilbene synthase family
  misc_feature (1)..(356): NCBI GI NO: 7433787 NR Description: anther-specific protein homolog T11I11
  misc_feature (1)..(358): NCBI GI NO: 34902722 NR Description: putative chalcone synthase
  misc_feature (1)..(356): NCBI GI NO: 7433790 NR Description: chalcone synthase homolog ChS1 - Monterey pine
  misc_feature (1)..(356): NCBI GI NO: 15217605 NR Description: chalcone and stilbene synthase family
  misc_feature (1)..(356): NCBI GI NO: 7433783 NR Description: anther-specific protein - wood tobacco
  misc_feature (1)..(356): NCBI GI NO: 21554288 NR Description: putative chalcone synthase [Arabidopsis thaliana]
  misc_feature (1)..(356): NCBI GI NO: 15236691 NR Description: chalcone and stilbene synthase family
  misc_feature (1)..(356): NCBI GI NO: 37535500 NR Description: anther-specific protein YY2
  misc_feature (1)..(356): NCBI GI NO: 7433785 NR Description: chalcone synthase homolog - rice
MQEYLVDGYFRDTNCDSPELKQKLTRLCKTTTVKTRYVVMSEEILKKYPELAAEGIPTVKQRLEICNEAVTEMAIEASQACINNWGGSLSDITHLVYVSSSEARLPGGDLYLAKGLGLSPDTQRVMLYFAGCSGGVAGLRVAKDIAENNPGSRVLIATSETTIIGFKPPSADRPYDLVGVALFGDGAGAMIIGSDPILESEKPLFELHTAVQEFLPHTEKKIDGRLTEEGISFKLARELPQIIEDNVEGFCDKLISVVGFENKEYNKMFWAVHPGGPAILNRIEKRLDLLPEKLSASRRALMDYGNASSNTIVYVLEYMIEEGLKIRKDARGDLEWGLILAFGPGITFEGILARNLCA

SEQ ID NO: 6458 - DNA, 1670 bp, Glycine max
  misc_feature (1)..(1670): Ceres Seq. ID no. 14308851
ggcgaaacactcccctttgccgctgttgttgttgctgcaccaccgaacaacttcccctgtaaatcgcgtttcgtttgtgcaaggttttaaaagatggctgatgctgaggacattcaacctcttgttgttgataatggaactggaatggtcaaggctggttttgcaggtgatgatgctcctagggccgtgttccccagcattattgggagaccacgccatactggtgtaatggttgggatgggtcagaaggatgcttacgtgggtgatgaagcccaatcaaaaaggggtatactcaccttgaagtatcctatagagcatggcatagtcagcaactgggacgatatggagaagatttggcatcacacattttacaatgagctacgtgttgcccctgaagaacaccccgtacttcttaccgaggcaccactcaatcccaaggccaacagagagaagatgacccaaattatgtttgagactttcaatgtgcctgccatgtatgttgcaattcaggctgtcttgtctctgtatgccagtggacgtactacaggtattgtgcttgattctggtgatggtgtgagccacacggtgcccatatatgaagggtatgctcttcctcatgcaattcttcggttggaccttgctggccgtgatttaacagagtacttggtgaaaatccttaccgagagaggatactccttcagcacctctgccgaaaaggaaattgtccgtgatgtgaaggagaaattggcatacgtggcccttgatttcgaacaagaaatggagactactaagagtagttctgcagtggaaaagagctatgaattgcctgatggacaggtcattacaataggttctgagagattccgttgcccagaagtactgttccagccttctctgattggtatggaagctactggaattcatgaaacgacatacaattccatcatgaaatgtgatgttgatattaggaaggatctgtatggaaacatcgtgcttagtggagggtctactatgtttccgggaattgctgatcgcatgagcaaggaaattagtgctcttgcacccagtagcatgaaaatcaaggtggttgcacctcctgagagaaagtacagtgtctggattggtggttctatcttggcatcacttagcaccttccaacagatgtggatctccaagggtgaatatgatgaatctgggccagccatcgttcatcggaagtgcttctaaagttgggtcaagtcgagctggatggtgatcaagttcttcatgcacccagtcctgtgccatatttcagtaaagtttggttgacttatttggtatttgaagctttgggtttttaatagatatatctagtttaatgaatggatttgtaagttgagtatgttataagtttctccgttaggtcaccttggaagccagactttttatgctattggcggatggtattggaactttgtaggttctgcttggtttggtttttccttttattcgattttcatgttgtggccaagaattaggtgcctcgagttaggaggacgatagtctaagcatcttttctcacagggatttttgagtcagtttctgtttatatttattatatgcataattggtttttatgtttgcagtacactcagaaatcagaatgtttttattgtttgaggtgattaaag

SEQ ID NO: 6459 - protein, 377 aa, Glycine max
  peptide (1)..(377): Ceres Seq. ID no. 14308852
  misc_feature (1)..(377): Pfam Name: Pfam Description:  Actin
  misc_feature (1)..(377): NCBI GI NO: 7960247 NR Description: actin-like protein [Phalaenopsis sp. 'True Lady']
  misc_feature (1)..(377): NCBI GI NO: 32186906 NR Description: actin [Gossypium hirsutum]
  misc_feature (1)..(377): NCBI GI NO: 231505 NR Description: ACTIN 101
  misc_feature (1)..(377): NCBI GI NO: 9965319 NR Description: actin [Setaria italica]
  misc_feature (1)..(377): NCBI GI NO: 11276968 NR Description: actin [imported] - Picea rubens
  misc_feature (1)..(377): NCBI GI NO: 34541966 NR Description: actin [Trifolium pratense]
  misc_feature (1)..(377): NCBI GI NO: 11276971 NR Description: actin isoform B [imported] - Mimosa pudica
  misc_feature (1)..(377): NCBI GI NO: 32186894 NR Description: actin [Gossypium hirsutum]
  misc_feature (1)..(377): NCBI GI NO: 23955912 NR Description: actin [Stevia rebaudiana]
  misc_feature (1)..(377): NCBI GI NO: 15229955 NR Description: actin 11 (ACT11) [Arabidopsis thaliana]
MADAEDIQPLVVDNGTGMVKAGFAGDDAPRAVFPSIIGRPRHTGVMVGMGQKDAYVGDEAQSKRGILTLKYPIEHGIVSNWDDMEKIWHHTFYNELRVAPEEHPVLLTEAPLNPKANREKMTQIMFETFNVPAMYVAIQAVLSLYASGRTTGIVLDSGDGVSHTVPIYEGYALPHAILRLDLAGRDLTEYLVKILTERGYSFSTSAEKEIVRDVKEKLAYVALDFEQEMETTKSSSAVEKSYELPDGQVITIGSERFRCPEVLFQPSLIGMEATGIHETTYNSIMKCDVDIRKDLYGNIVLSGGSTMFPGIADRMSKEISALAPSSMKIKVVAPPERKYSVWIGGSILASLSTFQQMWISKGEYDESGPAIVHRKCF

SEQ ID NO: 6460 - protein, 360 aa, Glycine max
  peptide (1)..(360): Ceres Seq. ID no. 14308853
  misc_feature (1)..(360): Pfam Name: Pfam Description:  Actin
  misc_feature (1)..(360): NCBI GI NO: 7960247 NR Description: actin-like protein [Phalaenopsis sp. 'True Lady']
  misc_feature (1)..(360): NCBI GI NO: 32186906 NR Description: actin [Gossypium hirsutum]
  misc_feature (1)..(360): NCBI GI NO: 231505 NR Description: ACTIN 101
  misc_feature (1)..(360): NCBI GI NO: 9965319 NR Description: actin [Setaria italica]
  misc_feature (1)..(360): NCBI GI NO: 11276971 NR Description: actin isoform B [imported] - Mimosa pudica
  misc_feature (1)..(360): NCBI GI NO: 34541966 NR Description: actin [Trifolium pratense]
  misc_feature (1)..(360): NCBI GI NO: 11276968 NR Description: actin [imported] - Picea rubens
  misc_feature (1)..(360): NCBI GI NO: 32186894 NR Description: actin [Gossypium hirsutum]
  misc_feature (1)..(360): NCBI GI NO: 23955912 NR Description: actin [Stevia rebaudiana]
  misc_feature (1)..(360): NCBI GI NO: 15229955 NR Description: actin 11 (ACT11) [Arabidopsis thaliana]
MVKAGFAGDDAPRAVFPSIIGRPRHTGVMVGMGQKDAYVGDEAQSKRGILTLKYPIEHGIVSNWDDMEKIWHHTFYNELRVAPEEHPVLLTEAPLNPKANREKMTQIMFETFNVPAMYVAIQAVLSLYASGRTTGIVLDSGDGVSHTVPIYEGYALPHAILRLDLAGRDLTEYLVKILTERGYSFSTSAEKEIVRDVKEKLAYVALDFEQEMETTKSSSAVEKSYELPDGQVITIGSERFRCPEVLFQPSLIGMEATGIHETTYNSIMKCDVDIRKDLYGNIVLSGGSTMFPGIADRMSKEISALAPSSMKIKVVAPPERKYSVWIGGSILASLSTFQQMWISKGEYDESGPAIVHRKCF

SEQ ID NO: 6461 - protein, 332 aa, Glycine max
  peptide (1)..(332): Ceres Seq. ID no. 14308854
  misc_feature (1)..(332): Pfam Name: Pfam Description:  Actin
  misc_feature (1)..(332): NCBI GI NO: 7960247 NR Description: actin-like protein [Phalaenopsis sp. 'True Lady']
  misc_feature (1)..(332): NCBI GI NO: 32186906 NR Description: actin [Gossypium hirsutum]
  misc_feature (1)..(332): NCBI GI NO: 231505 NR Description: ACTIN 101
  misc_feature (1)..(332): NCBI GI NO: 11276971 NR Description: actin isoform B [imported] - Mimosa pudica
  misc_feature (1)..(332): NCBI GI NO: 34541966 NR Description: actin [Trifolium pratense]
  misc_feature (1)..(332): NCBI GI NO: 11276968 NR Description: actin [imported] - Picea rubens
  misc_feature (1)..(332): NCBI GI NO: 9965319 NR Description: actin [Setaria italica]
  misc_feature (1)..(332): NCBI GI NO: 32186894 NR Description: actin [Gossypium hirsutum]
  misc_feature (1)..(332): NCBI GI NO: 23955912 NR Description: actin [Stevia rebaudiana]
  misc_feature (1)..(332): NCBI GI NO: 15229955 NR Description: actin 11 (ACT11) [Arabidopsis thaliana]
MVGMGQKDAYVGDEAQSKRGILTLKYPIEHGIVSNWDDMEKIWHHTFYNELRVAPEEHPVLLTEAPLNPKANREKMTQIMFETFNVPAMYVAIQAVLSLYASGRTTGIVLDSGDGVSHTVPIYEGYALPHAILRLDLAGRDLTEYLVKILTERGYSFSTSAEKEIVRDVKEKLAYVALDFEQEMETTKSSSAVEKSYELPDGQVITIGSERFRCPEVLFQPSLIGMEATGIHETTYNSIMKCDVDIRKDLYGNIVLSGGSTMFPGIADRMSKEISALAPSSMKIKVVAPPERKYSVWIGGSILASLSTFQQMWISKGEYDESGPAIVHRKCF

SEQ ID NO: 6462 - DNA, 1632 bp, Glycine max
  misc_feature (1)..(1632): Ceres Seq. ID no. 14312785
actgtcataacataagagtcgtggacgcggttggctgttgctgtctacggttccaacttccaagttacaagcttcacccattttataaaagttacggttcggttccgctgcattcgtgctttctagcaacacaaaatgagcgccatctctttcagttccacccatttgcacagttggaaaaatcccaaggggtttggaaaggtgagaaagcaacgagatgggaagctacttgtcaagtgttccagcaagagtgggaacccaacttcattgcaaaatggggttcgtgttggtgttcttggagctagtggctacactggttctgaggttatgcgactcttggctaatcatccacagtttgggattgcactgatgactgctgataggaaagctgggcagccaatctcttctgtattcccacatttgagcactcgggacttgccagatttgattgcaataaaggatgcaaacttttctgatgtggatgctgtattctgttgtttgcctcatggaactactcaggaaattattaaaggcctaccaaagcacttgaagattgttgatctttctgcagattttcgtctaaaagatctttctgagtatgaagagtggtatggtcagccgcatagagcaccagatttgcagaaagaagctatatatggattaacagaggttttaagggaggaaataaagaatgcacgtctagttgctaatcctggttgttatccaacttctgttcaacttcctcttgtcccattgataaaggctagtcttattgagcttaaaaatattatcattgatgctaaatctggtgtgagtggagcagggcgcagtgccaaagaaaatttattgttcactgaagtaactgaaggtctcaattcttatggtgttaccctacatcgccatgttcctgaaattgagcagggacttgctgatgcttcaggttcaaaagtaactgttagttttacaccacatctaattccaatgagccgtggtatgtaatcaactatttatgtggaaatggctccaggagtgagaattgaggacctgtaccagcaactgaagctctcatatgagaatgaagaatttgtttttgtgttggaaaatggagtcattcctcgaactcacagcgttaaagggactaattactgtttaatcaatgtttttccagaccgaattcctggaagagcaatcattatatctgttattgataatctagtgaagggagcttcaggtcaagctttacaaaaccttaatttgttaatgggatttccagaaaatttgggacttcattacctgcctctttttccatagagtagttgtcttgtccaactagagctccaattctgcagtcacagttccaccaaaatacttgatggagcagaggaaatattttcaagttatgtattttcgttctctagattgtaatgtgagattcttcaagaatttagaagggaattgattatggcattggcagggatactatagcaatttctgtcttttttgtcctttgttttgatctgtaatgttagaaatcactgaaggtggtggcgtgtagttttccaagtttgggttttggtttatttgtaatgccaatattttagtggactatgaaatcaccatctcaagtttttg

SEQ ID NO: 6463 - protein, 287 aa, Glycine max
  peptide (1)..(287): Ceres Seq. ID no. 14312786
  misc_feature (204)..(287): Pfam Name: Pfam Description:  Semialdehyde dehydrogenase, dimerisation domain
  misc_feature (46)..(287): NCBI GI NO: 16604368 NR Description: At2g19940/F6F22.3 [Arabidopsis thaliana]
  misc_feature (46)..(287): NCBI GI NO: 18399202 NR Description: N-acetyl-gamma- glutamyl-phosphate reductase -related
  misc_feature (39)..(287): NCBI GI NO: 37535658 NR Description: putative N-acetyl-gamma-glutamyl-phosphatereductase
  misc_feature (46)..(287): NCBI GI NO: 25284367 NR Description: hypothetical protein At2g19940
  misc_feature (49)..(287): NCBI GI NO: 22968389 NR Description: hypothetical protein [Rhodospirillum rubrum]
  misc_feature (117)..(287): NCBI GI NO: 23013472 NR Description: hypothetical protein
  misc_feature (50)..(287): NCBI GI NO: 6714965 NR Description: N-acetyl-gamma-glutamyl-phosphate reductase
  misc_feature (50)..(287): NCBI GI NO: 28376951 NR Description: N-acetyl-gamma-glutamyl-phosphate reductase
  misc_feature (51)..(287): NCBI GI NO: 22956652 NR Description: hypothetical protein [Rhodobacter sphaeroides]
  misc_feature (49)..(287): NCBI GI NO: 23054526 NR Description: hypothetical protein [Geobacter metallireducens]
MSAISFSSTHLHSWKNPKGFGKVRKQRDGKLLVKCSSKSGNPTSLQNGVRVGVLGASGYTGSEVMRLLANHPQFGIALMTADRKAGQPISSVFPHLSTRDLPDLIAIKDANFSDVDAVFCCLPHGTTQEIIKGLPKHLKIVDLSADFRLKDLSEYEEWYGQPHRAPDLQKEAIYGLTEVLREEIKNARLVANPGCYPTSVQLPLVPLIKASLIELKNIIIDAKSGVSGAGRSAKENLLFTEVTEGLNSYGVTLHRHVPEIEQGLADASGSKVTVSFTPHLIPMSRGM

SEQ ID NO: 6464 - protein, 223 aa, Glycine max
  peptide (1)..(223): Ceres Seq. ID no. 14312787
  misc_feature (140)..(223): Pfam Name: Pfam Description:  Semialdehyde dehydrogenase, dimerisation domain
  misc_feature (1)..(223): NCBI GI NO: 16604368 NR Description: At2g19940/F6F22.3 [Arabidopsis thaliana]
  misc_feature (1)..(223): NCBI GI NO: 18399202 NR Description: N-acetyl-gamma- glutamyl-phosphate reductase -related
  misc_feature (1)..(223): NCBI GI NO: 37535658 NR Description: putative N-acetyl-gamma-glutamyl-phosphatereductase
  misc_feature (1)..(223): NCBI GI NO: 25284367 NR Description: hypothetical protein At2g19940
  misc_feature (1)..(223): NCBI GI NO: 22968389 NR Description: hypothetical protein [Rhodospirillum rubrum]
  misc_feature (53)..(223): NCBI GI NO: 23013472 NR Description: hypothetical protein
  misc_feature (1)..(223): NCBI GI NO: 6714965 NR Description: N-acetyl-gamma-glutamyl-phosphate reductase
  misc_feature (1)..(223): NCBI GI NO: 28376951 NR Description: N-acetyl-gamma-glutamyl-phosphate reductase
  misc_feature (1)..(223): NCBI GI NO: 22956652 NR Description: hypothetical protein [Rhodobacter sphaeroides]
  misc_feature (1)..(223): NCBI GI NO: 23054526 NR Description: hypothetical protein [Geobacter metallireducens]
MRLLANHPQFGIALMTADRKAGQPISSVFPHLSTRDLPDLIAIKDANFSDVDAVFCCLPHGTTQEIIKGLPKHLKIVDLSADFRLKDLSEYEEWYGQPHRAPDLQKEAIYGLTEVLREEIKNARLVANPGCYPTSVQLPLVPLIKASLIELKNIIIDAKSGVSGAGRSAKENLLFTEVTEGLNSYGVTLHRHVPEIEQGLADASGSKVTVSFTPHLIPMSRGM

SEQ ID NO: 6465 - protein, 209 aa, Glycine max
  peptide (1)..(209): Ceres Seq. ID no. 14312788
  misc_feature (126)..(209): Pfam Name: Pfam Description:  Semialdehyde dehydrogenase, dimerisation domain
  misc_feature (1)..(209): NCBI GI NO: 16604368 NR Description: At2g19940/F6F22.3 [Arabidopsis thaliana]
  misc_feature (1)..(209): NCBI GI NO: 18399202 NR Description: N-acetyl-gamma- glutamyl-phosphate reductase -related
  misc_feature (1)..(209): NCBI GI NO: 37535658 NR Description: putative N-acetyl-gamma-glutamyl-phosphatereductase
  misc_feature (1)..(209): NCBI GI NO: 25284367 NR Description: hypothetical protein At2g19940
  misc_feature (1)..(209): NCBI GI NO: 22968389 NR Description: hypothetical protein [Rhodospirillum rubrum]
  misc_feature (39)..(209): NCBI GI NO: 23013472 NR Description: hypothetical protein
  misc_feature (1)..(209): NCBI GI NO: 6714965 NR Description: N-acetyl-gamma-glutamyl-phosphate reductase
  misc_feature (1)..(209): NCBI GI NO: 28376951 NR Description: N-acetyl-gamma-glutamyl-phosphate reductase
  misc_feature (1)..(209): NCBI GI NO: 22956652 NR Description: hypothetical protein [Rhodobacter sphaeroides]
  misc_feature (1)..(209): NCBI GI NO: 23054526 NR Description: hypothetical protein [Geobacter metallireducens]
MTADRKAGQPISSVFPHLSTRDLPDLIAIKDANFSDVDAVFCCLPHGTTQEIIKGLPKHLKIVDLSADFRLKDLSEYEEWYGQPHRAPDLQKEAIYGLTEVLREEIKNARLVANPGCYPTSVQLPLVPLIKASLIELKNIIIDAKSGVSGAGRSAKENLLFTEVTEGLNSYGVTLHRHVPEIEQGLADASGSKVTVSFTPHLIPMSRGM

SEQ ID NO: 6466 - DNA, 1213 bp, Glycine max
  misc_feature (1)..(1213): Ceres Seq. ID no. 15224566
ggaacaccaatacaacacgcctaagccaaacccaaatccaccgctctttattttcgtcttttctacccttcccggatcccaatccctaatctttctaccactctcactccaaaaatctctaattttttcatctgggaagatcggttgacgaatcgaggatccgatcgcttgcgaggaactagggtttcaatcgatcgcatcacacacaaacaatcatgtttagccggatgttcggtaaacctaaacaggaaaccaatgctgttgccactttggacaagctaaacgagacacttgaaatgctggagaaaaaggagaaagtgctccttaaaaaggtggcagcggaagttgaaaaggccaaagaattcacaagggggaagaacaaaagggcggcaatacaatgtctgaagaggaagaggttatatgaacagcaaatagagcagcttggaaatttccagttgcgtattcatgaccagatgatattgttggaaggtgctaaagctaccactgaaacagtagatgcattaagaactggagcagctgctatgaaggctatgcaaaaagcaacgaatattgatgatgttgacaagaccatggatgagatcaatgaacagaccgagaacatgaaacagattcaggatgcattgtcagctccaattggtgcagctgctgattttgacgaggacgaattggaagcagaacttgaagaattggagggtgctgagttggaagaacagcttcttcagccagcaactacagctcctgcagccccagtgcaggtcccagctgggcgccaacctactcgcccagttcctgcaaagcgaactcctgaagaagatgaattggcagctttgcaggctgagatggcactttgagcagaattttgcaggcattttttgtgtgcatgatgcgtggcttcaatgaggaattgtaaccactattacgtggattcctactcgcttatctgtgaaattattgagctggccagaggatgtatataaaaggtgaaaaaaaaaaggatcataaaagtcgttcaaaacttatttactattattttggatgagttcgaacccccctttccattatacgtaacaattattgatgcatttggctatcttatattttatgtggtcgagtttaacatggtcagtttaatcaatgtatatcttaaacatgctacaacgaagtataaggaataagaatttggttagccaac

SEQ ID NO: 6467 - protein, 218 aa, Glycine max
  peptide (1)..(218): Ceres Seq. ID no. 15224567
  misc_feature (18)..(196): Pfam Name: Pfam Description:  SNF7
  misc_feature (1)..(218): NCBI GI NO: 15233464 NR Description: expressed protein [Arabidopsis thaliana]
  misc_feature (3)..(218): NCBI GI NO: 21594892 NR Description: copia-like retroelement pol polyprotein
  misc_feature (1)..(218): NCBI GI NO: 15224854 NR Description: copia-related retroelement pol polyprotein
  misc_feature (1)..(214): NCBI GI NO: 28277855 NR Description: Unknown (protein for MGC:56112) [Danio rerio]
  misc_feature (1)..(208): NCBI GI NO: 28278647 NR Description: Similar to RIKEN cDNA 2010012F05 gene
  misc_feature (1)..(215): NCBI GI NO: 31212691 NR Description: ENSANGP00000020979 [Anopheles gambiae]
  misc_feature (2)..(218): NCBI GI NO: 19115183 NR Description: similar to yeast Snf7 protein involved in glucosederepression and in protein sorting in pre-vacuolar endosome
  misc_feature (19)..(208): NCBI GI NO: 28077049 NR Description: RIKEN cDNA 2010012F05 [Mus musculus]
  misc_feature (4)..(218): NCBI GI NO: 28850339 NR Description: similar to C56C10.3.p
  misc_feature (19)..(208): NCBI GI NO: 28827795 NR Description: Snf7 homologue associated with Alix 1
MFSRMFGKPKQETNAVATLDKLNETLEMLEKKEKVLLKKVAAEVEKAKEFTRGKNKRAAIQCLKRKRLYEQQIEQLGNFQLRIHDQMILLEGAKATTETVDALRTGAAAMKAMQKATNIDDVDKTMDEINEQTENMKQIQDALSAPIGAAADFDEDELEAELEELEGAELEEQLLQPATTAPAAPVQVPAGRQPTRPVPAKRTPEEDELAALQAEMAL

SEQ ID NO: 6468 - protein, 214 aa, Glycine max
  peptide (1)..(214): Ceres Seq. ID no. 15224568
  misc_feature (14)..(192): Pfam Name: Pfam Description:  SNF7
  misc_feature (1)..(214): NCBI GI NO: 15233464 NR Description: expressed protein [Arabidopsis thaliana]
  misc_feature (1)..(214): NCBI GI NO: 21594892 NR Description: copia-like retroelement pol polyprotein
  misc_feature (1)..(214): NCBI GI NO: 15224854 NR Description: copia-related retroelement pol polyprotein
  misc_feature (1)..(210): NCBI GI NO: 28277855 NR Description: Unknown (protein for MGC:56112) [Danio rerio]
  misc_feature (1)..(204): NCBI GI NO: 28278647 NR Description: Similar to RIKEN cDNA 2010012F05 gene
  misc_feature (1)..(211): NCBI GI NO: 31212691 NR Description: ENSANGP00000020979 [Anopheles gambiae]
  misc_feature (1)..(214): NCBI GI NO: 19115183 NR Description: similar to yeast Snf7 protein involved in glucosederepression and in protein sorting in pre-vacuolar endosome
  misc_feature (15)..(204): NCBI GI NO: 28077049 NR Description: RIKEN cDNA 2010012F05 [Mus musculus]
  misc_feature (1)..(214): NCBI GI NO: 28850339 NR Description: similar to C56C10.3.p
  misc_feature (15)..(204): NCBI GI NO: 28827795 NR Description: Snf7 homologue associated with Alix 1
MFGKPKQETNAVATLDKLNETLEMLEKKEKVLLKKVAAEVEKAKEFTRGKNKRAAIQCLKRKRLYEQQIEQLGNFQLRIHDQMILLEGAKATTETVDALRTGAAAMKAMQKATNIDDVDKTMDEINEQTENMKQIQDALSAPIGAAADFDEDELEAELEELEGAELEEQLLQPATTAPAAPVQVPAGRQPTRPVPAKRTPEEDELAALQAEMAL

SEQ ID NO: 6469 - protein, 191 aa, Glycine max
  peptide (1)..(191): Ceres Seq. ID no. 15224569
  misc_feature (1)..(169): Pfam Name: Pfam Description:  SNF7
  misc_feature (1)..(191): NCBI GI NO: 15233464 NR Description: expressed protein [Arabidopsis thaliana]
  misc_feature (1)..(191): NCBI GI NO: 21594892 NR Description: copia-like retroelement pol polyprotein
  misc_feature (1)..(191): NCBI GI NO: 15224854 NR Description: copia-related retroelement pol polyprotein
  misc_feature (1)..(187): NCBI GI NO: 28277855 NR Description: Unknown (protein for MGC:56112) [Danio rerio]
  misc_feature (1)..(181): NCBI GI NO: 28278647 NR Description: Similar to RIKEN cDNA 2010012F05 gene
  misc_feature (1)..(188): NCBI GI NO: 31212691 NR Description: ENSANGP00000020979 [Anopheles gambiae]
  misc_feature (1)..(191): NCBI GI NO: 19115183 NR Description: similar to yeast Snf7 protein involved in glucosederepression and in protein sorting in pre-vacuolar endosome
  misc_feature (1)..(181): NCBI GI NO: 28077049 NR Description: RIKEN cDNA 2010012F05 [Mus musculus]
  misc_feature (1)..(191): NCBI GI NO: 28850339 NR Description: similar to C56C10.3.p
  misc_feature (1)..(181): NCBI GI NO: 28827795 NR Description: Snf7 homologue associated with Alix 1
MLEKKEKVLLKKVAAEVEKAKEFTRGKNKRAAIQCLKRKRLYEQQIEQLGNFQLRIHDQMILLEGAKATTETVDALRTGAAAMKAMQKATNIDDVDKTMDEINEQTENMKQIQDALSAPIGAAADFDEDELEAELEELEGAELEEQLLQPATTAPAAPVQVPAGRQPTRPVPAKRTPEEDELAALQAEMAL

SEQ ID NO: 6470 - DNA, 1475 bp, Glycine max
  misc_feature (1)..(1475): Ceres Seq. ID no. 14312866
aagatttccaacaacccctctctgcaaaacgcttcgcataaggtacttatgcgcgataagactgtactggtaaccggcggagccggttacatcggcagccacaccgttcttcagctcttgctcggaggtttcagagccgtcgtcctcgacaacctcgaaaattcctccgaggttgccatccacagagtcagggagctcgccggcgaatttgggaacaacctctcctttcacaaggtggacctacgggacagagctgctctagaccaaatattttcttccacacaattcgatgctgtcatacattttgctggactgaaagcagtaggagaaagtgtgcaaaaacctttactatactataacaacaacttgactgggacaatcactctattggaagtcatggctgcccatggatgcaagaagctcgtgttttcatcttcagcaactgtatatggttggccaaaggaggttccatgcacagaagagttccctctgtcagcaatgaacccatatggacgaactaagcttatcattgaagaaatttgccgtgatgtccactgtgcagagccagattgtaaaataattttgttaagatacttcaacccagttggtgcacaccttagtggttatattggggaggatcctcgtggaattccaaacaatctcatgccatttgttcagcaagtagcagttggccgacggcctgcactgacagtttttggaaatgattataatacaagtgatggcactggggttcgggattacattcatgttgttgatttagcagatgggcacattgctgcattgcttaaactagatgaacctaatataggttgtgaggtttataacctgggaacaggaaagggaacatcagttttggagatggttagagcttttgaaatggcatctggaaagaaaattccacttgtgatggctggccgtagacctggtgatgctgaaattgtttatgcatcaacaaagaaagcggaaagagagcttaaatggaaggcaaaatatggcattgatgagatgtgccgtgatcaatggaactgggctagcaaaaacccttatggctatggagatcagggctccaccgattaaccacttagttttctctttgggttcttttctgaactcacccacaccgtagtccgtaggtcttgtgaatttagttttcccaaaagcttttctttctttagtgatcttaaggtgacaaagtacttgtattattactattcatagttacatagtaagtaagtagtggtttactatactgtaatttaaaggttctctaggttccttcttacaggttattgattattagattcggattctctcatgttccacatgagcagcatcctgttttgtaaatctaaatcacatgtttgtttaaagtgtgactaacaggtatccttacctcattattgagattaatttattttgaatgttacctttagtaataaatagcatttttcatg

SEQ ID NO: 6471 - protein, 365 aa, Glycine max
  peptide (1)..(365): Ceres Seq. ID no. 14312867
  misc_feature (22)..(355): Pfam Name: Pfam Description:  NAD dependent epimerase/dehydratase family
  misc_feature (17)..(365): NCBI GI NO: 11386775 NR Description: UDP-glucose 4-epimerase GEPI48
  misc_feature (20)..(365): NCBI GI NO: 21715990 NR Description: UDP-glucose 4-epimerase
  misc_feature (17)..(365): NCBI GI NO: 15236988 NR Description: UDP-glucose 4-epimerase
  misc_feature (20)..(365): NCBI GI NO: 12643850 NR Description: Probable UDP-glucose 4-epimerase At4g10960
  misc_feature (20)..(364): NCBI GI NO: 21553659 NR Description: UDP-galactose 4-epimerase-like protein
  misc_feature (20)..(365): NCBI GI NO: 32130594 NR Description: UDP-glucose-4-epimerase [Zea mays]
  misc_feature (20)..(363): NCBI GI NO: 15236663 NR Description: UDP-glucose 4-epimerase
  misc_feature (20)..(363): NCBI GI NO: 21536846 NR Description: UDPglucose 4-epimerase-like protein
  misc_feature (22)..(359): NCBI GI NO: 15217653 NR Description: UDP-glucose 4-epimerase
  misc_feature (20)..(364): NCBI GI NO: 25553520 NR Description: putative UDP-glucose 4-epimerase
KISNNPSLQNASHKVLMRDKTVLVTGGAGYIGSHTVLQLLLGGFRAVVLDNLENSSEVAIHRVRELAGEFGNNLSFHKVDLRDRAALDQIFSSTQFDAVIHFAGLKAVGESVQKPLLYYNNNLTGTITLLEVMAAHGCKKLVFSSSATVYGWPKEVPCTEEFPLSAMNPYGRTKLIIEEICRDVHCAEPDCKIILLRYFNPVGAHLSGYIGEDPRGIPNNLMPFVQQVAVGRRPALTVFGNDYNTSDGTGVRDYIHVVDLADGHIAALLKLDEPNIGCEVYNLGTGKGTSVLEMVRAFEMASGKKIPLVMAGRRPGDAEIVYASTKKAERELKWKAKYGIDEMCRDQWNWASKNPYGYGDQGSTD

SEQ ID NO: 6472 - protein, 349 aa, Glycine max
  peptide (1)..(349): Ceres Seq. ID no. 14312868
  misc_feature (6)..(339): Pfam Name: Pfam Description:  NAD dependent epimerase/dehydratase family
  misc_feature (1)..(349): NCBI GI NO: 11386775 NR Description: UDP-glucose 4-epimerase GEPI48
  misc_feature (4)..(349): NCBI GI NO: 21715990 NR Description: UDP-glucose 4-epimerase
  misc_feature (1)..(349): NCBI GI NO: 15236988 NR Description: UDP-glucose 4-epimerase
  misc_feature (4)..(349): NCBI GI NO: 12643850 NR Description: Probable UDP-glucose 4-epimerase At4g10960
  misc_feature (4)..(348): NCBI GI NO: 21553659 NR Description: UDP-galactose 4-epimerase-like protein
  misc_feature (4)..(349): NCBI GI NO: 32130594 NR Description: UDP-glucose-4-epimerase [Zea mays]
  misc_feature (4)..(347): NCBI GI NO: 15236663 NR Description: UDP-glucose 4-epimerase
  misc_feature (4)..(347): NCBI GI NO: 21536846 NR Description: UDPglucose 4-epimerase-like protein
  misc_feature (6)..(343): NCBI GI NO: 15217653 NR Description: UDP-glucose 4-epimerase
  misc_feature (4)..(348): NCBI GI NO: 25553520 NR Description: putative UDP-glucose 4-epimerase
MRDKTVLVTGGAGYIGSHTVLQLLLGGFRAVVLDNLENSSEVAIHRVRELAGEFGNNLSFHKVDLRDRAALDQIFSSTQFDAVIHFAGLKAVGESVQKPLLYYNNNLTGTITLLEVMAAHGCKKLVFSSSATVYGWPKEVPCTEEFPLSAMNPYGRTKLIIEEICRDVHCAEPDCKIILLRYFNPVGAHLSGYIGEDPRGIPNNLMPFVQQVAVGRRPALTVFGNDYNTSDGTGVRDYIHVVDLADGHIAALLKLDEPNIGCEVYNLGTGKGTSVLEMVRAFEMASGKKIPLVMAGRRPGDAEIVYASTKKAERELKWKAKYGIDEMCRDQWNWASKNPYGYGDQGSTD

SEQ ID NO: 6473 - protein, 233 aa, Glycine max
  peptide (1)..(233): Ceres Seq. ID no. 14312869
  misc_feature (1)..(223): Pfam Name: Pfam Description:  NAD dependent epimerase/dehydratase family
  misc_feature (1)..(233): NCBI GI NO: 11386775 NR Description: UDP-glucose 4-epimerase GEPI48
  misc_feature (1)..(233): NCBI GI NO: 21715990 NR Description: UDP-glucose 4-epimerase
  misc_feature (1)..(233): NCBI GI NO: 15236988 NR Description: UDP-glucose 4-epimerase
  misc_feature (1)..(233): NCBI GI NO: 12643850 NR Description: Probable UDP-glucose 4-epimerase At4g10960
  misc_feature (1)..(232): NCBI GI NO: 21553659 NR Description: UDP-galactose 4-epimerase-like protein
  misc_feature (1)..(233): NCBI GI NO: 32130594 NR Description: UDP-glucose-4-epimerase [Zea mays]
  misc_feature (1)..(231): NCBI GI NO: 15236663 NR Description: UDP-glucose 4-epimerase
  misc_feature (1)..(231): NCBI GI NO: 21536846 NR Description: UDPglucose 4-epimerase-like protein
  misc_feature (1)..(227): NCBI GI NO: 15217653 NR Description: UDP-glucose 4-epimerase
  misc_feature (1)..(232): NCBI GI NO: 25553520 NR Description: putative UDP-glucose 4-epimerase
MAAHGCKKLVFSSSATVYGWPKEVPCTEEFPLSAMNPYGRTKLIIEEICRDVHCAEPDCKIILLRYFNPVGAHLSGYIGEDPRGIPNNLMPFVQQVAVGRRPALTVFGNDYNTSDGTGVRDYIHVVDLADGHIAALLKLDEPNIGCEVYNLGTGKGTSVLEMVRAFEMASGKKIPLVMAGRRPGDAEIVYASTKKAERELKWKAKYGIDEMCRDQWNWASKNPYGYGDQGSTD

SEQ ID NO: 6474 - DNA, 1317 bp, Glycine max
  misc_feature (1)..(1317): Ceres Seq. ID no. 15178027
cgttcagcttcaccaacaataaataaataaaaaatcataacaccgttcatcaatggcggttccgctgcattcctagactactctctttttccgcaatttttcattggctgcgttcgttcgttcgttgcgtgctttagttgttacttttccgttacggcgatggagttggagcacccgaccgcgacgccgctcaactccgccatgacctacgacgaagcctccatggagcgcagcaagagcttcgtcaacgccttgcaggaacttaagaacctaaggcctcaactttattctgctgcagaatactgtgaaaaatcttatctccatagtgaacagaaacaaatggtacttgacaacctgaaagactatgctgtaagagcccttgtgaatgctgttgatcatctaggaacagttgcatacaagttaactgaccttcttgagcagcaaacatttgatgtctcaactatggatttgaaggtcgctaccataaatcagaaacttcttacatgccaaatttacactgataaagaaggtctacggcagcagcaattgttagctttcattcccagacatcataagcactacattttgccaaattctgtcaataaaaaggtacatttcagtccacaaatacagattgatgcaaggcagaatccatttcaaaccagaacccgttttcaatcttcaggtacccctgcagcgaaaactctttcatggcatttagcatcagagacaaagtctaccttaaaagggtcttcgcatgcttccccttccccaaacactgagaacccaaagttttctgccaaggcctctggagttttccatctcttagataatgaagagaacacctggatgaaatcctcacctgcacaaatttactttccaaatggagttcctacctctagtacacccatgcatactttaggtggtacaggcaaggatgcattggagggatccaaaccattgacagcattcagatcatttgactaccaaaatcggcgtgagactgtccaagtccctactcgaagcaaaagtgtgctatcagctttctttgtcaagcagaaaacaccaaagttgaaagccggttctttcttatgaatacctctaaagccatcccctcccctatgcaaatcctcagaattaattagtttctgattcaagcctttgaataatgatcctgtaagtagccggttccctggcaatcataatggttgggatcttggtcttctaatcgctttatgttgctcttgtggattgtgatctagttcaggcacctgcaaaatgtatatttgttgtatgctatgcaaaaaaagtttcatt

SEQ ID NO: 6475 - protein, 311 aa, Glycine max
  peptide (1)..(311): Ceres Seq. ID no. 15178028
  misc_feature (12)..(308): NCBI GI NO: 18407012 NR Description: expressed protein [Arabidopsis thaliana]
  misc_feature (12)..(308): NCBI GI NO: 26452761 NR Description: unknown protein [Arabidopsis thaliana]
  misc_feature (16)..(198): NCBI GI NO: 34912804 NR Description: P0501G01.11
  misc_feature (178)..(306): NCBI GI NO: 34912804 NR Description: P0501G01.11
  misc_feature (33)..(268): NCBI GI NO: 25408977 NR Description: hypothetical protein At2g46220
  misc_feature (12)..(304): NCBI GI NO: 15229112 NR Description: expressed protein [Arabidopsis thaliana]
  misc_feature (14)..(304): NCBI GI NO: 30689382 NR Description: expressed protein [Arabidopsis thaliana]
  misc_feature (14)..(150): NCBI GI NO: 10177091 NR Description: emb|CAB66408
  misc_feature (13)..(144): NCBI GI NO: 34913914 NR Description: OSJNBa0066C06.8
  misc_feature (8)..(144): NCBI GI NO: 15238265 NR Description: expressed protein [Arabidopsis thaliana]
MELEHPTATPLNSAMTYDEASMERSKSFVNALQELKNLRPQLYSAAEYCEKSYLHSEQKQMVLDNLKDYAVRALVNAVDHLGTVAYKLTDLLEQQTFDVSTMDLKVATINQKLLTCQIYTDKEGLRQQQLLAFIPRHHKHYILPNSVNKKVHFSPQIQIDARQNPFQTRTRFQSSGTPAAKTLSWHLASETKSTLKGSSHASPSPNTENPKFSAKASGVFHLLDNEENTWMKSSPAQIYFPNGVPTSSTPMHTLGGTGKDALEGSKPLTAFRSFDYQNRRETVQVPTRSKSVLSAFFVKQKTPKLKAGSFL

SEQ ID NO: 6476 - protein, 297 aa, Glycine max
  peptide (1)..(297): Ceres Seq. ID no. 15178029
  misc_feature (1)..(294): NCBI GI NO: 18407012 NR Description: expressed protein [Arabidopsis thaliana]
  misc_feature (1)..(294): NCBI GI NO: 26452761 NR Description: unknown protein [Arabidopsis thaliana]
  misc_feature (2)..(184): NCBI GI NO: 34912804 NR Description: P0501G01.11
  misc_feature (164)..(292): NCBI GI NO: 34912804 NR Description: P0501G01.11
  misc_feature (19)..(254): NCBI GI NO: 25408977 NR Description: hypothetical protein At2g46220
  misc_feature (1)..(290): NCBI GI NO: 15229112 NR Description: expressed protein [Arabidopsis thaliana]
  misc_feature (1)..(290): NCBI GI NO: 30689382 NR Description: expressed protein [Arabidopsis thaliana]
  misc_feature (1)..(136): NCBI GI NO: 10177091 NR Description: emb|CAB66408
  misc_feature (1)..(130): NCBI GI NO: 34913914 NR Description: OSJNBa0066C06.8
  misc_feature (1)..(130): NCBI GI NO: 15238265 NR Description: expressed protein [Arabidopsis thaliana]
MTYDEASMERSKSFVNALQELKNLRPQLYSAAEYCEKSYLHSEQKQMVLDNLKDYAVRALVNAVDHLGTVAYKLTDLLEQQTFDVSTMDLKVATINQKLLTCQIYTDKEGLRQQQLLAFIPRHHKHYILPNSVNKKVHFSPQIQIDARQNPFQTRTRFQSSGTPAAKTLSWHLASETKSTLKGSSHASPSPNTENPKFSAKASGVFHLLDNEENTWMKSSPAQIYFPNGVPTSSTPMHTLGGTGKDALEGSKPLTAFRSFDYQNRRETVQVPTRSKSVLSAFFVKQKTPKLKAGSFL

SEQ ID NO: 6477 - protein, 290 aa, Glycine max
  peptide (1)..(290): Ceres Seq. ID no. 15178030
  misc_feature (1)..(287): NCBI GI NO: 18407012 NR Description: expressed protein [Arabidopsis thaliana]
  misc_feature (1)..(287): NCBI GI NO: 26452761 NR Description: unknown protein [Arabidopsis thaliana]
  misc_feature (1)..(177): NCBI GI NO: 34912804 NR Description: P0501G01.11
  misc_feature (157)..(285): NCBI GI NO: 34912804 NR Description: P0501G01.11
  misc_feature (12)..(247): NCBI GI NO: 25408977 NR Description: hypothetical protein At2g46220
  misc_feature (1)..(283): NCBI GI NO: 15229112 NR Description: expressed protein [Arabidopsis thaliana]
  misc_feature (1)..(283): NCBI GI NO: 30689382 NR Description: expressed protein [Arabidopsis thaliana]
  misc_feature (1)..(129): NCBI GI NO: 10177091 NR Description: emb|CAB66408
  misc_feature (1)..(123): NCBI GI NO: 34913914 NR Description: OSJNBa0066C06.8
  misc_feature (1)..(123): NCBI GI NO: 15238265 NR Description: expressed protein [Arabidopsis thaliana]
MERSKSFVNALQELKNLRPQLYSAAEYCEKSYLHSEQKQMVLDNLKDYAVRALVNAVDHLGTVAYKLTDLLEQQTFDVSTMDLKVATINQKLLTCQIYTDKEGLRQQQLLAFIPRHHKHYILPNSVNKKVHFSPQIQIDARQNPFQTRTRFQSSGTPAAKTLSWHLASETKSTLKGSSHASPSPNTENPKFSAKASGVFHLLDNEENTWMKSSPAQIYFPNGVPTSSTPMHTLGGTGKDALEGSKPLTAFRSFDYQNRRETVQVPTRSKSVLSAFFVKQKTPKLKAGSFL

SEQ ID NO: 6478 - DNA, 1403 bp, Glycine max
  misc_feature (1)..(1403): Ceres Seq. ID no. 14312825
aaccttcactccgaccgttgtgcggagtcaggacagcaaccatatacgttcaaatctgttgcagctgggcaggaaaggttcaggactctacacagtacttactatagaaaagcacaacgaatcattctcgcttgtgggtcactttttggaagaaacctgtgtaaatcctacattcatcataaaccacctgagatcatgagtcctctagcaaagtggcacagatccaaaccaggcctgactgaacgttttcaattgtttgttaataaacgtgaactttgctatgcatatactgaattgaatgaccctgtagtacaacgacagagatttgctgaacaactcaaggatcggcaatctggcgatgatgaagcaatggccttagatgaaacattttgtacggctctagagtatggtttaccacctactggtggttggggtttgggcattgatcggttcaccatgttactgactgattcacagaatattaaggtttttgctttttctatatctgcataattactttgtttttgaaatttcttaccatcttctgtctttttggtgacgggaggttcttctcttccctgccatgaaacctcaagactgagccttcaaccaaaactatttgaatctctgagaagtaaaatcatcatacacaggtattttatacctcaagcttttaaattaaaagtatactccacattactgccaagtaccaagtatttccaaggaaattgtgagcacggtactgcgtaacttcattaacttgtaactagtagtgaaatggttaatcttgggtagcgatgttgagtggcaaaccccaataatgctagcagtttagtggactgtaaaaagctgctacataacgatagcagatagaaatcatataattcccaatacaaaatactcaaaaaatactaaaaaagcttcatatattcatcattacttctcaaaagtcacatcttatagacacaatcatcattaatacaaggcttaactaataacaattagaaaaataacaaaggctgggtgtggaagacctacaactcaggtgccaactgaagcctgctaaaaggggtgggcttggttagaaaatgggcgggcagcagaactgaggctagcaagcaggtgttctgtgtgtaattttgcgacaatacaaataactagataaaaatgcatcaaattgtatgcaatgggttaaggaacgatgatgggctagcttgaagttcctgagcttttacattgcagtctggtgagaaatagggctgctaactttgaaaattagtttccccatggcatgtgcatcaagtcatgaaaaacaaagaactcaatcgatggaagcagatgagtttgtgtgggcaaatagagattttgtttgtttaagcgagcataaaacacaacattaattc

SEQ ID NO: 6479 - protein, 170 aa, Glycine max
  peptide (1)..(170): Ceres Seq. ID no. 14312826
  misc_feature (58)..(162): Pfam Name: D, K and N Pfam Description: tRNA synthetases class II
  misc_feature (58)..(162): NCBI GI NO: 10798642 NR Description: lysyl-tRNA synthetase [Nicotiana tabacum]
  misc_feature (63)..(166): NCBI GI NO: 15229833 NR Description: lysyl-tRNA synthetase, putative
  misc_feature (58)..(162): NCBI GI NO: 2501025 NR Description: Lysyl-tRNA synthetase
  misc_feature (63)..(162): NCBI GI NO: 586059 NR Description: LYSYL-TRNA SYNTHETASE
  misc_feature (63)..(162): NCBI GI NO: 16716381 NR Description: lysyl-tRNA synthetase
  misc_feature (63)..(162): NCBI GI NO: 26354188 NR Description: unnamed protein product [Mus musculus]
  misc_feature (63)..(162): NCBI GI NO: 26355297 NR Description: unnamed protein product [Mus musculus]
  misc_feature (63)..(162): NCBI GI NO: 23270695 NR Description: Kars protein [Mus musculus]
  misc_feature (63)..(162): NCBI GI NO: 34533120 NR Description: unnamed protein product [Homo sapiens]
  misc_feature (63)..(162): NCBI GI NO: 20072717 NR Description: Kars protein [Mus musculus]
NLHSDRCAESGQQPYTFKSVAAGQERFRTLHSTYYRKAQRIILACGSLFGRNLCKSYIHHKPPEIMSPLAKWHRSKPGLTERFQLFVNKRELCYAYTELNDPVVQRQRFAEQLKDRQSGDDEAMALDETFCTALEYGLPPTGGWGLGIDRFTMLLTDSQNIKVFAFSISA

SEQ ID NO: 6480 - protein, 105 aa, Glycine max
  peptide (1)..(105): Ceres Seq. ID no. 14312827
  misc_feature (1)..(97): Pfam Name: D, K and N Pfam Description: tRNA synthetases class II
  misc_feature (1)..(97): NCBI GI NO: 10798642 NR Description: lysyl-tRNA synthetase [Nicotiana tabacum]
  misc_feature (1)..(101): NCBI GI NO: 15229833 NR Description: lysyl-tRNA synthetase, putative
  misc_feature (1)..(97): NCBI GI NO: 2501025 NR Description: Lysyl-tRNA synthetase
  misc_feature (1)..(97): NCBI GI NO: 586059 NR Description: LYSYL-TRNA SYNTHETASE
  misc_feature (1)..(97): NCBI GI NO: 16716381 NR Description: lysyl-tRNA synthetase
  misc_feature (1)..(97): NCBI GI NO: 26354188 NR Description: unnamed protein product [Mus musculus]
  misc_feature (1)..(97): NCBI GI NO: 26355297 NR Description: unnamed protein product [Mus musculus]
  misc_feature (1)..(97): NCBI GI NO: 23270695 NR Description: Kars protein [Mus musculus]
  misc_feature (1)..(97): NCBI GI NO: 34533120 NR Description: unnamed protein product [Homo sapiens]
  misc_feature (1)..(97): NCBI GI NO: 20072717 NR Description: Kars protein [Mus musculus]
MSPLAKWHRSKPGLTERFQLFVNKRELCYAYTELNDPVVQRQRFAEQLKDRQSGDDEAMALDETFCTALEYGLPPTGGWGLGIDRFTMLLTDSQNIKVFAFSISA

SEQ ID NO: 6481 - DNA, 1528 bp, Glycine max
  misc_feature (1)..(1528): Ceres Seq. ID no. 15177994
attttgcttcatttttttttttactttgttgagacttgagagtgttggaaaatgttggggactgctctgcaatttggttgtgttcgtggtgatgatcggttttacattccggtgaaggcaaggaagaaccagaaccagcgtaaaccggttcagagagagaagggtgttggtgaaactgagagaactgattcagtttcaaagagggaacttgttgcttctgagaatgggaattccaatgagtcttcctactcgttgaagaaacccatctcttgcccttctgtagagcctgctagtaacattgataggtttctggaatccacaactcctttagtcacagctcaatatttggccaagacaacaatgagaggttggaagacttgtgatgtggagtatcaatcttactttgctcttgatgatctctgggaatcgtttaaggagtggagtgcgtatggagcaggagtccctttggtacttgatcaaagacaatctgttgtgcaatattatgttccgtatttgtcggctattcaactatatggtcaatcagataagaagtcaaatgctaagccaaggtacaccagtgaagatagtgacggtgattactgccgagattcaagcagcgatggaagcagtgacagtgaatttggaaaaaggactgaactttttacagcacaaagaaatagtcactatcatataggtgatgcttcgtttcaaatgagcaggctatctgtacatgatcacaatacaatgcaagagggattttctagtgacgatagtgaaactgggaatcctaaagatcttctttttgagtattttgatcatgatcctccttatagccgtgaacctttgtctgacaagatacttgatcttgcacgcgactatcctagcctcaagtctgtaagaagttgtgatttattaccggccagttggatgtgtgtagcatggtatcctatatatcgaatacccaccggtccaacattaaaagatttagatgcctgctttcttacataccatacactccatacacccttgacaggaaatggaggtactcaggccccaattttggtttatccaaatgacattgatggcggtgtgccaaagatttccttaccaacttttgcaatggcttcctataagttaaagggatctatttggacacaaaatggagttagtgagagtcaagtagtaaattctctcttgcaggctgcagataactggttaaggctgcttcaggtgaatcaccctgattatcagttcttcgtatcgcatggcacataccacaggtgaatcaaatgagatgccttaaatttctgtgttcattgctctttgcaaacttggtatggtccttctatccatcaatccatcaatccatccatagagactgatgatggagttgggatttctaatgtggattcttgttactcattgcataagcagcacaaaagatgagcttgtctcaagtgaagaatgaaatagagattgctaaagtaaaaaaaaaaaaaacagaaaaaaaaaaaagattgctaaagtg

SEQ ID NO: 6482 - protein, 410 aa, Glycine max
  peptide (1)..(410): Ceres Seq. ID no. 15177995
  misc_feature (81)..(402): Pfam Name: DUF789 Pfam Description: Protein of unknown function
  misc_feature (55)..(402): NCBI GI NO: 22329567 NR Description: expressed protein [Arabidopsis thaliana]
  misc_feature (11)..(218): NCBI GI NO: 15450996 NR Description: Unknown protein [Arabidopsis thaliana]
  misc_feature (235)..(405): NCBI GI NO: 15450996 NR Description: Unknown protein [Arabidopsis thaliana]
  misc_feature (229)..(408): NCBI GI NO: 31249743 NR Description: hypothetical protein
  misc_feature (44)..(196): NCBI GI NO: 31249743 NR Description: hypothetical protein
  misc_feature (229)..(404): NCBI GI NO: 34897254 NR Description: hypothetical protein
  misc_feature (44)..(196): NCBI GI NO: 34897254 NR Description: hypothetical protein
  misc_feature (220)..(410): NCBI GI NO: 22327664 NR Description: expressed protein [Arabidopsis thaliana]
  misc_feature (12)..(195): NCBI GI NO: 22327664 NR Description: expressed protein [Arabidopsis thaliana]
  misc_feature (220)..(410): NCBI GI NO: 10177151 NR Description: gb|AAF31026
MLGTALQFGCVRGDDRFYIPVKARKNQNQRKPVQREKGVGETERTDSVSKRELVASENGNSNESSYSLKKPISCPSVEPASNIDRFLESTTPLVTAQYLAKTTMRGWKTCDVEYQSYFALDDLWESFKEWSAYGAGVPLVLDQRQSVVQYYVPYLSAIQLYGQSDKKSNAKPRYTSEDSDGDYCRDSSSDGSSDSEFGKRTELFTAQRNSHYHIGDASFQMSRLSVHDHNTMQEGFSSDDSETGNPKDLLFEYFDHDPPYSREPLSDKILDLARDYPSLKSVRSCDLLPASWMCVAWYPIYRIPTGPTLKDLDACFLTYHTLHTPLTGNGGTQAPILVYPNDIDGGVPKISLPTFAMASYKLKGSIWTQNGVSESQVVNSLLQAADNWLRLLQVNHPDYQFFVSHGTYHR

SEQ ID NO: 6483 - protein, 307 aa, Glycine max
  peptide (1)..(307): Ceres Seq. ID no. 15177996
  misc_feature (1)..(299): Pfam Name: DUF789 Pfam Description: Protein of unknown function
  misc_feature (1)..(299): NCBI GI NO: 22329567 NR Description: expressed protein [Arabidopsis thaliana]
  misc_feature (1)..(115): NCBI GI NO: 15450996 NR Description: Unknown protein [Arabidopsis thaliana]
  misc_feature (132)..(302): NCBI GI NO: 15450996 NR Description: Unknown protein [Arabidopsis thaliana]
  misc_feature (126)..(305): NCBI GI NO: 31249743 NR Description: hypothetical protein
  misc_feature (1)..(93): NCBI GI NO: 31249743 NR Description: hypothetical protein
  misc_feature (126)..(301): NCBI GI NO: 34897254 NR Description: hypothetical protein
  misc_feature (1)..(93): NCBI GI NO: 34897254 NR Description: hypothetical protein
  misc_feature (117)..(307): NCBI GI NO: 22327664 NR Description: expressed protein [Arabidopsis thaliana]
  misc_feature (1)..(92): NCBI GI NO: 22327664 NR Description: expressed protein [Arabidopsis thaliana]
  misc_feature (117)..(307): NCBI GI NO: 10177151 NR Description: gb|AAF31026
MRGWKTCDVEYQSYFALDDLWESFKEWSAYGAGVPLVLDQRQSVVQYYVPYLSAIQLYGQSDKKSNAKPRYTSEDSDGDYCRDSSSDGSSDSEFGKRTELFTAQRNSHYHIGDASFQMSRLSVHDHNTMQEGFSSDDSETGNPKDLLFEYFDHDPPYSREPLSDKILDLARDYPSLKSVRSCDLLPASWMCVAWYPIYRIPTGPTLKDLDACFLTYHTLHTPLTGNGGTQAPILVYPNDIDGGVPKISLPTFAMASYKLKGSIWTQNGVSESQVVNSLLQAADNWLRLLQVNHPDYQFFVSHGTYHR

SEQ ID NO: 6484 - DNA, 1904 bp, Glycine max
  misc_feature (1)..(1904): Ceres Seq. ID no. 15175849
attttaccggcggtggaagagagatagaccaataatctgaatctgaaacctccgtgttggtgttgcatatccaaaccctaatttggaaattgaattgttgaagggaagaagatcaagatggttctggcggagttaggtgggagcatttcgcgtgctctccagctgatgagcaatgcgacagtaatcgacgagaaggtgctcaacgattgcctcaacgacatcactcgcgctcttcttcaatccgatgttcaattcaagcttgtccgcgacatgcagaccaacatcaagaacattgtcaacctcgacgatctcgctgccggtcacaacaaacgcaggatcatccaacaagctgtgtttaacgaactctgcaaaattctggaccctgggaagccctctttcactcccaaaaagggcaaaacaagtgttgtcatgtttgttggtttgcaaggttctggaaaaaccacaacgtgtacaaagtatgcatattatcatcagaagaaaggctggaagccggctctagtatgtgcagatacattcagagctggtgcatttgatcaattgaagcaaaatgcaactaaagctaagatccctttctatggaagctatatggaatccgatccggtaaaaattgctgtggaaggtgtggagagattcaagaaagaaaactgtgatcttataattgttgatactagtgggaggcacaaacaagaagcttctctttttgaagaaatgcgccaagtttcggaagcaacgaaaccagatcttgttatatttgttatggatagcagtattggtcaggctgcttttgatcaagcccaagcatttaagcagagtgttgcagttggagctgtaattgttaccaaaatggatggccatgcaaaaggtggtggtgctcttagtgctgttgcagcaacaaagagtcctgtcatattcattggaactggagaacatatggacgagtttgaagtttttgatgttaagccatttgtcagtcgtctattaggaatgggcgactggtctgggtttatggacaaaattcatgaagtcgttcctatggatcaacaacctgaactgcttcagaagctgtcagaaggaaacttcaccttgaggattatgtatgagcagtttcagaacatacttaaaatgggtcctatcagccaggttttttctatgcttcccggatttagtgctgaattaatgccaaaaggccgtgagaaagaaagccaggcaaaaattaagcgttacatgacaatgatggattcaatgacaaacgaagagttggatagttcaaaccccaagctcatgaatgagtcacgcatgatgcggatagctcgaggtgcaggtcgtcagattagggaagtgatggagatgttggaagagtacaaacgtcttgcaaagatatggagcaaaatgaaagggcttaaaataccaaagaaaggtgatatgagtgccctatcccgaaatatgaatgcccaacacatgagcaaagtccttcctcctcagatgctgaagcaaattgggtggcatgggtgggttacaaaacttgatgaagcagatgggatccgccaaagacatgatgggaatgggaggaatgtttggtggtggtggtggtggtgattagttaattggcttgtgagctgaggattgttcctgaccatagccactgtcattgcattgtggtgttttacaactagactcgattgagcaggttatgcagttcaatcggtgttggagtgccatctgcaatagccgcaatgggtgcaagtgtctctttttgtaaaattaaatccttcttccctttttgggtatatttacttatttattattcagagcaatcaaagtaatcttattagaaattttcatagtctaggaacattaaaaacaaaagctatattcctcggatc

SEQ ID NO: 6485 - protein, 499 aa, Glycine max
  peptide (1)..(499): Ceres Seq. ID no. 15175850
  misc_feature (327)..(429): Pfam Name: Pfam Description:  Signal peptide binding domain
  misc_feature (1)..(476): NCBI GI NO: 1711512 NR Description: SIGNAL RECOGNITION PARTICLE 54 KD PROTEIN 2
  misc_feature (1)..(484): NCBI GI NO: 34909956 NR Description: putative signal recognition particle 54K protein
  misc_feature (1)..(476): NCBI GI NO: 2119055 NR Description: signal recognition particle 54K protein - tomato
  misc_feature (1)..(476): NCBI GI NO: 18402407 NR Description: signal recognition particle 54 kDa protein 2
  misc_feature (1)..(476): NCBI GI NO: 515681 NR Description: signal recognition particle 54 kDa subunit
  misc_feature (163)..(476): NCBI GI NO: 25294409 NR Description: hypothetical protein F27K7.8
  misc_feature (1)..(163): NCBI GI NO: 25294409 NR Description: hypothetical protein F27K7.8
  misc_feature (1)..(476): NCBI GI NO: 1711509 NR Description: SIGNAL RECOGNITION PARTICLE 54 KD PROTEIN 1
  misc_feature (1)..(476): NCBI GI NO: 1711511 NR Description: SIGNAL RECOGNITION PARTICLE 54 KD PROTEIN 2
  misc_feature (1)..(476): NCBI GI NO: 1711508 NR Description: SIGNAL RECOGNITION PARTICLE 54 KD PROTEIN 1
MVLAELGGSISRALQLMSNATVIDEKVLNDCLNDITRALLQSDVQFKLVRDMQTNIKNIVNLDDLAAGHNKRRIIQQAVFNELCKILDPGKPSFTPKKGKTSVVMFVGLQGSGKTTTCTKYAYYHQKKGWKPALVCADTFRAGAFDQLKQNATKAKIPFYGSYMESDPVKIAVEGVERFKKENCDLIIVDTSGRHKQEASLFEEMRQVSEATKPDLVIFVMDSSIGQAAFDQAQAFKQSVAVGAVIVTKMDGHAKGGGALSAVAATKSPVIFIGTGEHMDEFEVFDVKPFVSRLLGMGDWSGFMDKIHEVVPMDQQPELLQKLSEGNFTLRIMYEQFQNILKMGPISQVFSMLPGFSAELMPKGREKESQAKIKRYMTMMDSMTNEELDSSNPKLMNESRMMRIARGAGRQIREVMEMLEEYKRLAKIWSKMKGLKIPKKGDMSALSRNMNAQHMSKVLPPQMLKQIGWHGWVTKLDEADGIRQRHDGNGRNVWWWWWW

SEQ ID NO: 6486 - protein, 483 aa, Glycine max
  peptide (1)..(483): Ceres Seq. ID no. 15175851
  misc_feature (311)..(413): Pfam Name: Pfam Description:  Signal peptide binding domain
  misc_feature (1)..(460): NCBI GI NO: 1711512 NR Description: SIGNAL RECOGNITION PARTICLE 54 KD PROTEIN 2
  misc_feature (1)..(468): NCBI GI NO: 34909956 NR Description: putative signal recognition particle 54K protein
  misc_feature (1)..(460): NCBI GI NO: 2119055 NR Description: signal recognition particle 54K protein - tomato
  misc_feature (1)..(460): NCBI GI NO: 18402407 NR Description: signal recognition particle 54 kDa protein 2
  misc_feature (1)..(460): NCBI GI NO: 515681 NR Description: signal recognition particle 54 kDa subunit
  misc_feature (147)..(460): NCBI GI NO: 25294409 NR Description: hypothetical protein F27K7.8
  misc_feature (1)..(147): NCBI GI NO: 25294409 NR Description: hypothetical protein F27K7.8
  misc_feature (1)..(460): NCBI GI NO: 1711509 NR Description: SIGNAL RECOGNITION PARTICLE 54 KD PROTEIN 1
  misc_feature (1)..(460): NCBI GI NO: 1711511 NR Description: SIGNAL RECOGNITION PARTICLE 54 KD PROTEIN 2
  misc_feature (1)..(460): NCBI GI NO: 1711508 NR Description: SIGNAL RECOGNITION PARTICLE 54 KD PROTEIN 1
MSNATVIDEKVLNDCLNDITRALLQSDVQFKLVRDMQTNIKNIVNLDDLAAGHNKRRIIQQAVFNELCKILDPGKPSFTPKKGKTSVVMFVGLQGSGKTTTCTKYAYYHQKKGWKPALVCADTFRAGAFDQLKQNATKAKIPFYGSYMESDPVKIAVEGVERFKKENCDLIIVDTSGRHKQEASLFEEMRQVSEATKPDLVIFVMDSSIGQAAFDQAQAFKQSVAVGAVIVTKMDGHAKGGGALSAVAATKSPVIFIGTGEHMDEFEVFDVKPFVSRLLGMGDWSGFMDKIHEVVPMDQQPELLQKLSEGNFTLRIMYEQFQNILKMGPISQVFSMLPGFSAELMPKGREKESQAKIKRYMTMMDSMTNEELDSSNPKLMNESRMMRIARGAGRQIREVMEMLEEYKRLAKIWSKMKGLKIPKKGDMSALSRNMNAQHMSKVLPPQMLKQIGWHGWVTKLDEADGIRQRHDGNGRNVWWWWWW

SEQ ID NO: 6487 - protein, 448 aa, Glycine max
  peptide (1)..(448): Ceres Seq. ID no. 15175852
  misc_feature (276)..(378): Pfam Name: Pfam Description:  Signal peptide binding domain
  misc_feature (1)..(425): NCBI GI NO: 1711512 NR Description: SIGNAL RECOGNITION PARTICLE 54 KD PROTEIN 2
  misc_feature (1)..(433): NCBI GI NO: 34909956 NR Description: putative signal recognition particle 54K protein
  misc_feature (1)..(425): NCBI GI NO: 2119055 NR Description: signal recognition particle 54K protein - tomato
  misc_feature (1)..(425): NCBI GI NO: 18402407 NR Description: signal recognition particle 54 kDa protein 2
  misc_feature (1)..(425): NCBI GI NO: 515681 NR Description: signal recognition particle 54 kDa subunit
  misc_feature (112)..(425): NCBI GI NO: 25294409 NR Description: hypothetical protein F27K7.8
  misc_feature (1)..(112): NCBI GI NO: 25294409 NR Description: hypothetical protein F27K7.8
  misc_feature (1)..(425): NCBI GI NO: 1711509 NR Description: SIGNAL RECOGNITION PARTICLE 54 KD PROTEIN 1
  misc_feature (1)..(425): NCBI GI NO: 1711511 NR Description: SIGNAL RECOGNITION PARTICLE 54 KD PROTEIN 2
  misc_feature (1)..(425): NCBI GI NO: 1711508 NR Description: SIGNAL RECOGNITION PARTICLE 54 KD PROTEIN 1
MQTNIKNIVNLDDLAAGHNKRRIIQQAVFNELCKILDPGKPSFTPKKGKTSVVMFVGLQGSGKTTTCTKYAYYHQKKGWKPALVCADTFRAGAFDQLKQNATKAKIPFYGSYMESDPVKIAVEGVERFKKENCDLIIVDTSGRHKQEASLFEEMRQVSEATKPDLVIFVMDSSIGQAAFDQAQAFKQSVAVGAVIVTKMDGHAKGGGALSAVAATKSPVIFIGTGEHMDEFEVFDVKPFVSRLLGMGDWSGFMDKIHEVVPMDQQPELLQKLSEGNFTLRIMYEQFQNILKMGPISQVFSMLPGFSAELMPKGREKESQAKIKRYMTMMDSMTNEELDSSNPKLMNESRMMRIARGAGRQIREVMEMLEEYKRLAKIWSKMKGLKIPKKGDMSALSRNMNAQHMSKVLPPQMLKQIGWHGWVTKLDEADGIRQRHDGNGRNVWWWWWW

SEQ ID NO: 6488 - DNA, 836 bp, Glycine max
  misc_feature (1)..(836): Ceres Seq. ID no. 12607763
aacattttttaaaccttagtagatattgaactagcaagatctctaggtcacaattgatttgttaaactggttaaattagtggttgaaccatggttgaactggataatatgatttaacagaagtctacgaaaatgtagtctacaaggaggtattcctgattccagttcaatacccaagctttcctatttgtatgtttgagtatatttgttggctttgctttatattgtgcctaatgatagagaaatcatttttttctgccattttggctacaaactcatttgtgactggttcatgttttctagagatcttagctggaatcaaatcactagacccatatcatcaaataaagtggcagacgacaatatgacaactttttgaaggttggtaagaatgatgattgcatcccccataacagaaggtggaattttaataagaagttgtgatactagttacatatcaagggagctgatcagatgtggaatgagcaagggcattaacatcgaacgaccatatactttgatagaggaggaaccacagttgagaaaatctaaccctgctgcatgggttgaaagaatgtttgacctgcttgcatcaaaactgaatagagaaccaaagttgattctttgtgtcttgccatagagtaaaatttgtgatatatatgggccttggaaaaagaagtgtctgagtgaaattggtgttatcacttagtacatttgcccctgtcaagatcactgatcaataccttaccaatgtacttcttaaaatcaattctaaggaatgaattctttgttggcaataaagcattatgagcatcttcccttgattaaagatacccc

SEQ ID NO: 6489 - protein, 82 aa, Glycine max
  peptide (1)..(82): Ceres Seq. ID no. 12607764
  misc_feature (17)..(82): NCBI GI NO: 15225759 NR Description: Argonaute
  misc_feature (17)..(82): NCBI GI NO: 34395088 NR Description: putative ARGONAUTE9 protein
  misc_feature (1)..(82): NCBI GI NO: 34903256 NR Description: unnamed protein product
  misc_feature (1)..(82): NCBI GI NO: 15242170 NR Description: zwille/pinhead-like protein; protein id:At5g21150
  misc_feature (1)..(82): NCBI GI NO: 28396616 NR Description: ARGONAUTE9 protein [Arabidopsis thaliana]
  misc_feature (17)..(82): NCBI GI NO: 18401305 NR Description: Argonaute
  misc_feature (17)..(82): NCBI GI NO: 25335829 NR Description: Argonaute (AGO1)-like protein
  misc_feature (62)..(82): NCBI GI NO: 33087071 NR Description: zwille pinhead-like protein
MMIASPITEGGILIRSCDTSYISRELIRCGMSKGINIERPYTLIEEEPQLRKSNPAAWVERMFDLLASKLNREPKLILCVLP

SEQ ID NO: 6490 - protein, 81 aa, Glycine max
  peptide (1)..(81): Ceres Seq. ID no. 12607765
  misc_feature (16)..(81): NCBI GI NO: 15225759 NR Description: Argonaute
  misc_feature (16)..(81): NCBI GI NO: 34395088 NR Description: putative ARGONAUTE9 protein
  misc_feature (1)..(81): NCBI GI NO: 34903256 NR Description: unnamed protein product
  misc_feature (1)..(81): NCBI GI NO: 15242170 NR Description: zwille/pinhead-like protein; protein id:At5g21150
  misc_feature (1)..(81): NCBI GI NO: 28396616 NR Description: ARGONAUTE9 protein [Arabidopsis thaliana]
  misc_feature (16)..(81): NCBI GI NO: 18401305 NR Description: Argonaute
  misc_feature (16)..(81): NCBI GI NO: 25335829 NR Description: Argonaute (AGO1)-like protein
  misc_feature (61)..(81): NCBI GI NO: 33087071 NR Description: zwille pinhead-like protein
MIASPITEGGILIRSCDTSYISRELIRCGMSKGINIERPYTLIEEEPQLRKSNPAAWVERMFDLLASKLNREPKLILCVLP

SEQ ID NO: 6491 - protein, 58 aa, Glycine max
  peptide (1)..(58): Ceres Seq. ID no. 12607766
MFEYICWLCFILCLMIEKSFFSAILATNSFVTGSCFLEILAGIKSLDPYHQIKWQTTI

SEQ ID NO: 6492 - DNA, 1323 bp, Glycine max
  misc_feature (1)..(1323): Ceres Seq. ID no. 15168374
gacatgatatcagcacactttcactcactgtgctttcccgtgacacgcatctatacttgtccagaagaagtaagatccatgaactaacattcccacacgctcgcttcaccatatttgccacccttttaacctcacttcttagggttattttgctcccttttccttgtttgggaattgggtttggtttggtttttcttggttgtaaaaggtaaagaagaactaattggttaagttactatatatctagctagggtatataatattatataattattgttattaaaggaaacaaagaaagaactaagatgggaagaggtagggtacagctgaagaggatagagaacaagatcaatcgccaggtaactttctccaaaaggagaggtgggttgctcaagaaagctcatgaaatatctgtactctgtgatgctgaggtagctttgattatcttctctcacaaaggaaagctctttgagtatgctactgattcatgcatggagaagatactggaacgccatgaaaggtatgcctatgcagagaggcagctagtagcaaatgattctgagacacaggaaaactggaccattgaatacactagactgaaggcaaaaattgaccttttacagagaaaccacaggcactatatgggagaagatttggcttcaatgagcctcaaagagcttcagagtttggagcagcagttggttactggtatcaaaaacatccgcacaaggagggtacatatataacacataattcattatgttaatttcactttcatgcttcatgtgtgtgtgttagtttgacacttatcattgaaatttgttatgttttaatagaatgatctcatgtccgagtccatttctgagcttcagaaaaaggagaaaaggatacaagaggagaataacacccttgcaaagaagatcaaggagaaagagcaggctgtagcacagcaagctgcacaatgggagcagccaaactacagggttgatacatctttcatgccacagcagcaaccccttcccaccagtttgaacatatgtggcaataattactgccaggaagctgcaccagaactaggaaggaacggtctagacctgaccctggaaccactctattcttgcaaccttggatgcttctgaaaagttgtttcttctgagttggattatattatataagtgctggcatatatgaactactataagtagtctgtttgaatgttttatatgtattttggtctatggcttttccctctactttgaagacattattttgaattgcttctgttgtaaacaaattgaatttgaaatctaattgtgtattttt

SEQ ID NO: 6493 - protein, 146 aa, Glycine max
  peptide (1)..(146): Ceres Seq. ID no. 15168375
  misc_feature (75)..(143): Pfam Name: Pfam Description:  K-box region
  misc_feature (1)..(143): NCBI GI NO: 13446154 NR Description: MADS-box transcription factor [Pisum sativum]
  misc_feature (1)..(143): NCBI GI NO: 1483228 NR Description: MADS3 protein [Betula pendula]
  misc_feature (1)..(143): NCBI GI NO: 82313 NR Description: MADS box protein squa - garden snapdragon
  misc_feature (1)..(143): NCBI GI NO: 3646320 NR Description: MADS-box protein [Malus x domestica]
  misc_feature (1)..(146): NCBI GI NO: 37542848 NR Description: AP1-like protein [Malus x domestica]
  misc_feature (1)..(146): NCBI GI NO: 4102113 NR Description: NAP1-2 [Nicotiana tabacum]
  misc_feature (1)..(146): NCBI GI NO: 28381537 NR Description: PTM2 [Populus tremuloides]
  misc_feature (1)..(143): NCBI GI NO: 22091473 NR Description: MADS box transcription factor
  misc_feature (1)..(146): NCBI GI NO: 5070140 NR Description: MADS-box protein MADS5 [Nicotiana tabacum]
  misc_feature (1)..(146): NCBI GI NO: 28381535 NR Description: PTM1 [Populus tremuloides]
MGRGRVQLKRIENKINRQVTFSKRRGGLLKKAHEISVLCDAEVALIIFSHKGKLFEYATDSCMEKILERHERYAYAERQLVANDSETQENWTIEYTRLKAKIDLLQRNHRHYMGEDLASMSLKELQSLEQQLVTGIKNIRTRRVHI

SEQ ID NO: 6494 - protein, 97 aa, Glycine max
  peptide (1)..(97): Ceres Seq. ID no. 15168376
  misc_feature (1)..(97): NCBI GI NO: 13446154 NR Description: MADS-box transcription factor [Pisum sativum]
  misc_feature (1)..(97): NCBI GI NO: 1483228 NR Description: MADS3 protein [Betula pendula]
  misc_feature (1)..(97): NCBI GI NO: 82313 NR Description: MADS box protein squa - garden snapdragon
  misc_feature (1)..(97): NCBI GI NO: 3646320 NR Description: MADS-box protein [Malus x domestica]
  misc_feature (1)..(97): NCBI GI NO: 37542848 NR Description: AP1-like protein [Malus x domestica]
  misc_feature (1)..(97): NCBI GI NO: 4102113 NR Description: NAP1-2 [Nicotiana tabacum]
  misc_feature (1)..(97): NCBI GI NO: 28381537 NR Description: PTM2 [Populus tremuloides]
  misc_feature (1)..(97): NCBI GI NO: 22091473 NR Description: MADS box transcription factor
  misc_feature (1)..(97): NCBI GI NO: 5070140 NR Description: MADS-box protein MADS5 [Nicotiana tabacum]
  misc_feature (1)..(95): NCBI GI NO: 28381535 NR Description: PTM1 [Populus tremuloides]
MSESISELQKKEKRIQEENNTLAKKIKEKEQAVAQQAAQWEQPNYRVDTSFMPQQQPLPTSLNICGNNYCQEAAPELGRNGLDLTLEPLYSCNLGCF

SEQ ID NO: 6495 - protein, 84 aa, Glycine max
  peptide (1)..(84): Ceres Seq. ID no. 15168377
  misc_feature (13)..(81): Pfam Name: Pfam Description:  K-box region
  misc_feature (1)..(81): NCBI GI NO: 13446154 NR Description: MADS-box transcription factor [Pisum sativum]
  misc_feature (1)..(81): NCBI GI NO: 1483228 NR Description: MADS3 protein [Betula pendula]
  misc_feature (1)..(81): NCBI GI NO: 82313 NR Description: MADS box protein squa - garden snapdragon
  misc_feature (1)..(81): NCBI GI NO: 3646320 NR Description: MADS-box protein [Malus x domestica]
  misc_feature (1)..(84): NCBI GI NO: 37542848 NR Description: AP1-like protein [Malus x domestica]
  misc_feature (1)..(84): NCBI GI NO: 4102113 NR Description: NAP1-2 [Nicotiana tabacum]
  misc_feature (1)..(84): NCBI GI NO: 28381537 NR Description: PTM2 [Populus tremuloides]
  misc_feature (1)..(81): NCBI GI NO: 22091473 NR Description: MADS box transcription factor
  misc_feature (1)..(84): NCBI GI NO: 5070140 NR Description: MADS-box protein MADS5 [Nicotiana tabacum]
  misc_feature (1)..(84): NCBI GI NO: 28381535 NR Description: PTM1 [Populus tremuloides]
MEKILERHERYAYAERQLVANDSETQENWTIEYTRLKAKIDLLQRNHRHYMGEDLASMSLKELQSLEQQLVTGIKNIRTRRVHI

SEQ ID NO: 6496 - DNA, 1396 bp, Glycine max
  misc_feature (1)..(1396): Ceres Seq. ID no. 14312047
acgtttcaaatcgcagtctcagagcaaagcagagccaagaagaagaagaagaaaaccaacataatcaacaacaacaacaacaaaaagcttgcaaattagaagaatcttcagttaaaagggaagaagaacacacaagaagaaagagaagaagaaacgcgcgcgaatgaagggagaattagagttgccacctgggttcagatttcaccccactgatgaagaattggtgaatcactacttgtgtaggaagtgcgctggtcaaccaatcgcggttcccgtcatcaaagaggtcgatttgtacaagtttgatccatggcagcttccagaaattggtttttacggcgagaaagaatggtacttcttttctcctcgggaccggaaatacccgaacggttcacggccgaaccgcgccgccggaagcggctattggaaagccaccggcgctgataaaccgatcggaaaaccgaaagcgcttgggatcaagaaagctctggttttttacgccggaaaagcccccaaaggtgtgaaaaccaattggattatgcacgaatatcgcctcgccaatgttgaccgatctgcctccaagaaaaaaaacaacaacttgaggcttgatgattgggtgttgtgtcgaatctacaacaagaaagggaagattgagaaatacaacacaggcgcagcgaagatgaatgttgagatggttcatagttttgagcacgagaacgagacgaagccagagattcataagctaggaaatgagcaattgtacatggagacttcggattcggtgccaaggttgaacacggactcgagcagttcggagcacgtggtttcgcccgatgtcacgtgcgagagggaggtgcagagcgaccccaagtggaacgatgatctggacctaaagctagaaaacgcgtttgattttcagtttaattacttggacgataataacctttccgtggatgattacctttttggcactgttcagtatcaaatgggccagctctcgcccttgcaggacatgttcatgtacctacagaagatgtgaaaactgaaaacgaaacgttttgagcaacatgggacccgcaaatatctttgttttattatttttttaaaaggaaaagtcagcatttgtatgcaattgcattgcacctaacatgtgatgtgggctaggccaagcttagcaactattcttattctttgttctagagagatgagggaatgttgaattcggctgaaatgggctatttggattggttcttggtgtaaagaaaaaatgagagaaggagattaggtgctgcagtaagtaaaaagtaagtgagcaaattgatgataggttattggagggttaatgtgtgggtgtaaggactcacttaggaaaattcttgttcattgctattccagc

SEQ ID NO: 6497 - protein, 291 aa, Glycine max
  peptide (1)..(291): Ceres Seq. ID no. 14312048
  misc_feature (7)..(132): Pfam Name: NAM Pfam Description: No apical meristem
  misc_feature (4)..(290): NCBI GI NO: 21105748 NR Description: nam-like protein 10 [Petunia x hybrida]
  misc_feature (1)..(290): NCBI GI NO: 40647397 NR Description: NAC domain protein [Lycopersicon esculentum]
  misc_feature (1)..(290): NCBI GI NO: 14485513 NR Description: putative NAC domain protein [Solanum tuberosum]
  misc_feature (4)..(287): NCBI GI NO: 31322576 NR Description: NAC-domain protein 5-11 [Brassica napus]
  misc_feature (5)..(290): NCBI GI NO: 15223456 NR Description: No apical meristem (NAM) protein family
  misc_feature (4)..(287): NCBI GI NO: 31322578 NR Description: NAC-domain protein 18 [Brassica napus]
  misc_feature (1)..(178): NCBI GI NO: 31322570 NR Description: NAC-domain protein 5-1 [Brassica napus]
  misc_feature (197)..(266): NCBI GI NO: 31322570 NR Description: NAC-domain protein 5-1 [Brassica napus]
  misc_feature (1)..(283): NCBI GI NO: 22326685 NR Description: No apical meristem (NAM) protein family
  misc_feature (4)..(290): NCBI GI NO: 21105734 NR Description: nam-like protein 3 [Petunia x hybrida]
MKGELELPPGFRFHPTDEELVNHYLCRKCAGQPIAVPVIKEVDLYKFDPWQLPEIGFYGEKEWYFFSPRDRKYPNGSRPNRAAGSGYWKATGADKPIGKPKALGIKKALVFYAGKAPKGVKTNWIMHEYRLANVDRSASKKKNNNLRLDDWVLCRIYNKKGKIEKYNTGAAKMNVEMVHSFEHENETKPEIHKLGNEQLYMETSDSVPRLNTDSSSSEHVVSPDVTCEREVQSDPKWNDDLDLKLENAFDFQFNYLDDNNLSVDDYLFGTVQYQMGQLSPLQDMFMYLQKM

SEQ ID NO: 6498 - protein, 166 aa, Glycine max
  peptide (1)..(166): Ceres Seq. ID no. 14312049
  misc_feature (1)..(165): NCBI GI NO: 21105748 NR Description: nam-like protein 10 [Petunia x hybrida]
  misc_feature (1)..(165): NCBI GI NO: 40647397 NR Description: NAC domain protein [Lycopersicon esculentum]
  misc_feature (1)..(165): NCBI GI NO: 14485513 NR Description: putative NAC domain protein [Solanum tuberosum]
  misc_feature (1)..(162): NCBI GI NO: 31322576 NR Description: NAC-domain protein 5-11 [Brassica napus]
  misc_feature (1)..(165): NCBI GI NO: 15223456 NR Description: No apical meristem (NAM) protein family
  misc_feature (1)..(162): NCBI GI NO: 31322578 NR Description: NAC-domain protein 18 [Brassica napus]
  misc_feature (1)..(53): NCBI GI NO: 31322570 NR Description: NAC-domain protein 5-1 [Brassica napus]
  misc_feature (72)..(141): NCBI GI NO: 31322570 NR Description: NAC-domain protein 5-1 [Brassica napus]
  misc_feature (1)..(158): NCBI GI NO: 22326685 NR Description: No apical meristem (NAM) protein family
  misc_feature (1)..(165): NCBI GI NO: 21105734 NR Description: nam-like protein 3 [Petunia x hybrida]
MHEYRLANVDRSASKKKNNNLRLDDWVLCRIYNKKGKIEKYNTGAAKMNVEMVHSFEHENETKPEIHKLGNEQLYMETSDSVPRLNTDSSSSEHVVSPDVTCEREVQSDPKWNDDLDLKLENAFDFQFNYLDDNNLSVDDYLFGTVQYQMGQLSPLQDMFMYLQKM
